(19) United States
(12) Patent Application Publication
(10) Pub. No.: US 2022/0098672 A1
(43) Pub. Date: Mar. 31, 2022

(54) DETECTING CANCER, CANCER TISSUE OF ORIGIN, AND/OR A CANCER CELL TYPE

(71) Applicant: GRAIL, LLC, Menlo Park, CA (US)

(72) Inventors: Oliver Claude Venn, Menlo Park, CA (US); Alexander P. Fields, Menlo Park, CA (US); Samuel S. Gross, Menlo Park, CA (US); Qinwen Liu, Menlo Park, CA (US); Jan Schellenberger, Menlo Park, CA (US); Joerg Bredno, Menlo Park, CA (US); John F. Beausang, Menlo Park, CA (US); Seyedmehdi Shojaee, Menlo Park, CA (US); Onur Sakarya, Menlo Park, CA (US); M. Cyrus Maher, Menlo Park, CA (US); Arash Jamshidi, Menlo Park, CA (US)

(21) Appl. No.: 17/393,625

(22) Filed: Aug. 4, 2021

Related U.S. Application Data
(63) Continuation of application No. PCT/US20/16684, filed on Feb. 5, 2020.
Application No. PCT/US20/16684 is a continuation-in-part of application No. PCT/US20/15082, filed on Jan. 24, 2020.
Application No. PCT/US20/15082 is a continuation-in-part of application No. PCT/US20/16673, filed on Feb. 4, 2020.
(60) Provisional application No. 62/801,556, filed on Feb. 5, 2019.
(60) Provisional application No. 62/801,561, filed on Feb. 5, 2019.
(60) Provisional application No. 62/965,327, filed on Jan. 24, 2020.
(60) Provisional application No. 62/965,342, filed on Jan. 24, 2020.

(51) Int. Cl. C12Q 1/6886; C12Q 1/6827; G16B 40/20; G16B 20/20

(52) U.S. Cl. CPC C12Q 1/6886; C12Q 1/6827; C12Q 2600/112; G16B 20/20; C12Q 2600/154; G16B 40/20

(57) ABSTRACT

The present description provides a cancer assay panel for targeted detection of cancer-specific methylation patterns. Further provided herein includes methods of designing, making, and using the cancer assay panel for detection of cancer tissue of origin (e.g., types of cancer).

### CROSS-REFERENCE

[0001] This application is a continuation of International Application No. PCT/US20/016684, filed Feb. 4, 2020; which claims the benefit of U.S. Provisional Application No. 62/801,556, filed Feb. 5, 2019; U.S. Provisional Application No. 62/801,561, filed Feb. 5, 2019; U.S. Provisional Application No. 62/965,327, filed Jan. 24, 2020; U.S. Provisional Application No. 62/965,342, filed Jan. 24, 2020; PCT International Application No. PCT/US2020/015082, filed Jan. 24, 2020; and PCT International Application No. PCT/US2020/016673, filed Feb. 4, 2020; which applications are incorporated herein by reference in their entireties.

### SEQUENCE LISTING

[0002] The instant application contains a Sequence Listing which has been electronically submitted in ASCII format and is hereby incorporated by reference in its entirety. Said ASCII copy, created on Feb. 3, 2020, is named 50251-852_601_SL.txt and is 27,132,797 bytes in size.

### BACKGROUND

[0003] DNA methylation plays an important role in regulating gene expression. Aberrant DNA methylation has been implicated in many disease processes, including cancer. DNA methylation profiling using methylation sequencing (e.g., whole genome bisulfate sequencing (WGBS)) is increasingly recognized as a valuable diagnostic tool for detection, diagnosis, and/or monitoring of cancer. For example, specific patterns of differentially methylated regions may be useful as molecular markers for various diseases.

[0004] However, WGBS is not ideally suitable for a product assay. The reason is that the vast majority of the genome is either not differentially methylated in cancer, or the local CpG density is too low to provide a robust signal. Only a few percent of the genome is likely to be useful in classification.

[0005] Furthermore, there have been various challenges in identifying differentially methylated regions in various diseases. First off, determining differentially methylated regions in a disease group only holds weight in comparison with a group of control subjects, such that if the control group is small in number, the determination loses confidence with the small control group. Additionally, among a group of control subjects, methylation status can vary which can be difficult to account for when determining whether the regions are differentially methylated in a disease group. On another note, methylation of a cytosine at a CpG site is strongly correlated with methylation at a subsequent CpG site. To encapsulate this dependency is a challenge in itself.

[0006] Accordingly, a cost-effective method of accurately diagnosing a disease by detecting differentially methylated regions has not yet been available.

### SUMMARY

[0007] Described herein, in certain embodiments, are compositions comprising a plurality of different bait oligonucleotides, wherein the plurality of different bait oligonucleotides are configured to collectively hybridize to DNA molecules derived from at least 100 target genomic regions and wherein each genomic region of the at least 100 target genomic regions is differentially methylated in at least one cancer type relative to another cancer type or relative to a non-cancer type. In some embodiments, the at least 100 target genomic regions comprise at least one, at least 5, at least 10, at least 20, at least 50, or at least 100 target genomic regions that are differentially methylated in at least a first cancer type relative to a second cancer type and relative to a non-cancer type. In some embodiments, the at least 100 target genomic regions comprise at least one target genomic region that is differentially methylated in the first cancer type relative to two or more, three or more, four or more, five or more, or ten or more, twelve or more, or fifteen or more other cancer types. In some embodiments, the at least 100 target genomic regions comprise, for all possible pairs between the one cancer type and at least 10, at least 12, at least 15 or at least 18 other cancer types or the non-cancer type, at least one target genomic region that is differentially methylated between the pair of cancer types.

[0008] In some embodiments, the plurality of bait oligonucleotides are configured to hybridize to DNA molecules derived from at least 20% of the target genomic regions of any one of Lists 1-49. In some embodiments, the plurality of bait oligonucleotides are configured to hybridize to DNA molecules derived from at least 20% of the target genomic regions of Lists 1-49. In some embodiments, the plurality of bait oligonucleotides are configured to hybridize to DNA molecules derived from at least 20% or at least 40% of the target genomic regions of any one of Lists 1-15. In some embodiments, the plurality of bait oligonucleotides are configured to hybridize to DNA molecules derived from at least 20% or at least 40% of the target genomic regions of Lists 1-15. In some embodiments, the plurality of bait oligonucleotides are configured to hybridize to DNA molecules derived from at least 20% the target genomic regions of any one of Lists 16-32. In some embodiments, the plurality of bait oligonucleotides are configured to hybridize to DNA molecules derived from at least 20% of the target genomic regions of Lists 16-32. In some embodiments, the plurality of bait oligonucleotides are configured to hybridize to DNA molecules derived from at least 20% of the target genomic regions of any one of Lists 33-49. In some embodiments, the plurality of bait oligonucleotides are configured to hybridize to DNA molecules derived from at least 20% of the target genomic regions of Lists 33-49.

[0009] Described herein, in certain embodiments, are compositions comprising a plurality of different bait oligonucleotides configured to hybridize to DNA molecules derived from at least 20% of the target genomic regions of any one of Lists 1-49. In some embodiments, the plurality of bait oligonucleotides are configured to hybridize to DNA molecules derived from at least 20% of the target genomic regions of Lists 1-49. In some embodiments, the plurality of bait oligonucleotides are configured to hybridize to DNA molecules derived from at least 20% or at least 40% of the target genomic regions of any one of Lists 1-15. In some embodiments, the plurality of bait oligonucleotides are configured to hybridize to DNA molecules derived from at least 20% or at least 40% of the target genomic regions of Lists 1-15. In some embodiments, the plurality of bait oligonucleotides are configured to hybridize to DNA molecules derived from at least 20% the target genomic regions of any one of Lists 16-32. In some embodiments, the plurality of bait oligonucleotides are configured to hybridize to DNA molecules derived from at least 20% of the target genomic regions of Lists 16-32. In some embodiments, the plurality of bait oligonucleotides are configured to hybridize to DNA molecules derived from at least 20% of the target genomic regions of any one of Lists 33-49. In some embodiments, the plurality of bait oligonucleotides are configured to hybridize to DNA molecules derived from at least 20% of the target genomic regions of Lists 33-49.

[0010] In some embodiments, the plurality of different bait oligonucleotides are configured to hybridize to DNA molecules derived from at least 20% of the target genomic regions of List 1. In some embodiments, the DNA molecules are derived from at least 30%, 40%, 50%, 60%, 70%, or 80% of the target genomic regions of List 1.

[0011] In some embodiments, the plurality of different bait oligonucleotides are configured to hybridize to DNA molecules derived from at least 20% of the target genomic regions of List 2. In some embodiments, the DNA molecules are derived from at least 30%, 40%, 50%, 60%, 70%, or 80% of the target genomic regions of List 2.

[0012] In some embodiments, the plurality of different bait oligonucleotides are configured to hybridize to DNA molecules derived from at least 20% of the target genomic regions of List 3. In some embodiments, the DNA molecules are derived from at least 30%, 40%, 50%, 60%, 70%, or 80% of the target genomic regions of List 3.

[0013] In some embodiments, the plurality of different bait oligonucleotides are configured to hybridize to DNA molecules derived from at least 20% of the target genomic regions of List 4. In some embodiments, the DNA molecules are derived from at least 30%, 40%, 50%, 60%, 70%, or 80% of the target genomic regions of List 4.

[0014] In some embodiments, the plurality of different bait oligonucleotides are configured to hybridize to DNA molecules derived from at least 20% of the target genomic regions of List 5. In some embodiments, the DNA molecules are derived from at least 30%, 40%, 50%, 60%, 70%, or 80% of the target genomic regions of List 5.

[0015] In some embodiments, the plurality of different bait oligonucleotides are configured to hybridize to DNA molecules derived from at least 20% of the target genomic regions of List 6. In some embodiments, the DNA molecules are derived from at least 30%, 40%, 50%, 60%, 70%, or 80% of the target genomic regions of List 6.

[0016] In some embodiments, the plurality of different bait oligonucleotides are configured to hybridize to DNA molecules derived from at least 20% of the target genomic regions of List 7. In some embodiments, the DNA molecules are derived from at least 30%, 40%, 50%, 60%, 70%, or 80% of the target genomic regions of List 7.

[0017] In some embodiments, the plurality of different bait oligonucleotides are configured to hybridize to DNA molecules derived from at least 20% of the target genomic regions of List 8. In some embodiments, the DNA molecules are derived from at least 30%, 40%, 50%, 60%, 70%, or 80% of the target genomic regions of List 8.

[0018] In some embodiments, the plurality of different bait oligonucleotides are configured to hybridize to DNA molecules derived from at least 20% of the target genomic regions of List 9. In some embodiments, the DNA molecules are derived from at least 30%, 40%, 50%, 60%, 70%, or 80% of the target genomic regions of List 9.

[0019] In some embodiments, the plurality of different bait oligonucleotides are configured to hybridize to DNA molecules derived from at least 20% of the target genomic regions of List 10. In some embodiments, the DNA molecules are derived from at least 30%, 40%, 50%, 60%, 70%, or 80% of the target genomic regions of List 10.

[0020] In some embodiments, the plurality of different bait oligonucleotides are configured to hybridize to DNA molecules derived from at least 20% of the target genomic regions of List 11. In some embodiments, the DNA molecules are derived from at least 30%, 40%, 50%, 60%, 70%, or 80% of the target genomic regions of List 11.

[0021] In some embodiments, the plurality of different bait oligonucleotides are configured to hybridize to DNA molecules derived from at least 20% of the target genomic regions of List 12. In some embodiments, the DNA molecules are derived from at least 30%, 40%, 50%, 60%, 70%, or 80% of the target genomic regions of List 12.

[0022] In some embodiments, the plurality of different bait oligonucleotides are configured to hybridize to DNA molecules derived from at least 20% of the target genomic regions of List 13. In some embodiments, the DNA molecules are derived from at least 30%, 40%, 50%, 60%, 70%, or 80% of the target genomic regions of List 13.

[0023] In some embodiments, the plurality of different bait oligonucleotides are configured to hybridize to DNA molecules derived from at least 20% of the target genomic regions of List 14. In some embodiments, the DNA molecules are derived from at least 30%, 40%, 50%, 60%, 70%, or 80% of the target genomic regions of List 14.

[0024] In some embodiments, the plurality of different bait oligonucleotides are configured to hybridize to DNA molecules derived from at least 20% of the target genomic regions of List 15. In some embodiments, the DNA molecules are derived from at least 30%, 40%, 50%, 60%, 70%, or 80% of the target genomic regions of List 15.

[0025] In some embodiments, the plurality of different bait oligonucleotides are configured to hybridize to DNA molecules derived from at least 20% of the target genomic regions of List 16. In some embodiments, the DNA molecules are derived from at least 30%, 40%, 50%, 60%, 70%, or 80% of the target genomic regions of List 16.

[0026] In some embodiments, the plurality of different bait oligonucleotides are configured to hybridize to DNA molecules derived from at least 20% of the target genomic regions of List 17. In some embodiments, the DNA molecules are derived from at least 30%, 40%, 50%, 60%, 70%, or 80% of the target genomic regions of List 17.

[0027] In some embodiments, the plurality of different bait oligonucleotides are configured to hybridize to DNA molecules derived from at least 20% of the target genomic regions of List 18. In some embodiments, the DNA molecules are derived from at least 30%, 40%, 50%, 60%, 70%, or 80% of the target genomic regions of List 18.

[0028] In some embodiments, the plurality of different bait oligonucleotides are configured to hybridize to DNA molecules derived from at least 20% of the target genomic regions of List 19. In some embodiments, the DNA molecules are derived from at least 30%, 40%, 50%, 60%, 70%, or 80% of the target genomic regions of List 19.

[0029] In some embodiments, the plurality of different bait oligonucleotides are configured to hybridize to DNA molecules derived from at least 20% of the target genomic regions of List 20. In some embodiments, the DNA molecules are derived from at least 30%, 40%, 50%, 60%, 70%, or 80% of the target genomic regions of List 20.

[0030] In some embodiments, the plurality of different bait oligonucleotides are configured to hybridize to DNA molecules derived from at least 20% of the target genomic regions of List 21. In some embodiments, the DNA molecules are derived from at least 30%, 40%, 50%, 60%, 70%, or 80% of the target genomic regions of List 21.

[0031] In some embodiments, the plurality of different bait oligonucleotides are configured to hybridize to DNA molecules derived from at least 20% of the target genomic regions of List 22. In some embodiments, the DNA molecules are derived from at least 30%, 40%, 50%, 60%, 70%, or 80% of the target genomic regions of List 22.

[0032] In some embodiments, the plurality of different bait oligonucleotides are configured to hybridize to DNA molecules derived from at least 20% of the target genomic regions of List 23. In some embodiments, the DNA molecules are derived from at least 30%, 40%, 50%, 60%, 70%, or 80% of the target genomic regions of List 23.

[0033] In some embodiments, the plurality of different bait oligonucleotides are configured to hybridize to DNA molecules derived from at least 20% of the target genomic regions of List 24. In some embodiments, the DNA molecules are derived from at least 30%, 40%, 50%, 60%, 70%, or 80% of the target genomic regions of List 24.

[0034] In some embodiments, the plurality of different bait oligonucleotides are configured to hybridize to DNA molecules derived from at least 20% of the target genomic regions of List 25. In some embodiments, the DNA molecules are derived from at least 30%, 40%, 50%, 60%, 70%, or 80% of the target genomic regions of List 25.

[0035] In some embodiments, the plurality of different bait oligonucleotides are configured to hybridize to DNA molecules derived from at least 20% of the target genomic regions of List 26. In some embodiments, the DNA molecules are derived from at least 30%, 40%, 50%, 60%, 70%, or 80% of the target genomic regions of List 26.

[0036] In some embodiments, the plurality of different bait oligonucleotides are configured to hybridize to DNA molecules derived from at least 20% of the target genomic regions of List 27. In some embodiments, the DNA molecules are derived from at least 30%, 40%, 50%, 60%, 70%, or 80% of the target genomic regions of List 27.

[0037] In some embodiments, the plurality of different bait oligonucleotides are configured to hybridize to DNA molecules derived from at least 20% of the target genomic regions of List 28. In some embodiments, the DNA molecules are derived from at least 30%, 40%, 50%, 60%, 70%, or 80% of the target genomic regions of List 28.

[0038] In some embodiments, the plurality of different bait oligonucleotides are configured to hybridize to DNA molecules derived from at least 20% of the target genomic regions of List 29. In some embodiments, the DNA molecules are derived from at least 30%, 40%, 50%, 60%, 70%, or 80% of the target genomic regions of List 29.

[0039] In some embodiments, the plurality of different bait oligonucleotides are configured to hybridize to DNA molecules derived from at least 20% of the target genomic regions of List 30. In some embodiments, the DNA molecules are derived from at least 30%, 40%, 50%, 60%, 70%, or 80% of the target genomic regions of List 30.

[0040] In some embodiments, the plurality of different bait oligonucleotides are configured to hybridize to DNA molecules derived from at least 20% of the target genomic regions of List 31. In some embodiments, the DNA molecules are derived from at least 30%, 40%, 50%, 60%, 70%, or 80% of the target genomic regions of List 31.

[0041] In some embodiments, the plurality of different bait oligonucleotides are configured to hybridize to DNA molecules derived from at least 20% of the target genomic regions of List 32. In some embodiments, the DNA molecules are derived from at least 30%, 40%, 50%, 60%, 70%, or 80% of the target genomic regions of List 32.

[0042] In some embodiments, the plurality of different bait oligonucleotides are configured to hybridize to DNA molecules derived from at least 20% of the target genomic regions of List 33. In some embodiments, the DNA molecules are derived from at least 30%, 40%, 50%, 60%, 70%, or 80% of the target genomic regions of List 33.

[0043] In some embodiments, the plurality of different bait oligonucleotides are configured to hybridize to DNA molecules derived from at least 20% of the target genomic regions of List 34. In some embodiments, the DNA molecules are derived from at least 30%, 40%, 50%, 60%, 70%, or 80% of the target genomic regions of List 34.

[0044] In some embodiments, the plurality of different bait oligonucleotides are configured to hybridize to DNA molecules derived from at least 20% of the target genomic regions of List 35. In some embodiments, the DNA molecules are derived from at least 30%, 40%, 50%, 60%, 70%, or 80% of the target genomic regions of List 35.

[0045] In some embodiments, the plurality of different bait oligonucleotides are configured to hybridize to DNA molecules derived from at least 20% of the target genomic regions of List 36. In some embodiments, the DNA molecules are derived from at least 30%, 40%, 50%, 60%, 70%, or 80% of the target genomic regions of List 36.

[0046] In some embodiments, the plurality of different bait oligonucleotides are configured to hybridize to DNA molecules derived from at least 20% of the target genomic regions of List 37. In some embodiments, the DNA molecules are derived from at least 30%, 40%, 50%, 60%, 70%, or 80% of the target genomic regions of List 37.

[0047] In some embodiments, the plurality of different bait oligonucleotides are configured to hybridize to DNA molecules derived from at least 20% of the target genomic regions of List 38. In some embodiments, the DNA molecules are derived from at least 30%, 40%, 50%, 60%, 70%, or 80% of the target genomic regions of List 38.

[0048] In some embodiments, the plurality of different bait oligonucleotides are configured to hybridize to DNA molecules derived from at least 20% of the target genomic regions of List 39. In some embodiments, the DNA molecules are derived from at least 30%, 40%, 50%, 60%, 70%, or 80% of the target genomic regions of List 39.

[0049] In some embodiments, the plurality of different bait oligonucleotides are configured to hybridize to DNA molecules derived from at least 20% of the target genomic regions of List 40. In some embodiments, the DNA molecules are derived from at least 30%, 40%, 50%, 60%, 70%, or 80% of the target genomic regions of List 40.

[0050] In some embodiments, the plurality of different bait oligonucleotides are configured to hybridize to DNA molecules derived from at least 20% of the target genomic regions of List 41. In some embodiments, the DNA molecules are derived from at least 30%, 40%, 50%, 60%, 70%, or 80% of the target genomic regions of List 41.

[0051] In some embodiments, the plurality of different bait oligonucleotides are configured to hybridize to DNA molecules derived from at least 20% of the target genomic regions of List 42. In some embodiments, the DNA molecules are derived from at least 30%, 40%, 50%, 60%, 70%, or 80% of the target genomic regions of List 42.

[0052] In some embodiments, the plurality of different bait oligonucleotides are configured to hybridize to DNA molecules derived from at least 20% of the target genomic regions of List 43. In some embodiments, the DNA molecules are derived from at least 30%, 40%, 50%, 60%, 70%, or 80% of the target genomic regions of List 43.

[0053] In some embodiments, the plurality of different bait oligonucleotides are configured to hybridize to DNA molecules derived from at least 20% of the target genomic regions of List 44. In some embodiments, the DNA molecules are derived from at least 30%, 40%, 50%, 60%, 70%, or 80% of the target genomic regions of List 44.

[0054] In some embodiments, the plurality of different bait oligonucleotides are configured to hybridize to DNA molecules derived from at least 20% of the target genomic regions of List 45. In some embodiments, the DNA molecules are derived from at least 30%, 40%, 50%, 60%, 70%, or 80% of the target genomic regions of List 45.

[0055] In some embodiments, the plurality of different bait oligonucleotides are configured to hybridize to DNA molecules derived from at least 20% of the target genomic regions of List 46. In some embodiments, the DNA molecules are derived from at least 30%, 40%, 50%, 60%, 70%, or 80% of the target genomic regions of List 46.

[0056] In some embodiments, the plurality of different bait oligonucleotides are configured to hybridize to DNA molecules derived from at least 20% of the target genomic regions of List 47. In some embodiments, the DNA molecules are derived from at least 30%, 40%, 50%, 60%, 70%, or 80% of the target genomic regions of List 47.

[0057] In some embodiments, the plurality of different bait oligonucleotides are configured to hybridize to DNA molecules derived from at least 20% of the target genomic regions of List 48. In some embodiments, the DNA molecules are derived from at least 30%, 40%, 50%, 60%, 70%, or 80% of the target genomic regions of List 48.

[0058] In some embodiments, the plurality of different bait oligonucleotides are configured to hybridize to DNA molecules derived from at least 20% of the target genomic regions of List 49. In some embodiments, the DNA molecules are derived from at least 30%, 40%, 50%, 60%, 70%, or 80% of the target genomic regions of List 49.

[0059] In some embodiments, the plurality of different bait oligonucleotides are configured to hybridize to DNA molecules derived from at least 20% of the target genomic regions from any two or more, three or more, four or more, or five or more of Lists 16-32.

[0060] In some embodiments, the DNA molecules are derived from at least 30%, 40%, 50%, 60%, 70%, or 80% of the target genomic regions from any two or more, three or more, four or more, or five or more, six or more, seven or more, eight or more, nine or more, or ten or more of Lists 16-32.

[0061] In some embodiments, the plurality of different bait oligonucleotides are configured to hybridize to DNA molecules derived from at least 20% of the target genomic regions from any two or more, three or more, four or more, or five or more of Lists 33-49.

[0062] In some embodiments, the DNA molecules are derived from at least 30%, 40%, 50%, 60%, 70%, or 80% of the target genomic regions from any two or more, three or more, four or more, five or more, six or more, seven or more, eight or more, nine or more, or ten or more of Lists 33-49.

[0063] In some embodiments, the total size of the of the target genomic regions is less than 1100 kb, less than 750 kb, less than 270 kb, less than 200 kb, less than 150 kb, less than 100 kb, or less than 50 kb. In some embodiments, the total number of target genomic regions is less than 1700, less than 1300, less than 900, less than 700 or less than 400.

[0064] In some embodiments, the total size of the targeted genomic regions is less than 5,000 kb, 2,500 kb, less than 2,000 kb, less than 1,500 kb, less than 1,000 kb, less than 750 kb, or less than 500 kb. In some embodiments, the total number of targeted genomic regions is less than 20,000, less than 18,000, less than 16,000, less than 14,000, less than 12,000, less than 10,000, less than 8,000, less than 6,000, less than 4,000, or less than 2,000.

[0065] In some embodiments, the DNA molecules are converted cfDNA fragments. In some embodiments, the target genomic regions are hypermethylated regions, hypomethylated regions, or binary regions that can be either hypermethylated or hypomethylated, as indicated in the sequence listing. In some embodiments, the bait oligonucleotides are configured to hybridize to hypermethylated converted DNA molecules, hypomethylated converted DNA molecules, or both hypermethylated and hypomethylated converted DNA molecules derived from each targeted genomic region, as indicated in the sequence listing.

[0066] In some embodiments, the bait oligonucleotides are each conjugated to an affinity moiety. In some embodiments, the affinity moiety is biotin. In some embodiments, the bait oligonucleotides are each conjugated to a solid surface. In some embodiments, the solid surface is a microarray or chip.

[0067] In some embodiments, the bait oligonucleotides each have a length of 45 to 300 nucleotide bases, 75-200 nucleotide bases, 100-150 nucleotide bases, or about 120 nucleotide bases. In some embodiments, the bait oligonucleotides comprise a plurality of sets of two or more bait oligonucleotides, wherein each bait oligonucleotide within a set of bait oligonucleotides is configured to bind to the same converted target genomic region or configured to bind to a nucleic acid molecule derived from the target genomic region. In some embodiments, each set of bait oligonucleotides comprises 1 or more pairs of a first bait oligonucleotide and a second bait oligonucleotide, wherein each bait oligonucleotide comprises a 5′ end and a 3′ end, wherein a sequence of at least X nucleotide bases at the 3′ end of the first bait oligonucleotide is identical to a sequence of X nucleotide bases at the 5′ end the second bait oligonucleotide, and wherein X is at least 25, 30, 35, 40, 45, 50, 60, 70, 75 or 100. In some embodiments, the first bait oligonucleotide comprises a sequence of at least 31, 40, 50 or 60 nucleotide bases that does not overlap a sequence of the second bait oligonucleotide.

[0068] In some embodiments, the composition further comprises converted cfDNA from a test subject. In some embodiments, the cfDNA from the test subject is converted by a process comprising treatment with bisulfate or a cytosine deaminase.

[0069] Described herein, in certain embodiments, are methods of enriching cfDNA fragments informative of a type of cancer, the method comprising: contacting any one of the bait oligonucleotide compositions described herein with DNA derived from a test subject, and enriching the sample for cfDNA corresponding to genomic regions associated with the type of cancer by hybridization capture.

[0070] Described herein, in certain embodiments, are methods for obtaining sequence information informative of a presence or absence of a type of cancer, the method comprising (a) enriching converted DNA from a test subject by contacting the DNA with any one of the bait oligonucleotide compositions described herein, and (b) sequencing the enriched converted DNA.

[0071] Described herein, in certain embodiments, are methods for determining that a test subject has a type of cancer, the method comprising (a) capturing cfDNA fragments from the test subject with any one of the bait oligonucleotide compositions described herein, (b) sequencing the captured cfDNA fragments, and (c) applying a trained classifier to the cfDNA sequences to determine that the test subject has the type of cancer.

[0072] Described herein, in certain embodiments, are methods for determining that a test subject has a type of cancer, the method comprising (a) capturing cfDNA fragments from the test subject with any one of the bait oligonucleotide compositions described herein, (b) detecting the captured cfDNA fragments by DNA microarray, and (c) applying a trained classifier to the DNA fragments hybridized to the DNA microarray to determine that the test subject has the type of cancer.

[0073] In some embodiments, the trained classifier is a mixture model classifier. In some embodiments, the classifier was trained on converted DNA sequences derived from at least 1000, at least 2000, or at least 4000 target genomic regions selected from any one of Lists 1-49.

[0074] In some embodiments, the trained classifier determines the presence or absence of cancer or a cancer type by: (i) generating a set of features for the sample, wherein each feature in the set of features comprises a numerical value; (ii) inputting the set of features into the classifier, wherein the classifier comprises a multinomial classifier; (iii) based on the set of features, determining, at the classifier, a set of probability scores, wherein the set of probability scores comprises one probability score per cancer type class and per non-cancer type class; and (iv) thresholding the set of probability scores based on one or more values determined during training of the classifier to determine a final cancer classification of the sample. In some embodiments, the set of features comprises a set of binarized features. In some embodiments, the numerical value comprises a single binary value. In some embodiments, the multinomial classifier comprises a multinomial logistic regression ensemble trained to predict a source tissue for the cancer.

[0075] In some embodiments, the method further comprises determining the final cancer classification based on a top-two probability score differential relative to a minimum value, wherein the minimum value corresponds to a predefined percentage of training cancer samples that had been assigned the correct cancer type as their highest score during training of the classifier. In some embodiments, (i) in accordance with a determination that the top-two probability score differential exceeds the minimum value, assign a cancer label corresponding to the highest probability score determined by the classifier as the final cancer classification; and (ii) in accordance with a determination that the top-two probability score differential does not exceed the minimum value, assigning an indeterminate cancer label as the final cancer classification. In some embodiments, the type of cancer is selected from the group consisting of anorectal cancer, bladder cancer, bladder and urothelial cancer, breast cancer, cervical cancer, colorectal cancer, head and neck cancer, hepatobiliary cancer, liver and bile duct cancer, lung cancer, melanoma, ovarian cancer, pancreatic cancer, pancreatic and gall bladder cancer, prostate cancer, renal cancer, sarcoma, thyroid cancer, upper GI cancer, and uterine cancer. In some embodiments, the capture cfDNA fragments are converted cfDNA fragments.

[0076] Described herein, in certain embodiments, are cancer assay panels comprising: at least 5 pairs of probes, wherein each pair of the at least 5 pairs comprise two probes configured to overlap each other by an overlapping sequence, wherein the overlapping sequence comprises a sequence of at least 30 nucleotides, wherein the at least 30-nucleotide sequence is configured to hybridize to a converted cfDNA molecule corresponding to, or derived from one or more of genomic regions, wherein each of the genomic regions comprises at least five methylation sites, wherein the at least five methylation sites have an abnormal methylation pattern in first cancerous samples, and wherein each probe of the of the at least 5 pairs of probes comprises a non-overlapping sequence of at least 31 nucleotides. In some embodiments, the cancer assay panels comprise at least 10, at least 20, at least 30, at least 50, at least 100, at least 200, or at least 500 pairs of probes.

[0077] In some embodiments, the genomic regions are selected from a List, and the list is List 1 and the first cancerous samples are samples from subject having bladder cancer, the list is List 2 and the first cancerous samples are samples from subject having breast cancer, the list is List 3 and the first cancerous samples are samples from subject having cervical cancer, the list is List 4 and the first cancerous samples are samples from subject having colorectal cancer, the list is List 5 and the first cancerous samples are samples from subject having head and neck cancer, the list is List 6 and the first cancerous samples are samples from subject having hepatobiliary cancer, the list is List 7 and the first cancerous samples are samples from subject having lung cancer, the list is List 8 and the first cancerous samples are samples from subject having melanoma, the list is List 9 and the first cancerous samples are samples from subject having ovarian cancer, the list is List 10 and the first cancerous samples are samples from subject having pancreatic cancer, the list is List 11 and the first cancerous samples are samples from subject having prostate cancer, the list is List 12 and the first cancerous samples are samples from subject having renal cancer, the list is List 13 and the first cancerous samples are samples from subject having thyroid cancer, the list is List 14 and the first cancerous samples are samples from subject having upper gastrointestinal cancer, or the list is List 15 and the first cancerous samples are samples from subject having uterine cancer.

[0078] In some embodiments, the genomic regions are selected from a List, and the list is List 16 or List 33 and the first cancerous samples are samples from subject having anorectal cancer, the list is List 17 or List 34 and the first cancerous samples are samples from subject having bladder or urothelial cancer, the list is List 18 or List 35 and the first cancerous samples are samples from subject having breast cancer, the list is List 19 or List 36 and the first cancerous samples are samples from subject having cervical cancer, the list is List 20 or List 37 and the first cancerous samples are samples from subject having colorectal cancer, the list is List 21 or List 38 and the first cancerous samples are samples from subject having head or neck cancer, the list is List 22 or List 39 and the first cancerous samples are samples from subject having liver or bile duct cancer, the list is List 23 or List 40 and the first cancerous samples are samples from subject having lung cancer, the list is List 24 or List 41 and the first cancerous samples are samples from subject having melanoma, the list is List 25 or List 42 and the first cancerous samples are samples from subject having ovarian cancer, the list is List 26 or List 43 and the first cancerous samples are samples from subject having pancreatic or gallbladder cancer, the list is List 27 or List 44 and the first cancerous samples are samples from subject having prostate cancer, the list is List 28 or List 45 and the first cancerous samples are samples from subject having renal cancer, or the list is List 29 or List 46 and the first cancerous samples are samples from subject having sarcoma, the list is List 30 or List 47 and the first cancerous samples are samples from subjects having thyroid cancer, the list is List 31 or List 48 and the first cancerous samples are samples from subjects having upper gastrointestinal tract cancer, or the list is List 32 or List 49 and the first cancerous samples are samples from subjects having uterine cancer.

[0079] In some embodiments, the genomic regions comprise at least 20%, 30%, 40%, 50%, 60%, 70%, 80%, 90%, 95%, or 100% of the genomic regions in the List. In some embodiments, the genomic regions comprise at least 30, 53, 103, 159, 160, 200, 250, 300, 400, 500, 600, 800, or 1,000 genomic regions in the List. In some embodiments, the converted cfDNA molecules comprise cfDNA molecules treated to covert unmethylated C (cytosine) to U (uracil). In some embodiments, each of the at least 5 pairs of probes is conjugated to a non-nucleotide affinity moiety. In some embodiments, the non-nucleotide affinity moiety is a biotin moiety. In some embodiments, the abnormal methylation pattern has at least a threshold p-value rarity in the first cancerous samples. In some embodiments, each of the probes is designed to have sequence homology or sequence complementarity with less than 20 off-target genomic regions. In some embodiments, the less than 20 off-target genomic regions are identified using a k-mer seeding strategy. In some embodiments, the less than 20 off-target genomic regions are identified using k-mer seeding strategy combined to local alignment at seed locations. In some embodiments, each of the probes comprises at least 61, 75, 100, 120, or 121 nucleotides. In some embodiments, each of the probes comprises less than 300, 250, 200, 160 or 159 nucleotides. In some embodiments, each of the probes comprises 100-159 or 100-160 nucleotides. In some embodiments, each of the probes comprises less than 20, 15, 10, 8, or 6 methylation sites. In some embodiments, at least 80, 85, 90, 92, 95, or 98% of the at least five methylation sites are either methylated or unmethylated in the cancerous samples. In some embodiments, at least 3%, 5%, 10%, 15%, or 20% of the probes comprise no G (Guanine). In some embodiments, each of the probes comprise multiple binding sites to the methylation sites of the converted cfDNA molecule, wherein at least 80, 85, 90, 92, 95, or 98% of the multiple binding sites comprise exclusively either CpG or CpA. In some embodiments, each of the probes is configured to have sequence homology or sequence complementarity with less than 15, 10 or 8 off-target genomic regions.

[0080] In some embodiments, at least 30% of the genomic regions are in exons or introns. In some embodiments, at least 15% of the genomic regions are in exons. In some embodiments, at least 20% of the genomic regions are in exons. In some embodiments, less than 10% of the genomic regions are in intergenic regions. In some embodiments, the cancer assay panel comprises at least 100, 200, 300, 400, 500, 600, 700, 800, 900, 1000, 1,200, 1,400, 1,600, 1,800, 2,000, 2,200, 2,400, 2,600, 2,800, 3,000, 3,200, 4,000, 4,500, 5,000, 5,500, 6,000, 6,500, 7,000, 7,500, 8,000, 8,500, 9,000, 10,000, 15,000, or 20,000 probes. In some embodiments, the at least 5 pairs of probes together comprise at least 10,000, 20,000, 30,000, 40,000, 50,000, 60,000, 70,000, 80,000, 90,000, 100,000, 120,000, 140,000, 160,000, 180,000, 200,000, 240,000, 260,000, 280,000, 300,000, 320,000, 400,000, 450,000, 500,000, 550,000, 600,000, 650,000, 700,000, 750,000, 800,000, 850,000, 900,000, 1 million, 1.5 million, 2 million, 2.5 million, or 3 million, nucleotides.

[0081] Described herein, in certain embodiments, are method of detecting cancer and/or a cancer tissue of origin (TOO), comprising: (a) receiving a sample comprising a plurality of cfDNA molecules; (b) treating the plurality of cfDNA molecules to convert unmethylated C (cytosine) to U (uracil), thereby obtaining a plurality of converted cfDNA molecules; (c) applying any one of the cancer assay panels described herein to the plurality of converted cfDNA molecules, thereby enriching a subset of the converted cfDNA molecules; and (d) sequencing the enriched subset of the converted cfDNA molecule, thereby providing a set of sequence reads.

[0082] Described herein, in certain embodiments, are method of detecting cancer and/or a cancer tissue of origin (TOO), comprising: (a) receiving a sample comprising a plurality of cfDNA molecules; (b) treating the plurality of cfDNA molecules to convert unmethylated C (cytosine) to U (uracil), thereby obtaining a plurality of converted cfDNA molecules; (c) applying any one of the cancer assay panels described herein to the plurality of converted cfDNA molecules, thereby enriching a subset of the converted cfDNA molecules; and (d) detecting the enriched subset of the converted cfDNA molecule by hybridization to a DNA microarray.

[0083] In some embodiments, the method further comprises the step of: determining a health condition by evaluating the set of sequence reads, wherein the health condition is (a) a presence or absence of cancer; (b) a stage of cancer; (c) a presence or absence of a cancer tissue of origin (TOO); (d) a presence or absence of a cancer cell type; or (e) a presence or absence of at least 2, 3, 4, 5, 6, 7, 8, 9, 10, 11, 12, 13, 14, or 15 different types of cancer. In some embodiments, the sample comprising a plurality of cfDNA molecules was obtained from a human subject.

[0084] Described herein, in certain embodiments, are methods for detecting cancer, comprising the steps of: (a) obtaining a set of sequence reads by sequencing a set of nucleic acid fragments from a subject, wherein each of the nucleic acid fragments correspond to, or are derived from a plurality of genomic regions selected from one or more of Lists 1 to 15; one or more of Lists 16 to 32; or one or more of Lists 33 to 49 (b) for each of the sequence reads, determining methylation status at a plurality of CpG sites; and (c) determining that cancer has been detected in the subject by evaluating the methylation status for the sequence reads, wherein the detection of cancer comprises one or more of: (i) a presence or absence of cancer; (ii) a stage of cancer; (iii) a presence or absence of a cancer tissue of origin (TOO); (iv) a presence or absence of a cancer cell type; and (v) a presence or absence of at least 2, 3, 4, 5, 6, 7, 8, 9, 10, 11, 12, 13, 14, or 15 different types of cancer.

[0085] In some embodiments, (a) the plurality of genomic regions are selected from List 1 and the detection of cancer comprises a detection of bladder cancer; (b) the plurality of genomic regions are selected from List 2 and the detection of cancer comprises a detection of breast cancer; (c) the plurality of genomic regions are selected from List 3 and the detection of cancer comprises a detection of cervical cancer; (d) the plurality of genomic regions are selected from List 4 and the detection of cancer comprises a detection of colorectal cancer; (e) the plurality of genomic regions are selected from List 5 and the detection of cancer comprises a detection of head and neck cancer; (f) the plurality of genomic regions are selected from List 6 and the detection of cancer comprises a detection of hepatobiliary cancer; (g) the plurality of genomic regions are selected from List 7 and the detection of cancer comprises a detection of lung cancer; (h) the plurality of genomic regions are selected from List 8 and the detection of cancer comprises a detection of melanoma; (i) the plurality of genomic regions are selected from List 9 and the detection of cancer comprises a detection of ovarian cancer; (j) the plurality of genomic regions are selected from List 10 and the detection of cancer comprises a detection of pancreatic cancer; (k) the plurality of genomic regions are selected from List 11 and the detection of cancer comprises a presence or detection prostate cancer; (l) the plurality of genomic regions are selected from List 12 and the detection of cancer comprises a detection of renal cancer; (m) the plurality of genomic regions are selected from List 13 and the detection of cancer comprises a detection of thyroid cancer; (n) the plurality of genomic regions are selected from List 14 and the detection of cancer comprises a detection of upper gastrointestinal cancer; or (o) the plurality of genomic regions are selected from List 15 and the detection of cancer comprises a detection of uterine cancer.

[0086] In some embodiments, (a) the plurality of genomic regions are selected from List 16 or List 33 and the detection of cancer comprises a detection of anorectal cancer; the plurality of genomic regions are selected from List 17 or List 34 and the detection of cancer comprises a detection of bladder or urothelial cancer; the plurality of genomic regions are selected from List 18 or List 35 and the detection of cancer comprises a detection of breast cancer; the plurality of genomic regions are selected from List 19 or List 36 and the detection of cancer comprises a detection of cervical cancer; the plurality of genomic regions are selected from List 20 or List 37 and the detection of cancer comprises a detection of colorectal cancer; the plurality of genomic regions are selected from List 21 or List 38 and the detection of cancer comprises a detection of head and neck cancer; the plurality of genomic regions are selected from List 22 or List 39 and the detection of cancer comprises a detection of liver or bile duct cancer; the plurality of genomic regions are selected from List 23 or List 40 and the detection of cancer comprises a detection of lung cancer; the plurality of genomic regions are selected from List 24 or List 41 and the detection of cancer comprises a detection of melanoma; the plurality of genomic regions are selected from List 25 or List 42 and the detection of cancer comprises a detection of ovarian cancer; the plurality of genomic regions are selected from List 26 or List 43 and the detection of cancer comprises a presence or detection pancreatic or gallbladder cancer; the plurality of genomic regions are selected from List 27 or List 44 and the detection of cancer comprises a detection of prostate cancer; the plurality of genomic regions are selected from List 28 or List 45 and the detection of cancer comprises a detection of renal cancer; the plurality of genomic regions are selected from List 29 or List 46 and the detection of cancer comprises a detection of sarcoma; the plurality of genomic regions are selected from List 30 or List 47 and the detection of cancer comprises a detection of thyroid cancer; the plurality of genomic regions are selected from List 31 or List 48 and the detection of cancer comprises a detection of upper gastrointestinal tract cancer; or the plurality of genomic regions are selected from List 32 or List 49 and the detection of cancer comprises a detection of uterine cancer.

[0087] In some embodiments, the plurality of genomic regions comprises at least 20%, 30%, 40%, 50%, 60%, 70%, 80%, 90%, 95%, or 100% of the genomic regions of the List. In some embodiments, the plurality of genomic regions comprises at least 30, 50, 100, 150, 200, 250, or 300 of the genomic regions of the List. In some embodiments, the plurality of genomic regions comprises less than 90%, 80%, 70%, 60%, 50%, 40%, 30% or 20% of the genomic regions of the List. In some embodiments, the plurality of genomic regions comprises less than 25000, 20000, 15000, 10000, 7500, 5000, or 2500 of the genomic regions of the List. In some embodiments, the plurality of genomic regions comprises less than 1000, 500, 400, 300, 200, or 100 of the genomic regions of the List.

[0088] Described herein, in certain embodiments, are cancer assay panels comprising a plurality of probes, wherein each of the plurality of probes is configured to hybridize to a converted cfDNA molecule corresponding to one or more of a plurality of genomic regions selected from one or more of Lists 1 to 15. In some embodiments, the converted cfDNA molecules comprise cfDNA molecules treated to convert unmethylated cytosines to uracils. In some embodiments, wherein the plurality of probes are configured to hybridize to nucleic acid molecules corresponding to, or derived from at least 20%, 30%, 40%, 50%, 60%, 70%, 80%, 90%, 95%, or 100% of the genomic regions of a List and the List is one or more of Lists 1 to 15. In some embodiments, the plurality of probes are configured to hybridize to nucleic acid molecules corresponding to, or derived from at least 30, 50, 100, 159, 171, 200, 250, 300, 400, 500, 600, 800, or 1,000 of the genomic regions of a List and the List is one or more of Lists 1 to 15. In some embodiments, at least 3%, 5%, 10%, 15%, or 20% of the probes comprise no G (Guanine). In some embodiments, each of the probes comprise multiple binding sites to methylation sites of the converted cfDNA molecule, wherein at least 80, 85, 90, 92, 95, or 98% of the multiple binding sites comprise exclusively either CpG or CpA. In some embodiments, each of the probes is conjugated to a non-nucleotide affinity moiety. In some embodiments, the non-nucleotide affinity moiety is a biotin moiety.

[0089] Described herein, in certain embodiments, are methods of determining a presence or absence of cancer in a subject, the method comprising: (i) capturing cfDNA fragments from the subject with a composition comprising a plurality of different oligonucleotide baits; (ii) sequencing the captured cfDNA fragments, and (iii) applying a trained classifier to the cfDNA sequences to determine the presence or absence of cancer. In some embodiments, the likelihood of a false positive determination of a presence or absence of cancer is less than 1% and the likelihood of an accurate determination of a presence or absence of cancer is at least 40%. In some embodiments, the cancer is a stage I cancer, the likelihood of a false positive determination of a presence or absence of cancer is less than 1%, and the likelihood of an accurate determination of a presence or absence of cancer is at least 9%. In some embodiments, the cfDNA fragments are converted cfDNA fragments.

[0090] Described herein, in certain embodiments, are methods of detecting a cancer type comprising: (i) capturing cfDNA fragments from a subject with a composition comprising a plurality of different oligonucleotide baits, (ii) sequencing the captured cfDNA fragments, and (iii) applying a trained classifier to the cfDNA sequences to determine a cancer type; wherein the oligonucleotide baits are configured to hybridize to cfDNA fragments derived from a plurality of target genomic regions, wherein the plurality of target genomic regions is differentially methylated in one or more cancer types relative to a different cancer type or a non-cancer type, wherein the likelihood of a false-positive determination of cancer is less than 1%, and wherein the likelihood of an accurate assignment of a cancer type is at least 75%, at least 80%, at least 85% or at least 89%, or at least 90%. In some embodiments, the method further comprises applying the trained classifier to the cfDNA sequences to determine a presence of cancer before determining the cancer type. In some embodiments, the cfDNA fragments are converted cfDNA fragments.

[0091] In some embodiments, the cancer type is selected from uterine cancer, upper GI squamous cancer, all other upper GI cancers, thyroid cancer, sarcoma, urothelial renal cancer, all other renal cancers, prostate cancer, pancreatic cancer, ovarian cancer, neuroendocrine cancer, multiple myeloma, melanoma, lymphoma, small cell lung cancer, lung adenocarcinoma, all other lung cancers, leukemia, hepatobiliary carcinoma, hepatobiliary biliary, head and neck cancer, colorectal cancer, cervical cancer, breast cancer, bladder cancer, and anorectal cancer. In some embodiments, the cancer type is selected from anal cancer, bladder cancer, colorectal cancer, esophageal cancer, head and neck cancer, liver/bile-duct cancer, lung cancer, lymphoma, ovarian cancer, pancreatic cancer, plasma cell neoplasm, and stomach cancer. In some embodiments, the cancer type is selected from thyroid cancer, melanoma, sarcoma, myeloid neoplasm, renal cancer, prostate cancer, breast cancer, uterine cancer, ovarian cancer, bladder cancer, urothelial cancer, cervical cancer, anorectal cancer, head & neck cancer, colorectal cancer, liver cancer, bile duct cancer, pancreatic cancer, gallbladder cancer, upper GI cancer, multiple myeloma, lymphoid neoplasm, and lung cancer.

[0092] In some embodiments, the cancer type is a stage I cancer type, and the likelihood of an accurate assignment is at least 70% or at least 75%. In some embodiments, the cancer type is a stage II cancer type, and the likelihood of an accurate assignment is at least 85%.

[0093] In some embodiments, the cancer type is anorectal cancer, the target genomic regions are selected from Lists 16 or 33, and the accuracy of detecting anorectal cancer among samples with detected cancer is at least 80% or 88%. In some embodiments, the cancer type is stage I or stage II anorectal cancer, the target genomic regions are selected from Lists 16 or 33, and the accuracy of detecting stage I or stage II anorectal cancer among samples with detected cancer is at least 75% or 85%.

[0094] In some embodiments, the cancer type is bladder & urothelial cancer, the target genomic regions are selected from Lists 1, 17 or 34, and the accuracy of detecting bladder & urothelial cancer among samples with detected cancer is at least 80% or 90%. In some embodiments, the cancer type is stage I or stage II bladder & urothelial cancer, the target genomic regions are selected from Lists 1, 17 or 34, and the accuracy of stage I or stage II detecting bladder & urothelial cancer among samples with detected cancer is at least 75% or 85%.

[0095] In some embodiments, the cancer type is breast cancer, the target genomic regions are selected from Lists 2, 18 or 35, and the accuracy of detecting breast cancer among samples with detected cancer is at least 80% or 88%. In some embodiments, the cancer type is stage I or stage II breast cancer, the target genomic regions are selected from Lists 2, 18 or 35, and the accuracy of detecting stage I or stage II breast cancer among samples with detected cancer is at least 75% or 84%.

[0096] In some embodiments, the cancer type is cervical cancer, the target genomic regions are selected from Lists 3, 19 or 36, and the accuracy of detecting cervical cancer among samples with detected cancer is at least 80% or 88%. In some embodiments, the cancer type is stage I or stage II cervical cancer, the target genomic regions are selected from Lists 3, 19 or 36, and the accuracy of detecting stage I or stage II cervical cancer among samples with detected cancer is at least 75% or 85%.

[0097] In some embodiments, the cancer type is colorectal cancer, the target genomic regions are selected from Lists 4, 20 or 37, and the accuracy of detecting colorectal cancer among samples with detected cancer is at least 80% or 88%. In some embodiments, the cancer type is stage I or stage II colorectal cancer, the target genomic regions are selected from Lists 4, 20 or 37, and the accuracy of detecting stage I or stage II colorectal cancer among samples with detected cancer is at least 75% or 85%.

[0098] In some embodiments, the cancer type is head & neck cancer, the target genomic regions are selected from Lists 5, 21 or 38, and the accuracy of detecting head & neck cancer among samples with detected cancer is at least 80% or 88%. In some embodiments, the cancer type is stage I or stage II head & neck cancer, the target genomic regions are selected from Lists 5, 21 or 38, and the accuracy of detecting stage I or stage II head & neck cancer among samples with detected cancer is at least 75% or 85%.

[0099] In some embodiments, the cancer type is liver & bile duct cancer, the target genomic regions are selected from Lists 6, 22, or 39, and the accuracy of detecting liver & bile duct cancer among samples with detected cancer is at least 80% or 88%. In some embodiments, the cancer type is stage I or stage II liver & bile duct cancer, the target genomic regions are selected from Lists 6, 22, or 39, and the accuracy of detecting stage I or stage II liver & bile duct cancer among samples with detected cancer is at least 75% or 85%.

[0100] In some embodiments, the cancer type is lung cancer, the target genomic regions are selected from Lists 7, 23 or 40, and the accuracy of detecting lung cancer among samples with detected cancer is at least 80% or 88%. In some embodiments, the cancer type is stage I or stage II lung cancer, the target genomic regions are selected from Lists 7, 23 or 40, and the accuracy of detecting stage I or stage II lung cancer among samples with detected cancer is at least 75% or 85%.

[0101] In some embodiments, the cancer type is melanoma, the target genomic regions are selected from Lists 8, 24 or 41, and the accuracy of detecting melanoma among samples with detected cancer is at least 80% or 88%. In some embodiments, the cancer type is stage I or stage II melanoma, the target genomic regions are selected from Lists 8, 24 or 41, and the accuracy of detecting stage I or stage II melanoma among samples with detected cancer is at least 75% or 84%.

[0102] In some embodiments, the cancer type is ovarian cancer, the target genomic regions are selected from Lists 9, 25 or 42, and the accuracy of detecting ovarian cancer among samples with detected cancer is at least 80% or 88%. In some embodiments, the cancer type is stage I or stage II ovarian cancer, the target genomic regions are selected from Lists 9, 25 or 42, and the accuracy of detecting stage I or stage II ovarian cancer among samples with detected cancer is at least 75% or 85%.

[0103] In some embodiments, the cancer type is pancreas & gallbladder cancer, the target genomic regions are selected from Lists 10, 26 or 43, and the accuracy of detecting pancreas & gallbladder cancer among samples with detected cancer is at least 80% or 88%. In some embodiments, the cancer type is stage I or stage II pancreas & gallbladder cancer, the target genomic regions are selected from Lists 10, 26 or 43, and the accuracy of detecting stage I or stage II pancreas & gallbladder cancer among samples with detected cancer is at least 75%, 81% or 83%.

[0104] In some embodiments, the cancer type is prostate cancer, the target genomic regions are selected from Lists 11, 27 or 44, and the accuracy of detecting prostate cancer among samples with detected cancer is at least 80% or 88%. In some embodiments, the cancer type is stage I or stage II prostate cancer, the target genomic regions are selected from Lists 11, 27 or 44, and the accuracy of detecting stage I or stage II prostate cancer among samples with detected cancer is at least 75% or 83%.

[0105] In some embodiments, the cancer type is renal cancer, the target genomic regions are selected from Lists 12, 28 or 45, and the accuracy of detecting renal cancer among samples with detected cancer is at least 80% or 88%. In some embodiments, the cancer type is stage I or stage II renal cancer, the target genomic regions are selected from Lists 12, 28 or 45, and the accuracy of detecting stage I or stage II renal cancer among samples with detected cancer is at least 75% or 85%.

[0106] In some embodiments, the cancer type is sarcoma, the target genomic regions are selected from Lists 29 or 46, and the accuracy of detecting sarcoma among samples with detected cancer is at least 80% or 88%. In some embodiments, the cancer type is stage I or stage II sarcoma, the target genomic regions are selected from Lists 29 or 46, and the accuracy of detecting stage I or stage II sarcoma among samples with detected cancer is at least 75% or 83%.

[0107] In some embodiments, the cancer type is thyroid cancer, the target genomic regions are selected from Lists 13, 30 or 47, and the accuracy of detecting thyroid cancer among samples with detected cancer is at least 80% or 88%. In some embodiments, the cancer type is stage I or stage II thyroid cancer, the target genomic regions are selected from Lists 13, 30 or 47, and the accuracy of detecting stage I or stage II thyroid cancer among samples with detected cancer is at least 75% or 87%.

[0108] In some embodiments, the cancer type is upper gastrointestinal tract cancer, the target genomic regions are selected from Lists 14, 31 or 48, and the accuracy of detecting upper gastrointestinal tract cancer among samples with detected cancer is at least 80% or 88%. In some embodiments, the cancer type is stage I or stage II upper gastrointestinal tract cancer, the target genomic regions are selected from Lists 14, 31 or 48, and the accuracy of detecting stage I or stage II upper gastrointestinal tract cancer among samples with detected cancer is at least 75% or 83%.

[0109] In some embodiments, the cancer type is uterine cancer, the target genomic regions are selected from Lists 15, 32 or 49, and the accuracy of detecting uterine cancer among samples with detected cancer is at least 80% or 88%. In some embodiments, the cancer type is stage I or stage II uterine cancer, the target genomic regions are selected from Lists 16 or 33, and the accuracy of detecting stage I or stage II uterine cancer among samples with detected cancer is at least 75% or 85%.

[0110] In some embodiments, the cancer type is anorectal cancer, the target genomic regions are selected from Lists 16 or 33, and the sensitivity for anorectal cancer is at least 65% or 75%. In some embodiments, the cancer type is stage I or stage II anorectal cancer, the target genomic regions are selected from Lists 16 or 33, and the sensitivity for stage I or stage II anorectal cancer is at least 65% or 55%.

[0111] In some embodiments, the cancer type is bladder & urothelial cancer, the target genomic regions are selected from Lists 1, 17 or 34, and the sensitivity for bladder & urothelial cancer is at least 50% or 40%. In some embodiments, the cancer type is stage I or stage II bladder & urothelial cancer, the target genomic regions are selected from Lists 1, 17 or 34, and the accuracy of stage I or stage II detecting bladder & urothelial cancer is at least 40% or 50%.

[0112] In some embodiments, the cancer type is breast cancer, the target genomic regions are selected from Lists 2, 18 or 35, and the sensitivity for breast cancer is at least 20% or 25%. In some embodiments, the cancer type is stage I or stage II breast cancer, the target genomic regions are selected from Lists 2, 18 or 35, and the sensitivity for stage I or stage II breast cancer is at least 15% or 18%.

[0113] In some embodiments, the cancer type is cervical cancer, the target genomic regions are selected from Lists 3, 19 or 36, and the sensitivity for cervical cancer is at least 25% or 35%. In some embodiments, the cancer type is stage I or stage II cervical cancer, the target genomic regions are selected from Lists 3, 19 or 36, and the sensitivity for stage I or stage II cervical cancer is at least 17% or 22%.

[0114] In some embodiments, the cancer type is colorectal cancer, the target genomic regions are selected from Lists 4, 20 or 37, and the sensitivity for colorectal cancer is at least 55% or 65%. In some embodiments, the cancer type is stage I or stage II colorectal cancer, the target genomic regions are selected from Lists 4, 20 or 37, and the sensitivity for stage I or stage II colorectal cancer is at least 25%, 29% or 34%.

[0115] In some embodiments, the cancer type is head & neck cancer, the target genomic regions are selected from Lists 5, 21 or 38, and the sensitivity for head & neck cancer is at least 70% or 80%. In some embodiments, the cancer type is stage I or stage II head & neck cancer, the target genomic regions are selected from Lists 5, 21 or 38, and the sensitivity for stage I or stage II head & neck cancer is at least 70% or 79%.

[0116] In some embodiments, the cancer type is liver & bile duct cancer, the target genomic regions are selected from Lists 6, 22, or 39, and the sensitivity for liver & bile duct cancer is at least 75% or 85%. In some embodiments, the cancer type is stage I or stage II liver & bile duct cancer, the target genomic regions are selected from Lists 6, 22, or 39, and the sensitivity for stage I or stage II liver & bile duct cancer is at least 65% or 75%.

[0117] In some embodiments, the cancer type is lung cancer, the target genomic regions are selected from Lists 7, 23 or 40, and the sensitivity for lung cancer is at least 55% or 62%. In some embodiments, the cancer type is stage I or stage II lung cancer, the target genomic regions are selected from Lists 7, 23 or 40, and the sensitivity for stage I or stage II lung cancer is at least 20% or 25%.

[0118] In some embodiments, the cancer type is melanoma, the target genomic regions are selected from Lists 8, 24 or 41, and the sensitivity for melanoma is at least 40% or 30%.

[0119] In some embodiments, the cancer type is ovarian cancer, the target genomic regions are selected from Lists 9, 25 or 42, and the sensitivity for ovarian cancer is at least 70% or 80%.

[0120] In some embodiments, the cancer type is pancreas & gallbladder cancer, the target genomic regions are selected from Lists 10, 26 or 43, and the sensitivity for pancreas & gallbladder cancer is at least 60%, 70% or 74%. In some embodiments, the cancer type is stage I or stage II pancreas & gallbladder cancer, the target genomic regions are selected from Lists 10, 26 or 43, and the sensitivity for stage I or stage II pancreas & gallbladder cancer is at least 40% or 50%.

[0121] In some embodiments, the cancer type is sarcoma, the target genomic regions are selected from Lists 29 or 46, and the sensitivity for sarcoma is at least 40% or 50%.

[0122] In some embodiments, the cancer type is upper gastrointestinal tract cancer, the target genomic regions are selected from Lists 14, 31 or 48, and the sensitivity for upper gastrointestinal tract cancer is at least 70% or 60%. In some embodiments, the cancer type is stage I or stage II upper gastrointestinal tract cancer, the target genomic regions are selected from Lists 14, 31 or 48, and the sensitivity for stage I or stage II upper gastrointestinal tract cancer is at least 35% or 45%.

[0123] In some embodiments, the composition comprising oligonucleotide baits is the composition of any one of the compositions described herein or any one of the cancer assay panels described herein. In some embodiments, the plurality of genomic regions comprises no more than 1700, 1300, 900, 700 or 400 genomic regions. In some embodiments, the total size of the plurality of genomic regions is less than 4 MB, less than 2 MB, less than 1100 kb, less than 750 kb, less than 270 kb, less than 200 kb, less than 150 kb, less than 100 kb, or less than 50 kb. In some embodiments, the subject has an elevated risk of one or more cancer types. In some embodiments, the subject manifests symptoms associated with one or more cancer types. In some embodiments, the subject has not been diagnosed with a cancer.

[0124] In some embodiments, the classifier was trained on converted DNA sequences derived from a least 100 subjects with a first cancer type, at least 100 subjects with a second cancer type, and at least 100 subjects with no cancer. In some embodiments, the first cancer type is ovarian cancer. In some embodiments, the first cancer type is colorectal cancer. In some embodiments, the first cancer type is selected from thyroid cancer, melanoma, sarcoma, myeloid neoplasm, renal cancer, prostate cancer, breast cancer, uterine cancer, ovarian cancer, bladder cancer, urothecal cancer, cervical cancer, anorectal cancer head & neck cancer, colorectal cancer, liver cancer, pancreatic cancer, gallbladder cancer, esophageal cancer, stomach cancer, multiple myeloma, lymphoid neoplasm, lung cancer, or leukemia. In some embodiments, the classifier was trained on converted DNA sequences derived from at least 1000, at least 2000, or at least 4000 target genomic regions selected from any one of Lists 1-49.

[0125] In some embodiments, the trained classifier determines the presence or absence of cancer or a cancer type by: (i) generating a set of features for the sample, wherein each feature in the set of features comprises a numerical value; (ii) inputting the set of features into the classifier, wherein the classifier comprises a multinomial classifier; (iii) based on the set of features, determining, at the classifier, a set of probability scores, wherein the set of probability scores comprises one probability score per cancer type class and per non-cancer type class; and (iv) thresholding the set of probability scores based on one or more values determined during training of the classifier to determine a final cancer classification of the sample. In some embodiments, the set of features comprises a set of binarized features. In some embodiments, the numerical value comprises a single binary value. In some embodiments, the multinomial classifier comprises a multinomial logistic regression ensemble trained to predict a source tissue for the cancer. In some embodiments, the method further comprises determining the final cancer classification based on a top-two probability score differential relative to a minimum value, wherein the minimum value corresponds to a predefined percentage of training cancer samples that had been assigned the correct cancer type as their highest score during training of the classifier.

[0126] In some embodiments, (i) in accordance with a determination that the top-two probability score differential exceeds the minimum value, assign a cancer label corresponding to the highest probability score determined by the classifier as the final cancer classification; and (ii) in accordance with a determination that the top-two probability score differential does not exceed the minimum value, assigning an indeterminate cancer label as the final cancer classification.

[0127] Described herein, in certain embodiments, are methods of treating a type of cancer in a subject in need thereof, the method comprising: (i) detecting the type of cancer by any of the method described herein, and (ii) administering an anti-cancer therapeutic agent to the subject. In some embodiments, the anti-cancer agent is a chemotherapeutic agent selected from the group consisting of alkylating agents, antimetabolites, anthracyclines, anti-tumor antibiotics, cytoskeletal disruptors (taxans), topoisomerase inhibitors, mitotic inhibitors, corticosteroids, kinase inhibitors, nucleotide analogs, and platinum-based agents.

### INCORPORATION BY REFERENCE

[0128] All publications, patents, and patent applications mentioned in this specification are herein incorporated by reference to the same extent as if each individual publication, patent, or patent application was specifically and individually indicated to be incorporated by reference.

### BRIEF DESCRIPTION OF THE DRAWINGS

[0129] The novel features of the disclosure are set forth with particularity in the appended claims. A better understanding of the features and advantages of the present disclosure will be obtained by reference to the following detailed description that sets forth illustrative embodiments, in which the principles of the disclosure are utilized, and the accompanying drawings of which:

[0130] FIG. 1A illustrates a 2× tiled probe design, with three probes targeting a small target region, where each base in a target region (boxed in the dotted rectangle) is covered by at least two probes, according to an embodiment.

[0131] FIG. 1B illustrates a 2× tiled probe design, with more than three probes targeting a larger target region, where each base in a target region (boxed in the dotted rectangle) is covered by at least two probes, according to an embodiment.

[0132] FIG. 1C illustrates probe design targeting hypomethylated and/or hypermethylated fragments in genomic regions, according to an embodiment.

[0133] FIG. 2 illustrates a process of generating a cancer assay panel, according to an embodiment.

[0134] FIG. 3A is a flowchart describing a process of creating a data structure for a control group, according to an embodiment.

[0135] FIG. 3B is a flowchart describing an additional step of validating the data structure for the control group of FIG. 3A, according to an embodiment.

[0136] FIG. 4 is a flowchart describing a process for selecting genomic regions for designing probes for a cancer assay panel, according to an embodiment.

[0137] FIG. 5 is an illustration of an example p-value score calculation, according to an embodiment.

[0138] FIG. 6A is a flowchart describing a process of training a classifier based on hypomethylated and hypermethylated fragments indicative of cancer, according to an embodiment.

[0139] FIG. 6B is a flowchart describing a process of identifying fragments indicative of cancer determined by probabilistic models, according to an embodiment.

[0140] FIG. 7A is a flowchart describing a process of sequencing a fragment of cell-free (cf) DNA, according to an embodiment.

[0141] FIG. 7B is an illustration of the process of FIG. 7A of sequencing a fragment of cell-free (cf) DNA to obtain a methylation state vector, according to an embodiment.

[0142] FIG. 8A illustrates extent of bisulfite conversion (upper panel) and mean coverage/sequencing depth (lower panel) across varying stages of cancer.

[0143] FIG. 8B illustrates concentration of cfDNA per sample across varying stages of cancer.

[0144] FIG. 9 is a graph of the amounts of DNA fragments binding to probes depending on the sizes of overlaps between the DNA fragments and the probes.

[0145] FIG. 10A illustrates a flowchart of devices for sequencing nucleic acid samples according to one embodiment. FIG. 10B illustrates an analytic system that analyzes methylation status of cfDNA according to one embodiment.

[0146] FIG. 11 is a color-coded graph presenting numbers of genomic regions selected for differentiating each target TOO (x-axis) from a contrast TOO (y-axis).

[0147] FIG. 12 provides data for verifying selected genomic regions using cfDNA and WBG gDNA. Fractions (y-axis) classifying each TOO (x-axis) correctly are provided.

[0148] FIG. 13 is a receiver operator curve comparing the true positive rate and false positive rate of cancer detection by a trained classifier utilizing methylation status information from the target genomic regions of list 23 (optimized for lung cancer).

### DETAILED DESCRIPTION

### Definitions

[0149] Unless defined otherwise, all technical and scientific terms used herein have the meaning commonly understood by a person skilled in the art to which this description belongs. As used herein, the following terms have the meanings ascribed to them below.

[0150] As used herein any reference to “one embodiment” or “an embodiment” means that a particular element, feature, structure, or characteristic described in connection with the embodiment is included in at least one embodiment. The appearances of the phrase “in one embodiment” in various places in the specification are not necessarily all referring to the same embodiment, thereby providing a framework for various possibilities of described embodiments to function together.

[0151] As used herein, the terms “comprises,” “comprising,” “includes,” “including,” “has,” “having” or any other variation thereof, are intended to cover a non-exclusive inclusion. For example, a process, method, article, or apparatus that comprises a list of elements is not necessarily limited to only those elements but may include other elements not expressly listed or inherent to such process, method, article, or apparatus. Further, unless expressly stated to the contrary, “or” refers to an inclusive or and not to an exclusive or. For example, a condition A or B is satisfied by any one of the following: A is true (or present) and B is false (or not present), A is false (or not present) and B is true (or present), and both A and B are true (or present).

[0152] In addition, use of the “a” or “an” are employed to describe elements and components of the embodiments herein. This is done merely for convenience and to give a general sense of the description. This description should be read to include one or at least one and the singular also includes the plural unless it is obvious that it is meant otherwise.

[0153] As used herein, ranges and amounts can be expressed as “about” a particular value or range. About also includes the exact amount. Hence “about 5 μg” means “about 5 μg” and also “5 μg.” Generally, the term “about” includes an amount that would be expected to be within experimental error. In some embodiments, “about” refers to the number or value recited, “+” or “−” 20%, 10%, or 5% of the number or value. Additionally, ranges recited herein are understood to be shorthand for all of the values within the range, inclusive of the recited endpoints. For example, a range of 1 to 50 is understood to include any number, combination of numbers, or sub-range from the group consisting of 1, 2, 3, 4, 5, 6, 7, 8, 9, 10, 11, 12, 13, 14, 15, 16, 17, 18, 19, 20, 21, 22, 23, 24, 25, 26, 27, 28, 29, 30, 31, 32, 33, 34, 35, 36, 37, 38, 39, 40, 41, 42, 43, 44, 45, 46, 47, 48, 49, and 50.

[0154] The term “methylation” as used herein refers to a process by which a methyl group is added to a DNA molecule. For example, a hydrogen atom on the pyrimidine ring of a cytosine base can be converted to a methyl group, forming 5-methylcytosine. The term also refers to a process by which a hydroxymethyl group is added to a DNA molecule, for example by oxidation of a methyl group on the pyrimidine ring of a cytosine base. Methylation and hydroxymethylation tend to occur at dinucleotides of cytosine and guanine referred to herein as “CpG sites.”

[0155] The term “methylation” can also refer to the methylation status of a CpG site. A CpG site with a 5-methylcytosine moiety is methylated. A CpG site with a hydrogen atom on the pyrimidine ring of the cytosine base is unmethylated.

[0156] In such embodiments, the wet laboratory assay used to detect methylation may vary from those described herein as is well known in the art.

[0157] The term “methylation site” as used herein refers to a region of a DNA molecule where a methyl group can be added. “CpG” sites are the most common methylation site, but methylation sites are not limited to CpG sites. For example, DNA methylation may occur in cytosines in CHG and CHH, where H is adenine, cytosine or thymine. Cytosine methylation in the form of 5-hydroxymethylcytosine may also assessed (see, e.g., WO 2010/037001 and WO 2011/127136, which are incorporated herein by reference), and features thereof, using the methods and procedures disclosed herein.

[0158] The term “CpG site” as used herein refers to a region of a DNA molecule where a cytosine nucleotide is followed by a guanine nucleotide in the linear sequence of bases along its 5′ to 3′ direction. “CpG” is a shorthand for 5′-C-phosphate-G-3′ that is cytosine and guanine separated by only one phosphate group. Cytosines in CpG dinucleotides can be methylated to form 5-methylcytosine.

[0159] The term “CpG detection site” as used herein refers to a region in a probe that is configured to hybridize to a CpG site of a target DNA molecule. The CpG site on the target DNA molecule can comprise cytosine and guanine separated by one phosphate group, where cytosine is methylated or unmethylated. The CpG site on the target DNA molecule can comprise uracil and guanine separated by one phosphate group, where the uracil is generated by the conversion of unmethylated cytosine.

[0160] The term “UpG” is a shorthand for 5′-U-phosphate-G-3′ that is uracil and guanine separated by only one phosphate group. UpG can be generated by a bisulfate treatment of a DNA that converts unmethylated cytosines to uracils. Cytosines can be converted to uracils by other methods known in the art, such as chemical modification, synthesis, or enzymatic conversion.

[0161] The term “hypomethylated” or “hypermethylated” as used herein refers to a methylation status of a DNA molecule containing multiple CpG sites (e.g., more than 3, 4, 5, 6, 7, 8, 9, 10, etc.) where a high percentage of the CpG sites (e.g., more than 80%, 85%, 90%, or 95%, or any other percentage within the range of 50%-100%) are unmethylated or methylated, respectively.

[0162] The terms “methylation state vector” or “methylation status vector” as used herein refers to a vector comprising multiple elements, where each element indicates the methylation status of a methylation site in a DNA molecule comprising multiple methylation sites, in the order they appear from 5′ to 3′ in the DNA molecule. For example, <Mₓ, Mₓ₊₁, Mₓ₊₂>, <Mₓ, Mₓ₊₁, Uₓ₊₂>, . . . , <Uₓ, Uₓ₊₁, Uₓ₊₂> can be methylation vectors for DNA molecules comprising three methylation sites, where M represents a methylated methylation site and U represents an unmethylated methylation site.

[0163] The term “abnormal methylation pattern” or “anomalous methylation pattern” as used herein refers to the methylation pattern of a DNA molecule or a methylation state vector that is expected to be found in a sample less frequently than a threshold value. In one embodiment provided herein, the expectedness of finding a specific methylation state vector in a healthy control group comprising healthy individuals is represented by a p-value. A low p-value score generally corresponds to a methylation state vector which is relatively unexpected in comparison to other methylation state vectors within samples from healthy individuals. A high p-value score generally corresponds to a methylation state vector which is relatively more expected in comparison to other methylation state vectors found in samples from healthy individuals in the healthy control group. A methylation state vector having a p-value lower than a threshold value (e.g., 0.1, 0.01, 0.001, 0.0001, etc.) can be defined as an abnormal/anomalous methylation pattern. Various methods known in the art can be used to calculate a p-value or expectedness of a methylation pattern or a methylation state vector. Exemplary methods provided herein involve use of a Markov chain probability that assumes methylation statuses of CpG sites to be dependent on methylation statuses of neighboring CpG sites. Alternate methods provided herein calculate the expectedness of observing a specific methylation state vector in healthy individuals by utilizing a mixture model including multiple mixture components, each being an independent-sites model where methylation at each CpG site is assumed to be independent of methylation statuses at other CpG sites.

[0164] The term “cancerous sample” as used herein refers to a sample comprising genomic DNAs from an individual diagnosed with cancer. The genomic DNAs can be, but are not limited to, cfDNA fragments or chromosomal DNAs from a subject with cancer. The genomic DNAs can be sequenced (or otherwise detected) and their methylation status can be assessed by methods known in the art, for example, bisulfite sequencing. When genomic sequences are obtained from public database (e.g., The Cancer Genome Atlas (TCGA)) or experimentally obtained by sequencing a genome of an individual diagnosed with cancer, cancerous sample can refer to genomic DNAs or cfDNA fragments having the genomic sequences. The term “cancerous samples” as a plural refers to samples comprising genomic DNAs from multiple individuals, each individual diagnosed with cancer. In various embodiments, cancerous samples from more than 100, 300, 500, 1,000, 2,000, 5,000, 10,000, 20,000, 40,000, 50,000, or more individuals diagnosed with cancer are used.

[0165] The term “non-cancerous sample” or “healthy sample” as used herein refers to a sample comprising genomic DNAs from an individual not diagnosed with cancer. The genomic DNAs can be, but are not limited to, cfDNA fragments or chromosomal DNAs from a subject without cancer. The genomic DNAs can be sequenced (or otherwise detected) and their methylation status can be assessed by methods known in the art, for example, bisulfite sequencing. When genomic sequences are obtained from public database (e.g., The Cancer Genome Atlas (TCGA)) or experimentally obtained by sequencing a genome of an individual without cancer, non-cancerous sample can refer to genomic DNAs or cfDNA fragments having the genomic sequences. The term “non-cancerous samples” as a plural refers to samples comprising genomic DNAs from multiple individuals, each individual is without cancer. In various embodiments, healthy samples from more than 100, 300, 500, 1,000, 2,000, 5,000, 10,000, 20,000, 40,000, 50,000, or more individuals without cancer are used.

[0166] The term “training sample” as used herein refers to a sample used to train a classifier described herein and/or to select one or more genomic regions for cancer detection or detecting a cancer tissue of origin or cancer cell-type. The training samples can comprise genomic DNAs or a modification there of, from one or more healthy subjects and from one or more subjects having a disease condition (e.g., cancer, a specific type of cancer, a specific stage of cancer, etc.). The genomic DNAs can be, but are not limited to, cfDNA fragments or chromosomal DNAs. The genomic DNAs can be sequenced (or otherwise detected) and their methylation status can be assessed by methods known in the art, for example, bisulfite sequencing. When genomic sequences are obtained from public database (e.g., The Cancer Genome Atlas (TCGA)) or experimentally obtained by sequencing a genome of an individual, a training sample can refer to genomic DNAs or cfDNA fragments having the genomic sequences.

[0167] The term “test sample” as used herein refers to a sample from a subject, whose health condition was, has been or will be tested using a classifier and/or an assay panel described herein. The test sample can comprise genomic DNAs or a modification there of. The genomic DNAs can be, but are not limited to, cfDNA fragments or chromosomal DNAs.

[0168] The term “target genomic region” as used herein refers to a region in a genome selected for analysis in test samples. An assay panel is generated with probes designed to hybridize to (and optionally pull down) nucleic acid fragments derived from the target genomic region or a fragment thereof. A nucleic acid fragment derived from the target genomic region refers to a nucleic acid fragment generated by degradation, cleavage, bisulfite conversion, or other processing of the DNA from the target genomic region.

[0169] Various target genomic regions are described according to their chromosomal location in the sequence listing filed herewith. The sequence listing includes the following information: (1) the chromosome on which the region is located, along with the start and stop position of the genomic region, (2) whether the region is hypo or hypermethylated in cancer (or “binary” if the both the hypomethylated and hypermethylated are informative). The chromosome numbers and the start and stop positions are provided relative to a known human reference genome, hg19. The sequence of the human reference genome, hg19, is available from Genome Reference Consortium with a reference number, GRCh37/hg19, and also available from Genome Browser provided by Santa Cruz Genomics Institute. Chromosomal DNA is double-stranded, so a target genomic region includes two DNA strands: one with the sequence provided in the listing and a second that is a reverse complement to the sequence in the listing. Probes can be designed to hybridize to one or both sequences. Optionally, probes hybridize to converted sequences resulting from, for example, treatment with sodium bisulfite.

[0170] The term “off-target genomic region” as used herein refers to a region in a genome which has not been selected for analysis in test samples, but has sufficient homology to a target genomic region to potentially be bound and pulled down by a probe designed to target the target genomic region. In one embodiment, an off-target genomic region is a genomic region that aligns to a probe along at least 45 bp with at least a 90% match rate.

[0171] The terms “converted DNA molecules,” “converted cfDNA molecules,” and “modified fragment obtained from processing of the cfDNA molecules” refer to DNA molecules obtained by processing DNA or cfDNA molecules in a sample for the purpose of differentiating a methylated nucleotide and an unmethylated nucleotide in the DNA or cfDNA molecules. For example, in one embodiment, the sample can be treated with bisulfite ion (e.g., using sodium bisulfite), as is well-known in the art, to convert unmethylated cytosines (“C”) to uracils (“U”). In another embodiment, the conversion of unmethylated cytosines to uracils is accomplished using an enzymatic conversion reaction, for example, using a cytidine deaminase (such as APOBEC). After treatment, converted DNA molecules or cfDNA molecules include additional uracils which are not present in the original cfDNA sample. Replication by DNA polymerase of a DNA strand comprising a uracil results in addition of an adenine to the nascent complementary strand instead of the guanine normally added as the complement to a cytosine or methylcytosine.

[0172] The terms “cell free nucleic acid,” “cell free DNA,” or “cfDNA” refers to nucleic acid fragments that circulate in an individual's body (e.g., bloodstream) and originate from one or more healthy cells and/or from one or more cancerous cells. Additionally, cfDNA may come from other sources such as viruses, fetuses, etc.

[0173] The term “circulating tumor DNA” or “ctDNA” refers to nucleic acid fragments that originate from tumor cells, which may be released into an individual's bloodstream as result of biological processes such as apoptosis or necrosis of dying cells or actively released by viable tumor cells.

[0174] The term “fragment” as used herein can refer to a fragment of a nucleic acid molecule. For example, in one embodiment, a fragment can refer to a cfDNA molecule in a blood or plasma sample, or a cfDNA molecule that has been extracted from a blood or plasma sample. An amplification product of a cfDNA molecule may also be referred to as a “fragment.” In another embodiment, the term “fragment” refers to a sequence read, or set of sequence reads, that have been processed for subsequent analysis (e.g., for in machine-learning based classification), as described herein. For example, as is well known in the art, raw sequence reads can be aligned to a reference genome and matching paired end sequence reads assembled into a longer fragment for subsequent analysis.

[0175] The term “individual” refers to a human individual. The term “healthy individual” refers to an individual presumed not to have a cancer or disease.

[0176] The term “subject” refers to an individual whose DNA is being analyzed. A subject may be a test subject whose DNA is be evaluated using a targeted panel as described herein to evaluate whether the person has cancer or another disease. A subject may also be part of a control group known not to have cancer or another disease. A subject may also be part of a cancer or other disease group known to have cancer or another disease. Control and cancer/disease groups may be used to assist in designing or validating the targeted panel.

[0177] The term “sequence reads” as used herein refers to nucleotide sequences reads from a sample. Sequence reads can be obtained through various methods provided herein or as known in the art.

[0178] The term “sequencing depth” as used herein refers to the count of the number of times a given target nucleic acid within a sample has been sequenced (e.g., the count of sequence reads at a given target region). Increasing sequencing depth can reduce required amounts of nucleic acids required to assess a disease state (e.g., cancer or cancer tissue of origin).

[0179] The term “tissue of origin” or “TOO” as used herein refers to the organ, organ group, body region or cell type that a cancer arises or originates from. The identification of a tissue of origin or cancer cell type typically allows for identification of the most appropriate next steps in the care continuum of cancer to further diagnose, stage and decide on treatment.

[0180] The term “transition” generally refers to changes in base composition from one purine to another purine, or from one pyrimidine to another pyrimidine. For instance, the following changes are transitions: C→U, U→C, G→A, A→G, C→T, and T→C.

[0181] “An entirety of probes” of a panel or bait set or “an entirety of polynucleotide-containing probes” of a panel or bait set generally refers to all of the probes delivered with a specified panel or bait set. For instance, in some embodiments, a panel or bait set may include both (1) probes having features specified herein (e.g., probes for binding to cell-free DNA fragments corresponding to or derived from genomic regions set forth herein in one or more Lists) and (2) additional probes that do not contain such feature(s). The entirety of probes of a panel generally refers to all probes delivered with the panel or bait set, including such probes that do not contain the specified feature(s).

### Cancer Assay Panel

[0182] In a first aspect, the present description provides a cancer assay panel comprising a plurality of probes or a plurality of probe pairs. The assay panels described herein can alternatively be referred to as bait sets or as compositions comprising bait oligonucleotides. The probes are specifically designed to target one or more nucleic acid molecules corresponding to, or derived from genomic regions differentially methylated between cancer and non-cancer samples, between different cancer tissue of origin (TOO) types, between different cancer cell type, or between samples of different stages of cancer, as identified by methods provided herein. In some embodiments, probes target genomic regions (or nucleic acid molecules derived therefrom) having methylation patterns specific to a cancer type, e.g., (1) bladder cancer, (2) breast cancer, (3) cervical cancer, (4) colorectal cancer, (5) head and neck cancer, (6) hepatobiliary cancer, (7) lung cancer, (8) melanoma, (9) ovarian cancer, (10) pancreatic cancer, (11) prostate cancer, (12) renal cancer, (13) thyroid cancer, (14) upper gastrointestinal cancer, or (15) uterine cancer. In some embodiments, the panel includes probes targeting genomic regions specific to a single cancer type. In some embodiments, the panel includes probes specific to 2, 3, 4, 5, 6, 7, 89, 10, 11, 12, 13, 14, 15 or more cancer types. In some embodiments, the target genomic regions are selected to maximize classification accuracy, subject to a size budget (which is determined by sequencing budget and desired depth of sequencing).

[0183] For designing the cancer assay panel, an analytics system may collect samples corresponding to various outcomes under consideration, e.g., samples known to have cancer, samples considered to be healthy, samples from a known tissue of origin, etc. The sources of the cfDNA and/or ctDNA used to select target genomic regions can vary depending on the purpose of the assay. For example, different sources may be desirable for an assay intended to diagnose cancer generally, a specific type of cancer, a cancer stage, or a tissue of origin. These samples may be processed using one or more methods known in the art to determine the methylation status of CpG sites (e.g., with whole-genome bisulfite sequencing (WGBS)), or the information may be obtained from a public database (e.g., TCGA). The analytics system may be any generic computing system with a computer processor and a computer-readable storage medium with instructions for executing the computer processor to perform any or all operations described in this present disclosure.

[0184] The cancer assay panel's design and utility is generally described in FIG. 2. For designing the cancer assay panel, an analytics system collects samples corresponding to various outcomes under consideration, e.g., samples known to have cancer, samples considered to be healthy, samples from a known TOO, etc. These samples may be processed with whole-genome bisulfite sequencing (WGBS) or obtained from public database (e.g., TCGA). The analytics system may be any generic computing system with a computer processor and a computer-readable storage medium with instructions for executing the computer processor to perform any or all operations described in this present disclosure. With the samples, the analytics system determines methylation statuses at CpG sites for each fragment in the sample.

[0185] The analytics system may then select target genomic regions for inclusion in a cancer assay panel based on methylation patterns of nucleic acid fragments. One approach considers pairwise distinguishability between pairs of outcomes (e.g., one cancer type vs. a second cancer type) for selection of targeted regions. Another approach considers distinguishability for target genomic regions when considering each outcome against the remaining outcomes (e.g., one cancer type vs. all other cancer types). From the selected target genomic regions with high distinguishability power, the analytics system may design probes to target nucleic acid fragments inclusive of, or derived from, the selected genomic regions. The analytics system may generate variable sizes of the cancer assay panel, e.g., where a small sized cancer assay panel includes probes targeting the most informative genomic region, a medium sized cancer assay panel includes probes from the small sized cancer assay panel and additional probes targeting a second tier of informative genomic regions, and a large sized cancer assay panel includes probes from the small sized and the medium sized cancer assay panels and even more probes targeting a third tier of informative genomic regions. With data obtained such cancer assay panels (e.g., the methylation status on nucleic acids derived from the cancer assay panels), the analytics system may train classifiers with various classification techniques to predict a sample's likelihood of having a particular outcome or state, e.g., cancer, specific cancer type, other disorder, other disease, etc.

[0186] Exemplary methodology for designing a cancer assay panel is generally described in FIG. 2. For instance, to design a cancer assay panel, an analytics system may collect information on the methylation status of CpG sites of nucleic acid fragments from samples corresponding to various outcomes under consideration, e.g., samples known to have cancer, samples considered to be healthy, samples from a known TOO, etc. These samples may be processed (e.g., with whole-genome bisulfate sequencing (WGBS)) to determine the methylation status of CpG sites, or the information may be obtained from TCGA. The analytics system may be any generic computing system with a computer processor and a computer-readable storage medium with instructions for executing the computer processor to perform any or all operations described in this present disclosure.

[0187] In some embodiments, the cancer assay panel comprises at least 500 pairs of probes, wherein each pair of the at least 500 pairs comprises two probes configured to overlap each other by an overlapping sequence, wherein the overlapping sequence comprises at least 30-nucleotides, and wherein each probe is configured to hybridize to a converted DNA (e.g., a cfDNA) molecule corresponding to one or more genomic regions. In some embodiments, each of the genomic regions comprises at least five methylation sites, and wherein the at least five methylation sites have an abnormal methylation pattern in cancerous samples or a different methylation pattern between samples of a different TOO. For example, in one embodiment, the at least five methylation sites are differentially methylated either between cancerous and non-cancerous samples or between one or more pairs of samples from cancers with different tissue of origin. In some embodiments, each pair of probes comprises a first probe and a second probe, wherein the second probe differs from the first probe. The second probe can overlap with the first probe by an overlapping sequence that is at least 30, at least 40, at least 50, or at least 60 nucleotides in length.

[0188] The target genomic regions can be selected from any one of Lists 1-49 (TABLE 1). In some embodiments, the cancer assay panel comprises a plurality of probes, wherein each of the plurality of probes is configured to hybridize to a converted cfDNA molecule corresponding to one or more of the genomic regions in any one of Lists 1-49 or any combination of lists thereof. In some embodiments, the plurality of different bait oligonucleotides are configured to hybridize to DNA molecules derived from at least 20% of the target genomic regions of any one of Lists 1-49. In some embodiments, the plurality of different bait oligonucleotides are configured to hybridize to DNA molecules derived from at least 30%, 40%, 50%, 60%, 70%, or 80% of the target genomic regions of any one of Lists 1-49.

[0189] The target genomic regions can be selected from List 1. In some embodiments, a method for detecting bladder cancer comprises evaluating the methylation status for sequencing reads derived from the target genomic regions of List 1. The target genomic regions can be selected from List 2. In some embodiments, a method for detecting breast cancer comprises evaluating the methylation status for sequencing reads derived from the target genomic regions of List 2. The target genomic regions can be selected from List 3. In some embodiments, a method for detecting cervical cancer comprises evaluating the methylation status for sequencing reads derived from the target genomic regions of List 3. The target genomic regions can be selected from List 4. In some embodiments, a method for detecting colorectal cancer comprises evaluating the methylation status for sequencing reads derived from the target genomic regions of List 4. The target genomic regions can be selected from List 5. In some embodiments, a method for detecting head and neck cancer comprises evaluating the methylation status for sequencing reads derived from the target genomic regions of List 5. The target genomic regions can be selected from List 6. In some embodiments, a method for detecting hepatobiliary cancer comprises evaluating the methylation status for sequencing reads derived from the target genomic regions of List 6. The target genomic regions can be selected from List 7. In some embodiments, a method for detecting lung cancer comprises evaluating the methylation status for sequencing reads derived from the target genomic regions of List 7. The target genomic regions can be selected from List 8. In some embodiments, a method for detecting melanoma comprises evaluating the methylation status for sequencing reads derived from the target genomic regions of List 8. The target genomic regions can be selected from List 9. In some embodiments, a method for detecting ovarian cancer comprises evaluating the methylation status for sequencing reads derived from the target genomic regions of List 9. The target genomic regions can be selected from List 10. In some embodiments, a method for detecting pancreatic cancer comprises evaluating the methylation status for sequencing reads derived from the target genomic regions of List 10. The target genomic regions can be selected from List 11. In some embodiments, a method for detecting prostate cancer comprises evaluating the methylation status for sequencing reads derived from the target genomic regions of List 11. The target genomic regions can be selected from List 12. In some embodiments, a method for detecting renal cancer comprises evaluating the methylation status for sequencing reads derived from the target genomic regions of List 12. The target genomic regions can be selected from List 13. In some embodiments, a method for detecting thyroid cancer comprises evaluating the methylation status for sequencing reads derived from the target genomic regions of List 13. The target genomic regions can be selected from List 14. In some embodiments, a method for detecting upper gastrointestinal cancer comprises evaluating the methylation status for sequencing reads derived from the target genomic regions of List 14. The target genomic regions can be selected from List 15. In some embodiments, a method for detecting uterine cancer comprises evaluating the methylation status for sequencing reads derived from the target genomic regions of List 15.

[0190] The target genomic regions can be selected from List 16. In some embodiments, a method for detecting anorectal cancer comprises evaluating the methylation status for sequencing reads derived from the target genomic regions of List 16. The target genomic regions can be selected from List 17. In some embodiments, a method for detecting bladder and urothelial cancers comprises evaluating the methylation status for sequencing reads derived from the target genomic regions of List 17. The target genomic regions can be selected from List 18. In some embodiments, a method for detecting breast cancer comprises evaluating the methylation status for sequencing reads derived from the target genomic regions of List 18. The target genomic regions can be selected from List 19. In some embodiments, a method for detecting cervical cancer comprises evaluating the methylation status for sequencing reads derived from the target genomic regions of List 19. The target genomic regions can be selected from List 20. In some embodiments, a method for detecting colorectal cancer comprises evaluating the methylation status for sequencing reads derived from the target genomic regions of List 20. The target genomic regions can be selected from List 21. In some embodiments, a method for detecting head and neck cancer comprises evaluating the methylation status for sequencing reads derived from the target genomic regions of List 21. The target genomic regions can be selected from List 22. In some embodiments, a method for detecting liver and bile duct cancers comprises evaluating the methylation status for sequencing reads derived from the target genomic regions of List 22. The target genomic regions can be selected from List 23. In some embodiments, a method for detecting lung cancer comprises evaluating the methylation status for sequencing reads derived from the target genomic regions of List 23. The target genomic regions can be selected from List 24. In some embodiments, a method for detecting melanoma comprises evaluating the methylation status for sequencing reads derived from the target genomic regions of List 24. The target genomic regions can be selected from List 25. In some embodiments, a method for detecting ovarian cancer comprises evaluating the methylation status for sequencing reads derived from the target genomic regions of List 25. The target genomic regions can be selected from List 26. In some embodiments, a method for detecting pancreatic and gallbladder cancers comprises evaluating the methylation status for sequencing reads derived from the target genomic regions of List 26. The target genomic regions can be selected from List 27. In some embodiments, a method for detecting prostate cancer comprises evaluating the methylation status for sequencing reads derived from the target genomic regions of List 27. The target genomic regions can be selected from List 28. In some embodiments, a method for detecting renal cancer comprises evaluating the methylation status for sequencing reads derived from the target genomic regions of List 28. The target genomic regions can be selected from List 29. In some embodiments, a method for detecting sarcoma comprises evaluating the methylation status for sequencing reads derived from the target genomic regions of List 29. The target genomic regions can be selected from List 30. In some embodiments, a method for detecting thyroid cancer comprises evaluating the methylation status for sequencing reads derived from the target genomic regions of List 30. The target genomic regions can be selected from List 31. In some embodiments, a method for detecting upper gastrointestinal cancer comprises evaluating the methylation status for sequencing reads derived from the target genomic regions of List 31. The target genomic regions can be selected from List 32. In some embodiments, a method for detecting uterine cancer comprises evaluating the methylation status for sequencing reads derived from the target genomic regions of List 32.

[0191] The target genomic regions can be selected from List 33. In some embodiments, a method for detecting anorectal cancer comprises evaluating the methylation status for sequencing reads derived from the target genomic regions of List 33. The target genomic regions can be selected from List 34. In some embodiments, a method for detecting bladder and urothelial cancers comprises evaluating the methylation status for sequencing reads derived from the target genomic regions of List 34. The target genomic regions can be selected from List 35. In some embodiments, a method for detecting breast cancer comprises evaluating the methylation status for sequencing reads derived from the target genomic regions of List 35. The target genomic regions can be selected from List 36. In some embodiments, a method for detecting cervical cancer comprises evaluating the methylation status for sequencing reads derived from the target genomic regions of List 36. The target genomic regions can be selected from List 37. In some embodiments, a method for detecting colorectal cancer comprises evaluating the methylation status for sequencing reads derived from the target genomic regions of List 37. The target genomic regions can be selected from List 38. In some embodiments, a method for detecting head and neck cancer comprises evaluating the methylation status for sequencing reads derived from the target genomic regions of List 38. The target genomic regions can be selected from List 39. In some embodiments, a method for detecting liver and bile duct cancers comprises evaluating the methylation status for sequencing reads derived from the target genomic regions of List 39. The target genomic regions can be selected from List 40. In some embodiments, a method for detecting lung cancer comprises evaluating the methylation status for sequencing reads derived from the target genomic regions of List 40. The target genomic regions can be selected from List 41. In some embodiments, a method for detecting melanoma comprises evaluating the methylation status for sequencing reads derived from the target genomic regions of List 41. The target genomic regions can be selected from List 42. In some embodiments, a method for detecting ovarian cancer comprises evaluating the methylation status for sequencing reads derived from the target genomic regions of List 42. The target genomic regions can be selected from List 43. In some embodiments, a method for detecting pancreatic and gallbladder cancers comprises evaluating the methylation status for sequencing reads derived from the target genomic regions of List 43. The target genomic regions can be selected from List 44. In some embodiments, a method for detecting prostate cancer comprises evaluating the methylation status for sequencing reads derived from the target genomic regions of List 44. The target genomic regions can be selected from List 45. In some embodiments, a method for detecting renal cancer comprises evaluating the methylation status for sequencing reads derived from the target genomic regions of List 45. The target genomic regions can be selected from List 46. In some embodiments, a method for detecting sarcoma comprises evaluating the methylation status for sequencing reads derived from the target genomic regions of List 46. The target genomic regions can be selected from List 47. In some embodiments, a method for detecting thyroid comprises evaluating the methylation status for sequencing reads derived from the target genomic regions of List 47. The target genomic regions can be selected from List 48. In some embodiments, a method for detecting upper gastrointestinal cancer comprises evaluating the methylation status for sequencing reads derived from the target genomic regions of List 48. The target genomic regions can be selected from List 49. In some embodiments, a method for detecting uterine cancer comprises evaluating the methylation status for sequencing reads derived from the target genomic regions of List 49.

[0192] Since the probes are configured to hybridize to a converted DNA or cfDNA molecule corresponding to, or derived from, one or more genomic regions, the probes can have a sequence different from the targeted genomic region. For example, a DNA containing unmethylated CpG site will be converted to include UpG instead of CpG because unmethylated cytosines are converted to uracils by a conversion reaction (e.g., bisulfite treatment). As a result, a probe is configured to hybridize to a sequence including UpG instead of a naturally existing unmethylated CpG. Accordingly, a complementary site in the probe to the unmethylation site can comprise CpA instead of CpG, and some probes targeting a hypomethylated site where all methylation sites are unmethylated can have no guanine (G) bases. In some embodiments, at least 3%, 5%, 10%, 15%, or 20% of the probes comprise no CpG sequences.

[0193] The cancer assay panel can be used to detect the presence or absence of cancer generally and/or provide a cancer classification such as cancer type, stage of cancer such as I, II, III, or IV, or provide the TOO where the cancer is believed to originate. The panel may include probes targeting genomic regions differentially methylated between general cancerous (pan-cancer) samples and non-cancerous samples, or only in cancerous samples with a specific cancer type (e.g., lung cancer-specific targets). For example, in some embodiments, a cancer assay panel is designed to include differentially methylated genomic regions based on bisulfite sequencing data generated from the cfDNA from cancer and non-cancer individuals.

[0194] Each of the probes (or probe pairs) is designed to target one or more target genomic regions. The target genomic regions are selected based on several criteria designed to increase selective enriching of informative cfDNA fragments while decreasing noise and non-specific bindings.

[0195] In one example, a panel can include probes that can selectively bind and optionally enrich cfDNA fragments that are differentially methylated in cancerous samples. In this case, sequence from the enriched fragments can provide information relevant to detection of cancer. Furthermore, the probes are designed to target genomic regions that are determined to have an abnormal methylation pattern in cancer samples, or in sample from certain tissue types or cell types. In one embodiment, probes are designed to target genomic regions determined to be hypermethylated or hypomethylated in certain cancers, or cancer tissue of origins, to provide additional selectivity and specificity of the detection. In some embodiments, a panel comprises probes targeting hypomethylated fragments. In some embodiments, a panel comprises probes targeting hypermethylated fragments. In some embodiments, a panel comprises both a first set of probes targeting hypermethylated fragments and a second set of probes targeting hypomethylated fragments. (FIG. 1C) In some embodiments, the ratio between the first set of probes targeting hypermethylated fragments and the second set of probes targeting hypomethylated fragments (Hyper:Hypo ratio) ranges between 0.4 and 2, between 0.5 and 1.8, between 0.5 and 1.6, between 1.4 and 1.6, between 1.2 and 1.4, between 1 and 1.2, between 0.8 and 1, between 0.6 and 0.8 or between 0.4 and 0.6. Methods of identifying genomic regions (i.e., genomic regions giving rise to differentially methylated DNA molecules or anomalously methylated DNA molecules between cancer and non-cancer samples, between different cancer tissue of origin (TOO) types, between different cancer cell type, or between samples from different stages of cancer) are provided in detail herein and methods of identifying anomalously methylated DNA molecules or fragments that are identified as indicative of cancer are also provided in detail herein.

[0196] In a second example, genomic regions can be selected when the genomic regions give rise to anomalously methylated DNA molecules in cancer samples or samples with known cancer tissue of origin (TOO) types. For example, as described herein, a Markov model trained on a set of non-cancerous samples can be used to identify genomic regions that give rise to anomalously methylated DNA molecules (i.e., DNA molecules having a methylation pattern below a p-value threshold).

[0197] Each of the probes can target a genomic region comprising at least 30 bp, 35 bp, 40 bp, 45 bp, 50 bp, 60 bp, 70 bp, 80 bp, 90 bp, 100 bp or more. In some embodiments, the genomic regions can be selected to have less than 30, 25, 20, 15, 12, 10, 8, or 6 methylation sites.

[0198] The genomic regions can be selected when at least 80, 85, 90, 92, 95, or 98% of the at least five methylation (e.g., CpG) sites within the region are either methylated or unmethylated in non-cancerous or cancerous samples, or in cancer samples from a tissue of origin (TOO).

[0199] Genomic regions may be further filtered to select only those that are likely to be informative based on their methylation patterns, for example, CpG sites that are differentially methylated between cancerous and non-cancerous samples (e.g., abnormally methylated or unmethylated in cancer versus non-cancer), between cancerous samples of a TOO and cancerous samples of a different TOO, or CpG sites that are differentially methylated only in cancerous samples of a specific TOO. For the selection, calculation can be performed with respect to each CpG or a plurality of CpG sites. For example, a first count is determined that is the number of cancer-containing samples (cancer_count) that include a fragment overlapping that CpG, and a second count is determined that is the number of total samples containing fragments overlapping that CpG site (total). Genomic regions can be selected based on criteria positively correlated to the number of cancer-containing samples (cancer_count) that include a fragment indicative of cancer overlapping that CpG site, and inversely correlated with the number of total samples containing fragments indicative of cancer overlapping that CpG site (total). In one embodiment, the number of non-cancerous samples (n_{non-cancer}) and the number of cancerous samples (n_{cancer}) having a fragment overlapping a CpG site are counted. Then the probability that a sample is cancer is estimated, for example as (n_{cancer}+1)/(n_{cancer}+n_{non-cancer}+2).

[0200] CpG sites scored by this metric are ranked and greedily added to a panel until the panel size budget is exhausted. The process of selecting genomic regions indicative of cancer is further detailed herein. In some embodiments, depending on whether the assay is intended to be a pan-cancer assay or a single-cancer assay, or depending on what kind of flexibility is desired when picking which CpG sites are contributing to the panel. A panel for detecting a specific cancer type can be designed using a similar process. In this embodiment, for each cancer type, and for each CpG site, the information gain is computed to determine whether to include a probe targeting that CpG site. The information gain may be computed for samples with a given cancer type of a TOO compared to all other samples. For example, consider two random variables, “AF” and “CT”. “AF” is a binary variable that indicates whether there is an abnormal fragment overlapping a particular CpG site in a particular sample (yes or no). “CT” is a binary random variable indicating whether the cancer is of a particular type (e.g., lung cancer or cancer other than lung). One can compute the mutual information with respect to “CT” given “AF.” That is, how many bits of information about the cancer type (lung vs. non-lung in the example) are gained if one knows whether there is an anomalous fragment overlapping a particular CpG site. This can be used to rank CpG's based on how lung-specific they are. This procedure is repeated for a plurality of cancer types. If a particular region is commonly differentially methylated only in lung cancer (and not other cancer types or non-cancer), CpG's in that region would tend to have high information gains for lung cancer. For each cancer type, CpG sites are ranked by this information gain metric, and then greedily added to a panel until the size budget for that cancer type is exhausted.

[0201] Further filtration can be performed to select probes with high specificity for enrichment (i.e., high binding efficiency) of nucleic acids derived from targeted genomic regions. Probes can be filtered to reduce non-specific binding (or off-target binding) to nucleic acids derived from non-targeted genomic regions. For example, probes can be filtered to select only those probes having less than a set threshold of off-target binding events. In one embodiment, probes can be aligned to a reference genome (e.g., a human reference genome) to select probes that align to less than a set threshold of regions across the genome. For example, probes can be selected that align to less than 25, 24, 23, 22, 21, 20, 19, 18, 17, 16, 15, 14, 13, 12, 11, 10, 9 or 8 off-target regions across the reference genome. In other cases, filtration is performed to remove genomic regions when the sequence of the target genomic regions appears more than 5, 10, 15, 20, 21, 22, 23, 24, 25, 26, 27, 28, 29, 30, 31, 32, 33, 34 or 35 times in a genome. Further filtration can be performed to select target genomic regions when a probe sequence, or a set of probe sequences that are 90%, 91%, 92%, 93%, 94%, 95%, 96%, 97%, 98% or 99% homologous to the target genomic regions, appear less than 25, 24, 23, 22, 21, 20, 19, 18, 17, 16, 15, 14, 13, 12, 11, 10, 9 or 8 times in a reference genome, or to remove target genomic regions when the probe sequence, or a set of probe sequences designed to enrich for the targeted genomic region are 90%, 91%, 92%, 93%, 94%, 95%, 96%, 97%, 98% or 99% homologous to the target genomic regions, appear more than 5, 10, 15, 20, 21, 22, 23, 24, 25, 26, 27, 28, 29, 30, 31, 32, 33, 34 or 35 times in a reference genome. This is for excluding repetitive probes that can pull down off-target fragments, which are not desired and can impact assay efficiency.

[0202] In some embodiments, a fragment-probe overlap of at least 45 bp was demonstrated to be effective for achieving a non-negligible amount of pulldown (though as one of skill in the art would appreciate this number can very) as provided in Example 1. In some embodiments, more than a 10% mismatch rate between the probe and fragment sequences in the region of overlap is sufficient to greatly disrupt binding, and thus pulldown efficiency. Therefore, sequences that can align to the probe along at least 45 bp with at least a 90% match rate can be candidates for off-target pulldown. Thus, in one embodiment, the number of such regions are scored. The best probes have a score of 1, meaning they match in only one place (the intended target region). Probes with an intermediate score (say, less than 5 or 10) may in some instances be accepted, and in some instances any probes above a particular score are discarded. Other cutoff values can be used for specific samples.

[0203] Once the probes hybridize and capture DNA fragments corresponding to, or derived from, a target genomic region, the hybridized probe-DNA fragment intermediates are pulled down (or isolated), and the targeted DNA is amplified and its methylation status is determined by, for example, sequencing or hybridization to a microarray, etc. The sequence read provides information relevant for detection of cancer. For this end, a panel is designed to include a plurality of probes that can capture fragments that can together provide information relevant to detection of cancer. In some embodiments, a panel includes at least 5, 50, 100, 200, 300, 400, 500, 600, 700, 800, 900, 1000, 1,200, 1,400, 1,600, 1,800, 2,000, 2,200, 2,400, 2,600, 2,800, 3,000, 3,200, 4,000, 4,500, 5,000, 5,500, 6,000, 6,500, 7,000, 7,500, 8,000, 8,500, 9,000, or 10,000 pairs of probes. In other embodiments, a panel includes at least 100, 200, 300, 400, 500, 600, 700, 800, 900, 1000, 1,200, 1,400, 1,600, 1,800, 2,000, 2,200, 2,400, 2,600, 2,800, 3,000, 3,200, 4,000, 4,500, 5,000, 5,500, 6,000, 6,500, 7,000, 7,500, 8,000, 8,500, 9,000, 10,000, 15,000, or 20,000 probes. The plurality of probes together can comprise at least 10,000, 20,000, 30,000, 40,000, 50,000, 60,000, 70,000, 80,000, 90,000, 100,000, 120,000, 140,000, 160,000, 180,000, 200,000, 240,000, 260,000, 280,000, 300,000, 320,000, 400,000, 450,000, 500,000, 550,000, 600,000, 650,000, 700,000, 750,000, 800,000, 850,000, 900,000, 1 million, 1.5 million, 2 million, 2.5 million, or 3 million nucleotides.

[0204] The selected target genomic regions can be located in various positions in a genome, including but not limited to exons, introns, intergenic regions, and other parts. In some embodiments, probes targeting non-human genomic regions, such as those targeting viral genomic regions, can be added.

[0205] In some instances, primers may be used to specifically amplify targets/biomarkers of interest (e.g., by PCR), thereby enriching the sample for desired targets/biomarkers (optionally without hybridization capture). For example, forward and reverse primers can be prepared for each genomic region of interest and used to amplify fragments that correspond to or are derived from the desired genomic region. Thus, while the present disclosure pays particular attention to cancer assay panels and bait sets for hybridization capture, the disclosure is broad enough to encompass other methods for enrichment of cell-free DNA. Accordingly, a skilled artisan, with the benefit of this disclosure, will recognize that methods analogous to those described herein in connection with hybridization capture can alternatively be accomplished by replacing hybridization capture with some other enrichment strategy, such as PCR amplification of cell-free DNA fragments that correspond with genomic regions of interest. In some embodiments, bisulfite padlock probe capture is used to enrich regions of interest, such as is described in Zhang et al. (US 2016/0340740). In some embodiments, additional or alternative methods are used for enrichment (e.g., non-targeted enrichment) such as reduced representation bisulfite sequencing, methylation restriction enzyme sequencing, methylation DNA immunoprecipitation sequencing, methyl-CpG-binding domain protein sequencing, methyl DNA capture sequencing, or microdroplet PCR.

### Probes

[0206] The cancer assay panel provided herein is a panel including a set of hybridization probes (also referred to herein as “probes”) designed to, during enrichment, target and pull down nucleic acid fragments of interest for the assay. In some embodiments, the probes are designed to hybridize and enrich DNA or cfDNA molecules from cancerous samples that have been treated to convert unmethylated cytosines (C) to uracils (U). In other embodiments, the probes are designed to hybridize and enrich DNA or cfDNA molecules from cancerous samples of a TOO that have been treated to convert unmethylated cytosines (C) to uracils (U). The probes can be designed to anneal (or hybridize) to a target (complementary) strand of DNA or RNA. The target strand can be the “positive” strand (e.g., the strand transcribed into mRNA, and subsequently translated into a protein) or the complementary “negative” strand. In a particular embodiment, a cancer assay panel may include sets of two probes, one probe targeting the positive strand and the other probe targeting the negative strand of a target genomic region.

[0207] For each target genomic region, four possible probe sequences can be designed. DNA molecules corresponding to, or derived from, each target region is double-stranded, as such, a probe or probe set can target either the “positive” or forward strand or its reverse complement (the “negative” strand). Additionally, in some embodiments, the probes or probe sets are designed to enrich DNA molecules or fragments that have been treated to convert unmethylated cytosines (C) to uracils (U). Because the probes or probe sets are designed to enrich DNA molecules corresponding to, or derived from the targeted regions after conversion, the probe's sequence can be designed to enrich DNA molecules of fragments where unmethylated C's have been converted to U's (by utilizing A's in place of G's at sites that are unmethylated cytosines in DNA molecules or fragments corresponding to, or derived from, the targeted region). In one embodiment, probes are designed to bind to, or hybridize to, DNA molecules or fragments from genomic regions known to contain cancer-specific methylation patterns (e.g., hypermethylated or hypomethylated DNA molecules), thereby enriching (or detecting) cancer-specific DNA molecules or fragments. Targeting genomic regions, or cancer-specific methylation patterns, can be advantageous allowing one to specifically enrich for DNA molecules or fragments identified as informative for cancer or cancer TOO, and thus, lowering detection needs and costs (e.g., lowering sequencing costs). In other embodiments, two probe sequences can be designed per a target genomic region (one for each DNA strand). In still other cases, probes are designed to enrich for all DNA molecules or fragments corresponding to, or derived from, a targeted region (i.e., regardless of strand or methylation status). This might be because the cancer methylation status is not highly methylated or unmethylated, or because the probes are designed to target small mutations or other variations rather than methylation changes, with these other variations similarly indicative of the presence or absence of a cancer or the presence or absence of a cancer of one or more TOOs. In that case, all four possible probe sequences can be included per a target genomic region.

[0208] The probes can range in length from 10s, 100s, 200s, or 300s of base pairs. The probes can comprise at least 50, 75, 100, or 120 nucleotides. The probes can comprise less than 300, 250, 200, or 150 nucleotides. In an embodiment, the probes comprise 100-150 nucleotides. In one particular embodiment, the probes comprise 120 nucleotides.

[0209] In some embodiments, the probes are designed in a “2× tiled” fashion to cover overlapping portions of a target region. Each probe optionally overlaps in coverage at least partially with another probe in the library. In such embodiments, the panel contains multiple pairs of probes, with each probe in a pair overlapping the other by at least 25, 30, 35, 40, 45, 50, 60, 70, 75 or 100 nucleotides. In some embodiments, the overlapping sequence can be designed to be complementary to a target genomic region (or cfDNA derived therefrom) or to be complementary to a sequence with homology to a target region or cfDNA. Thus, in some embodiments, at least two probes are complementary to the same sequence within a target genomic region, and a nucleotide fragment corresponding to or derived from the target genomic region can be bound and pulled down by at least one of the probes. Other levels of tiling are possible, such as 3× tiling, 4× tiling, etc., wherein each nucleotide in a target region can bind to more than two probes.

[0210] In one embodiment, each base in a target genomic region is overlapped by exactly two probes, as illustrated in FIG. 1A. A single pair of probes is enough to pull down a genomic region if the overlap between the two probes is longer than the target genomic region and extends beyond both ends of the target genomic region. In some instances, even relatively small target regions may be targeted with three probes (see FIG. 1A). A probe set comprising three or more probes is optionally used to capture a larger genomic region (see FIG. 1B). In some embodiments, subsets of probes will collectively extend across an entire genomic region (e.g., may be complementary to non-converted or converted fragments from the genomic region). A tiled probe set optionally comprises probes that collectively include at least two probes that overlap every nucleotide in the genomic region. This is done to ensure that cfDNAs comprising a small portion of a target genomic region at one end will have a substantial overlap extending into the adjacent non-targeted genomic region with at least one probe, to provide for efficient capture.

[0211] For example, a 100 bp cfDNA fragment comprising a 30 nt target genomic region can be guaranteed to have at least 65 bp overlap with at least one of the overlapping probes. Other levels of tiling are possible. For example, to increase target size and add more probes in a panel, probes can be designed to expand a 30 bp target region by at least 70 bp, 65 bp, 60 bp, 55 bp, or 50 bp. To capture any fragment that overlaps the target region at all (even if by only 1 bp), the probes can be designed to extend past the ends of the target region on either side.

[0212] The probes are designed to analyze methylation status of target genomic regions (e.g., of the human or another organism) that are suspected to correlate with the presence or absence of cancer generally, presence or absence of certain types of cancers, cancer stage, or presence or absence of other types of diseases.

[0213] Furthermore, the probes are designed to effectively hybridize to and optionally pull down cfDNA fragments containing a target genomic region. In some embodiments, the probes are designed to cover overlapping portions of a target region, so that each probe is “tiled” in coverage such that each probe overlaps in coverage at least partially with another probe in the library. In such embodiments, the panel contains multiple pairs of probes, where each pair comprises at least two probes overlapping each other by an overlapping sequence of at least 25, 30, 35, 40, 45, 50, 60, 70, 75 or 100 nucleotides. In some embodiments, the overlapping sequence can be designed to be complementary to a target genomic region (or a converted version thereof), thus a nucleotide fragment derived from or containing the target genomic region can be bound and optionally pulled down by at least one of the probes.

[0214] In one embodiment, the smallest target genomic region is 30 bp. When a new target region is added to the panel (based on the greedy selection as described above), the new target region of 30 bp can be centered on a specific CpG site of interest. Then, it is checked whether each edge of this new target is close enough to other targets such that they can be merged. This is based on a “merge distance” parameter which can be 200 bp by default but can be tuned. This allows close but distinct target regions to be enriched with overlapping probes. Depending on whether close enough targets exist to the left or right of the new target, the new target can be merged with nothing (increasing the number of panel targets by one), merged with just one target either to the left or the right (not changing the number of panel targets), or merged with existing targets both to the left and right (reducing the number of panel targets by one).

### Methods of Selecting Target Genomic Regions

[0215] In another aspect, methods of selecting target genomic regions for detecting cancer and/or a TOO are provided. The targeted genomic regions can be used to design and manufacture probes for a cancer assay panel. Methylation status of DNA or cfDNA molecules corresponding to, or derived from, the target genomic regions can be screened using the cancer assay panel. Alternative methods, for example by WGBS or other methods known in the art, can be also implemented to detect methylation status of DNA molecules or fragments corresponding to, or derived from, the target genomic regions.

### Sample Processing

[0216] FIG. 7A is a flowchart of a process 100 for processing a nucleic acid sample and generating methylation state vectors for DNA fragments, according to one embodiment. While the present disclosure pays particular attention to sequencing based approaches for detecting nucleic acids and determining methylation status, the disclosure is broad enough to encompass other methods for determining methylation status of nucleic acid sequences (such as methylation-aware sequencing approaches described in WO 2014/043763, which is incorporated herein by reference). As described in FIG. 7A, the method includes, but is not limited to, the following steps. For example, any step of the method may comprise a quantitation sub-step for quality control or other laboratory assay procedures known to one skilled in the art.

[0217] In step 105, a nucleic acid sample (DNA or RNA) is extracted from a subject. In the present disclosure, DNA and RNA may be used interchangeably unless otherwise indicated. That is, the embodiments described herein may be applicable to both DNA and RNA types of nucleic acid sequences. However, the examples described herein may focus on DNA for purposes of clarity and explanation. The sample may be any subset of the human genome, including the whole genome. The sample may include blood, plasma, serum, urine, fecal, saliva, other types of bodily fluids, or any combination thereof. In some embodiments, methods for drawing a blood sample (e.g., syringe or finger prick) may be less invasive than procedures for obtaining a tissue biopsy, which may require surgery. The extracted sample may comprise cfDNA and/or ctDNA. For healthy individuals, the human body may naturally clear out cfDNA and other cellular debris. If a subject has a cancer or disease, cfDNA and/or ctDNA in an extracted sample may be present at a detectable level for detecting the cancer or disease.

[0218] In step 110, the cfDNA fragments are treated to convert unmethylated cytosines to uracils. In one embodiment, the method uses a bisulfite treatment of the DNA which converts the unmethylated cytosines to uracils without converting the methylated cytosines. For example, a commercial kit such as the EZ DNA Methylation™—Gold, EZ DNA Methylation™—Direct or an EZ DNA Methylation™—Lightning kit (available from Zymo Research Corp (Irvine, Calif.)) is used for the bisulfite conversion. In another embodiment, the conversion of unmethylated cytosines to uracils is accomplished using an enzymatic reaction. For example, the conversion can use a commercially available kit for conversion of unmethylated cytosines to uracils, such as APOBEC-Seq (NEBiolabs, Ipswich, Mass.).

[0219] In step 115, a sequencing library is prepared. In a first step, a ssDNA adapter is added to the 3′-OH end of a bisulfite-converted ssDNA molecule using a ssDNA ligation reaction. In one embodiment, the ssDNA ligation reaction uses CircLigase II (Epicentre) to ligate the ssDNA adapter to the 3′-OH end of a bisulfite-converted ssDNA molecule, wherein the 5′-end of the adapter is phosphorylated and the bisulfite-converted ssDNA has been dephosphorylated (i.e., the 3′ end has a hydroxyl group). In another embodiment, the ssDNA ligation reaction uses Thermostable 5′ AppDNA/RNA ligase (available from New England BioLabs (Ipswich, Mass.)) to ligate the ssDNA adapter to the 3′-OH end of a bisulfite-converted ssDNA molecule. In this example, the first UMI adapter is adenylated at the 5′-end and blocked at the 3′-end. In another embodiment, the ssDNA ligation reaction uses a T4 RNA ligase (available from New England BioLabs) to ligate the ssDNA adapter to the 3′-OH end of a bisulfate-converted ssDNA molecule. In a second step, a second strand DNA is synthesized in an extension reaction. For example, an extension primer, that hybridizes to a primer sequence included in the ssDNA adapter, is used in a primer extension reaction to form a double-stranded bisulfite-converted DNA molecule. Optionally, in one embodiment, the extension reaction uses an enzyme that is able to read through uracil residues in the bisulfate-converted template strand. Optionally, in a third step, a dsDNA adapter is added to the double-stranded bisulfite-converted DNA molecule. Finally, the double-stranded bisulfate-converted DNA is amplified to add sequencing adapters. For example, PCR amplification using a forward primer that includes a P5 sequence and a reverse primer that includes a P7 sequence is used to add P5 and P7 sequences to the bisulfate-converted DNA. Optionally, during library preparation, unique molecular identifiers (UMI) may be added to the nucleic acid molecules (e.g., DNA molecules) through adapter ligation. The UMIs are short nucleic acid sequences (e.g., 4-10 base pairs) that are added to ends of DNA fragments during adapter ligation. In some embodiments, UMIs are degenerate base pairs that serve as a unique tag that can be used to identify sequence reads originating from a specific DNA fragment. During PCR amplification following adapter ligation, the UMIs are replicated along with the attached DNA fragment, which provides a way to identify sequence reads that came from the same original fragment in downstream analysis.

[0220] In step 120, targeted DNA sequences may be enriched from the library. This is used, for example, where a targeted panel assay is being performed on the samples. During enrichment, hybridization probes (also referred to herein as “probes”) are used to target, and pull down, nucleic acid fragments informative for the presence or absence of cancer (or disease), cancer status, or a cancer classification (e.g., cancer type or tissue of origin). For a given workflow, the probes may be designed to anneal (or hybridize) to a target (complementary) strand of DNA or RNA. The target strand may be the “positive” strand (e.g., the strand transcribed into mRNA, and subsequently translated into a protein) or the complementary “negative” strand. The probes may range in length from 10s, 100s, or 1000s of base pairs. Moreover, the probes may cover overlapping portions of a target region.

[0221] After a hybridization step 120, the hybridized nucleic acid fragments are captured and may also be amplified using PCR (enrichment 125). For example, the target sequences can be enriched to obtain enriched sequences that can be subsequently sequenced. In general, any known method in the art can be used to isolate, and enrich for, probe-hybridized target nucleic acids. For example, as is well known in the art, a biotin moiety can be added to the 5′-end of the probes (i.e., biotinylated) to facilitate isolation of target nucleic acids hybridized to probes using a streptavidin-coated surface (e.g., streptavidin-coated beads).

[0222] In step 130, sequence reads are generated from the enriched DNA sequences, e.g., enriched sequences. Sequence data may be acquired from the enriched DNA sequences by known means in the art. For example, the method may include next generation sequencing (NGS) techniques including synthesis technology (Illumina), pyrosequencing (454 Life Sciences), ion semiconductor technology (Ion Torrent sequencing), single-molecule real-time sequencing (Pacific Biosciences), sequencing by ligation (SOLiD sequencing), nanopore sequencing (Oxford Nanopore Technologies), or paired-end sequencing. In some embodiments, massively parallel sequencing is performed using sequencing-by-synthesis with reversible dye terminators. In other embodiments, as would be readily understood by one of skill in the art, any known means for detecting nucleic acids and determining methylations status can be used. For example, sequences can be detected, and methylation status determined, using known methylation-aware sequencing (see e.g., WO 2014/043763), a DNA microarray (e.g., with labeled probes adhered or conjugated to a solid surface or DNA array chip), etc.

[0223] In step 140, methylation state vectors are generated from the sequence reads. To do so, a sequence read is aligned to a reference genome. The reference genome helps provide the context as to what position in a human genome the fragment cfDNA originates from. In a simplified example, the sequence read is aligned such that the three CpG sites correlate to CpG sites 23, 24, and 25 (arbitrary reference identifiers used for convenience of description). After alignment, there is information both on methylation status of all CpG sites on the cfDNA fragment and which position in the human genome the CpG sites map to. With the methylation status and location, a methylation state vector may be generated for the fragment cfDNA.

### Generation of Data Structure

[0224] FIG. 3A is a flowchart describing a process 300 of generating a data structure for a healthy control group, according to an embodiment. To create a healthy control group data structure, the analytics system obtains information related to methylation status of a plurality of CpG sites on sequence reads derived from a plurality of DNA molecules or fragments from a plurality of healthy subjects. The method provided herein for creating a healthy control group data structure can be performed similarly for subjects with cancer, subjects with cancer of a TOO, subjects with a known cancer type, or subjects with another known disease state. A methylation state vector is generated for each DNA molecule or fragment, for example via the process 100.

[0225] With each fragment's methylation state vector, the analytics system subdivides 310 the methylation state vector into strings of CpG sites. In one embodiment, the analytics system subdivides 310 the methylation state vector such that the resulting strings are all less than a given length. For example, a methylation state vector of length 11 may be subdivided into strings of length less than or equal to 3 would result in 9 strings of length 3, 10 strings of length 2, and 11 strings of length 1. In another example, a methylation state vector of length 7 being subdivided into strings of length less than or equal to 4 would result in 4 strings of length 4, 5 strings of length 3, 6 strings of length 2, and 7 strings of length 1. If a methylation state vector is shorter than or the same length as the specified string length, then the methylation state vector may be converted into a single string containing all of the CpG sites of the vector.

[0226] The analytics system tallies 320 the strings by counting, for each possible CpG site and possibility of methylation states in the vector, the number of strings present in the control group having the specified CpG site as the first CpG site in the string and having that possibility of methylation states. For example, at a given CpG site and considering string lengths of 3, there are 2\hat{ }3 or 8 possible string configurations. At that given CpG site, for each of the 8 possible string configurations, the analytics system tallies 320 how many occurrences of each methylation state vector possibility come up in the control group. Continuing this example, this may involve tallying the following quantities: <Mₓ, Mₓ₊₁, Mₓ₊₂>, <Mₓ, Mₓ₊₁, Uₓ₊₂>, . . . , <Uₓ, Uₓ₊₁, Uₓ₊₂> for each starting CpG site x in the reference genome. The analytics system creates 330 the data structure storing the tallied counts for each starting CpG site and string possibility.

[0227] There are several benefits to setting an upper limit on string length. First, depending on the maximum length for a string, the size of the data structure created by the analytics system can dramatically increase in size. For instance, maximum string length of 4 means that every CpG site has at the very least 2\hat{ }4 numbers to tally for strings of length 4. Increasing the maximum string length to 5 means that every CpG site has an additional 2\hat{ }4 or 16 numbers to tally, doubling the numbers to tally (and computer memory required) compared to the prior string length. Reducing string size helps keep the data structure creation and performance (e.g., use for later accessing as described below), in terms of computational and storage, reasonable. Second, a statistical consideration to limiting the maximum string length is to avoid overfitting downstream models that use the string counts. If long strings of CpG sites do not, biologically, have a strong effect on the outcome (e.g., predictions of anomalousness that predictive of the presence of cancer), calculating probabilities based on large strings of CpG sites can be problematic as it requires a significant amount of data that may not be available, and thus would be too sparse for a model to perform appropriately. For example, calculating a probability of anomalousness/cancer conditioned on the prior 100 CpG sites would require counts of strings in the data structure of length 100, ideally some matching exactly the prior 100 methylation states. If only sparse counts of strings of length 100 are available, there will be insufficient data to determine whether a given string of length of 100 in a test sample is anomalous or not.

### Validation of Data Structure

[0228] Once the data structure has been created, the analytics system may seek to validate 340 the data structure and/or any downstream models making use of the data structure. One type of validation checks consistency within the control group's data structure. For example, if there are any outlier subjects, samples, and/or fragments within a control group, then the analytics system may perform various calculations to determine whether to exclude any fragments from one of those categories. In a representative example, the healthy control group may contain a sample that is undiagnosed but cancerous such that the sample contains anomalously methylated fragments. This first type of validation ensures that potential cancerous samples are removed from the healthy control group so as to not affect the control group's purity.

[0229] A second type of validation checks the probabilistic model used to calculate p-values with the counts from the data structure itself (i.e., from the healthy control group). A process for p-value calculation is described below in conjunction with FIG. 5. Once the analytics system generates a p-value for the methylation state vectors in the validation group, the analytics system builds a cumulative density function (CDF) with the p-values. With the CDF, the analytics system may perform various calculations on the CDF to validate the control group's data structure. One test uses the fact that the CDF should ideally be at or below an identity function, such that CDF(x)≤x. On the converse, being above the identity function reveals some deficiency within the probabilistic model used for the control group's data structure. For example, if 1/100 of fragments have a p-value score of 1/1000 meaning CDF( 1/1000)= 1/100> 1/1000, then the second type of validation fails indicating an issue with the probabilistic model.

[0230] A third type of validation uses a healthy set of validation samples separate from those used to build the data structure, which tests if the data structure is properly built and the model works. An example process for carrying out this type of validation is described below in conjunction with FIG. 3B. The third type of validation can quantify how well the healthy control group generalizes the distribution of healthy samples. If the third type of validation fails, then the healthy control group does not generalize well to the healthy distribution.

[0231] A fourth type of validation tests with samples from a non-healthy validation group. The analytics system calculates p-values and builds the CDF for the non-healthy validation group. With a non-healthy validation group, the analytics system expects to see the CDF(x)>x for at least some samples or, stated differently, the converse of what was expected in the second type of validation and the third type of validation with the healthy control group and the healthy validation group. If the fourth type of validation fails, then this is indicative that the model is not appropriately identifying the anomalousness that it was designed to identify.

[0232] FIG. 3B is a flowchart describing the additional step 340 of validating the data structure for the control group of FIG. 3A, according to an embodiment. In this embodiment of the step 340 of validating the data structure, the analytics system performs the fourth type of validation test as described above which utilizes a validation group with a supposedly similar composition of subjects, samples, and/or fragments as the control group. For example, if the analytics system selected healthy subjects without cancer for the control group, then the analytics system also uses healthy subjects without cancer in the validation group.

[0233] The analytics system takes the validation group and generates 100 a set of methylation state vectors as described in FIG. 3A. The analytics system performs a p-value calculation for each methylation state vector from the validation group. The p-value calculation process will be further described in conjunction with FIGS. 4-5. For each possibility of methylation state vector, the analytics system calculates a probability from the control group's data structure. Once the probabilities are calculated for the possibilities of methylation state vectors, the analytics system calculates 350 a p-value score for that methylation state vector based on the calculated probabilities. The p-value score represents an expectedness of finding that specific methylation state vector and other possible methylation state vectors having even lower probabilities in the control group. A low p-value score, thereby, generally corresponds to a methylation state vector which is relatively unexpected in comparison to other methylation state vectors within the control group, where a high p-value score generally corresponds to a methylation state vector which is relatively more expected in comparison to other methylation state vectors found in the control group. Once the analytics system generates a p-value score for the methylation state vectors in the validation group, the analytics system builds 360 a cumulative density function (CDF) with the p-value scores from the validation group. The analytics system validates 370 consistency of the CDF as described above in the fourth type of validation tests.

### Anomalously Methylated Fragments

[0234] Anomalously methylated fragments having abnormal methylation patterns in cancer patient samples, subject with cancer of a TOO, subjects with a known cancer type, or subjects with another known disease state, are selected as target genomic regions, according to an embodiment as outlined in FIG. 4. Exemplary processes of selected anomalously methylated fragments 440 are visually illustrated in FIG. 5, and is further described below the description of FIG. 4. In process 400, the analytics system generates 100 methylation state vectors from cfDNA fragments of the sample. The analytics system handles each methylation state vector as follows.

[0235] For a given methylation state vector, the analytics system enumerates 410 all possibilities of methylation state vectors having the same starting CpG site and same length (i.e., set of CpG sites) in the methylation state vector. As each methylation state may be methylated or unmethylated there are only two possible states at each CpG site, and thus the count of distinct possibilities of methylation state vectors depends on a power of 2, such that a methylation state vector of length n would be associated with 2n possibilities of methylation state vectors.

[0236] The analytics system calculates 420 the probability of observing each possibility of methylation state vector for the identified starting CpG site/methylation state vector length by accessing the healthy control group data structure. In one embodiment, calculating the probability of observing a given possibility uses a Markov chain probability to model the joint probability calculation which will be described in greater detail with respect to FIG. 5 below. In other embodiments, calculation methods other than Markov chain probabilities are used to determine the probability of observing each possibility of methylation state vector.

[0237] The analytics system calculates 430 a p-value score for the methylation state vector using the calculated probabilities for each possibility. In one embodiment, this includes identifying the calculated probability corresponding to the possibility that matches the methylation state vector in question. Specifically, this is the possibility having the same set of CpG sites, or similarly the same starting CpG site and length as the methylation state vector. The analytics system sums the calculated probabilities of any possibilities having probabilities less than or equal to the identified probability to generate the p-value score.

[0238] This p-value represents the probability of observing the methylation state vector of the fragment or other methylation state vectors even less probable in the healthy control group. A low p-value score, thereby, generally corresponds to a methylation state vector which is rare in a healthy subject, and which causes the fragment to be labeled abnormally methylated, relative to the healthy control group. A high p-value score generally relates to a methylation state vector is expected to be present, in a relative sense, in a healthy subject. If the healthy control group is a non-cancerous group, for example, a low p-value indicates that the fragment is abnormally methylated relative to the non-cancer group, and therefore possibly indicative of the presence of cancer in the test subject.

[0239] As above, the analytics system calculates p-value scores for each of a plurality of methylation state vectors, each representing a cfDNA fragment in the test sample. To identify which of the fragments are abnormally methylated, the analytics system may filter 440 the set of methylation state vectors based on their p-value scores. In one embodiment, filtering is performed by comparing the p-values scores against a threshold and keeping only those fragments below the threshold. This threshold p-value score could be on the order of 0.1, 0.01, 0.001, 0.0001, or similar.

[0240] P-Value Score Calculation

[0241] FIG. 5 is an illustration 500 of an example p-value score calculation, according to an embodiment. To calculate a p-value score given a test methylation state vector 505, the analytics system takes that test methylation state vector 505 and enumerates 410 possibilities of methylation state vectors. In this illustrative example, the test methylation state vector 505 is <M₂₃, M₂₄, M₂₅, U₂₆>. As the length of the test methylation state vector 505 is 4, there are 2\hat{ }4 possibilities of methylation state vectors encompassing CpG sites 23-26. In a generic example, the number of possibilities of methylation state vectors is 2n, where n is the length of the test methylation state vector or alternatively the length of the sliding window (described further below).

[0242] The analytics system calculates 420 probabilities 515 for the enumerated possibilities of methylation state vectors. As methylation is conditionally dependent on methylation status of nearby CpG sites, one way to calculate the probability of observing a given methylation state vector possibility is to use Markov chain model. Generally, a methylation state vector such as <S₁, S₂, . . . , Sₙ>, where S denotes the methylation state whether methylated (denoted as M), unmethylated (denoted as U), or indeterminate (denoted as I), has a joint probability that can be expanded using the chain rule of probabilities as:

P(<S₁,S₂, . . . ,Sₙ>)=P(Sₙ|S₁, . . . ,Sₙ₋₁>)*P(Sₙ₋₁|S₁, . . . ,Sₙ₋₂>)*P(S₂|S₁)*P(S₁) (1)

Markov chain model can be used to make the calculation of the conditional probabilities of each possibility more efficient. In one embodiment, the analytics system selects a Markov chain order k which corresponds to how many prior CpG sites in the vector (or window) to consider in the conditional probability calculation, such that the conditional probability is modeled as P(Sₙ|S₁, . . . , Sₙ₋₁)˜P(Sₙ|Sₙ₋ₖ₋₂, . . . , Sₙ₋₁).

[0243] To calculate each Markov modeled probability for a possibility of methylation state vector, the analytics system accesses the control group's data structure, specifically the counts of various strings of CpG sites and states. To calculate P(Mₙ|Sₙ₋ₖ₋₂, . . . , Sₙ₋₁), the analytics system takes a ratio of the stored count of the number of strings from the data structure matching <Sₙ₋ₖ₋₂, . . . , Sₙ₋₁, Mₙ> divided by the sum of the stored count of the number of strings from the (2) data structure matching <Sₙ₋ₖ₋₂, Sₙ₋₁, Mₙ> and <Sₙ₋ₖ₋₂, Sₙ₋₁, Uₙ>. Thus, P(Mₙ|Sₙ₋ₖ₋₂, . . . , Sₙ₋₁), is calculated ratio having the form:

$$\frac{\# of 〈 {S}_{n - k - 2} , … , {S}_{n - 1} , {M}_{n} 〉}{\begin{matrix}\# of 〈 {S}_{n - k - 2} , … , {S}_{n - 1} , {M}_{n} 〉 + \\ \# of 〈 {S}_{n - k - 2} , … , {S}_{n - 1} , {U}_{n} 〉\end{matrix}}$$

[0244] The calculation may additionally implement a smoothing of the counts by applying a prior distribution. In one embodiment, the prior distribution is a uniform prior as in Laplace smoothing. As an example of this, a constant is added to the numerator and another constant (e.g., twice the constant in the numerator) is added to the denominator of the above equation. In other embodiments, an algorithmic technique such as Knesser-Ney smoothing is used.

[0245] In the illustration, the above denoted formulas are applied to the test methylation state vector 505 covering sites 23-26. Once the calculated probabilities 515 are completed, the analytics system calculates 430 a p-value score 525 that sums the probabilities that are less than or equal to the probability of possibility of methylation state vector matching the test methylation state vector 505.

[0246] In one embodiment, the computational burden of calculating probabilities and/or p-value scores may be further reduced by caching at least some calculations. For example, the analytic system may cache in transitory or persistent memory calculations of probabilities for possibilities of methylation state vectors (or windows thereof). If other fragments have the same CpG sites, caching the possibility probabilities allows for efficient calculation of p-value scores without needing to re-calculate the underlying possibility probabilities. Equivalently, the analytics system may calculate p-value scores for each of the possibilities of methylation state vectors associated with a set of CpG sites from vector (or window thereof). The analytics system may cache the p-value scores for use in determining the p-value scores of other fragments including the same CpG sites. Generally, the p-value scores of possibilities of methylation state vectors having the same CpG sites may be used to determine the p-value score of a different one of the possibilities from the same set of CpG sites.

### Sliding Window

[0247] In one embodiment, the analytics system uses 435 a sliding window to determine possibilities of methylation state vectors and calculate p-values. Rather than enumerating possibilities and calculating p-values for entire methylation state vectors, the analytics system enumerates possibilities and calculates p-values for only a window of sequential CpG sites, where the window is shorter in length (of CpG sites) than at least some fragments (otherwise, the window would serve no purpose). The window length may be static, user determined, dynamic, or otherwise selected.

[0248] In calculating p-values for a methylation state vector larger than the window, the window identifies the sequential set of CpG sites from the vector within the window starting from the first CpG site in the vector. The analytic system calculates a p-value score for the window including the first CpG site. The analytics system then “slides” the window to the second CpG site in the vector, and calculates another p-value score for the second window. Thus, for a window size l and methylation vector length m, each methylation state vector will generate m-l+1 p-value scores. After completing the p-value calculations for each portion of the vector, the lowest p-value score from all sliding windows is taken as the overall p-value score for the methylation state vector. In another embodiment, the analytics system aggregates the p-value scores for the methylation state vectors to generate an overall p-value score.

[0249] Using the sliding window helps to reduce the number of enumerated possibilities of methylation state vectors and their corresponding probability calculations that would otherwise need to be performed. Example probability calculations are shown in FIG. 5, but generally the number of possibilities of methylation state vectors increases exponentially by a factor of 2 with the size of the methylation state vector. To give a realistic example, it is possible for fragments to have upwards of 54 CpG sites. Instead of computing probabilities for 2 54 (1.8×10\hat{ }16) possibilities to generate a single p-value, the analytics system can instead use a window of size 5 (for example) which results in 50 p-value calculations for each of the 50 windows of the methylation state vector for that fragment. Each of the 50 calculations enumerates 2 5 (32) possibilities of methylation state vectors, which total results in 50×2\hat{ }5 (1.6×10\hat{ }3) probability calculations. This results in a vast reduction of calculations to be performed, with no meaningful hit to the accurate identification of anomalous fragments. This additional step can also be applied when validating 340 the control group with the validation group's methylation state vectors.

### Identifying Fragments Indicative of Cancer

[0250] The analytics system identifies 450 DNA fragments indicative of cancer from the filtered set of anomalously methylated fragments.

### Hypomethylated and Hypermethylated Fragments

[0251] According to a first method, the analytics system may identify DNA fragments that are deemed hypomethylated or hypermethylated as fragments indicative of cancer from the filtered set of anomalously methylated fragments. Hypomethylated and hypermethylated fragments can be defined as fragments of a certain length of CpG sites (e.g., more than 3, 4, 5, 6, 7, 8, 9, 10, etc.) with a high percentage of methylated CpG sites (e.g., more than 80%, 85%, 90%, or 95%, or any other percentage within the range of 50%-100%) or a high percentage of unmethylated CpG sites (e.g., more than 80%, 85%, 90%, or 95%, or any other percentage within the range of 50%-100%).

### Probabilistic Models

[0252] According to a method described herein, the analytics system identifies fragments indicative of cancer utilizing probabilistic models of methylation patterns fitted to each cancer type and non-cancer type. The analytics system calculates log-likelihood ratios for a sample using DNA fragments in the genomic regions considering the various cancer types with the fitted probabilistic models for each cancer type and non-cancer type. The analytics system may determine a DNA fragment to be indicative of cancer based on whether at least one of the log-likelihood ratios considered against the various cancer types is above a threshold value.

[0253] In one embodiment of partitioning the genome, the analytics system partitions the genome into regions by multiple stages. In a first stage, the analytics system separates the genome into blocks of CpG sites. Each block is defined when there is a separation between two adjacent CpG sites that exceeds some threshold, e.g., greater than 200 bp, 300 bp, 400 bp, 500 bp, 600 bp, 700 bp, 800 bp, 900 bp, or 1,000 bp. From each block, the analytics system subdivides at a second stage each block into regions of a certain length, e.g., 500 bp, 600 bp, 700 bp, 800 bp, 900 bp, 1,000 bp, 1,100 bp, 1,200 bp, 1,300 bp, 1,400 bp, or 1,500 bp. The analytics system may further overlap adjacent regions by a percentage of the length, e.g., 10%, 20%, 30%, 40%, 50%, or 60%.

[0254] The analytics system analyzes sequence reads derived from DNA fragments for each region. The analytics system may process samples from tissue and/or high-signal cfDNA. High-signal cfDNA samples may be determined by a binary classification model, by cancer stage, or by another metric.

[0255] For each cancer type and non-cancer, the analytics system fits a separate probabilistic model for fragments. In one example, each probabilistic model is mixture model comprising a combination of a plurality of mixture components with each mixture component being an independent-sites model where methylation at each CpG site is assumed to be independent of methylation statuses at other CpG sites.

[0256] In alternate embodiments, calculation is performed with respect to each CpG site. Specifically, a first count is determined that is the number of cancerous samples (cancer_count) that include an anomalously methylated DNA fragment overlapping that CpG, and a second count is determined that is the total number of samples containing fragments overlapping that CpG (total) in the set. Genomic regions can be selected based on the numbers, for example, based on criteria positively correlated to the number of cancerous samples (cancer_count) that include a DNA fragment overlapping that CpG, and inversely correlated to the total number of samples containing fragments overlapping that CpG (total) in the set.

[0257] Cancer of various types having different TOO can be selected from the group consisting of: breast cancer, uterine cancer, cervical cancer, ovarian cancer, bladder cancer, urothelial cancer of renal pelvis, renal cancer other than urothelial, prostate cancer, anorectal cancer, anal cancer, colorectal cancer, hepatobiliary cancer arising from hepatocytes, hepatobiliary cancer arising from cells other than hepatocytes, liver/bile-duct cancer, esophageal cancer, pancreatic cancer, squamous cell cancer of the upper gastrointestinal tract, upper gastrointestinal cancer other than squamous, head and neck cancer, lung cancer, lung adenocarcinoma, small cell lung cancer, squamous cell lung cancer and cancer other than adenocarcinoma or small cell lung cancer, neuroendocrine cancer, melanoma, thyroid cancer, sarcoma, plasma cell neoplasm, multiple myeloma, myeloid neoplasm, lymphoma, and leukemia.

[0258] In some embodiments, various cancer types can be classified and labeled using classification methods available in the art, such as the International Classification of Diseases for Oncology (ICD-O-3) (codes.iarc.fr) or the Surveillance, Epidemiology, and End Results Program (SEER) (seer.cancer.gov). In other embodiments, cancer types are classified in three orthogonal codes, (i) topographical codes, (ii) morphological codes, or (iii) behavioral codes. Under behavioral codes, benign tumor is 0, uncertain behavior is 1, carcinoma in situ is 2, malignant, primary site is 3 and malignant, metastatic site is 6.

[0259] In some embodiments, a cancer TOO can be selected from a group defined by the guideline that will be used to stage a detected cancer. For example, the reference, Amin, M. B., Edge, S., Greene, F., Byrd, D. R., Brookland, R. K., Washington, M. K., Gershenwald, J. E., Compton, C. C., Hess, K. R., Sullivan, D. C., Jessup, J. M., Brierley, J. D., Gaspar, L. E., Schilsky, R. L., Balch, C. M., Winchester, D. P., Asare, E. A., Madera, M., Gress, D. M., Meyer, L. R. (Eds.), AJCC Cancer Staging Manual, 8th edition, Springer, 2017, identifies groups of different cancers that are staged together following standard guidelines, typically, such staging is a next step in cancer management following its detection and diagnosis.

[0260] The analytics system can further calculate log-likelihood ratios (“R”) for a fragment indicating a likelihood of the fragment being indicative of cancer considering the various cancer types with the fitted probabilistic models for each cancer type and non-cancer type, or for a cancer TOO. The two probabilities may be taken from probabilistic models fitted for each of the cancer types and the non-cancer type, the probabilistic models defined to calculate a likelihood of observing a methylation pattern on a fragment given each of the cancer types and the non-cancer type. For example, the probabilistic models may be defined fitted for each of the cancer types and the non-cancer type.

### Selection of Genomic Regions Indicative of Cancer

[0261] The analytics system identifies 460 genomic regions indicative of cancer. To identify these informative regions, the analytics system calculates an information gain for each genomic region or more specifically each CpG site that describes an ability to distinguish between various outcomes.

[0262] A method for identifying genomic regions capable of distinguishing between cancer type and non-cancer type utilizes a trained classification model that can be applied on the set of anomalously methylated DNA molecules or fragments corresponding to, or derived from a cancerous or non-cancerous group. The trained classification model can be trained to identify any condition of interest that can be identified from the methylation state vectors.

[0263] In one embodiment, the trained classification model is a binary classifier trained based on methylation states for cfDNA fragments or genomic sequences obtained from a subject cohort with cancer or a cancer TOO, and a healthy subject cohort without cancer, and is then used to classify a test subject probability of having cancer, a cancer TOO, or not having cancer, based on anomalously methylation state vectors. In other embodiments, different classifiers may be trained using subject cohorts known to have particular cancer (e.g., breast, lung, prostrate, etc.); known to have cancer of particular TOO where the cancer is believed to originate; or known to have different stages of particular cancer (e.g., breast, lung, prostrate, etc.). In these embodiments, different classifiers may be trained using sequence reads obtained from samples enriched for tumor cells from subject cohorts known to have particular cancer (e.g., breast, lung, prostrate, etc.). Each genomic region's ability to distinguish between cancer type and non-cancer type in the classification model is used to rank the genomic regions from most informative to least informative in classification performance. The analytics system may identify genomic regions from the ranking according to information gain in classification between non-cancer type and cancer type.

Computing Information Gain from Hypomethylated and Hypermethylated Fragments Indicative of Cancer

[0264] With fragments indicative of cancer, the analytics system may train a classifier according to a process 600 illustrated in FIG. 6A, according to an embodiment. The process 600 accesses two training groups of samples a non-cancer group and a cancer group and obtains 605 a non-cancer set of methylation state vectors and a cancer set of methylation state vectors comprising anomalously methylated fragments, e.g., via step 440 from the process 400.

[0265] The analytics system determines 610, for each methylation state vector, whether the methylation state vector is indicative of cancer. Here, fragments indicative of cancer may be defined as hypermethylated or hypomethylated fragments determined if at least some number of CpG sites have a particular state (methylated or unmethylated, respectively) and/or have a threshold percentage of sites that are the particular state (again, methylated or unmethylated, respectively). In one example, cfDNA fragments are identified as hypomethylated or hypermethylated, respectively, if the fragment overlaps at least 5 CpG sites, and at least 80%, 90%, or 100% of its CpG sites are methylated or at least 80%, 90%, or 100% are unmethylated.

[0266] In an alternate embodiment, the process considers portions of the methylation state vector and determines whether the portion is hypomethylated or hypermethylated, and may distinguish that portion to be hypomethylated or hypermethylated. This alternative resolves missing methylation state vectors which are large in size but contain at least one region of dense hypomethylation or hypermethylation. This process of defining hypomethylation and hypermethylation can be applied in step 450 of FIG. 4. In another embodiment, the fragments indicative of cancer may be defined according to likelihoods outputted from trained probabilistic models.

[0267] In one embodiment, the analytics system generates 620 a hypomethylation score (P_{hypo}) and a hypermethylation score (P_{hyper}) CpG site in the genome. To generate either score at a hyper, given CpG site, the classifier takes four counts at that CpG site (1) count of (methylations state) vectors of the cancer set labeled hypomethylated that overlap the CpG site; (2) count of vectors of the cancer set labeled hypermethylated that overlap the CpG site; (3) count of vectors of the non-cancer set labeled hypomethylated that overlap the CpG site; and (4) count of vectors of the non-cancer set labeled hypermethylated that overlap the CpG site. Additionally, the process may normalize these counts for each group to account for variance in group size between the non-cancer group and the cancer group. In alternative embodiments wherein fragments indicative of cancer are more generally used, the scores may be more broadly defined as counts of fragments indicative of cancer at each genomic region and/or CpG site.

[0268] In one embodiment, to generate 620 the hypomethylation score at a given CpG site, the process takes a ratio of (1) over (1) summed with (3). Similarly, the hypermethylation score is calculated by taking a ratio of (2) over (2) and (4). Additionally, these ratios may be calculated with an additional smoothing technique as discussed above. The hypomethylation score and the hypermethylation score relate to an estimate of cancer probability given the presence of hypomethylation or hypermethylation of fragments from the cancer set.

[0269] The analytics system generates 630 an aggregate hypomethylation score and an aggregate hypermethylation score for each anomalous methylation state vector. The aggregate hyperand hypo methylation scores, are determined based on the hyper and hypo methylation scores of the CpG sites in the methylation state vector. In one embodiment, the aggregate hyper and hypo methylation scores are assigned as the largest hyper and hypo methylation scores of the sites in each state vector, respectively. However, in alternate embodiments, the aggregate scores could be based on means, medians, or other calculations that use the hyper/hypo methylation scores of the sites in each vector.

[0270] The analytics system ranks 640 all of that subject's methylation state vectors by their aggregate hypomethylation score and by their aggregate hypermethylation score, resulting in two rankings per subject. The process selects aggregate hypomethylation scores from the hypomethylation ranking and aggregate hypermethylation scores from the hypermethylation ranking. With the selected scores, the classifier generates 650 a single feature vector for each subject. In one embodiment, the scores selected from either ranking are selected with a fixed order that is the same for each generated feature vector for each subject in each of the training groups. As an example, in one embodiment the classifier selects the first, the second, the fourth, and the eighth aggregate hyper methylation score, and similarly for each aggregate hypo methylation score, from each ranking and writes those scores in the feature vector for that subject.

[0271] The analytics system trains 660 a binary classifier to distinguish feature vectors between the cancer and non-cancer training groups. Generally, any one of a number of classification techniques may be used. In one embodiment the classifier is a non-linear classifier. In a specific embodiment, the classifier is a non-linear classifier utilizing a L2-regularized kernel logistic regression with a Gaussian radial basis function (RBF) kernel.

[0272] Specifically, in one embodiment, the number of non-cancer samples or different cancer type(s) (nₒₜₕₑᵣ) and the number of cancer samples or cancer type(s) (n_{cancer}) having an anomalously methylated fragment overlapping a CpG site are counted. Then the probability that a sample is cancer is estimated by a score (“S”) that positively correlates to and inversely correlated to nₒₜₕₑᵣ. The score can be calculated using the equation: (n_{cancer}+1)/(n_{cancer}+nₒₜₕₑᵣ+2) or (n_{cancer})/(n_{cancer}+nₒₜₕₑᵣ). The analytics system computes 670 an information gain for each cancer type and for each genomic region or CpG site to determine whether the genomic region or CpG site is indicative of cancer. The information gain is computed for training samples with a given cancer type compared to all other samples. For example, two random variables ‘anomalous fragment’ (‘AF’) and ‘cancer type’ (‘CT’) are used. In on embodiment, AF is a binary variable indicating whether there is an anomalous fragment overlapping a given CpG site in a given samples as determined for the anomaly score/feature vector above. CT is a random variable indicating whether the cancer is of a particular type. The analytics system computes the mutual information with respect to CT given AF. That is, how many bits of information about the cancer type are gained if it is known whether there is an anomalous fragment overlapping a particular CpG site.

[0273] For a given cancer type, the analytics system uses this information to rank CpG sites based on how cancer specific they are. This procedure is repeated for all cancer types under consideration. If a particular region is commonly anomalously methylated in training samples of a given cancer but not in training samples of other cancer types or in healthy training samples, then CpG sites overlapped by those anomalous fragments will tend to have high information gains for the given cancer type. The ranked CpG sites for each cancer type are greedily added (selected) to a selected set of CpG sites based on their rank for use in the cancer classifier.

Computing Pairwise Information Gain from Fragments Indicative of Cancer Identified from Probabilistic Models

[0274] With fragments indicative of cancer identified according to a method described herein, the analytics may identify genomic regions according to the process 680 in FIG. 6B. The analytics system defines 690 a feature vector for each sample, for each region, for each cancer type by a count of DNA fragments that have a calculated log-likelihood ratio that the fragment is indicative of cancer above a plurality of thresholds, wherein each count is a value in the feature vector. In one embodiment, the analytics system counts the number of fragments present in a sample at a region for each cancer type with log-likelihood ratios above one or a plurality of possible threshold values. The analytics system defines a feature vector for each sample, by a count of DNA fragments for each genomic region for each cancer type that provides a calculated log-likelihood ratio for the fragment above a plurality of thresholds, wherein each count is a value in the feature vector. The analytics system uses the defined feature vectors to calculate an informative score for each genomic region describing that genomic region's ability to distinguish between each pair of cancer types. For each pair of cancer types, the analytics system ranks regions based on the informative scores. The analytics system may select regions based on the ranking according to informative scores.

[0275] The analytics system calculates 695 an informative score for each region describing that region's ability to distinguish between each pair of cancer types. For each pair of distinct cancer types, the analytics system may specify one type as a positive type and the other as a negative type. In one embodiment, a region's ability to distinguish between the positive type and the negative type is based on mutual information, calculated using the estimated fraction of cfDNA samples of the positive type and of the negative type for which the feature would be expected to be non-zero in the final assay, i.e., at least one fragment of that tier that would be sequenced in a targeted methylation assay. Those fractions are estimated using the observed rates at which the feature occurs in healthy cfDNA, and in high-signal cfDNA and/or tumor samples of each cancer type. For example, if a feature occurs frequently in healthy cfDNA, then it will also be estimated to occur frequently in cfDNA of any cancer type, and would likely result in a low informative score. The analytics system may choose a certain number of regions for each pair of cancer types from the ranking, e.g., 1024.

[0276] In additional embodiments, the analytics system further identifies predominantly hypermethylated or hypomethylated regions from the ranking of regions. The analytics system may load the set of fragments in the positive type(s) for a region that was identified as informative. The analytics system, from the loaded fragments, evaluates whether the loaded fragments are predominantly hypermethylated or hypomethylated. If the loaded fragments are predominately hypermethylated or hypomethylated, the analytics system may select probes corresponding to the predominant methylation pattern. If the loaded fragments are not predominantly hypermethylated or hypomethylated, the analytics system may use a mixture of probes for targeting both hypermethylation and hypomethylation. The analytics system may further identify a minimal set of CpG sites that overlap more than some percentage of the fragments.

[0277] In other embodiments, the analytics system, after ranking the regions based on informative scores, labels each region with the lowest informative ranking across all pairs of cancer types. For example, if a region was the 10th-most-informative region for distinguishing breast from lung, and the 5th-most-informative for distinguishing breast from colorectal, then it would be given an overall label of “5”. The analytics system may design probes starting with the lowest-labeled regions while adding regions to the panel, e.g., until the panel's size budget has been exhausted.

### Off Target Genomic Regions

[0278] In some embodiments, probes targeting selected genomic regions are further filtered 475 based on the number of their off-target regions. This is for screening probes that pull down too many cfDNA fragments corresponding to, or derived from, off-target genomic regions. Exclusion of probes having many off-target regions can be valuable by decreasing off-target rates and increasing target coverage for a given amount of sequencing.

[0279] An off-target genomic region is a genomic region that has sufficient homology to a target genomic region, such that DNA molecules or fragments derived from off-target genomic regions are hybridized to and pulled down by a probe designed to hybridize to a target genomic region. An off-target genomic region can be a genomic region (or a converted sequence of that same region) that aligns to a probe along at least 35 bp, 40 bp, 45 bp, 50 bp, 60 bp, 70 bp, or 80 bp with at least an 80%, 85%, 90%, 95%, or 97% match rate. In one embodiment, an off-target genomic region is a genomic region (or a converted sequence of that same region) that aligns to a probe along at least 45 bp with at least a 90% match rate. Various methods known in the art can be adopted to screen off-target genomic regions.

[0280] Exhaustively searching the genome to find all off-target genomic regions can be computationally challenging. In one embodiment, a k-mer seeding strategy (which can allow one or more mismatches) is combined to local alignment at the seed locations. In this case, exhaustive searching of good alignments can be guaranteed based on k-mer length, number of mismatches allowed, and number of k-mer seed hits at a particular location. This requires doing dynamic programing local alignment at a large number of locations, so this approach is highly optimized to use vector CPU instructions (e.g., AVX2, AVX512) and also can be parallelized across many cores within a machine and also across many machines connected by a network. A person of ordinary skill will recognize that modifications and variations of this approach can be implemented for the purpose of identifying off-target genomic regions.

[0281] In some embodiments, probes having sequence homology with off-target genomic regions, or DNA molecules corresponding to, or derived from off-target genomic regions comprising more than a threshold number are excluded (or filtered) from the panel. For example, probes having sequence homology with off-target genomic regions, or DNA molecules corresponding to, or derived from off-target genomic regions from more than 30, more than 25, more than 20, more than 18, more than 15, more than 12, more than 10, or more than 5 off-target regions are excluded.

[0282] In some embodiments, probes are divided into 2, 3, 4, 5, 6, or more separate groups depending on the numbers of off-target regions. For example, probes having sequence homology with no off-target regions or DNA molecules corresponding to, or derived from off-target regions are assigned to high-quality group, probes having sequence homology with 1-18 off-target regions or DNA molecules corresponding to, or derived from 1-18 off-target regions, are assigned to low-quality group, and probes having sequence homology with more than 19 off-target regions or DNA molecules corresponding to, or derived from 19 off-target regions, are assigned to poor-quality group. Other cut-off values can be used for the grouping.

[0283] In some embodiments, probes in the lowest quality group are excluded. In some embodiments, probes in groups other than the highest-quality group are excluded. In some embodiments, separate panels are made for the probes in each group. In some embodiments, all the probes are put on the same panel, but separate analysis is performed based on the assigned groups.

[0284] In some embodiments, a panel comprises a larger number of high-quality probes than the number of probes in lower groups. In some embodiments, a panel comprises a smaller number of poor-quality probes than the number of probes in other group. In some embodiments, more than 95%, 90%, 85%, 80%, 75%, or 70% of probes in a panel are high-quality probes. In some embodiments, less than 35%, 30%, 20%, 10%, 5%, 4%, 3%, 2% or 1% of the probes in a panel are low-quality probes. In some embodiments, less than 5%, 4%, 3%, 2% or 1% of the probes in a panel are poor-quality probes. In some embodiments, no poor-quality probes are included in a panel.

[0285] In some embodiments, probes having below 50%, below 40%, below 30%, below 20%, below 10% or below 5% are excluded. In some embodiments, probes having above 30%, above 40%, above 50%, above 60%, above 70%, above 80%, or above 90% are selectively included in a panel.

### Methods of Using Cancer Assay Panel

[0286] In yet another aspect, methods of using a cancer assay panel are provided. The methods can comprise steps of treating DNA molecules or fragments to convert unmethylated cytosines to uracils (e.g., using bisulfite treatment), applying a cancer panel (as described herein) to the converted DNA molecules or fragments, enriching a subset of converted DNA molecules or fragments that hybridize (or bind) to the probes in the panel, and detecting the nucleic acid sequence and determining the methylation status thereof, for example, by sequencing the enriched cfDNA fragments. In some embodiments, the sequence reads can be compared to a reference genome (e.g., a human reference genome), allowing for identification of methylation states at a plurality of CpG sites within the DNA molecules or fragments and thus provide information relevant to detecting cancer. While the present disclosure pays particular attention to sequencing based approaches for detecting nucleic acids and determining methylation status thereof (via sequence reads), the disclosure is broad enough to encompass other methods for detecting nucleic acids and determining methylation status thereof (such as other methylation-aware sequencing approaches (e.g., as described in WO 2014/043763, which is incorporated herein by reference), DNA microarrays (e.g., with labeled probes adhered or conjugated to a solid surface or DNA array chip), etc.

### Analysis of Sequence Reads

[0287] In some embodiments, the sequence reads may be aligned to a reference genome using known methods in the art to determine alignment position information. The alignment position information may indicate a beginning position and an end position of a region in the reference genome that corresponds to a beginning nucleotide base and end nucleotide base of a given sequence read. Alignment position information may also include sequence read length, which can be determined from the beginning position and end position. A region in the reference genome may be associated with a gene or a segment of a gene.

[0288] In various embodiments, a sequence read is comprised of a read pair denoted as R₁ and R₂. For example, the first read R₁ may be sequenced from a first end of a nucleic acid fragment whereas the second read R₂ may be sequenced from the second end of the nucleic acid fragment. Therefore, nucleotide base pairs of the first read R₁ and second read R₂ may be aligned consistently (e.g., in opposite orientations) with nucleotide bases of the reference genome. Alignment position information derived from the read pair R₁ and R₂ may include a beginning position in the reference genome that corresponds to an end of a first read (e.g., R₁) and an end position in the reference genome that corresponds to an end of a second read (e.g., R₂). In other words, the beginning position and end position in the reference genome represent the likely location within the reference genome to which the nucleic acid fragment corresponds. An output file having SAM (sequence alignment map) format or BAM (binary alignment map) format may be generated and output for further analysis.

[0289] From the sequence reads, the location and methylation state for each of CpG site may be determined based on alignment to a reference genome. Further, a methylation state vector for each fragment may be generated specifying a location of the fragment in the reference genome (e.g., as specified by the position of the first CpG site in each fragment, or another similar metric), a number of CpG sites in the fragment, and the methylation state of each CpG site in the fragment whether methylated (e.g., denoted as M), unmethylated (e.g., denoted as U), or indeterminate (e.g., denoted as I). The methylation state vectors may be stored in temporary or persistent computer memory for later use and processing. Further, duplicate reads or duplicate methylation state vectors from a single subject may be removed. In an additional embodiment, it may be determined that a certain fragment has one or more CpG sites that have an indeterminate methylation status. Such fragments may be excluded from later processing or selectively included where downstream data model accounts for such indeterminate methylation statuses.

[0290] FIG. 7B is an illustration of the process 100 of FIG. 7A of sequencing a cfDNA fragment to obtain a methylation state vector, according to an embodiment. As an example, the analytics system takes a cfDNA fragment 112. In this example, the cfDNA fragment 112 contains three CpG sites. As shown, the first and third CpG sites of the cfDNA fragment 112 are methylated 114. During the treatment step 120, the cfDNA fragment 112 is converted to generate a converted cfDNA fragment 122. During the treatment 120, the second CpG site which was unmethylated has its cytosine converted to uracil. However, the first and third CpG sites are not convert.

[0291] After conversion, a sequencing library 130 is prepared and sequenced 140 generating a sequence read 142. The analytics system aligns 150 the sequence read 142 to a reference genome 144. The reference genome 144 provides the context as to what position in a human genome the fragment cfDNA originates from. In this simplified example, the analytics system aligns 150 the sequence read such that the three CpG sites correlate to CpG sites 23, 24, and 25 (arbitrary reference identifiers used for convenience of description). The analytics system thus generates information both on methylation status of all CpG sites on the cfDNA fragment 112 and which to position in the human genome the CpG sites map. As shown, the CpG sites on sequence read 142 which were methylated are read as cytosines. In this example, the cytosine's appear in the sequence read 142 only in the first and third CpG site which allows one to infer that the first and third CpG sites in the original cfDNA fragment were methylated. The second CpG site is read as a thymine (U is converted to T during the sequencing process), and thus, one can infer that the second CpG site was unmethylated in the original cfDNA fragment. With these two pieces of information, the methylation status and location, the analytics system generates 160 a methylation state vector 152 for the fragment cfDNA 112. In this example, the resulting methylation state vector 152 is <M₂₃, U₂₄, M₂₅>, wherein M corresponds to a methylated CpG site, U corresponds to an unmethylated CpG site, and the subscript numbers correspond to positions of each CpG site in the reference genome.

[0292] FIGS. 8A & 8B show three graphs of data validating consistency of sequencing from a control group. The first graph 170 shows conversion accuracy of conversion of unmethylated cytosines to uracil (step 120) on cfDNA fragment obtained from a test sample across subjects in varying stages of cancer—stage 0, stage I, stage II, stage III, stage IV, and non-cancer. As shown, there was uniform consistency in converting unmethylated cytosines on cfDNA fragments into uracils. There was an overall conversion accuracy of 99.47% with a precision at ±0.024%. The second graph 180 compares coverage (depth of sequencing) over varying stages of cancer. Counting only sequence reads that were confidently mapped to a reference genome, the mean coverage over all groups was 34. The third graph 190 shows the concentration of cfDNA per sample across varying stages of cancer.

### Detection of Cancer

[0293] Sequence reads obtained by the methods provided herein are further processed by automated algorithms. For example, the analytics system is used to receive sequencing data from a sequencer and perform various aspects of processing as described herein. The analytics system can be one of a personal computer (PC), a desktop computer, a laptop computer, a notebook, a tablet PC, a mobile device. A computing device can be communicatively coupled to the sequencer through a wireless, wired, or a combination of wireless and wired communication technologies. Generally, the computing device is configured with a processor and memory storing computer instructions that, when executed by the processor, cause the processor to perform steps as described in the remainder of this document. Generally, the amount of genetic data and data derived therefrom is sufficiently large, and the amount of computational power required so great, so as to be impossible to be performed on paper or by the human mind alone.

[0294] The clinical interpretation of methylation status of targeted genomic regions is a process that includes classifying the clinical effect of each or a combination of the methylation status and reporting the results in ways that are meaningful to a medical professional. The clinical interpretation can be based on comparison of the sequence reads with database specific to cancer or non-cancer subjects, and/or based on numbers and types of the cfDNA fragments having cancer-specific methylation patterns identified from a sample. In some embodiments, targeted genomic regions are ranked or classified based on their likeness to be differentially methylated in cancer samples, and the ranks or classifications are used in the interpretation process. The ranks and classifications can include (1) the type of clinical effect, (2) the strength of evidence of the effect, and (3) the size of the effect. Various methods for clinical analysis and interpretation of genome data can be adopted for analysis of the sequence reads. In some other embodiments, the clinical interpretation of the methylation states of such differentially methylated regions can be based on machine learning approaches that interpret a current sample based on a classification or regression method that was trained using the methylation states of such differentially methylated regions from samples from cancer and non-cancer patients with known cancer status, cancer type, cancer stage, TOO, etc.

[0295] The clinically meaning information can include the presence or absence of cancer generally, presence or absence of certain types of cancers, cancer stage, or presence or absence of other types of diseases. In some embodiments, the information relates to a presence or absence of one or more cancer types, selected from the group consisting of breast cancer, endometrial cancer, cervical cancer, ovarian cancer, bladder cancer, urothelial cancer of renal pelvis, renal cell carcinoma, prostate cancer, anorectal cancer, colorectal cancer, hepatocellular cancer, cholangiocarcinoma and hepatobiliary cancer, pancreatic cancer, upper GI adenocarcinoma, esophageal squamous cell cancer, head and neck cancer, squamous cell lung cancer, lung adenocarcinoma, small cell lung cancer, neuroendocrine cancer, melanoma, thyroid cancer, sarcoma, multiple myeloma, myeloid neoplasm, lymphoma, and leukemia. In some embodiments, the samples are not cancerous and are from subjects having white blood cell clonal expansion or no cancer.

### Cancer Classifier

[0296] In some examples, the assay panel described herein can be used with a cancer type classifier that predicts a disease state for a sample, such as a cancer or non-cancer prediction, a tissue of origin prediction, and/or an indeterminate prediction. In some examples, the cancer type classifier can generate features based on sequence reads by taking into account methylated or unmethylated fragments of DNA at certain genomic areas of interest. For instance, if the cancer type classifier determines that a methylation pattern at a fragment resembles that of a certain cancer type, then the cancer type classifier can set a feature for that fragment as 1, and otherwise if no such fragment is present, then the feature can be set as 0. In this way, the cancer type classifier can produce a set of binary features (merely by way of example, 30,000 features) for each sample. Further, in some examples, all or a portion of the set of binary features for a sample can be input into the cancer type classifier to provide a set of probability scores, such as one probability score per cancer type class and for a non-cancer type class. Furthermore, in some examples, the cancer type classifier can incorporate or otherwise be used in conjunction with thresholding to determine whether a sample is to be called as cancer or non-cancer, and/or indeterminate thresholding to reflect confidence in a specific TOO call. Such methods are described further below.

[0297] To train the cancer type classifier, the analytics system (e.g., analytics system 800) can obtain a set of training samples. In some examples, each training sample includes fragment file(s) (e.g., file containing sequence read data), a label corresponding to a type of cancer (TOO) or non-cancer status of the sample, and/or sex of the individual of the sample. The analytics system can utilize the training set to train the cancer type classifier to predict the disease state of the sample.

[0298] In some examples, for training, the analytics system divides the genome (e.g., whole genome) or a subset of the genome (e.g., targeted methylation regions) into regions. Merely by way of example, portions of the genome can be separated into “blocks” of CpGs, whereby a new block begins whenever there is a separation between nearest-neighbor CpGs is at least a minimum separation distance (e.g., at least 500 bp). Further, in some examples, each block can be divided into 1000 bp regions and positioned such that neighboring regions have a certain amount (e.g., 50% or 500 bp) of overlap.

[0299] Furthermore, in some examples, the analytics system can split the training set into K subsets or folds to be used in a K-fold cross-validation. In some examples, the folds can be balanced for cancer/non-cancer status, tissue of origin, cancer stage, age (e.g., grouped in 10 yr buckets), and/or smoking status. In some examples, the training set is split into 5 folds, whereby 5 separate classifiers are trained, in each case training on ⅘ of the training samples and using the remaining ⅕ for validation.

[0300] During training with the training set, the analytics system can, for each cancer type (and for healthy cfDNA), fit a probabilistic model to the fragments deriving from the samples of that type. As used herein a “probabilistic model” is any mathematical model capable of assigning a probability to a sequence read based on methylation status at one or more sites on the read. During training, the analytics system fits sequence reads derived from one or more samples from subjects having a known disease and can be used to determine sequence reads probabilities indicative of a disease state utilizing methylation information or methylation state vectors. In particular, in some cases, the analytics system determines observed rates of methylation for each CpG site within a sequence read. The rate of methylation represents a fraction or percentage of base pairs that are methylated within a CpG site. The trained probabilistic model can be parameterized by products of the rates of methylation. In general, any known probabilistic model for assigning probabilities to sequence reads from a sample can be used. For example, the probabilistic model can be a binomial model, in which every site (e.g., CpG site) on a nucleic acid fragment is assigned a probability of methylation, or an independent sites model, in which each CpG's methylation is specified by a distinct methylation probability with methylation at one site assumed to be independent of methylation at one or more other sites on the nucleic acid fragment.

[0301] In some examples, the probabilistic model is a Markov model, in which the probability of methylation at each CpG site is dependent on the methylation state at some number of preceding CpG sites in the sequence read, or nucleic acid molecule from which the sequence read is derived. See, e.g., U.S. patent application Ser. No. 16/352,602, entitled “Anomalous Fragment Detection and Classification,” and filed Mar. 13, 2019, which is incorporated by reference in its entirety herein and can be used for various embodiments.

[0302] In some examples, the probabilistic model is a “mixture model” fitted using a mixture of components from underlying models. For example, in some embodiments, the mixture components can be determined using multiple independent sites models, where methylation (e.g., rates of methylation) at each CpG site is assumed to be independent of methylation at other CpG sites. Utilizing an independent sites model, the probability assigned to a sequence read, or the nucleic acid molecule from which it derives, is the product of the methylation probability at each CpG site where the sequence read is methylated and one minus the methylation probability at each CpG site where the sequence read is unmethylated. In accordance with this example, the analytics system determines rates of methylation of each of the mixture components. The mixture model is parameterized by a sum of the mixture components each associated with a product of the rates of methylation. A probabilistic model Pr of n mixture components can be represented as:

$$Pr ( fragment \vert \{ {β}_{k i} , {f}_{k} \} ) = {\sum }_{k = 1}^{n} {f}_{k} {\prod }_{i} {{β}_{k i}^{{m}_{i}} ( 1 - {β}_{k i} )}^{1 - {m}_{i}}$$

For an input fragment, m₁∈{0, 1} represents the fragment's observed methylation status at position i of a reference genome, with 0 indicating unmethylation and 1 indicating methylation. A fractional assignment to each mixture component k is fₖ, where fₖ≥0 and Σₖ₌₁ⁿfₖ=1. The probability of methylation at position i in a CpG site of mixture component k is βₖᵢ. Thus, the probability of unmethylation is 1−βₖᵢ. The number of mixture components n can be 1, 2, 3, 4, 5, 6, 7, 8, 9, 10, etc.

[0303] In some examples, the analytics system fits the probabilistic model using maximum-likelihood estimation to identify a set of parameters {βₖᵢ, fₖ} that maximizes the log-likelihood of all fragments deriving from a disease state, subject to a regularization penalty applied to each methylation probability with regularization strength r. The maximized quantity for N total fragments can be represented as:

$${\sum }_{j}^{N} ln ( P r ( fragmen {t}_{j} \vert \{ {β}_{k i} , {f}_{k} \} ) ) + r \cdot ln ( {β}_{k i} ( 1 - {β}_{k i} ) )$$

[0304] In some examples, the analytics system performs fits separately for each cancer type and for healthy cfDNA. As one of skill in the art would appreciate, other means can be used to fit the probabilistic models or to identify parameters that maximize the log-likelihood of all sequence reads derived from the reference samples. For example, in some examples, Bayesian fitting (using e.g., Markov chain Monte Carlo), in which each parameter is not assigned a single value but instead is associated to a distribution, is used. In some examples, gradient-based optimization, in which the gradient of the likelihood (or log-likelihood) with respect to the parameter values is used to step through parameter space towards an optimum, is used. In still some examples, expectation-maximization, in which a set of latent parameters (such as identities of the mixture component from which each fragment is derived) are set to their expected values under the previous model parameters, and then the model's parameters are assigned to maximize the likelihood conditional on the assumed values of those latent variables. The two-step process is then repeated until convergence.

[0305] Further, in some examples, the analytics system can generate features for each sample in the training set. For example, for each sample (regardless of label), in each region, for each cancer type, for each fragment, the analytics system can evaluate the log-likelihood ratio R with the fitted probabilistic models according to:

$${R}_{c ancertypeA} ( fragment ) ≡ ln ( \frac{Pr ( fragment \vert cancer type A )}{Pr ( fragment \vert healthy cfDNA )} )$$

Next, for each sample, for each region, for each cancer type, for each of a set of “tier” values, the analytics system can count the number of fragments with Rcancer type>tier and assign those counts as non-negative integer-valued features. For example, the tiers include threshold values of 1, 2, 3, 4, 5, 6, 7, 8, and 9, resulting in each region hosting 9 features per cancer type.

[0306] In some examples, the analytics system can select certain features for inclusion in a feature vector for each sample. For example, for each pair of distinct cancer types, the analytics system can specify one type as the “positive type” and the other as the “negative type” and rank the features by their ability to distinguish those types. In some cases, the ranking is based on mutual information calculated by the analytics system. For example, the mutual information can be calculated using the estimated fraction of samples of the positive type and negative type (e.g., cancer types A and B) for which the feature is expected to be nonzero in a resulting assay. For instance, if a feature occurs frequently in healthy cfDNA, the analytics system determines the feature is unlikely to occur frequently in cfDNA associated with various types of cancer. Consequently, the feature can be a weak measure in distinguishing between disease states. In calculating mutual information I, the variable X is a certain feature (e.g., binary) and variable Y represents a disease state, e.g., cancer type A or B:

$$I ( X ; Y ) = {\sum }_{y ∈ Y} {\sum }_{x ∈ X} p ( x , y ) log log ( \frac{p ( x , y )}{p ( x ) p ( y )} )$$

$$I \approx \frac{1}{2} ( p ( 1 \vert A ) \cdot log ( \frac{p ( 1 \vert A )}{\frac{1}{2} ( p ( 1 \vert A ) + p ( 1 \vert B ) )} ) + p ( 1 \vert B ) \cdot log ( \frac{p ( 1 \vert B )}{\frac{1}{2} ( p ( 1 \vert A ) p ( 1 \vert B ) )} ) )$$

$$p ( 1 \vert A ) = {f}_{A} + {f}_{H} - {f}_{H} {f}_{A}$$

The joint probability mass function of X and Y is p(x, y) and the marginal probability mass functions are p(x) and p(y). The analytics system can assume that feature absence is uninformative and either disease state is equally likely a priori, for example, p(Y=A)=p(Y=B)=0.5. The probability of observing (e.g., in cfDNA) a given binary feature of cancer type A is represented by p(1|A), where f_{A} is the probability of observing the feature in ctDNA samples from tumor (or high-signal cfDNA samples) associated with cancer type A, and f_{H} is the probability of observing the feature in a healthy or non-cancer cfDNA sample.

[0307] In some examples, only features corresponding to the positive type are included in the ranking, and only when those features' predicted rate of occurrence is greater in the positive type than in the negative type. For example, if “liver” is the positive type and “breast” is the negative type, then only “liver_x” features are considered, and only if their estimated occurrence in liver cfDNA is greater than their estimated occurrence in breast cfDNA. Further, in some examples, for each region, for each cancer type pair (including non-cancer as a negative type), the analytics system keeps only the best performing tier. Further, in some examples, the analytics system transforms feature values by binarization, whereby any feature value greater than 0 is set to 1, such that all features are either 0 or 1.

[0308] In some examples, the analytics system trains a multinomial logistic regression classifier on the training data for a fold, and generates predictions for the held-out data. For example, for each of the K folds, one logistic regression can be trained for each combination of hyperparameters. Such hyperparameters can include L2 penalty and/or topK (e.g., the number of high-ranking regions to keep per tissue type pair (including non-cancer), as ranked by the mutual information procedure outlined above). For each set of hyperparameters, performance is evaluated on the cross-validated predictions of the full training set, and the set of hyperparameters with the best performance is selected for retraining on the full training set. In some examples, the analytics system uses log-loss as a performance metric, whereby the log-loss is calculated by taking the negative logarithm of the prediction for the correct label for each sample, and then summing over samples (i.e. a perfect prediction of 1.0 for the correct label would give a log-loss of 0).

[0309] To generate predictions for a new sample, feature values are calculated using the same method described above, but restricted to features (region/positive class combinations) selected under the chosen topK value. Generated features are then used to create a prediction using the logistic regression model trained above.

[0310] In some examples, the analytics trains a two-stage classifier. For example, the analytics system trains a binary cancer classifier to distinguish between the labels, cancer and non-cancer, based on the feature vectors of the training samples. In this case, the binary classifier outputs a prediction score indicating the likelihood of the presence or absence of cancer. In another example, the analytics system trains a multiclass cancer classifier to distinguish between many cancer types. In this multiclass cancer classifier, the cancer classifier is trained to determine a cancer prediction that comprises a prediction value for each of the cancer types being classified for. The prediction values can correspond to a likelihood that a given sample has each of the cancer types. For example, the cancer classifier returns a cancer prediction including a prediction value for breast cancer, lung cancer, and non-cancer. For example, the cancer classifier may return a cancer prediction for a test sample including a prediction score for breast cancer, lung cancer, and/or no cancer.

[0311] The analytics system can train the cancer classifier according to any one of a number of methods. As an example, the binary cancer classifier may be a L2-regularized logistic regression classifier that is trained using a log-loss function. As another example, the multi-cancer (TOO) classifier may be a multinomial logistic regression. In practice either type of cancer classifier may be trained using other techniques. These techniques are numerous including potential use of kernel methods, machine learning algorithms such as multilayer neural networks, etc. In particular, methods as described in PCT/US2019/022122 and U.S. patent application Ser. No. 16/352,602 which are incorporated by reference in their entireties herein can be used for various embodiments. Still further, in some examples, the TOO classifier is trained only on cancer samples that were successfully called as cancer by the binary classifier, thereby ensuring sufficient cancer signal in the cancer sample. On the other hand, in some examples, the binary classifier is trained on the training samples regardless of TOO.

### Exemplary Sequencer and Analytics System

[0312] FIG. 10A is a flowchart of systems and devices for sequencing nucleic acid samples according to one embodiment. This illustrative flowchart includes devices such as a sequencer 820 and an analytics system 800. The sequencer 820 and the analytics system 800 may work in tandem to perform one or more steps in the processes described herein.

[0313] In various embodiments, the sequencer 820 receives an enriched nucleic acid sample 810. As shown in FIG. 10A, the sequencer 820 can include a graphical user interface 825 that enables user interactions with particular tasks (e.g., initiate sequencing or terminate sequencing) as well as one more loading stations 830 for loading a sequencing cartridge including the enriched fragment samples and/or for loading necessary buffers for performing the sequencing assays. Therefore, once a user of the sequencer 820 has provided the necessary reagents and sequencing cartridge to the loading station 830 of the sequencer 820, the user can initiate sequencing by interacting with the graphical user interface 825 of the sequencer 820. Once initiated, the sequencer 820 performs the sequencing and outputs the sequence reads of the enriched fragments from the nucleic acid sample 810.

[0314] In some embodiments, the sequencer 820 is communicatively coupled with the analytics system 800. The analytics system 800 includes some number of computing devices used for processing the sequence reads for various applications such as assessing methylation status at one or more CpG sites, variant calling or quality control. The sequencer 820 may provide the sequence reads in a BAM file format to the analytics system 800. The analytics system 800 can be communicatively coupled to the sequencer 820 through a wireless, wired, or a combination of wireless and wired communication technologies. Generally, the analytics system 800 is configured with a processor and non-transitory computer-readable storage medium storing computer instructions that, when executed by the processor, cause the processor to process the sequence reads or to perform one or more steps of any of the methods or processes disclosed herein.

[0315] In some embodiments, the sequence reads may be aligned to a reference genome using known methods in the art to determine alignment position information. Alignment position may generally describe a beginning position and an end position of a region in the reference genome that corresponds to a beginning nucleotide based and an end nucleotide base of a given sequence read. Corresponding to methylation sequencing, the alignment position information may be generalized to indicate a first CpG site and a last CpG site included in the sequence read according to the alignment to the reference genome. The alignment position information may further indicate methylation statuses and locations of all CpG sites in a given sequence read. A region in the reference genome may be associated with a gene or a segment of a gene; as such, the analytics system 800 may label a sequence read with one or more genes that align to the sequence read. In one embodiment, fragment length (or size) is determined from the beginning and end positions.

[0316] In various embodiments, for example when a paired-end sequencing process is used, a sequence read is comprised of a read pair denoted as R_1 and R_2. For example, the first read R_1 may be sequenced from a first end of a double-stranded DNA (dsDNA) molecule whereas the second read R_2 may be sequenced from the second end of the double-stranded DNA (dsDNA). Therefore, nucleotide base pairs of the first read R_1 and second read R_2 may be aligned consistently (e.g., in opposite orientations) with nucleotide bases of the reference genome. Alignment position information derived from the read pair R_1 and R_2 may include a beginning position in the reference genome that corresponds to an end of a first read (e.g., R_1) and an end position in the reference genome that corresponds to an end of a second read (e.g., R_2). In other words, the beginning position and end position in the reference genome represent the likely location within the reference genome to which the nucleic acid fragment corresponds. In one embodiment, the read pair R_1 and R_2 can be assembled into a fragment, and the fragment used for subsequent analysis and/or classification. An output file having SAM (sequence alignment map) format or BAM (binary) format may be generated and output for further analysis.

[0317] Referring now to FIG. 14B, FIG. 14B is a block diagram of an analytics system 800 for processing DNA samples according to one embodiment. The analytics system implements one or more computing devices for use in analyzing DNA samples. The analytics system 800 includes a sequence processor 840, sequence database 845, model database 855, models 850, parameter database 865, and score engine 860. In some embodiments, the analytics system 800 performs one or more steps in the processes 300 of FIG. 3A, 340 of FIG. 3B, 400 of FIG. 4, 500 of FIG. 5, 600 of FIG. 6A, or 680 of FIG. 6B and other process described herein.

[0318] The sequence processor 840 generates methylation state vectors for fragments from a sample. At each CpG site on a fragment, the sequence processor 840 generates a methylation state vector for each fragment specifying a location of the fragment in the reference genome, a number of CpG sites in the fragment, and the methylation state of each CpG site in the fragment whether methylated, unmethylated, or indeterminate via the process 300 of FIG. 3A. The sequence processor 840 may store methylation state vectors for fragments in the sequence database 845. Data in the sequence database 845 may be organized such that the methylation state vectors from a sample are associated to one another.

[0319] Further, multiple different models 850 may be stored in the model database 855 or retrieved for use with test samples. In one example, a model is a trained cancer classifier for determining a cancer prediction for a test sample using a feature vector derived from anomalous fragments. The training and use of the cancer classifier is discussed elsewhere herein. The analytics system 800 may train the one or more models 850 and store various trained parameters in the parameter database 865. The analytics system 800 stores the models 850 along with functions in the model database 855.

[0320] During inference, the score engine 860 uses the one or more models 850 to return outputs. The score engine 860 accesses the models 850 in the model database 855 along with trained parameters from the parameter database 865. According to each model, the score engine receives an appropriate input for the model and calculates an output based on the received input, the parameters, and a function of each model relating the input and the output. In some use cases, the score engine 860 further calculates metrics correlating to a confidence in the calculated outputs from the model. In other use cases, the score engine 860 calculates other intermediary values for use in the model.

### Application

[0321] In some embodiments, the methods, analytic systems and/or classifier of the present invention can be used to detect the presence (or absence) of cancer, monitor cancer progression or recurrence, monitor therapeutic response or effectiveness, determine a presence or monitor minimum residual disease (MRD), or any combination thereof. In some embodiments, the analytic systems and/or classifier may be used to identify the tissue or origin for a cancer. For instance, the systems and/or classifiers may be used to identify a cancer as of any of the following cancer types: breast cancer, uterine cancer, cervical cancer, ovarian cancer, bladder cancer, urothelial cancer of renal pelvis, renal cancer other than urothelial, prostate cancer, anorectal cancer, anal cancer, colorectal cancer, hepatobiliary cancer arising from hepatocytes, hepatobiliary cancer arising from cells other than hepatocytes, liver/bile-duct cancer, esophageal cancer, pancreatic cancer, squamous cell cancer of the upper gastrointestinal tract, upper gastrointestinal cancer other than squamous, head and neck cancer, lung cancer, lung adenocarcinoma, small cell lung cancer, squamous cell lung cancer and cancer other than adenocarcinoma or small cell lung cancer, neuroendocrine cancer, melanoma, thyroid cancer, sarcoma, plasma cell neoplasm, multiple myeloma, myeloid neoplasm, lymphoma, and leukemia. For example, as described herein, a classifier can be used to generate a likelihood or probability score (e.g., from 0 to 100) that a sample feature vector is from a subject with cancer. In some embodiments, the probability score is compared to a threshold probability to determine whether or not the subject has cancer. In other embodiments, the likelihood or probability score can be assessed at different time points (e.g., before or after treatment) to monitor disease progression or to monitor treatment effectiveness (e.g., therapeutic efficacy). In still other embodiments, the likelihood or probability score can be used to make or influence a clinical decision (e.g., detection of cancer, treatment selection, assessment of treatment effectiveness, etc.). For example, in one embodiment, if the likelihood or probability score exceeds a threshold, a physician can prescribe an appropriate treatment.

### Detection of Cancers

[0322] In some embodiments, the methods and/or classifier of the present invention are used to detect a cancer type in a subject suspected of having cancer. For example, a classifier (as described herein) can be used to determine a likelihood or probability score that a sample feature vector is from a subject that has a cancer type.

[0323] In one embodiment, a probability score of greater than or equal to 60 can indicated that the subject has the cancer type. In still other embodiments, a probability score greater than or equal to 65, greater than or equal to 70, greater than or equal to 75, greater than or equal to 80, greater than or equal to 85, greater than or equal to 90, or greater than or equal to 95, indicated that the subject has cancer type. In other embodiments, a probability score can indicate the severity of disease. For example, a probability score of 80 may indicate a more severe form, or later stage, of cancer compared to a score below 80 (e.g., a score of 70). Similarly, an increase in the probability score over time (e.g., at a second, later time point) can indicate disease progression or a decrease in the probability score over time (e.g., at a second, later time point) can indicate successful treatment.

[0324] In another embodiment, a cancer log-odds ratio can be calculated for a test subject by taking the log of a ratio of a probability of being a cancer type over a probability of not being the cancer type (i.e., one minus the probability of being the cancer type), as described herein. In accordance with this embodiment, a cancer log-odds ratio greater than 1 can indicate that the subject has a cancer type. In still other embodiments, a cancer type log-odds ratio greater than 1.2, greater than 1.3, greater than 1.4, greater than 1.5, greater than 1.7, greater than 2, greater than 2.5, greater than 3, greater than 3.5, or greater than 4, indicates that the subject has the cancer type. In other embodiments, a cancer log-odds ratio can indicate the severity of disease. For example, a cancer log-odds ratio greater than 2 may indicate a more severe form, or later stage, of a form of cancer compared to a score below 2 (e.g., a score of 1). Similarly, an increase in the cancer log-odds ratio over time (e.g., at a second, later time point) can indicate disease progression or a decrease in the cancer log-odds ratio over time (e.g., at a second, later time point) can indicate successful treatment.

[0325] According to aspects of the invention, the methods and systems of the present invention can be trained to detect or classify multiple cancer indications. For example, the methods, systems and classifiers of the present invention can be used to detect the presence of one or more, two or more, three or more, five or more, or ten or more different types of cancer.

[0326] In some embodiments, the cancer is one or more of head and neck cancer, liver/bile duct cancer, upper GI cancer, pancreatic/gallbladder cancer; colorectal cancer, ovarian cancer, lung cancer, multiple myeloma, lymphoid neoplasms, melanoma, sarcoma, breast cancer, and uterine cancer. In some embodiments, the cancer is one or more of anorectal cancer, bladder or urothelial cancer, or cervical cancer. In some embodiments, the cancer is one or more of breast cancer, uterine cancer, cervical cancer, ovarian cancer, bladder cancer, urothelial cancer of renal pelvis, renal cancer other than urothelial, prostate cancer, anorectal cancer, anal cancer, colorectal cancer, hepatobiliary cancer arising from hepatocytes, hepatobiliary cancer arising from cells other than hepatocytes, liver/bile-duct cancer, esophageal cancer, pancreatic cancer, squamous cell cancer of the upper gastrointestinal tract, upper gastrointestinal cancer other than squamous, head and neck cancer, lung cancer, lung adenocarcinoma, small cell lung cancer, squamous cell lung cancer and cancer other than adenocarcinoma or small cell lung cancer, neuroendocrine cancer, melanoma, thyroid cancer, sarcoma, plasma cell neoplasm, multiple myeloma, myeloid neoplasm, lymphoma, and leukemia.

[0327] In some embodiments, the likelihood or probability score can be assessed at different time points (e.g., or before or after treatment) to monitor disease progression or to monitor treatment effectiveness (e.g., therapeutic efficacy). For example, the present disclosure provides methods that involve obtaining a first sample (e.g., a first plasma cfDNA sample) from a cancer patient at a first time point, determining a first likelihood or probability score therefrom (as described herein), obtaining a second test sample (e.g., a second plasma cfDNA sample) from the cancer patient at a second time point, and determine a second likelihood or probability score therefrom (as described herein).

### Treatment

[0328] In still another embodiment, information obtained from any method described herein (e.g., the likelihood or probability score) can be used to make or influence a clinical decision (e.g., diagnosis of cancer, treatment selection, assessment of treatment effectiveness, etc.). For example, in one embodiment, if the likelihood or probability score exceeds a threshold, a physician can prescribe an appropriate treatment (e.g., a resection surgery, radiation therapy, chemotherapy, and/or immunotherapy). In some embodiments, information such as a likelihood or probability score can be provided as a readout to a physician or subject.

[0329] A classifier (as described herein) can be used to determine a likelihood or probability score that a sample feature vector is from a subject that has cancer or a particular type of cancer (e.g., tissue of origin). In one embodiment, an appropriate treatment (e.g., resection surgery or therapeutic) is prescribed when the likelihood or probability exceeds a threshold. For example, in one embodiment, if the likelihood or probability score is greater than or equal to 60, one or more appropriate treatments are prescribed. In another embodiments, if the likelihood or probability score is greater than or equal to 65, greater than or equal to 70, greater than or equal to 75, greater than or equal to 80, greater than or equal to 85, greater than or equal to 90, or greater than or equal to 95, one or more appropriate treatments are prescribed. In other embodiments, a cancer log-odds ratio can indicate the effectiveness of a cancer treatment. For example, an increase in the cancer log-odds ratio over time (e.g., at a second, after treatment) can indicate that the treatment was not effective. Similarly, a decrease in the cancer log-odds ratio over time (e.g., at a second, after treatment) can indicate successful treatment. In another embodiment, if the cancer log-odds ratio is greater than 1, greater than 1.5, greater than 2, greater than 2.5, greater than 3, greater than 3.5, or greater than 4, one or more appropriate treatments are prescribed.

[0330] In some embodiments, the treatment is one or more cancer therapeutic agents selected from the group consisting of a chemotherapy agent, a targeted cancer therapy agent, a differentiating therapy agent, a hormone therapy agent, and an immunotherapy agent. For example, the treatment can be one or more chemotherapy agents selected from the group consisting of alkylating agents, antimetabolites, anthracyclines, anti-tumor antibiotics, cytoskeletal disruptors (taxans), topoisomerase inhibitors, mitotic inhibitors, corticosteroids, kinase inhibitors, nucleotide analogs, platinum-based agents and any combination thereof. In some embodiments, the treatment is one or more targeted cancer therapy agents selected from the group consisting of signal transduction inhibitors (e.g. tyrosine kinase and growth factor receptor inhibitors), histone deacetylase (HDAC) inhibitors, retinoic receptor agonists, proteosome inhibitors, angiogenesis inhibitors, and monoclonal antibody conjugates. In some embodiments, the treatment is one or more differentiating therapy agents including retinoids, such as tretinoin, alitretinoin and bexarotene. In some embodiments, the treatment is one or more hormone therapy agents selected from the group consisting of anti-estrogens, aromatase inhibitors, progestins, estrogens, anti-androgens, and GnRH agonists or analogs. In one embodiment, the treatment is one or more immunotherapy agents selected from the group comprising monoclonal antibody therapies such as rituximab (RITUXAN) and alemtuzumab (CAMPATH), non-specific immunotherapies and adjuvants, such as BCG, interleukin-2 (IL-2), and interferon-alfa, immunomodulating drugs, for instance, thalidomide and lenalidomide (REVLIMID). It is within the capabilities of a skilled physician or oncologist to select an appropriate cancer therapeutic agent based on characteristics such as the type of tumor, cancer stage, previous exposure to cancer treatment or therapeutic agent, and other characteristics of the cancer.

### EXAMPLES

[0331] The following examples are put forth so as to provide those of ordinary skill in the art with a complete disclosure and description of how to make and use the present description, and are not intended to limit the scope of what the inventors regard as their description nor are they intended to represent that the experiments below are all or the only experiments performed. Efforts have been made to ensure accuracy with respect to numbers used (e.g., amounts, temperature, etc.) but some experimental errors and deviations should be accounted for.

### Example 1—Analysis of Probe Qualities

[0332] To test how much overlap between a cfDNA fragment and a probe is required to achieve a non-negligible amount of pulldown, various lengths of overlaps were tested using panels designed to include three different types of probes (V1D3, V1D4, V1E2) having various overlaps with 175 bp target DNA fragments specific to each probe. Tested overlaps ranged between 0 bp and 120 bp. Samples comprising 175 bp target DNA fragments were applied to the panel and washed, and then DNA fragments bound to the probes were collected. The amounts of the collected DNA fragments were measured and the amounts were plotted as densities over the sizes of overlaps as provided in FIG. 9.

[0333] There was no significant binding and pull down of target DNA fragments when there were less than 45 bp of overlaps. These results suggest that a fragment-probe overlap of at least 45 bp is generally required to achieve a non-negligible amount of pulldown although this number can vary depending on the assay conditions.

[0334] Furthermore, it has been suggested that more than a 10% mismatch rate between the probe and fragment sequences in the region of overlap is sufficient to greatly disrupt binding, and thus pulldown efficiency. Therefore, sequences that can align to the probe along at least 45 bp with at least a 90% match rate are candidates for off-target pulldown.

[0335] Thus, we have performed an exhaustive searching of all genomic regions having 45 bp alignments with 90%+ match rate (i.e., off-target regions) for each probe. Specifically, we combined a k-mer seeding strategy (which can allow one or more mismatches) with local alignment at the seed locations. This guaranteed not missing any good alignments based on k-mer length, number of mismatches allowed, and number of k-mer seed hits at a particular location. This involves performing dynamic programing local alignment at a large number of locations, so the implementation was optimized to use vector CPU instructions (e.g., AVX2, AVX512) and parallelized across many cores within a machine and also across many machines connected by a network. This allows exhaustive search which is valuable in designing a high-performance panel (i.e., low off-target rate and high target coverage for a given amount of sequencing).

[0336] Following the exhaustive searching, each probe was scored based on the number of off-target regions. The best probes have a score of 1, meaning they match in only one place (high Q). Probes with a low score between 2-19 hits (low Q) were accepted but probes with a poor score more than 20 hits (poor Q) were discarded. Other cutoff values can be used for specific samples.

[0337] Numbers of high quality, low quality, and poor quality probes were then counted among probes targeting hypermethylated genomic regions or hypomethylated genomic regions.

### Example 2—Cancer Assay Panels for Detecting Specific-Cancer Types

[0338] Cancer types: Cancer-specific panels were designed to detect cancer and/or cancer tissue of origin of fifteen (15) different cancer types. The 15 cancer types include (1) bladder cancer, (2) breast cancer, (3) cervical cancer, (4) colorectal cancer, (5) head and neck cancer, (6) hepatobiliary cancer, (7) lung cancer, (8) melanoma, (9) ovarian cancer, (10) pancreatic cancer, (11) prostate cancer, (12) renal cancer, (13) thyroid cancer, (14) upper gastrointestinal cancer, and (15) uterine cancer (see Lists 1-15). Cancer-specific classification was applied to the samples for relevant classification and labeling.

[0339] Samples used for genomic region selection: DNA samples for this work came from various sources.

[0340] The Circulating Cell-free Genome Atlas Study (“CCGA”; Clinical Trial.gov identifier NCT02889978) is a prospective, multi-center, case-control, observational study with longitudinal follow-up. De-identified biospecimens were collected from approximately 15,000 participants from 142 sites. Samples were selected to ensure a prespecified distribution of cancer types and non-cancers across sites in each cohort, and cancer and non-cancer samples were frequency age-matched by gender.

[0341] The Cancer Genome Atlas (“TCGA”; Clinical Trial.gov identifier NCT02889978) is a public resource developed through a collaboration between the National Cancer Institute (NCI) and the National Human Genome Research Institute (NHGRI).

[0342] Dissociated tumor cells (DTC) were acquired from Conversant.

[0343] Non-cancer cells were provided by Yuval Dor and Ben Glaser (Hebrew University) and originated from human tissue obtained from standard clinical procedures. For example, breast luminal and basal epithelial cells were from breast reduction surgery; colon epithelial cells were from tissue near the site of re-implantation following segmental resection for localized colon pathology; bone marrow cells were from joint replacement surgery; vascular and arterial endothelial cells were from vascular surgery; and head and neck epithelium was from tonsillectomy.

[0344] WGBS was performed on more than 1000 genomic DNA samples collected from healthy individuals and individuals diagnosed with cancers of various stages and tissues of origin. The samples included formaldehyde-fixed, paraffin-embedded (FFPE) tissue blocks, disseminated tumor cells (DTC) from cancers of different TOOs, bone marrow mononuclear cells (BMMC), white blood cells (WBC) and peripheral blood mononuclear cells (PBMC). The DTCs were subjected to negative selection to remove WBCs, fibroblasts, and endothelial cells using a negative selection kit (Miltenyi) prior to gDNA isolation. The negative selection yielded purified tumor cells that allowed differentially methylated regions to be more clearly identified.

[0345] The TCGA data was collected by hybridization of bisulfate-converted DNA fragments from 8809 samples to methylation-sensitive oligonucleotide arrays. β-values from this study represent the relative abundance of methylation at 480,000 individual CpG sites. 75,000 of these CpG sites were analyzed after excluding CpGs from noisy genomic regions (360,000) and CpG sites with cross-hybridizing probes (45,000). The TCGA data was analyzed using different algorithms because it describes methylation of individual CpG sites, whereas WGBS data reveals the methylation pattern of strings of adjacent CpG sites on DNA fragments.

[0346] Tissue of Origin classes: Each sample was categorized into one of twenty-five (25) different Tissue of Origin (TOO) classes: breast cancer, uterine cancer, cervical cancer, ovarian cancer, bladder cancer, urothelial cancer of renal pelvis, renal cancer other than urothelial, prostate cancer, anorectal cancer, colorectal cancer, hepatobiliary cancer arising from hepatocytes, hepatobiliary cancer arising from cells other than hepatocytes, pancreatic cancer, squamous cell cancer of the upper gastrointestinal tract, upper gastrointestinal cancer other than squamous, head and neck cancer, lung adenocarcinoma, small cell lung cancer, squamous cell lung cancer and cancer other than adenocarcinoma or small cell lung cancer, neuroendocrine cancer, melanoma, thyroid cancer, sarcoma, multiple myeloma, lymphoma, and leukemia. These TOO classes encompass 97% of the cancer incidence reported by the Surveillance, Epidemiology, and End Results program (SEER; seer.cancer.gov), after filtering out liquid, brain, small intestine, vagina+vulva and penis+testis. Rare incidence cancers like sarcoma, and neuroendocrine cancers were aggregated to guard against misclassification. International Classification of Diseases for Oncology (ICD-O-3) topographical, morphological, and behavioral codes and World Health Organization (WHO) topography designations were used to categorize individual samples into the TOO classes. For example, the 34 TCGA studies were mapped to 25 TOO classes as shown in TABLE 1. The TOO classification was iteratively refined against observed classification performance.

TABLE 1
Tissue of Origin (TOO) classification of TCGA types

| TOO class | TCGA type | N |
|---|---|---|
| Breast | BRCA | 779 |
| Renal | KIRC, KIRP, RICH | 657 |
| Brain | LLG, GBM | 654 |
| Upper GI | ESCA, STAD | 580 |
| Melanoma | SKCM, UVM | 550 |
| Head and neck | HNSC | 528 |
| Thyroid | THCA | 507 |
| Prostate | PRAD | 498 |
| Uterine | UCEC, UCS | 484 |
| Lung adenocarcinoma | LUAD | 444 |
| Bladder | BLCA | 409 |
| Colorectal | COAD, READ | 382 |
| Hepatobiliary hcc | LIHC | 377 |
| Lung squamous | LUSC | 370 |
| Cervical | CESC | 307 |
| Sarcoma | SARC | 261 |
| Adrenal | ACC, PCPG | 259 |
| Pancreas | PAAD | 184 |
| Leukemia | LAML, LCML | 140 |
| Testicular | TGCT | 134 |
| Thymus | THYM | 124 |
| Mesothelioma | MESO | 87 |
| Lymphoma | DLBC | 48 |
| Hepatobiliary biliary | CHOL | 36 |
| Ovarian | OV | 10 |

[0347] Region selection: For target selection, fragments having abnormal methylation patterns in cancer samples were selected using one or more method as described herein. Use of these methods allowed identification of low noise regions as putative targets. Among the low noise regions, fragments most informative in discriminating cancer types were ranked and selected.

[0348] Specifically, in some embodiments, when WGBS data were used, fragment sequences in the database were filtered based on p-value using a non-cancer distribution, and only fragments with p<0.001 were retained, as described herein. In some cases, the selected cfDNAs were further filtered to retain only those that were at least 90% methylated or 90% unmethylated. Next, for each CpG site in the selected fragments, the numbers of cancer samples or non-cancer samples were counted that include fragments overlapping that CpG site. Specifically, P (cancer overlapping fragment) for each CpG was calculated and genomic sites with high P values were selected as general cancer targets. By design, the selected fragments had very low noise (i.e., few non-cancer fragments overlapping).

[0349] To find cancer type specific targets, similar selection processes were performed. CpG sites were ranked based on their information gain, comparing (i) the numbers of samples of a specific TOO or other samples, including both non-cancer samples and samples of a different TOO, (ii) the numbers of samples of a specific TOO or non-cancer samples, and/or (iii) the numbers of samples of a specific TOO or a different TOO that include fragments overlapping that CpG site. The process was applied to each of the 25 TOOs and the comparison was done for all pairwise combinations for 25 TOOs. For example, P (cancer of a TOO|overlapping fragment) was calculated and then compared with P (cancer of a different TOO|overlapping fragment). An outlier fragment in each TOO having much greater likelihood under cancer of a TOO than under cancer of a different TOO was selected as a target for the TOO. Accordingly, genomic regions selected by the pairwise comparisons included genomic regions differentially methylated to separate a target TOO and a contrast TOO. The numbers of genomic regions for differentiating each target TOO (x-axis) from a contrast TOO (y-axis) are provided in FIG. 11.

[0350] When TCGA data were used, CpG beta value indicating intensity of methylation was used to identify target genomic regions. This is because array data are not at CpG site levels, and thus they are prone to result in false positives. To avoid false positives, CpG sites were converted into 350 bp bins across the genome. Beta values of each bin were calculated as the mean of CpG beta values in that bin. Bins with less than 2 CpG's were excluded from the analysis. Next, bins were selected with beta difference of >0.95 between (i) samples of a specific TOO and other samples, including both non-cancer samples and samples of a different TOO, (ii) samples of a specific TOO and non-cancer samples, and/or (iii) samples of a specific TOO and a different TOO that include fragments overlapping that CpG site.

[0351] Genomic regions selected as described above were then filtered based on the numbers of their off-target genomic regions as specified herein. Specifically, numbers of genomic locations that have >=45 bp alignments with >=90% identity were calculated as the numbers of off-target genomic regions. Genomic regions having off-target genomic regions more than 20 were discarded.

[0352] Various lists of target genomic regions selected as described in this section are identified in TABLE 2 (see Lists 1-15).

TABLE 2
Summary of Lists 1-15

| | | Target | | | Panel |
|---|---|---|---|---|---|
| | | Genomic | SEQ ID NOs | | Size |
| List | Cancer type detected | Regions | First | Last | (kb) |
| 1 | Bladder | 345 | 1 | 345 | 15.2 |
| 2 | Breast | 881 | 346 | 1226 | 45.0 |
| 3 | Cervical | 8 | 1227 | 1234 | 0.3 |
| 4 | Colorectal | 701 | 1235 | 1935 | 30.8 |
| 5 | Head and neck | 177 | 1936 | 2112 | 8.7 |
| 6 | Hepatobiliary | 335 | 2113 | 2447 | 24.0 |
| 7 | Lung | 491 | 2448 | 2938 | 22.4 |
| 8 | Melanoma | 78 | 2939 | 3016 | 3.4 |
| 9 | Ovarian | 881 | 3017 | 3897 | 37.0 |
| 10 | Pancreatic | 29 | 3898 | 3926 | 1.3 |
| 11 | Prostate | 784 | 3927 | 4710 | 37.7 |
| 12 | Renal | 517 | 4711 | 5227 | 22.6 |
| 13 | Thyroid | 23 | 5228 | 5250 | 1.0 |
| 14 | Upper gastrointestinal | 226 | 5251 | 5476 | 14.9 |
| 15 | Uterine | 240 | 5477 | 5716 | 10.9 |

For each list, the table identifies the cancer type detected, the total number of target genomic regions in the list, a range of SEQ ID NOs corresponding to all target genomic regions in the list to be found in the sequence listing submitted with this application, and a panel size (total of the lengths of all target genomic regions in the list). The sequence listing identifies the chromosomal location of each target genomic region, whether cfDNA fragments to be enriched from the region are hypermethylated or hypomethylated, and the sequence of one DNA strand of the target genomic region. The chromosome numbers and the start and stop positions are provided relative to a known human reference genome, hg19. The sequence of the human reference genome, hg19, is available from Genome Reference Consortium with a reference number, GRCh37/hg19, and also available from Genome Browser provided by Santa Cruz Genomics Institute.

### Example 3—Cancer Assay Panels for Diagnosing Specific Cancer Types

[0353] Additional cancer assay panels were designed to identify specific cancer types in a manner analogous to that set forth in Example 2. Various lists of target genomic regions selected as described in this section are identified in TABLE 3 (see Lists 16-49). The target genomic regions of Lists 16-32 contain subsets of the methylation sites of the target genomic regions of Lists 33-49, respectively.

TABLE 3
Summary of Lists 16-49

| | | Target | | | Panel |
|---|---|---|---|---|---|
| | | Genomic | SEQ ID NOs | | Size |
| List | Cancer type detected | Regions | First | Last | (kb) |
| 16 | Anorectal | 937 | 5717 | 6653 | 198.8 |
| 17 | Bladder and urothelial | 977 | 6654 | 7630 | 212.6 |
| 18 | Breast | 1201 | 7631 | 8831 | 243.9 |
| 19 | Cervical | 1258 | 8832 | 10089 | 278.1 |
| 20 | Colorectal | 771 | 10090 | 10860 | 143.6 |
| 21 | Head and neck | 1143 | 10861 | 12003 | 236.3 |
| 22 | Liver and bile duct | 1088 | 12004 | 13091 | 256.1 |
| 23 | Lung | 1321 | 13092 | 14412 | 236.5 |
| 24 | Melanoma | 907 | 14413 | 15319 | 244.8 |
| 25 | Ovarian | 853 | 15320 | 16172 | 181.0 |
| 26 | Pancreatic and | 1003 | 16173 | 17175 | 193.3 |
| | gallbladder | | | | |
| 27 | Prostate | 953 | 17176 | 18128 | 222.2 |
| 28 | Renal | 881 | 18129 | 19009 | 202.8 |
| 29 | Sarcoma | 1014 | 19010 | 20023 | 260.1 |
| 30 | Thyroid | 748 | 20024 | 20771 | 170.8 |
| 31 | Upper gastrointestinal | 793 | 20772 | 21564 | 169.7 |
| 32 | Uterine | 1170 | 21565 | 22734 | 252.9 |
| 33 | Anorectal | 933 | 22735 | 23667 | 669.7 |
| 34 | Bladder and urothelial | 1066 | 23668 | 24733 | 575.9 |
| 35 | Breast | 1272 | 24734 | 26005 | 695.4 |
| 36 | Cervical | 1384 | 26006 | 27389 | 950.7 |
| 37 | Colorectal | 905 | 27390 | 28294 | 708.7 |
| 38 | Head and neck | 1256 | 28295 | 29550 | 770.5 |
| 39 | Liver and bile duct | 1158 | 29551 | 30708 | 814.3 |
| 40 | Lung | 1660 | 30709 | 32368 | 1043.4 |
| 41 | Melanoma | 791 | 32369 | 33159 | 521.7 |
| 42 | Ovarian | 858 | 33160 | 34017 | 354.5 |
| 43 | Pancreatic and | 1191 | 34018 | 35208 | 999.6 |
| | gallbladder | | | | |
| 44 | Prostate | 895 | 35209 | 36103 | 484.8 |
| 45 | Renal | 865 | 36104 | 36968 | 474.2 |
| 46 | Sarcoma | 951 | 36969 | 37919 | 524.9 |
| 47 | Thyroid | 719 | 37920 | 38638 | 244.6 |
| 48 | Upper gastrointestinal | 854 | 38639 | 39492 | 890.5 |
| 49 | Uterine | 1239 | 39493 | 40731 | 805.1 |

For each list, the table identifies the cancer type detected, the total number of target genomic regions in the list, a range of SEQ ID NOs corresponding to all target genomic regions in the list to be found in the sequence listing submitted with this application, and a panel size (total of the lengths of all target genomic regions in the list). The sequence listing identifies the chromosomal location of each target genomic region, whether cfDNA fragments to be enriched from the region are hypermethylated or hypomethylated, and the sequence of one DNA strand of the target genomic region. The chromosome numbers and the start and stop positions are provided relative to a known human reference genome, hg19. The sequence of the human reference genome, hg19, is available from Genome Reference Consortium with a reference number, GRCh37/hg19, and also available from Genome Browser provided by Santa Cruz Genomics Institute.

### Example 4—Generation of a Mixture Model Classifier

[0354] To maximize performance, the predictive cancer models described in this Example were trained using sequence data obtained from a plurality of samples from known cancer types and non-cancers from both CCGA sub-studies (CCGA1 and CCGA22), a plurality of tissue samples for known cancers obtained from CCGA1, and a plurality of non-cancer samples from the STRIVE study (See Clinical Trail.gov Identifier: NCT03085888 (//clinicaltrials.gov/ct2/show/NCT03085888)). The STRIVE study is a prospective, multi-center, observational cohort study to validate an assay for the early detection of breast cancer and other invasive cancers, from which additional non-cancer training samples were obtained to train the classifier described herein. The known cancer types included from the CCGA sample set included the following: breast, lung, prostate, colorectal, renal, uterine, pancreas, esophageal, lymphoma, head and neck, ovarian, hepatobiliary, melanoma, cervical, multiple myeloma, leukemia, thyroid, bladder, gastric, and anorectal. As such, a model can be a multi-cancer model (or a multi-cancer classifier) for detecting one or more, two or more, three or more, four or more, five or more, ten or more, or 20 or more different types of cancer.

[0355] The classifier performance data shown below was reported out for a locked classifier trained on cancer and non-cancer samples obtained from CCGA2, a CCGA sub-study, and on non-cancer samples from STRIVE. The individuals in the CCGA2 sub-study were different from the individuals in the CCGA1 sub-study whose cfDNA was used to select target genomes. From the CCGA2 study, blood samples were collected from individuals diagnosed with untreated cancer (including 20 tumor types and all stages of cancer) and healthy individuals with no cancer diagnosis (controls). For STRIVE, blood samples were collected from women within 28 days of their screening mammogram. Cell-free DNA (cfDNA) was extracted from each sample and treated with bisulfite to convert unmethylated cytosines to uracils. The bisulfite treated cfDNA was enriched for informative cfDNA molecules using hybridization probes designed to enrich bisulfite-converted nucleic acids derived from each of a plurality of targeted genomic regions in an assay panel comprising all of the genomic regions of Lists 1-16. The enriched bisulfite-converted nucleic acid molecules were sequenced using paired-end sequencing on an Illumina platform (San Diego, Calif.) to obtain a set of sequence reads for each of the training samples, and the resulting read pairs were aligned to the reference genome, assembled into fragments, and methylated and unmethylated CpG sites identified.

### Mixture Model Based Featurization

[0356] For each cancer type (including non-cancer) a probabilistic mixture model was trained and utilized to assign a probability to each fragment from each cancer and non-cancer sample based on how likely it was that the fragment would be observed in a given sample type.

### Fragment-Level Analysis

[0357] Briefly, for each sample type (cancer and non-cancer samples), for each region (where each region was used as-is if less than 1 kb, or else subdivided into 1 kb regions in length with a 50% overlap (e.g., 500 base pairs overlap) between adjacent regions), a probabilistic model was fit to the fragments derived from the training samples for each type of cancer and non-cancer. The probabilistic model trained for each sample type was a mixture model, where each of three mixture components was an independent-sites model in which methylation at each CpG is assumed to be independent of methylation at other CpGs. Fragments were excluded from the model if: they had a p-value (from a non-cancer Markov model) greater than 0.01; were marked as duplicate fragments; the fragments had a bag size of greater than 1 (for targeted methylation samples only); they did not cover at least one CpG site; or if the fragment was greater than 1000 bases in length. Retained training fragments were assigned to a region if they overlapped at least one CpG from that region. If a fragment overlapped CpGs in multiple regions, it was assigned to all of them.

### Local Source Models

[0358] Each probabilistic model was fit using maximum-likelihood estimation to identify a set of parameters that maximized the log-likelihood of all fragments deriving from each sample type, subject to a regularization penalty.

[0359] Specifically, in each classification region, a set of probabilistic models were trained, one for each training label (i.e., one for each cancer type and one for non-cancer). Each model took the form of a Bernoulli mixture model with three components. Mathematically,

Pr(fragment|{βₖᵢ,fₖ})=Σₖ₌₁ⁿfₖΠᵢβₖᵢ^{m}^{ᵢ}(1−βₖᵢ)^{1-m}^{ᵢ}

where n is the number of mixture components, set to 3; mᵢ∈{0, 1} is the fragment's observed methylation at position i; fₖ is the fractional assignment to component k (with fₖ≥0 and Σfₖ=1); and βₖᵢ is the methylation fraction in component k at CpG i. The product over i included only those positions for which a methylation state could be identified from the sequencing. Maximum-likelihood values of the parameters {fₖ, βₖᵢ} of each model were estimated by using the rprop algorithm (e.g., the rprop algorithm as described in Riedmiller M, Braun H. RPROP—A Fast Adaptive Learning Algorithm. Proceedings of the International Symposium on Computer and Information Science VII, 1992) to maximize the total log-likelihood of the fragments of one training label, subject to a regularization penalty on βₖᵢ that took the form of a beta-distributed prior. Mathematically, the maximized quantity was

Σⱼ ln(Pr(fragmentⱼ|{βₖᵢ,fₖ}))+Σ_{k,i} ln(βₖᵢ(1−βₖᵢ)) (2)

where r is the regularization strength, which was set to 1.

### Featurization

[0360] Once the probabilistic models were trained, a set of numerical features was computed for each sample. Specifically, features were extracted for each fragment from each training sample, for each cancer type and non-cancer sample, in each region. The extracted features were the tallies of outlier fragments (i.e., anomalously methylated fragments), which were defined as those whose log-likelihood under a first cancer model exceeded the log-likelihood under a second cancer model or non-cancer model by at least a threshold tier value. Outlier fragments were tallied separately for each genomic region, sample model (i.e., cancer type), and tier (for tiers 1, 2, 3, 4, 5, 6, 7, 8, and 9), yielding 9 features per region for each sample type. In this way, each feature was defined by three properties: a genomic region; a “positive” cancer type label (excluding non-cancer); and the tier value selected from the set {1, 2, 3, 4, 5, 6, 7, 8, 9}. The numerical value of each feature was defined as the number of fragments in that region such that

$$ln ( \frac{Pr ( fragment \vert positive cancer type )}{Pr ( fragment \vert non \text{-} cancer} ) > tier \qquad ( 3 )$$

where the probabilities were defined by equation (1) using the maximum-likelihood-estimated parameter values corresponding to the “positive” cancer type (in the numerator of the logarithm) or to non-cancer (in the denominator).

### Feature Ranking

[0361] For each set of pairwise features, the features were ranked using mutual information based on their ability to distinguish the first cancer type (which defined the log-likelihood model from which the feature was derived) from the second cancer type or non-cancer. Specifically, two ranked lists of features were compiled for each unique pair of class labels: one with the first label assigned as the “positive” and the second as the “negative”, and the other with the positive/negative assignment swapped (with the exception of the “non-cancer” label, which was only permitted as the negative label). For each of these ranked lists, only features whose positive cancer type label (as in equation (3)) matched the positive label under consideration were included in the ranking. For each such feature, the fraction of training samples with non-zero feature value was calculated separately for the positive and negative labels. Features for which this fraction was greater in the positive label were ranked by their mutual information with respect to that pair of class labels.

[0362] The top ranked 256 features from each pairwise comparison were identified and added to the final feature set for each cancer type and non-cancer. To avoid redundancy, if more than one feature was selected from the same positive type and genomic region (i.e., for multiple negative types), only the one assigned the lowest (most informative) rank for its cancer type pair was retained, breaking ties by choosing the higher tier value. The features in the final feature set for each sample (cancer type and non-cancer) were binarized (any feature value greater than 0 was set to 1, so that all features were either 0 or 1).

### Classifier Training

[0363] The training samples were then divided into distinct 5-fold cross-validation training sets, and a two-stage classifier was trained for each fold, in each case training on ⅘ of the training samples and using the remaining ⅕ for validation.

[0364] In the first stage of training, a binary (two-class) logistic regression model for detecting the presence of cancer was trained to discriminate the cancer samples (regardless of TOO) from non-cancer. When training this binary classifier, a sample weight was assigned to the male non-cancer samples to counteract sex-imbalance in the training set. For each sample, the binary classifier outputs a prediction score indicating the likelihood of a presence or absence of cancer.

[0365] In the second stage of training, a parallel multi-class logistic regression model for determining cancer tissue of origin was trained with TOO as the target label. Only the cancer samples that received a score above the 95th percentile of the non-cancer samples in the first stage classifier were included in the training of this multi-class classifier. For each cancer sample used in training the multi-class classifier, the multi-class classifier outputs prediction values for the cancer types being classified, where each prediction value is a likelihood that the given sample has a certain cancer type. For example, the cancer classifier can return a cancer prediction for a test sample including a prediction score for breast cancer, a prediction score for lung cancer, and/or a prediction score for no cancer.

[0366] Both binary and multi-class classifiers were trained by stochastic gradient descent with mini-batches, and in each case, training was stopped early when the performance on the validation fold (assessed by cross-entropy loss) began to degrade. For predicting on samples outside of the training set, in each stage, the scores assigned by the five cross-validated classifiers were averaged. Scores assigned to sex-inappropriate cancer types were set to zero, with the remaining values renormalized to sum to one.

[0367] Scores assigned to the validation folds within the training set were retained for use in assigning cutoff values (thresholds) to target certain performance metrics. In particular, the probability scores assigned to the training set non-cancer samples were used to define thresholds corresponding to particular specificity levels. For example, for a desired specificity target of 99.4%, the threshold was set at the 99.4th percentile of the cross-validated cancer detection probability scores assigned to the non-cancer samples in the training set. Training samples with a probability score that exceeded a threshold were called as positive for cancer.

[0368] Subsequently, for each training sample determined to be positive for cancer, a TOO or cancer type assessment was made from the multiclass classifier. First, the multi-class logistic regression classifier assigned a set of probability scores, one for each prospective cancer type, to each sample. Next, the confidence of these scores was assessed as the difference between the highest and second-highest scores assigned by the multi-class classifier for each sample. Then, the cross-validated training set scores were used to identify the lowest threshold value such that of the cancer samples in the training set with top-two score differential exceeding the threshold, 90% had been assigned the correct TOO label as their highest score. In this way, the scores assigned to the validation folds during training were further used to determine a second threshold for distinguishing between confident and indeterminate TOO calls.

[0369] At prediction time, samples receiving a score from the binary (first-stage) classifier below the predefined specificity threshold were assigned a “non-cancer” label. For the remaining samples, those whose top-two TOO-score differential from the second-stage classifier was below the second predefined threshold were assigned the “indeterminate cancer” label. The remaining samples were assigned the cancer label to which the TOO classifier assigned the highest score.

### Example 5—Classification with the Target Genomic Regions of Lists 16-32

[0370] The discriminatory value of the target genomic regions of Lists 16-32 was evaluated by testing the ability of a cancer classifier to detect cancer and any of 20 different cancer types according to the methylation status of these target genomic regions. Performance was evaluated over a set of 1,532 cancer samples and 1,521 non-cancer samples that were not used to train the classifier, as shown in TABLE 4. For each sample, differentially methylated cfDNA was enriched using a bait set comprising all of the target genomic regions of Lists 16-32. The classifier was then constrained to provide cancer determinations based only on the methylation status of the target genomic regions of the List being evaluated.

TABLE 4
Cancer diagnoses of individuals whose cfDNA was used
to validate the classifier

| | | Stage | | | | |
|---|---|---|---|---|---|---|
| | | | | | | Not |
| Cancer Type | Total | I | II | III | IV | Reported |
| Non-cancer | 1521 | — | — | — | — | — |
| Lung | 261 | 60 | 23 | 72 | 106 | 0 |
| Breast | 247 | 102 | 110 | 27 | 8 | 0 |
| Prostate | 188 | 39 | 113 | 19 | 17 | 0 |
| Lymphoid neoplasm | 147 | 15 | 27 | 27 | 39 | 39 |
| Colorectal | 121 | 13 | 22 | 41 | 45 | 0 |
| Pancreas and gallbladder | 95 | 15 | 15 | 19 | 46 | 0 |
| Uterine | 84 | 73 | 3 | 5 | 3 | 0 |
| Upper GI | 67 | 9 | 12 | 19 | 27 | 0 |
| Head and neck | 62 | 7 | 13 | 16 | 26 | 0 |
| Renal | 56 | 37 | 4 | 4 | 11 | 0 |
| Ovary | 37 | 4 | 2 | 25 | 6 | 0 |
| Multiple myeloma | 34 | 10 | 13 | 11 | 0 | 0 |
| Not reported | 29 | 8 | 5 | 7 | 6 | 3 |
| Liver bile duct | 29 | 5 | 7 | 7 | 10 | 0 |
| Sarcoma | 17 | 2 | 4 | 5 | 6 | 0 |
| Bladder and urothelial | 16 | 6 | 7 | 3 | 1 | 0 |
| Anorectal | 14 | 4 | 5 | 5 | 0 | 0 |
| Cervical | 11 | 8 | 1 | 2 | 0 | 0 |
| Melanoma | 7 | 3 | 1 | 0 | 3 | 0 |
| Myeloid neoplasm | 4 | 2 | 1 | 0 | 1 | 0 |
| Thyroid | 4 | 0 | 0 | 0 | 0 | 4 |
| Prediction only | 2 | 0 | 0 | 0 | 2 | 0 |

[0371] Results from the classifier performance analysis for lists 16-32 are presented in TABLES 5-8. An exemplary receiver operator curve (ROC) generated by a trained classifier is shown in FIG. 13. The ROC shows true positive results and false positive results for a determination of cancer or no-cancer based on the methylation status of the target genomic regions of list 23, optimized for lung cancer. The asymmetric shape of the ROC curve illustrates that the classifier was designed to minimize false positive results. Except for list 28 (renal cancer) the areas under the curve are tightly clustered between 0.77 and 0.80, as shown in TABLE 5. These results indicate that a determination of cancer is not grossly compromised by using panels optimized for the detection of individual cancer types. Additionally, classifier performance was tested for randomly selected 50% subsets of the target genomic regions of list 20 (colorectal cancer), list 23 (lung cancer) and list 26 (pancreas and gall bladder cancer). The areas under the ROC curve for these subsets of target genomic regions were also tightly clustered between 0.77 and 0.80, indicating that a determination of cancer is not detectably compromised by using smaller panels of less than 400-700 target genomic regions having a total panel size of less than 75-140 kb.

[0372] Once a determination of cancer is made, the classifier assigns the cancer to one of twenty distinct cancer types. The accuracy of these determinations with a specificity of 0.990 is presented in various formats. TABLE 5 shows true positives, false positives, and false negatives as scored based on the methylation status of each list of target genomic regions optimized for the detection of a specific cancer type. A true positive occurs when the presence of cancer is detected and the cancer type is accurately determined. A false positive occurs for samples from individuals diagnosed with the cancer type that the list was optimized for when the presence of cancer is detected and an inaccurate cancer type is scored. A false negative occurs for samples from individuals diagnosed with a different cancer type than the cancer type that the list was optimized for when the presence of cancer is detected and the cancer type is inaccurately scored as the cancer type for which the list was optimized.

TABLE 5
Cancer detection and cancer type determination using
data for lists of target genomic regions optimized
for the detection of specific cancer types.

| Cancer Type for | | True | False | False |
|---|---|---|---|---|
| Target Genomic Regions | AUC | Positive | Positive | Negative |
| Anorectal | 0.78 | 0 | 0 | 6 |
| Bladder & Urothelial | 0.78 | 3 | 0 | 1 |
| Breast | 0.79 | 67 | 5 | 1 |
| Cervical | 0.80 | 0 | 0 | 2 |
| Colorectal | 0.78 | 72 | 2 | 2 |
| Head & Neck | 0.78 | 38 | 16 | 6 |
| Liver & Bile duct | 0.78 | 17 | 2 | 2 |
| Lung | 0.80 | 143 | 11 | 4 |
| Melanoma | 0.79 | 3 | 0 | 0 |
| Ovary | 0.78 | 24 | 1 | 2 |
| Pancreas & Gallbladder | 0.79 | 47 | 2 | 8 |
| Prostate | 0.78 | 14 | 0 | 1 |
| Renal | 0.59 | 0 | 0 | 0 |
| Sarcoma | 0.78 | 6 | 0 | 1 |
| Thyroid | 0.78 | 0 | 1 | 0 |
| Upper GI | 0.77 | 32 | 2 | 1 |
| Uterine | 0.79 | 11 | 0 | 0 |
| Random 50% of | 0.77 | 88 | 0 | 7 |
| Colorectal | | | | |
| Random 50% of | 0.79 | 92 | 1 | 8 |
| Lung | | | | |
| Random 50% of | 0.78 | 94 | 0 | 9 |
| Pancreas & Gallbladder | | | | |

[0373] The accuracy of cancer detection by a trained classifier based on the methylation status of lists of target genomic regions selected for specific cancer types is presented for various cancer type lists in TABLE 6. When cancer is detected, a cancer type is assigned from one of twenty possible classes of cancer types. The accuracy of cancer type determination is presented in TABLE 7. The cancer type determination results are for the accuracy of determining all twenty cancer types, even though the lists of target genomic regions were optimized to detect a single cancer type.

[0374] The results in TABLES 6-7 are segregated for various stages of cancer. Cancer detection and cancer type determination were more accurate for samples from individuals diagnosed with later stages of cancer. This was expected because late stage tumors shed more cfDNA. Nevertheless, the accuracy of detecting cancer and assigning a cancer type for early stage cancers is remarkably high. Furthermore, randomly eliminating 50% of the target genomic regions of list 20 (colorectal cancer), list 23 (lung cancer) and list 26 (pancreas and gall bladder cancer) had essentially no impact on classifier accuracy.

[0375] The sensitivity at a specificity of 0.990 for detecting stages I-IV cancers of various cancer types by a classifier acting on the methylation status of target genomic regions in lists selected for the specific cancer type to be detected is presented in TABLE 8. For example, when the false positive rate for detecting cancer is limited to 1%, a classifier considering the methylation status of the target genomic regions of list 16 accurately detected anorectal cancer for 50% (2 out of 4) of the samples collected from individuals diagnosed with stage I anorectal cancer. An overall sensitivity for all cancer stages of >70% was achieved for anorectal cancer, head & neck cancer, liver & bile duct cancer, ovarian cancer, pancreatic & gallbladder cancer, and upper gastrointestinal tract cancer. The sensitivity for detecting stage I+II cancers was >50% for anorectal cancer, bladder & urothelial cancer, head & neck cancer, liver & bile duct cancer, and pancreatic & gallbladder cancer. Sensitivity based on the methylation status of a randomly selected 50% of the target genomic regions for colorectal cancer, lung cancer, or pancreatic and gall bladder cancer was essentially identical to sensitivity using 100% of the corresponding target genomic regions.

TABLE 6
Cancer detection accuracy with 99.0% specificity by a classifier using only target genomic regions specific to the indicated cancer type.

| | | | Bladder & | | | | | | | | | | Liver & | |
|---|---|---|---|---|---|---|---|---|---|---|---|---|---|---|
| Cancer | Anorectal | | Urothelial | | Breast | | Cervical | | Colorectal | | Head & Neck | | Bile duct | |
| Stage | % | Fraction | % | Fraction | % | Fraction | % | Fraction | % | Fraction | % | Fraction | % | Fraction |
| All | 43 | 653/1532 | 45 | 694/1532 | 45 | 684/1532 | 45 | 695/1532 | 42 | 648/1532 | 43 | 665/1532 | 43 | 660/1532 |
| I | 9 | 38/422 | 12 | 49/422 | 11 | 48/422 | 11 | 46/422 | 9 | 36/422 | 10 | 40/422 | 11 | 45/422 |
| II | 31 | 120/388 | 33 | 126/388 | 34 | 130/388 | 33 | 126/388 | 31 | 119/388 | 31 | 121/388 | 31 | 122/388 |
| III | 61 | 192/313 | 65 | 203/313 | 61 | 192/313 | 67 | 210/313 | 59 | 184/313 | 63 | 196/313 | 61 | 191/313 |
| I + II | 20 | 158/810 | 22 | 175/810 | 22 | 178/810 | 21 | 172/810 | 19 | 155/810 | 20 | 161/810 | 21 | 167/810 |
| I + II + III | 31 | 350/1123 | 34 | 378/1123 | 33 | 370/1123 | 34 | 382/1123 | 30 | 339/1123 | 32 | 357/1123 | 32 | 358/1123 |
| III + IV | 71 | 482/676 | 75 | 504/676 | 73 | 492/676 | 75 | 509/676 | 71 | 477/676 | 72 | 489/676 | 72 | 485/676 |
| IV | 80 | 290/363 | 83 | 301/363 | 83 | 300/363 | 82 | 299/363 | 81 | 293/363 | 81 | 293/363 | 81 | 294/363 |
| | | | | | | | Pancreas & | | | | | | | |
| Cancer | Lung | | Melanoma | | Ovary | | Gallbladder | | Prostate | | Renal | | Sarcoma | |
| Stage | % | Fraction | % | Fraction | % | Fraction | % | Fraction | % | Fraction | % | Fraction | % | Fraction |
| All | 44 | 675/1532 | 44 | 678/1532 | 44 | 666/1532 | 44 | 678/1532 | 42 | 639/1532 | 44 | 679/1532 | 44 | 666/1532 |
| I | 10 | 43/422 | 11 | 46/422 | 10 | 43/422 | 10 | 44/422 | 8 | 35/422 | 11 | 45/422 | 10 | 40/422 |
| II | 33 | 126/388 | 32 | 125/388 | 30 | 117/388 | 31 | 120/388 | 32 | 125/388 | 33 | 127/388 | 31 | 122/388 |
| III | 63 | 198/313 | 60 | 187/313 | 62 | 195/313 | 63 | 198/313 | 56 | 175/313 | 62 | 193/313 | 61 | 192/313 |
| I + II | 21 | 169/810 | 21 | 171/810 | 20 | 160/810 | 20 | 164/810 | 20 | 160/810 | 21 | 172/810 | 20 | 162/810 |
| I + II + III | 33 | 367/1123 | 32 | 358/1123 | 32 | 355/1123 | 32 | 362/1123 | 30 | 335/1123 | 33 | 365/1123 | 32 | 354/1123 |
| III + IV | 73 | 493/676 | 73 | 491/676 | 73 | 490/676 | 74 | 498/676 | 69 | 469/676 | 72 | 488/676 | 72 | 487/676 |
| IV | 81 | 295/363 | 84 | 304/363 | 81 | 295/363 | 83 | 300/363 | 81 | 294/363 | 81 | 295/363 | 81 | 295/363 |

| | | | | | | | Random 50% | | Random 50% | | Random 50% | |
|---|---|---|---|---|---|---|---|---|---|---|---|---|
| Cancer | Thyroid | | Upper GI | | Uterine | | Colorectal | | Lung | | Pancreas & Gallbladder | |
| Stage | % | Fraction | % | Fraction | % | Fraction | % | Fraction | % | Fraction | % | Fraction |
| All | 43 | 655/1532 | 43 | 654/1532 | 44 | 668/1532 | 40 | 618/1532 | 44 | 679/1532 | 44 | 669/1532 |
| I | 10 | 43/422 | 10 | 41/422 | 11 | 47/422 | 7 | 31/422 | 10 | 42/422 | 10 | 42/422 |
| II | 30 | 115/388 | 31 | 121/388 | 31 | 121/388 | 27 | 106/388 | 32 | 125/388 | 30 | 117/388 |
| III | 60 | 187/313 | 59 | 186/313 | 62 | 195/313 | 58 | 180/313 | 64 | 201/313 | 63 | 196/313 |
| I + II | 20 | 158/810 | 20 | 162/810 | 21 | 168/810 | 17 | 137/810 | 21 | 167/810 | 20 | 159/810 |
| I + II + III | 31 | 345/1123 | 31 | 348/1123 | 32 | 363/1123 | 28 | 317/1123 | 33 | 368/1123 | 32 | 355/1123 |
| III + IV | 71 | 478/676 | 71 | 478/676 | 72 | 489/676 | 70 | 471/676 | 74 | 500/676 | 73 | 495/676 |
| IV | 80 | 291/363 | 80 | 292/363 | 81 | 294/363 | 80 | 291/363 | 82 | 299/363 | 82 | 299/363 |

TABLE 7
Accuracy of cancer type determinations with 99.0% specificity by a classifier using only target genomic regions specific to the
indicated cancer type.

| | | | Bladder & | | | | | | | | | | Liver & | |
|---|---|---|---|---|---|---|---|---|---|---|---|---|---|---|
| Cancer | Anorectal | | Urothelial | | Breast | | Cervical | | Colorectal | | Head & Neck | | Bile duct | |
| Stage | % | Fraction | % | Fraction | % | Fraction | % | Fraction | % | Fraction | % | Fraction | % | Fraction |
| All | 89 | 493/552 | 90 | 549/612 | 90 | 534/595 | 89 | 516/577 | 89 | 461/516 | 90 | 514/574 | 89 | 485/546 |
| I | 73 | 19/26 | 74 | 26/35 | 69 | 22/32 | 81 | 21/26 | 76 | 16/21 | 77 | 20/26 | 74 | 23/31 |
| II | 89 | 86/97 | 91 | 100/110 | 89 | 101/113 | 87 | 94/108 | 88 | 85/97 | 89 | 93/104 | 92 | 91/99 |
| III | 89 | 143/161 | 91 | 159/175 | 92 | 153/167 | 91 | 149/163 | 92 | 135/147 | 89 | 150/168 | 88 | 139/158 |
| I + II | 85 | 105/123 | 87 | 126/145 | 85 | 123/145 | 86 | 115/134 | 86 | 101/118 | 87 | 113/130 | 88 | 114/130 |
| I + II + III | 87 | 248/284 | 89 | 285/320 | 89 | 276/312 | 89 | 264/297 | 89 | 236/265 | 88 | 263/298 | 88 | 253/288 |
| III + IV | 90 | 379/420 | 91 | 411/454 | 91 | 398/436 | 90 | 389/431 | 91 | 352/389 | 90 | 389/431 | 89 | 366/410 |
| IV | 91 | 236/259 | 90 | 252/279 | 91 | 245/269 | 90 | 240/268 | 90 | 217/242 | 91 | 239/263 | 90 | 227/252 |
| | | | | | | | Pancreas & | | | | | | | |
| Cancer | Lung | | Melanoma | | Ovary | | Gallbladder | | Prostate | | Renal | | Sarcoma | |
| Stage | % | Fraction | % | Fraction | % | Fraction | % | Fraction | % | Fraction | % | Fraction | % | Fraction |
| All | 89 | 536/600 | 89 | 504/565 | 89 | 457/511 | 90 | 530/589 | 90 | 502/560 | 90 | 517/576 | 90 | 490/546 |
| I | 80 | 24/30 | 79 | 22/28 | 76 | 22/29 | 70 | 19/27 | 68 | 19/28 | 68 | 21/31 | 72 | 18/25 |
| II | 90 | 102/114 | 87 | 89/102 | 89 | 81/91 | 88 | 98/112 | 88 | 90/102 | 91 | 93/102 | 87 | 85/98 |
| III | 90 | 154/172 | 91 | 140/154 | 92 | 133/145 | 92 | 158/171 | 88 | 137/155 | 89 | 144/161 | 90 | 138/154 |
| I + II | 88 | 126/144 | 85 | 111/130 | 86 | 103/120 | 84 | 117/139 | 84 | 109/130 | 86 | 114/133 | 84 | 103/123 |
| I + II + III | 89 | 280/316 | 88 | 251/284 | 89 | 236/265 | 89 | 275/310 | 86 | 246/285 | 88 | 258/294 | 87 | 241/277 |
| III + IV | 90 | 401/446 | 90 | 380/422 | 90 | 345/382 | 92 | 399/436 | 91 | 386/423 | 91 | 387/426 | 91 | 373/409 |
| IV | 90 | 247/274 | 90 | 240/268 | 90 | 212/237 | 91 | 241/265 | 93 | 249/268 | 92 | 243/265 | 92 | 235/255 |

| | | | | | | | Random 50% | | Random 50% | | Random 50% | |
|---|---|---|---|---|---|---|---|---|---|---|---|---|
| Cancer | Thyroid | | Upper GI | | Uterine | | Colorectal | | Lung | | Pancreas & Gallbladder | |
| Stage | % | Fraction | % | Fraction | % | Fraction | % | Fraction | % | Fraction | % | Fraction |
| All | 89 | 440/495 | 89 | 463/520 | 90 | 546/608 | 90 | 446/497 | 89 | 533/596 | 90 | 518/579 |
| I | 78 | 18/23 | 71 | 17/24 | 75 | 27/36 | 79 | 15/19 | 77 | 23/30 | 65 | 17/26 |
| II | 93 | 74/80 | 87 | 83/95 | 89 | 99/111 | 89 | 78/88 | 89 | 101/114 | 87 | 91/105 |
| III | 90 | 125/139 | 91 | 131/144 | 90 | 161/178 | 88 | 130/147 | 91 | 157/172 | 93 | 157/169 |
| I + II | 89 | 92/103 | 84 | 100/119 | 86 | 126/147 | 87 | 93/107 | 86 | 124/144 | 82 | 108/131 |
| I + II + III | 90 | 217/242 | 88 | 231/263 | 88 | 287/325 | 88 | 223/254 | 89 | 281/316 | 88 | 265/300 |
| III + IV | 89 | 334/377 | 91 | 352/389 | 91 | 413/453 | 90 | 345/382 | 91 | 401/442 | 92 | 398/434 |
| IV | 88 | 209/238 | 90 | 221/245 | 92 | 252/275 | 92 | 215/235 | 90 | 244/270 | 91 | 241/265 |

TABLE 8
Sensitivity with 99.0% specificity for the indicated Cancer Type by a classifier using only target genomic
regions specific to the indicated cancer type.

| | | | Bladder & | | | | | | | | | | Liver & | |
|---|---|---|---|---|---|---|---|---|---|---|---|---|---|---|
| Cancer | Anorectal | | Urothelial | | Breast | | Cervical | | Colorectal | | Head & Neck | | Bile duct | |
| Stage | % | Fraction | % | Fraction | % | Fraction | % | Fraction | % | Fraction | % | Fraction | % | Fraction |
| All | 79 | 11/14 | 50 | 8/16 | 29 | 71/247 | 36 | 4/11 | 69 | 83/121 | 84 | 52/62 | 86 | 25/29 |
| I | 50 | 2/4 | 50 | 3/6 | 2 | 2/102 | 13 | 1/8 | 23 | 3/13 | 86 | 6/7 | 60 | 3/5 |
| II | 80 | 4/5 | 57 | 4/7 | 36 | 39/110 | 100 | 1/1 | 41 | 9/22 | 77 | 10/13 | 86 | 6/7 |
| III | 100 | 5/5 | 50 | 1/2 | 82 | 22/27 | 100 | 2/2 | 71 | 29/41 | 81 | 13/16 | 86 | 6/7 |
| I + II | 67 | 6/9 | 54 | 7/13 | 19 | 41/212 | 22 | 2/9 | 34 | 12/35 | 80 | 16/20 | 75 | 9/12 |
| I + II + III | 79 | 11/14 | 53 | 8/15 | 26 | 63/239 | 36 | 4/11 | 54 | 41/76 | 81 | 29/36 | 79 | 15/19 |
| III + IV | 100 | 5/5 | 33 | 1/3 | 86 | 30/35 | 100 | 2/2 | 83 | 71/86 | 86 | 36/42 | 94 | 16/17 |
| IV | n.a. | 0 | 0 | 0/1 | 100 | 8/8 | | | 93 | 42/45 | 89 | 23/26 | 100 | 10/10 |
| | | | | | | | Pancreas & | | | | | | | |
| Cancer | Lung | | Melanoma | | Ovary | | Gallbladder | | Prostate | | Renal | | Sarcoma | |
| Stage | % | Fraction | % | Fraction | % | Fraction | % | Fraction | % | Fraction | % | Fraction | % | Fraction |
| All | 64 | 166/261 | 43 | 3/7 | 84 | 31/37 | 74 | 70/95 | 11.7 | 22/188 | 21.4 | 12/56 | 47 | 8/17 |
| I | 13 | 8/60 | 0 | 0/3 | 25 | 1/4 | 40 | 6/15 | 2.6 | 1/39 | 2.7 | 1/37 | 50 | 1/2 |
| II | 61 | 14/23 | 0 | 0/1 | 0 | 0/2 | 67 | 10/15 | 5.3 | 6/113 | 0.0 | 0/4 | 0 | 0/4 |
| III | 75 | 54/72 | 0 | 0/4 | 96 | 24/25 | 68 | 13/19 | 10.5 | 2/19 | 50.0 | 2/4 | 60 | 3/5 |
| I + II | 27 | 22/83 | 0 | 0/4 | 17 | 1/6 | 53 | 16/30 | 4.6 | 7/152 | 2.4 | 1/41 | 17 | 1/6 |
| I + II + III | 49 | 76/155 | 100 | 3/3 | 81 | 25/31 | 59 | 29/49 | 5.3 | 9/171 | 6.7 | 3/45 | 36 | 4/11 |
| III + IV | 81 | 144/178 | 100 | 3/3 | 97 | 30/31 | 83 | 54/65 | 41.7 | 15/36 | 73.3 | 11/15 | 64 | 7/11 |
| IV | 85 | 90/106 | n.a. | 0 | 100 | 6/6 | 89 | 41/46 | 76.5 | 13/17 | 81.8 | 9/11 | 67 | 4/6 |

| | | | | | | | Random 50% | | Random 50% | | Random 50% | |
|---|---|---|---|---|---|---|---|---|---|---|---|---|
| Cancer | Thyroid | | Upper GI | | Uterine | | Colorectal | | Lung | | Pancreas & Gallbladder | |
| Stage | % | Fraction | % | Fraction | % | Fraction | % | Fraction | % | Fraction | % | Fraction |
| All | 25 | 1/4 | 70 | 47/67 | 21 | 18/84 | 66 | 80/121 | 64 | 166/261 | 74 | 70/95 |
| I | 0 | 0/2 | 11 | 1/9 | 16 | 12/73 | 15 | 2/13 | 12 | 7/60 | 40 | 6/15 |
| II | 0 | 0/1 | 75 | 9/12 | 33 | 1/3 | 36 | 8/22 | 61 | 14/23 | 67 | 10/15 |
| III | n.a. | 0 | 63 | 12/19 | 60 | 3/5 | 68 | 28/41 | 76 | 55/72 | 63 | 12/19 |
| I + II | 0 | 0/3 | 48 | 10/21 | 17 | 13/76 | 29 | 10/1 | 25 | 21/83 | 53 | 16/30 |
| I + II + III | 0 | 0/3 | 55 | 22/40 | 20 | 16/81 | 50 | 38/76 | 49 | 76/155 | 57 | 28/49 |
| III + IV | 100 | 1/1 | 80 | 37/46 | 63 | 5/8 | 81 | 70/86 | 82 | 145/178 | 83 | 54/65 |
| IV | 100 | 1/1 | 93 | 25/27 | 67 | 2/3 | 93 | 42/45 | 85 | 90/106 | 91 | 42/46 |

### Example 6—Detection of Cancer Using Cancer Assay Panel

[0376] Blood samples are collected from a group of individuals previously diagnosed with cancer of a TOO (“test group”), and other groups of individuals without cancer or diagnosed with a different type of cancer (“other group”). cfDNA fragments are extracted from the blood samples and treated with bisulfite to convert unmethylated cytosines to uracils. The cancer assay panel described herein is applied to the bisulfite treated samples. Unbound cfDNA fragments are washed and cfDNA fragments bound to the probes are collected. The collected cfDNA fragments are amplified and sequenced. The sequence reads confirm that the probes specifically enrich cfDNA fragments having methylation patterns indicative of cancer of a TOO and samples from the test group include significantly more of the differentially methylated cfDNA fragments compared to the other group.

[0377] While preferred embodiments of the present disclosure have been shown and described herein, it will be obvious to those skilled in the art that such embodiments are provided by way of example only. Numerous variations, changes, and substitutions will now occur to those skilled in the art without departing from the disclosure. It should be understood that various alternatives to the embodiments of the disclosure described herein may be employed in practicing the disclosure. It is intended that the following claims define the scope of the disclosure and that methods and structures within the scope of these claims and their equivalents be covered thereby.

The application's sequence listing, which the Patent Office published only in electronic form, follows.

SEQUENCE LISTING (40731 sequences)

SEQ ID NO: 1 - DNA, 73 bp, Homo sapiens
  chr1:41832149-41832222
  hyper
ccccgctctgctccccgcggaccccctcgctcccttccggccccacggcggccgcccccgccacaccccccgc

SEQ ID NO: 2 - DNA, 40 bp, Homo sapiens
  chr1:161410664-161410704
  hyper
ctcaccactatactaacgaggacgacggcgacggtcgccg

SEQ ID NO: 3 - DNA, 36 bp, Homo sapiens
  chr2:48011382-48011418
  hyper
taggctgcacgtgcaccgagacgaagatagaatatt

SEQ ID NO: 4 - DNA, 104 bp, Homo sapiens
  chr2:97779475-97779579
  hyper
tatggaagacggcaagcgggagaggtggcccaccctcatggagcgcttgtgctcggatggcttcgcatttccccaataccccattaaaccgtatcatctgaaga

SEQ ID NO: 5 - DNA, 5 bp, Homo sapiens
  chr2:240402555-240402560
  hyper
attta

SEQ ID NO: 6 - DNA, 105 bp, Homo sapiens
  chr3:42922531-42922636
  hyper
gacagccagagggcccgcgggcgctcgggaaaggggcgggtgcacttccggcccccgaagcctcagcgagggagtctccgggaggcgcggcggggagtaggcagt

SEQ ID NO: 7 - DNA, 52 bp, Homo sapiens
  chr3:111579038-111579090
  hyper
tgagaaagagaaggtccgctgctggatggtgtagggcgcgggattcagagaa

SEQ ID NO: 8 - DNA, 43 bp, Homo sapiens
  chr3:127451673-127451716
  hyper
atgtctatgaggccaccgagtgcactgacggacaccatgactg

SEQ ID NO: 9 - DNA, 31 bp, Homo sapiens
  chr3:127451760-127451791
  hyper
gcagagctgggaggagcggtgggtggaagga

SEQ ID NO: 10 - DNA, 42 bp, Homo sapiens
  chr3:155722291-155722333
  hyper
gagccgcagactggagctgttcctattcggccatcttgccag

SEQ ID NO: 11 - DNA, 37 bp, Homo sapiens
  chr3:195622171-195622208
  hyper
gagccccaaatcccagcggctgcggtcagggagagaa

SEQ ID NO: 12 - DNA, 89 bp, Homo sapiens
  chr3:195622289-195622378
  hyper
tccagaagtgcagggccgctactgcgtctcagcccccatagcctcatccgccatcggccggcggccgggtggtcgcgcccctcctcctg

SEQ ID NO: 13 - DNA, 54 bp, Homo sapiens
  chr3:195622513-195622567
  hyper
tcgccggccgcggaaccgggctccactcagccctcagcccgcctccagggcccc

SEQ ID NO: 14 - DNA, 111 bp, Homo sapiens
  chr3:195622598-195622709
  hyper
gagtcccccgtattcacggtaaggggccatccgagaagcccacagcagaggggcctccgtccgactccatctgagaccccctcctccgaggcatcccggggctgcagccca

SEQ ID NO: 15 - DNA, 42 bp, Homo sapiens
  chr4:1243420-1243462
  hyper
ccgagccctgatttaccgtccgagagccggcggcacatggga

SEQ ID NO: 16 - DNA, 74 bp, Homo sapiens
  chr4:1243487-1243561
  hyper
ccagtgcgtccccaggcgggggagccccgactcctggagggaccgcgtcctgcccggcccgggaagttcagggc

SEQ ID NO: 17 - DNA, 31 bp, Homo sapiens
  chr4:38664663-38664694
  hyper
tgccgccccgctcgctcgcagcaccctgaag

SEQ ID NO: 18 - DNA, 60 bp, Homo sapiens
  chr5:110847995-110848055
  hyper
gacgcacctggcaggacgccccgggcgccacagtcgccctccacacgggccaccccaatc

SEQ ID NO: 19 - DNA, 31 bp, Homo sapiens
  chr5:110848250-110848281
  hyper
tcagggcaaggcgggccgagcccccagcccc

SEQ ID NO: 20 - DNA, 39 bp, Homo sapiens
  chr5:176739418-176739457
  hyper
ccgccgctgatccacacgttcgggcgggaaaagaagcag

SEQ ID NO: 21 - DNA, 89 bp, Homo sapiens
  chr5:176739463-176739552
  hyper
aatttgaaaacccaagcgatggggcggggttgagaggggagctgggcctcaatgcgcaggcgccggcggaggggcggcggacccggctc

SEQ ID NO: 22 - DNA, 31 bp, Homo sapiens
  chr6:27792345-27792376
  hyper
agttttttgaacacagcggcacacgtgtggc

SEQ ID NO: 23 - DNA, 88 bp, Homo sapiens
  chr6:34405048-34405136
  hyper
cgctggccagccgctccgagtgcgaggcccgcagaacctgtgcccacccgcccacccagaattcgcgctggcccgcgagccccgagcg

SEQ ID NO: 24 - DNA, 31 bp, Homo sapiens
  chr6:157446395-157446426
  hyper
gaaaaccaataagcctcgggcctggctggag

SEQ ID NO: 25 - DNA, 31 bp, Homo sapiens
  chr7:5329219-5329250
  hyper
gagaagggactttaatcgcaaaacgccttca

SEQ ID NO: 26 - DNA, 31 bp, Homo sapiens
  chr8:40047837-40047868
  hyper
caccttcaacattctgcgggcaatgatgttc

SEQ ID NO: 27 - DNA, 31 bp, Homo sapiens
  chr10:49892636-49892667
  hyper
tgcaccagtggtcacacggctagtgaagagg

SEQ ID NO: 28 - DNA, 31 bp, Homo sapiens
  chr10:94000686-94000717
  hyper
tttcatttagctgcagcgaaccacgagggag

SEQ ID NO: 29 - DNA, 46 bp, Homo sapiens
  chr11:64038084-64038130
  hyper
acccagaagatgagaccgcaattcgagaatcaaagggccgggagcg

SEQ ID NO: 30 - DNA, 36 bp, Homo sapiens
  chr11:69062211-69062247
  hyper
cagtgggacccacagacggctcgggagtgaccaagc

SEQ ID NO: 31 - DNA, 31 bp, Homo sapiens
  chr11:69062275-69062306
  hyper
gtggacacctcctacccggagccccccaagg

SEQ ID NO: 32 - DNA, 31 bp, Homo sapiens
  chr11:69062341-69062372
  hyper
ctccaggccctacccacgacagcccagctgg

SEQ ID NO: 33 - DNA, 31 bp, Homo sapiens
  chr12:22198510-22198541
  hyper
tgagggaaaccctcaccggatgagagaggga

SEQ ID NO: 34 - DNA, 37 bp, Homo sapiens
  chr14:95864477-95864514
  hyper
gtgtatggagtgtgtccgtgtccgtgtgtgcctctgt

SEQ ID NO: 35 - DNA, 31 bp, Homo sapiens
  chr15:43584165-43584196
  hyper
aatagtgttacctgcccgtagttccagggcc

SEQ ID NO: 36 - DNA, 77 bp, Homo sapiens
  chr15:70391278-70391355
  hyper
aagcctgtaggtgtctcggtcgctagcctggacactccgagggacgcggacgctcccccgctcgctcgccccggccc

SEQ ID NO: 37 - DNA, 31 bp, Homo sapiens
  chr15:80215296-80215327
  hyper
ctgtacttgcaagcctcgaacccccaactcc

SEQ ID NO: 38 - DNA, 45 bp, Homo sapiens
  chr15:80215447-80215492
  hyper
cgtccccgcccagccccgcccggcgcccggcgctcaccagctctc

SEQ ID NO: 39 - DNA, 697 bp, Homo sapiens
  chr15:80215523-80216220
  hyper
aggtcgtctagcaagccgccctcccccgccgccagcaagaaggtggcgtctcgcagctcctcgttattcgtccgcctcgggtccatccggccccgccgcccgactttgcgctgagacccaaggggaagccccgaggggaccccgcgccgtaggagggagtggaggagccggcgaaccgcgatggagccggggcccagcacagcgcgagcggctcctcggctgttcgtgctgcttccccagcttcttcaccggcacctgcagcttccgcacctcctggtccgcgttcacgttagagttaacgtcctccatcccggccccgctgcctccgccgcccgcggccctctcgctctcgcagcaacaagggaagagccggaggaaagaggcgtccacgccgctcactccagccgaggcccccgcatatagcagggccaggccccgtcgccagggttcccccagcgcgggtcccgaagcaccgctggccacagatgaaccgcctcctcagcgcaggtccgggattcggggaggcagcgccaatatccggtctctgcagccatcttccctccgtccctccgcccaccgagggtcggccctgtaggtgacctcagagcgtcggggatgggcgtggccccgtcgggcgctaagaagacctagcgcagagaggaccgccgagctcccgacggggcggggccaggtgtgt

SEQ ID NO: 40 - DNA, 252 bp, Homo sapiens
  chr15:80216261-80216513
  hyper
cggcggaagtggaacgcggcctgacctgcgacggaaagccactgcaagcccggaggcgaacagaaggcattccgcgagccgggctgagttggtgaacacggtcctcgttcaccccgcctattggtctgggcgtgtggggtattctccacccacttatacggcgtgtgggaccgacgggcccgtcctgcccggctccggtccggatctcgagtaggcgctcaatgggattcggggagacgtagtttactttgt

SEQ ID NO: 41 - DNA, 31 bp, Homo sapiens
  chr16:50773733-50773764
  hyper
cagatatctctcttcccggtgagcctgaata

SEQ ID NO: 42 - DNA, 31 bp, Homo sapiens
  chr16:50773769-50773800
  hyper
tcagaattagctttaacgcaatgttctaagc

SEQ ID NO: 43 - DNA, 39 bp, Homo sapiens
  chr17:7761564-7761603
  hyper
acctgggacgcgtgtacgacctaacgtcattggcacagg

SEQ ID NO: 44 - DNA, 31 bp, Homo sapiens
  chr17:17687052-17687083
  hyper
tgacccccctccacctcgatggggtgctgag

SEQ ID NO: 45 - DNA, 52 bp, Homo sapiens
  chr17:70270192-70270244
  hyper
actaacatacttctcacgggaagcactgtgcctgtcccgaccaggaggggct

SEQ ID NO: 46 - DNA, 31 bp, Homo sapiens
  chr17:79889370-79889401
  hyper
tcccagcactgccaggcgctttgctggggca

SEQ ID NO: 47 - DNA, 31 bp, Homo sapiens
  chr18:20512627-20512658
  hyper
tctagtggtctaaaaacgattcttttacaaa

SEQ ID NO: 48 - DNA, 31 bp, Homo sapiens
  chr19:11950106-11950137
  hyper
ggtcagtgctccaacacggggaatttgagtc

SEQ ID NO: 49 - DNA, 45 bp, Homo sapiens
  chr20:4981853-4981898
  hyper
gggccagggtggccggcgggcgcggggtcccgggagatgggtcgg

SEQ ID NO: 50 - DNA, 34 bp, Homo sapiens
  chr20:4982139-4982173
  hyper
gccgcctgcaaaatggcgccgcggaggggcgggc

SEQ ID NO: 51 - DNA, 42 bp, Homo sapiens
  chr20:4982183-4982225
  hyper
gtgcagcggagccgcccgcccccgcgccggtctggggcccac

SEQ ID NO: 52 - DNA, 81 bp, Homo sapiens
  chr20:4982237-4982318
  hyper
ccccgacccctgccctcgggcctccccccggggaggggctgctccctggcacccggcagcgctccccggaacatcccgggc

SEQ ID NO: 53 - DNA, 24 bp, Homo sapiens
  chr20:52308720-52308744
  hyper
aaactgacctggaggccgggcgcg

SEQ ID NO: 54 - DNA, 31 bp, Homo sapiens
  chr22:40280490-40280521
  hyper
tctttttaacaaaattcgtaagctggtacta

SEQ ID NO: 55 - DNA, 31 bp, Homo sapiens
  chrX:39959180-39959211
  hyper
tgcagaatggaatgcacgcttttttcttcct

SEQ ID NO: 56 - DNA, 34 bp, Homo sapiens
  chr1:2121713-2121747
  hypo
agaaggacgccgtcaccggcgtgcaggctgccaa

SEQ ID NO: 57 - DNA, 31 bp, Homo sapiens
  chr1:2267946-2267977
  hypo
cccctggggtgcaggccgcctctggatctgc

SEQ ID NO: 58 - DNA, 88 bp, Homo sapiens
  chr1:14121944-14122032
  hypo
agtttgtgctacctctcgtctgtggatctaggcgtgaggaggtagaagggagcccctggtcacgcccctgtgccgccttctagtggca

SEQ ID NO: 59 - DNA, 31 bp, Homo sapiens
  chr1:14122108-14122139
  hypo
gctgaaaactgtgttgcgggtgaatggatgt

SEQ ID NO: 60 - DNA, 40 bp, Homo sapiens
  chr1:25115717-25115757
  hypo
atagaaacaggctgggcgaggaggctcacgcctgtaatcc

SEQ ID NO: 61 - DNA, 31 bp, Homo sapiens
  chr1:25230201-25230232
  hypo
gtcctgagccccaacacgtacttgagaggga

SEQ ID NO: 62 - DNA, 51 bp, Homo sapiens
  chr1:27056296-27056347
  hypo
gatgaccatgcagggccgggcgcagagtgccatgggcggcctctcttatac

SEQ ID NO: 63 - DNA, 31 bp, Homo sapiens
  chr1:28364960-28364991
  hypo
aaaaaaaaaaaaaaaccgaacacagattgga

SEQ ID NO: 64 - DNA, 31 bp, Homo sapiens
  chr1:28852334-28852365
  hypo
gggagagctagagaggcgaggttctcgggaa

SEQ ID NO: 65 - DNA, 31 bp, Homo sapiens
  chr1:41281552-41281583
  hypo
caggtctctctgaccccgagctgctgtcctt

SEQ ID NO: 66 - DNA, 73 bp, Homo sapiens; identical to SEQ ID NO: 1
  chr1:41832149-41832222
  hypo

SEQ ID NO: 67 - DNA, 31 bp, Homo sapiens
  chr1:53562234-53562265
  hypo
ctcacacactccacttcgatacactcacaca

SEQ ID NO: 68 - DNA, 31 bp, Homo sapiens
  chr1:54408755-54408786
  hypo
tttacacctcctggggcgtgaactggactca

SEQ ID NO: 69 - DNA, 31 bp, Homo sapiens
  chr1:54408817-54408848
  hypo
gagagacaaggactttcgttcaaagtaaaga

SEQ ID NO: 70 - DNA, 45 bp, Homo sapiens
  chr1:54408858-54408903
  hypo
ctttcatccctgaaaacgtccaagaaaagtcggtaagagatcata

SEQ ID NO: 71 - DNA, 31 bp, Homo sapiens
  chr1:54408914-54408945
  hypo
aaggcaaagaaatctacgaaggaagccaaag

SEQ ID NO: 72 - DNA, 21 bp, Homo sapiens
  chr1:89347741-89347762
  hypo
cagaacgctgggaggtcgagg

SEQ ID NO: 73 - DNA, 31 bp, Homo sapiens
  chr1:90448904-90448935
  hypo
cctgcagtcagtttcccgtattaacatctta

SEQ ID NO: 74 - DNA, 64 bp, Homo sapiens
  chr1:90449039-90449103
  hypo
tcttctagaatctcatcgcatccaggttatcacatttcatttcgttgccgcgtcttcttaggct

SEQ ID NO: 75 - DNA, 40 bp, Homo sapiens; identical to SEQ ID NO: 2
  chr1:161410664-161410704
  hypo

SEQ ID NO: 76 - DNA, 31 bp, Homo sapiens
  chr1:200612480-200612511
  hypo
aaacaagtaggccaggcgtggtggctcatgc

SEQ ID NO: 77 - DNA, 31 bp, Homo sapiens
  chr1:230219679-230219710
  hypo
atggaggagctggagccgtggacaggcctga

SEQ ID NO: 78 - DNA, 41 bp, Homo sapiens
  chr1:230219713-230219754
  hypo
catctccatcagcacccggatgttggcgtacatgcctgtga

SEQ ID NO: 79 - DNA, 31 bp, Homo sapiens
  chr1:230219794-230219825
  hypo
tgtcactttggacacccgagatttccctgat

SEQ ID NO: 80 - DNA, 31 bp, Homo sapiens
  chr1:230219849-230219880
  hypo
ttaatttgatcccctgcgtcccagtggactg

SEQ ID NO: 81 - DNA, 53 bp, Homo sapiens
  chr1:230821540-230821593
  hypo
gtgctgagcaccagcccggcgggtccttgctgggacctcggattgcagtgctg

SEQ ID NO: 82 - DNA, 31 bp, Homo sapiens
  chr1:230821595-230821626
  hypo
ctttctctggggacagcgtgagtaacagaca

SEQ ID NO: 83 - DNA, 31 bp, Homo sapiens
  chr1:230821628-230821659
  hypo
caggtaaaccagtcatcgcagtgtgaggagt

SEQ ID NO: 84 - DNA, 31 bp, Homo sapiens
  chr2:2879706-2879737
  hypo
cacctagcaagggccccggtacaaaggacac

SEQ ID NO: 85 - DNA, 52 bp, Homo sapiens
  chr2:2879768-2879820
  hypo
gcagggtggcaagggccggtgggcatggcccacaaagcggctgggtcctggg

SEQ ID NO: 86 - DNA, 31 bp, Homo sapiens
  chr2:2879823-2879854
  hypo
aggctgggtgtccccacgctgtctgtgcccc

SEQ ID NO: 87 - DNA, 31 bp, Homo sapiens
  chr2:2879895-2879926
  hypo
agggcctttgctcttgcgtgtgtttcctcag

SEQ ID NO: 88 - DNA, 31 bp, Homo sapiens
  chr2:3272898-3272929
  hypo
tgcacatccaaaaatgcgtgtggtctgatca

SEQ ID NO: 89 - DNA, 31 bp, Homo sapiens
  chr2:10289575-10289606
  hypo
gttgtttaattttcagcgaaaagtttgctgg

SEQ ID NO: 90 - DNA, 44 bp, Homo sapiens
  chr2:10601534-10601578
  hypo
tcactgtctaatacagcggccatgagccacgtgtagttcttgag

SEQ ID NO: 91 - DNA, 31 bp, Homo sapiens
  chr2:10634546-10634577
  hypo
cagggccttttccagacgtgggccatggaag

SEQ ID NO: 92 - DNA, 62 bp, Homo sapiens
  chr2:10634630-10634692
  hypo
gtcacagacatgtcttcggaagccagtcggggaggccagggctggggcgggccaggaccaat

SEQ ID NO: 93 - DNA, 31 bp, Homo sapiens
  chr2:10634717-10634748
  hypo
cccaaggaagagcagtcgagggcaagggcca

SEQ ID NO: 94 - DNA, 31 bp, Homo sapiens
  chr2:15027588-15027619
  hypo
aagcctatgagaaatacgaggcagggagggc

SEQ ID NO: 95 - DNA, 31 bp, Homo sapiens
  chr2:25044264-25044295
  hypo
cgtgaacctccccacccgaattgcctcagtt

SEQ ID NO: 96 - DNA, 31 bp, Homo sapiens
  chr2:25044342-25044373
  hypo
ggaagggagcctgctgcggggcaggccagct

SEQ ID NO: 97 - DNA, 18 bp, Homo sapiens
  chr2:28502826-28502844
  hypo
gcccggcagaggcttttt

SEQ ID NO: 98 - DNA, 55 bp, Homo sapiens
  chr2:85290473-85290528
  hypo
cctccaatccctctgccgctcctccctctcagaggaaaggcggagtcctcaccac

SEQ ID NO: 99 - DNA, 40 bp, Homo sapiens
  chr2:89601944-89601984
  hypo
atagcagcacacaggccgagtgaggtagctcacgcctgta

SEQ ID NO: 100 - DNA, 104 bp, Homo sapiens; identical to SEQ ID NO: 4
  chr2:97779475-97779579
  hypo

SEQ ID NO: 101 - DNA, 25 bp, Homo sapiens
  chr2:97825525-97825550
  hypo
atttttttttttgagacggagtctc

SEQ ID NO: 102 - DNA, 31 bp, Homo sapiens
  chr2:97890111-97890142
  hypo
actaaagattaagcttcgttgaaacactttt

SEQ ID NO: 103 - DNA, 31 bp, Homo sapiens
  chr2:127816629-127816660
  hypo
ccggccggctctggctcgtggttgactctga

SEQ ID NO: 104 - DNA, 43 bp, Homo sapiens
  chr2:137195176-137195219
  hypo
ctgtgcaattccttcccgccatgctgcccgcatccctgttatc

SEQ ID NO: 105 - DNA, 49 bp, Homo sapiens
  chr2:225692100-225692149
  hypo
ccactgaaaggggtcacggaaagcaaacctcaatcggggaagataaact

SEQ ID NO: 106 - DNA, 31 bp, Homo sapiens
  chr2:228010266-228010297
  hypo
gctgtggttagaacttcgggtcacaccattc

SEQ ID NO: 107 - DNA, 91 bp, Homo sapiens
  chr2:228185365-228185456
  hypo
ggctgtgtgcagtgctcgcaggccagcacgcgttccgtgtgggtgcgggcttggcaggccccacgctcaaagtggccggccagcaccgctg

SEQ ID NO: 108 - DNA, 31 bp, Homo sapiens
  chr2:239144284-239144315
  hypo
gatgagtcataacccacgagaagtgaagctg

SEQ ID NO: 109 - DNA, 41 bp, Homo sapiens
  chr2:240064715-240064756
  hypo
agctcagcactgatcacgccctgtcacgcatggctcctgga

SEQ ID NO: 110 - DNA, 31 bp, Homo sapiens
  chr2:240402417-240402448
  hypo
ctgcccactccacacccgccaccttagttac

SEQ ID NO: 111 - DNA, 31 bp, Homo sapiens
  chr2:240402491-240402522
  hypo
tggcttttcttctctccggatcccactgttt

SEQ ID NO: 112 - DNA, 5 bp, Homo sapiens
  chr2:240402555-240402560
  hypo
attta

SEQ ID NO: 113 - DNA, 31 bp, Homo sapiens
  chr2:241789957-241789988
  hypo
aggggccagagccctgcgtgagaaagcccca

SEQ ID NO: 114 - DNA, 31 bp, Homo sapiens
  chr2:242895762-242895793
  hypo
tctgacccagggagcccgcagcaggcaggtc

SEQ ID NO: 115 - DNA, 31 bp, Homo sapiens
  chr3:52141679-52141710
  hypo
gggagatcaaggattccgataaagcccaagt

SEQ ID NO: 116 - DNA, 31 bp, Homo sapiens
  chr3:61332124-61332155
  hypo
ttgattttggacttctcgactcatgaaccat

SEQ ID NO: 117 - DNA, 31 bp, Homo sapiens
  chr3:62022461-62022492
  hypo
caaatgctaggtaattcgtaccatcctctga

SEQ ID NO: 118 - DNA, 27 bp, Homo sapiens
  chr3:64950009-64950036
  hypo
ggactacatgtgcgagacaccatgccc

SEQ ID NO: 119 - DNA, 23 bp, Homo sapiens
  chr3:88210213-88210236
  hypo
ttttttttttttgagacggagtc

SEQ ID NO: 120 - DNA, 31 bp, Homo sapiens
  chr3:119687780-119687811
  hypo
aaacataataagcacccgcaaaaatgaaatg

SEQ ID NO: 121 - DNA, 31 bp, Homo sapiens
  chr3:128122245-128122276
  hypo
tgcacctccctgacagcgtaggtcctagcag

SEQ ID NO: 122 - DNA, 31 bp, Homo sapiens
  chr3:133648600-133648631
  hypo
gcattgcttagcagtgcgggatcttccagga

SEQ ID NO: 123 - DNA, 42 bp, Homo sapiens; identical to SEQ ID NO: 10
  chr3:155722291-155722333
  hypo

SEQ ID NO: 124 - DNA, 31 bp, Homo sapiens
  chr3:183020691-183020722
  hypo
ctccctcctggctgggcgcggtggctcacac

SEQ ID NO: 125 - DNA, 31 bp, Homo sapiens
  chr3:196752752-196752783
  hypo
agaggccatgtgggtgcgggcaagagaggcc

SEQ ID NO: 126 - DNA, 31 bp, Homo sapiens
  chr3:196752819-196752850
  hypo
gaggaggtgacagttgcgctggactgtgatg

SEQ ID NO: 127 - DNA, 39 bp, Homo sapiens
  chr4:995246-995285
  hypo
cctctgcaggtaggtacggactggcgcatgtttccaagt

SEQ ID NO: 128 - DNA, 42 bp, Homo sapiens; identical to SEQ ID NO: 15
  chr4:1243420-1243462
  hypo

SEQ ID NO: 129 - DNA, 74 bp, Homo sapiens; identical to SEQ ID NO: 16
  chr4:1243487-1243561
  hypo

SEQ ID NO: 130 - DNA, 31 bp, Homo sapiens
  chr4:1925938-1925969
  hypo
atgtgtgtacagccaccgtttcaggcatgtt

SEQ ID NO: 131 - DNA, 29 bp, Homo sapiens
  chr4:2878139-2878168
  hypo
tagcttaggctgggtgcgtcggctcaagc

SEQ ID NO: 132 - DNA, 17 bp, Homo sapiens
  chr4:2961295-2961312
  hypo
ggcgacagacaaagact

SEQ ID NO: 133 - DNA, 31 bp, Homo sapiens
  chr4:3808368-3808399
  hypo
ccaatgaaacccattccgcatgccccatgat

SEQ ID NO: 134 - DNA, 34 bp, Homo sapiens
  chr4:7432356-7432390
  hypo
gagatgctcctctgtgcggcgcagtcaccacctc

SEQ ID NO: 135 - DNA, 58 bp, Homo sapiens
  chr4:7432516-7432574
  hypo
cagttacagcaccctccgctgaaaagccttttccagcctgaacgcggcggctatggag

SEQ ID NO: 136 - DNA, 31 bp, Homo sapiens
  chr4:8550061-8550092
  hypo
gtgcccaggtagctgccgctgcaacattatt

SEQ ID NO: 137 - DNA, 31 bp, Homo sapiens
  chr4:109295090-109295121
  hypo
cttgggagtgatgggacgaatatacccatgt

SEQ ID NO: 138 - DNA, 50 bp, Homo sapiens
  chr4:170105280-170105330
  hypo
ctcagggcactcccaccggcaggcttactgtgaaccgacatcccctactt

SEQ ID NO: 139 - DNA, 48 bp, Homo sapiens
  chr4:170105331-170105379
  hypo
tgaaatccatttggtacggcaggagatctcttgcgggatgtctgcatt

SEQ ID NO: 140 - DNA, 31 bp, Homo sapiens
  chr4:170105464-170105495
  hypo
accagagcacatcacacgtgcacacatccaa

SEQ ID NO: 141 - DNA, 31 bp, Homo sapiens
  chr5:174970-175001
  hypo
tgaaggggctgagctccgtgactcgatctcc

SEQ ID NO: 142 - DNA, 31 bp, Homo sapiens
  chr5:2094834-2094865
  hypo
aggatcggggaggaggcggccaggccagccc

SEQ ID NO: 143 - DNA, 20 bp, Homo sapiens
  chr5:110826285-110826305
  hypo
aactccgtcaaaaaaaaata

SEQ ID NO: 144 - DNA, 60 bp, Homo sapiens; identical to SEQ ID NO: 18
  chr5:110847995-110848055
  hypo

SEQ ID NO: 145 - DNA, 31 bp, Homo sapiens; identical to SEQ ID NO: 19
  chr5:110848250-110848281
  hypo

SEQ ID NO: 146 - DNA, 20 bp, Homo sapiens
  chr5:111160054-111160074
  hypo
gactccgtctcaaaaaataa

SEQ ID NO: 147 - DNA, 31 bp, Homo sapiens
  chr5:131982534-131982565
  hypo
gtaatggtctgcagcccgggggttggggacc

SEQ ID NO: 148 - DNA, 40 bp, Homo sapiens
  chr5:150066937-150066977
  hypo
ctgatggggctgggcacggtgactcatgcctataatctca

SEQ ID NO: 149 - DNA, 18 bp, Homo sapiens
  chr5:154929087-154929105
  hypo
gcccggatctcattattt

SEQ ID NO: 150 - DNA, 31 bp, Homo sapiens
  chr5:177800879-177800910
  hypo
cagggcagtcagagctcgctttgaacatatc

SEQ ID NO: 151 - DNA, 31 bp, Homo sapiens
  chr5:178702394-178702425
  hypo
tctgtggctgaagaaccggcccccaaagtta

SEQ ID NO: 152 - DNA, 31 bp, Homo sapiens
  chr5:180220014-180220045
  hypo
ctgccctgggcttgcccggctcccttgcccg

SEQ ID NO: 153 - DNA, 15 bp, Homo sapiens
  chr5:180255233-180255248
  hypo
cgtgccctgccaaac

SEQ ID NO: 154 - DNA, 31 bp, Homo sapiens
  chr5:180255249-180255280
  hypo
tctggtggtaaggcttcgattactaaatgga

SEQ ID NO: 155 - DNA, 31 bp, Homo sapiens
  chr6:24425298-24425329
  hypo
gtcatggtgttcttgtcggaatgtgaacata

SEQ ID NO: 156 - DNA, 31 bp, Homo sapiens
  chr6:24425331-24425362
  hypo
gcaccctctagcattacgaatctcttaggat

SEQ ID NO: 157 - DNA, 31 bp, Homo sapiens
  chr6:24425429-24425460
  hypo
tgctgctattttgggtcgtatcactgtaaaa

SEQ ID NO: 158 - DNA, 31 bp, Homo sapiens
  chr6:33907852-33907883
  hypo
aagcacggaggcatctcgtggctgtacccta

SEQ ID NO: 159 - DNA, 31 bp, Homo sapiens
  chr6:33907929-33907960
  hypo
tgttgatcctgagacccgttgtctagcttct

SEQ ID NO: 160 - DNA, 88 bp, Homo sapiens; identical to SEQ ID NO: 23
  chr6:34405048-34405136
  hypo

SEQ ID NO: 161 - DNA, 41 bp, Homo sapiens
  chr6:37100544-37100585
  hypo
agaaaagtagacctgccgggcgcggtggctcacgcctgcga

SEQ ID NO: 162 - DNA, 31 bp, Homo sapiens; identical to SEQ ID NO: 24
  chr6:157446395-157446426
  hypo

SEQ ID NO: 163 - DNA, 31 bp, Homo sapiens
  chr6:158488743-158488774
  hypo
tcccttcctgtgcacacgccatctgtgccct

SEQ ID NO: 164 - DNA, 31 bp, Homo sapiens
  chr6:158488821-158488852
  hypo
ctggggctctctgtgtcggtggtagcctggg

SEQ ID NO: 165 - DNA, 49 bp, Homo sapiens
  chr6:158488878-158488927
  hypo
cattcaggatgccctccggagcaggcccatcaacgcggagagtgcttag

SEQ ID NO: 166 - DNA, 31 bp, Homo sapiens
  chr7:526252-526283
  hypo
tgcctgcatgtgaatgcgtgtgaatgcatga

SEQ ID NO: 167 - DNA, 31 bp, Homo sapiens
  chr7:532562-532593
  hypo
ggatcctggaacctcccggcattcatgtgtg

SEQ ID NO: 168 - DNA, 39 bp, Homo sapiens
  chr7:1097389-1097428
  hypo
cccctgtgcacctgctcggccccccgagctcccggtggg

SEQ ID NO: 169 - DNA, 31 bp, Homo sapiens
  chr7:1932816-1932847
  hypo
ctgcctttcccccaaacggcagcccaggcag

SEQ ID NO: 170 - DNA, 31 bp, Homo sapiens
  chr7:1963283-1963314
  hypo
tgaaggcggctgtggccgtgggactgactgc

SEQ ID NO: 171 - DNA, 31 bp, Homo sapiens; identical to SEQ ID NO: 25
  chr7:5329219-5329250
  hypo

SEQ ID NO: 172 - DNA, 31 bp, Homo sapiens
  chr7:5483111-5483142
  hypo
aagtgttgcctaccaccgaggctacaaaacc

SEQ ID NO: 173 - DNA, 31 bp, Homo sapiens
  chr7:44291703-44291734
  hypo
gcaagaagtcaaggccgcgcctgtggattgg

SEQ ID NO: 174 - DNA, 31 bp, Homo sapiens
  chr7:45125844-45125875
  hypo
gaccctctgcacgctgcgtttgagggagaac

SEQ ID NO: 175 - DNA, 18 bp, Homo sapiens
  chr7:47733260-47733278
  hypo
ttctgacatagagtctcg

SEQ ID NO: 176 - DNA, 31 bp, Homo sapiens
  chr7:50342134-50342165
  hypo
aacctgcccaaggtcacgcagtggaggagag

SEQ ID NO: 177 - DNA, 31 bp, Homo sapiens
  chr7:98821689-98821720
  hypo
atgtgcatgccaagaacgtctccatctccac

SEQ ID NO: 178 - DNA, 31 bp, Homo sapiens
  chr7:108498633-108498664
  hypo
tatctccattaaatgccgatccacattctgt

SEQ ID NO: 179 - DNA, 31 bp, Homo sapiens
  chr7:133318547-133318578
  hypo
tcatttttttttcttacgtggtctcttggca

SEQ ID NO: 180 - DNA, 31 bp, Homo sapiens
  chr7:137706783-137706814
  hypo
ctgccaccacagctaccgcagcctctgggag

SEQ ID NO: 181 - DNA, 42 bp, Homo sapiens
  chr7:137706891-137706933
  hypo
gatgatgaggtgggggcgctgctgctgcgaggagcaggcaat

SEQ ID NO: 182 - DNA, 36 bp, Homo sapiens
  chr7:137706942-137706978
  hypo
ggggtgggggtggggccggggcggggtgttgggggg

SEQ ID NO: 183 - DNA, 31 bp, Homo sapiens
  chr7:148042016-148042047
  hypo
gcagcacagtccatgccgcgatttagccatg

SEQ ID NO: 184 - DNA, 31 bp, Homo sapiens
  chr7:149513356-149513387
  hypo
ggggcgctgcccagggcggggggatgggcag

SEQ ID NO: 185 - DNA, 31 bp, Homo sapiens
  chr7:151624664-151624695
  hypo
catcacctgaggtctgcgtaaggagaaggtg

SEQ ID NO: 186 - DNA, 31 bp, Homo sapiens
  chr7:151624776-151624807
  hypo
ggtgctgctgtccatccggtgacactggata

SEQ ID NO: 187 - DNA, 71 bp, Homo sapiens
  chr7:151624808-151624879
  hypo
catttgattctgagcccgtgtcacctccctggaactgtcccgacatgcaggagtcacgataaaccatactg

SEQ ID NO: 188 - DNA, 31 bp, Homo sapiens
  chr7:157221589-157221620
  hypo
gtggccacagctggggcggggggccagtttc

SEQ ID NO: 189 - DNA, 31 bp, Homo sapiens
  chr7:157847180-157847211
  hypo
agtctatgaaacatgccgtgagattattttc

SEQ ID NO: 190 - DNA, 31 bp, Homo sapiens
  chr8:135595330-135595361
  hypo
tgtgcccactgcccaccgagctcaccaccca

SEQ ID NO: 191 - DNA, 31 bp, Homo sapiens
  chr8:141741418-141741449
  hypo
caaaaatgctagagtacgcattataagaaaa

SEQ ID NO: 192 - DNA, 37 bp, Homo sapiens
  chr9:97591478-97591515
  hypo
cacacacacacacacacgcacacgcacacacacacat

SEQ ID NO: 193 - DNA, 31 bp, Homo sapiens
  chr9:127106879-127106910
  hypo
ggccgggctctgttctcgttacctagatgcc

SEQ ID NO: 194 - DNA, 31 bp, Homo sapiens
  chr9:134188221-134188252
  hypo
cacgggcctggccatacgtcttccatatgtg

SEQ ID NO: 195 - DNA, 31 bp, Homo sapiens
  chr9:140120570-140120601
  hypo
gacatgccgggacatgcggggtggctgttgt

SEQ ID NO: 196 - DNA, 31 bp, Homo sapiens
  chr10:1720646-1720677
  hypo
tcacactcaaggtcaccgagaactttggggc

SEQ ID NO: 197 - DNA, 31 bp, Homo sapiens
  chr10:36639322-36639353
  hypo
gactgtataccaggaacggctaggctctgtt

SEQ ID NO: 198 - DNA, 61 bp, Homo sapiens
  chr10:36639460-36639521
  hypo
agttcattgaggtgggcgttagtgacagagtctcgctctgccacctaggctagagtgcagt

SEQ ID NO: 199 - DNA, 31 bp, Homo sapiens; identical to SEQ ID NO: 27
  chr10:49892636-49892667
  hypo

SEQ ID NO: 200 - DNA, 31 bp, Homo sapiens
  chr10:69836219-69836250
  hypo
ttcaagtgtgtgtattcgtgtcctaggcttg

SEQ ID NO: 201 - DNA, 37 bp, Homo sapiens
  chr10:84618975-84619012
  hypo
tacaggtatgatccaccgcacccggccagtagtctaa

SEQ ID NO: 202 - DNA, 31 bp, Homo sapiens
  chr10:84619102-84619133
  hypo
atgatcagaatcatctcgctccgttactttt

SEQ ID NO: 203 - DNA, 31 bp, Homo sapiens
  chr10:133557717-133557748
  hypo
gccccagagctggactcggtccatgactggg

SEQ ID NO: 204 - DNA, 54 bp, Homo sapiens
  chr10:133557753-133557807
  hypo
agcctgtagcactgcacggggcatgatgccggagtgtcacgaagtgggaaatgg

SEQ ID NO: 205 - DNA, 31 bp, Homo sapiens
  chr10:135064837-135064868
  hypo
tgtctccctgcttccccgctgtctctgtctc

SEQ ID NO: 206 - DNA, 31 bp, Homo sapiens
  chr11:420901-420932
  hypo
aggggcctggggctcccggggctgggcgggg

SEQ ID NO: 207 - DNA, 43 bp, Homo sapiens
  chr11:64335473-64335516
  hypo
ggggaaagggacagggcggcacgtcgtgcggtggcggcagagc

SEQ ID NO: 208 - DNA, 42 bp, Homo sapiens
  chr11:65810129-65810171
  hypo
ggcaggcctcggtggccgggccggcgccgccgccgggcaggt

SEQ ID NO: 209 - DNA, 50 bp, Homo sapiens
  chr11:67059785-67059835
  hypo
gtgggttgctgcagcccgtgtctcactcagactgccggggtggttgggct

SEQ ID NO: 210 - DNA, 31 bp, Homo sapiens
  chr11:67074565-67074596
  hypo
tgtacttagatggagacgggtaagcaatggc

SEQ ID NO: 211 - DNA, 41 bp, Homo sapiens
  chr11:67078707-67078748
  hypo
cacgggtttcacctgccggctgcctacgcaaaggcagagaa

SEQ ID NO: 212 - DNA, 31 bp, Homo sapiens
  chr11:75681481-75681512
  hypo
attaggcagaaagggccgggcatgatggctc

SEQ ID NO: 213 - DNA, 40 bp, Homo sapiens
  chr11:119044182-119044222
  hypo
ctcagaagctatacagcggcaccgccggaacctggctgag

SEQ ID NO: 214 - DNA, 34 bp, Homo sapiens
  chr11:119044410-119044444
  hypo
cccggatgcctgtgggcgccgggtgcagacagtg

SEQ ID NO: 215 - DNA, 21 bp, Homo sapiens
  chr12:1007361-1007382
  hypo
agtcattggttaggcacggtg

SEQ ID NO: 216 - DNA, 31 bp, Homo sapiens
  chr12:1607424-1607455
  hypo
tgctgtggccacctcccggggaggacagtct

SEQ ID NO: 217 - DNA, 31 bp, Homo sapiens
  chr12:1607477-1607508
  hypo
gaagtgcagtggggcacgagagcaggcagtg

SEQ ID NO: 218 - DNA, 31 bp, Homo sapiens; identical to SEQ ID NO: 33
  chr12:22198510-22198541
  hypo

SEQ ID NO: 219 - DNA, 20 bp, Homo sapiens
  chr12:40341755-40341775
  hypo
ctggccgagaatttcttgaa

SEQ ID NO: 220 - DNA, 27 bp, Homo sapiens
  chr12:72042566-72042593
  hypo
acattagaaaataattcgagcagccag

SEQ ID NO: 221 - DNA, 57 bp, Homo sapiens
  chr12:89800519-89800576
  hypo
taaaactggaggttatcgccatgggaaactacatgcccgatacgtaataatataata

SEQ ID NO: 222 - DNA, 31 bp, Homo sapiens
  chr12:104220731-104220762
  hypo
atacatatgcctgggcgcggtggctcatgcc

SEQ ID NO: 223 - DNA, 31 bp, Homo sapiens
  chr12:116999940-116999971
  hypo
tgtggtgggatatgagcgtggagcatctctg

SEQ ID NO: 224 - DNA, 31 bp, Homo sapiens
  chr12:116999984-117000015
  hypo
agaggctgcctgagaccgatgccaaaacccc

SEQ ID NO: 225 - DNA, 54 bp, Homo sapiens
  chr12:117000079-117000133
  hypo
tgtgcctgaaaccatccgtagctccaaactcgcaagttccgtgaaacaataaat

SEQ ID NO: 226 - DNA, 31 bp, Homo sapiens
  chr12:125158872-125158903
  hypo
aagccccccgtctggccgtgctgagcagaca

SEQ ID NO: 227 - DNA, 31 bp, Homo sapiens
  chr12:131291827-131291858
  hypo
aagacccctactatgccggtcacaaccctac

SEQ ID NO: 228 - DNA, 41 bp, Homo sapiens
  chr12:131294421-131294462
  hypo
tagctggacacagtggcgtgtacctgtagtcacaagtgctc

SEQ ID NO: 229 - DNA, 31 bp, Homo sapiens
  chr12:131693247-131693278
  hypo
tgagggtgcaggtcatcggggtcccgagtga

SEQ ID NO: 230 - DNA, 31 bp, Homo sapiens
  chr12:133148662-133148693
  hypo
cttagaatggcagggccgccctggtctgaga

SEQ ID NO: 231 - DNA, 31 bp, Homo sapiens
  chr13:22214671-22214702
  hypo
aataaccagccttgcccgatcatggcagcat

SEQ ID NO: 232 - DNA, 60 bp, Homo sapiens
  chr13:22214772-22214832
  hypo
ctcatgtgctccctctcggggtcatgccagtacaggtctagctcccgagagggagggagg

SEQ ID NO: 233 - DNA, 31 bp, Homo sapiens
  chr13:23509169-23509200
  hypo
tcacctacctgtccctcggcctctggggtgg

SEQ ID NO: 234 - DNA, 23 bp, Homo sapiens
  chr13:45933586-45933609
  hypo
accgcgcccggcccaagtttctt

SEQ ID NO: 235 - DNA, 44 bp, Homo sapiens
  chr13:99204542-99204586
  hypo
ggatgatgggaagggacgcagaccctggacgctgggtaccaaat

SEQ ID NO: 236 - DNA, 31 bp, Homo sapiens
  chr13:99204639-99204670
  hypo
gggacacaagtggctacgggacagcagagag

SEQ ID NO: 237 - DNA, 34 bp, Homo sapiens
  chr13:99204675-99204709
  hypo
ccatctgcagctaagccggcggaggtcttcttcc

SEQ ID NO: 238 - DNA, 31 bp, Homo sapiens
  chr13:106915515-106915546
  hypo
gagtcataaaggtggccgtgttgcatcctca

SEQ ID NO: 239 - DNA, 31 bp, Homo sapiens
  chr13:111980477-111980508
  hypo
agagtggctttgttttcgggggtgacacttg

SEQ ID NO: 240 - DNA, 31 bp, Homo sapiens
  chr13:111999133-111999164
  hypo
gtactcaacctgctaacgggtggtatctgcc

SEQ ID NO: 241 - DNA, 61 bp, Homo sapiens
  chr13:114185956-114186017
  hypo
agatcaagagcagcacgcgtgtggacctgcaggtgacacggcgccccgtacatgcagatca

SEQ ID NO: 242 - DNA, 31 bp, Homo sapiens
  chr14:34682592-34682623
  hypo
ttttgtggggagggggcgaatctgatgccat

SEQ ID NO: 243 - DNA, 22 bp, Homo sapiens
  chr14:74311711-74311733
  hypo
tttaattcggttgattgtcttc

SEQ ID NO: 244 - DNA, 31 bp, Homo sapiens
  chr14:74626547-74626578
  hypo
tacaggtgtgaatcaccgtgccctgcctaca

SEQ ID NO: 245 - DNA, 31 bp, Homo sapiens
  chr14:74626605-74626636
  hypo
cctaccatacagcaagcgttctcaactttgg

SEQ ID NO: 246 - DNA, 31 bp, Homo sapiens
  chr14:76998234-76998265
  hypo
cgcccagcagcaggcccgggcctgccccctt

SEQ ID NO: 247 - DNA, 31 bp, Homo sapiens
  chr14:88131325-88131356
  hypo
ttgtcatggcaaatgacgtggcaactactct

SEQ ID NO: 248 - DNA, 31 bp, Homo sapiens
  chr14:88669111-88669142
  hypo
tcttcctagagtcttccggttgcggggggtg

SEQ ID NO: 249 - DNA, 31 bp, Homo sapiens
  chr14:94844985-94845016
  hypo
gagagaagcagagacacgttgtaaggctgat

SEQ ID NO: 250 - DNA, 37 bp, Homo sapiens; identical to SEQ ID NO: 34
  chr14:95864477-95864514
  hypo

SEQ ID NO: 251 - DNA, 31 bp, Homo sapiens
  chr14:102493760-102493791
  hypo
acggacagtgttgagacgttctggctgtaaa

SEQ ID NO: 252 - DNA, 51 bp, Homo sapiens
  chr14:102493962-102494013
  hypo
gtctctttgaaggagacgagtatgccaccttgatgacgcagtgcaaagagg

SEQ ID NO: 253 - DNA, 31 bp, Homo sapiens
  chr14:104047903-104047934
  hypo
agaccccactttacctcgggtaactgaaacc

SEQ ID NO: 254 - DNA, 87 bp, Homo sapiens
  chr15:28900533-28900620
  hypo
ctatgtgctcctctgacgtgccgttactcagaggtgagtggccgtctcctttccctgtgccctggtgaagagcggtgcagcagcttc

SEQ ID NO: 255 - DNA, 31 bp, Homo sapiens; identical to SEQ ID NO: 35
  chr15:43584165-43584196
  hypo

SEQ ID NO: 256 - DNA, 77 bp, Homo sapiens; identical to SEQ ID NO: 36
  chr15:70391278-70391355
  hypo

SEQ ID NO: 257 - DNA, 697 bp, Homo sapiens; identical to SEQ ID NO: 39
  chr15:80215523-80216220
  hypo

SEQ ID NO: 258 - DNA, 252 bp, Homo sapiens; identical to SEQ ID NO: 40
  chr15:80216261-80216513
  hypo

SEQ ID NO: 259 - DNA, 27 bp, Homo sapiens
  chr15:90919630-90919657
  hypo
ggcctgagccaccgcacccgacccatc

SEQ ID NO: 260 - DNA, 31 bp, Homo sapiens
  chr15:99975076-99975107
  hypo
cgtccctgcgccctcacgcctcacctgggag

SEQ ID NO: 261 - DNA, 31 bp, Homo sapiens
  chr16:1147812-1147843
  hypo
ttgggtcccttgggttcgggtggcccgggat

SEQ ID NO: 262 - DNA, 67 bp, Homo sapiens
  chr16:8722898-8722965
  hypo
tagcacaggaagaagacgacgtcctgggagaggaagcacaaggcagcccgcacgatatcatcagaat

SEQ ID NO: 263 - DNA, 31 bp, Homo sapiens
  chr16:8722995-8723026
  hypo
gtcaccaaggcaactccgcagtgtcactgct

SEQ ID NO: 264 - DNA, 31 bp, Homo sapiens
  chr16:8723031-8723062
  hypo
ctcagtatgatctgagcgtggactctgcagg

SEQ ID NO: 265 - DNA, 75 bp, Homo sapiens
  chr16:8723076-8723151
  hypo
gttatgagaaccagctcgggtgagactggggaagctctccacaaccccgtcactcctgcccggctcacaccacca

SEQ ID NO: 266 - DNA, 31 bp, Homo sapiens
  chr16:29340561-29340592
  hypo
tgagttcttggaaagccgaggccggccggtt

SEQ ID NO: 267 - DNA, 31 bp, Homo sapiens
  chr16:50334491-50334522
  hypo
tgagaacattctctcccgtgggctgagcgcc

SEQ ID NO: 268 - DNA, 31 bp, Homo sapiens; identical to SEQ ID NO: 41
  chr16:50773733-50773764
  hypo

SEQ ID NO: 269 - DNA, 31 bp, Homo sapiens; identical to SEQ ID NO: 42
  chr16:50773769-50773800
  hypo

SEQ ID NO: 270 - DNA, 31 bp, Homo sapiens
  chr16:84061605-84061636
  hypo
gcacgccgactgattacgaggaagagaaatg

SEQ ID NO: 271 - DNA, 31 bp, Homo sapiens
  chr16:87670945-87670976
  hypo
ctccccggccatcatccgtctgtctctggat

SEQ ID NO: 272 - DNA, 31 bp, Homo sapiens
  chr16:88898118-88898149
  hypo
aggagagcggtgaggccgagcacggggtgcg

SEQ ID NO: 273 - DNA, 31 bp, Homo sapiens
  chr17:1454344-1454375
  hypo
tgagagtattgcggggcggagtcagcgggac

SEQ ID NO: 274 - DNA, 31 bp, Homo sapiens
  chr17:17330585-17330616
  hypo
tcaattcctccaagatcgccatgatagatca

SEQ ID NO: 275 - DNA, 31 bp, Homo sapiens
  chr17:17330628-17330659
  hypo
gaatcccactgccttccggaaaggctaagag

SEQ ID NO: 276 - DNA, 59 bp, Homo sapiens
  chr17:21793591-21793650
  hypo
ctgtggatcatgaatccgcagtgaattcggaggctggctgagaccggcctgggtcaaaa

SEQ ID NO: 277 - DNA, 31 bp, Homo sapiens
  chr17:21793742-21793773
  hypo
tctcccagtgttttaccgtcttgcgtccaag

SEQ ID NO: 278 - DNA, 31 bp, Homo sapiens
  chr17:29094864-29094895
  hypo
gcactccagcctttatcgcttcttactccta

SEQ ID NO: 279 - DNA, 31 bp, Homo sapiens
  chr17:48881297-48881328
  hypo
gtgtgttctacatcctcgagatttataatga

SEQ ID NO: 280 - DNA, 31 bp, Homo sapiens
  chr17:56569870-56569901
  hypo
cctgcaatggtgtcttcgtttggccaaccag

SEQ ID NO: 281 - DNA, 31 bp, Homo sapiens
  chr17:56569936-56569967
  hypo
atggtctggaacccagcgagtcacctaatag

SEQ ID NO: 282 - DNA, 52 bp, Homo sapiens; identical to SEQ ID NO: 45
  chr17:70270192-70270244
  hypo

SEQ ID NO: 283 - DNA, 31 bp, Homo sapiens
  chr17:76395197-76395228
  hypo
tggcaagaagagcaggcgtctgccacgctga

SEQ ID NO: 284 - DNA, 31 bp, Homo sapiens
  chr17:76794654-76794685
  hypo
tcacagttcccaaaaacggctctttcctggc

SEQ ID NO: 285 - DNA, 31 bp, Homo sapiens
  chr17:77824716-77824747
  hypo
cagaggtccagatccacggggactgacctga

SEQ ID NO: 286 - DNA, 31 bp, Homo sapiens
  chr17:79296507-79296538
  hypo
ccccccgcacagaccccgggatccaaccccc

SEQ ID NO: 287 - DNA, 31 bp, Homo sapiens; identical to SEQ ID NO: 46
  chr17:79889370-79889401
  hypo

SEQ ID NO: 288 - DNA, 31 bp, Homo sapiens
  chr17:80104070-80104101
  hypo
ctggacggctgtcccacgttgaataatgatg

SEQ ID NO: 289 - DNA, 31 bp, Homo sapiens
  chr17:80163308-80163339
  hypo
ttttcaaaataaagtccgatctccttggcac

SEQ ID NO: 290 - DNA, 31 bp, Homo sapiens
  chr18:20696269-20696300
  hypo
tacgggtgtgagccaccgtgcccggccgcta

SEQ ID NO: 291 - DNA, 31 bp, Homo sapiens
  chr18:20790546-20790577
  hypo
caggttctaaacataacggttgatcacatgg

SEQ ID NO: 292 - DNA, 31 bp, Homo sapiens
  chr18:20790617-20790648
  hypo
taagaagccaagaagacgggagccatcactt

SEQ ID NO: 293 - DNA, 31 bp, Homo sapiens
  chr18:20790657-20790688
  hypo
tgcctgctgtggttcacgcctgcagtccctc

SEQ ID NO: 294 - DNA, 31 bp, Homo sapiens
  chr18:20790700-20790731
  hypo
actacttcaggaaacacgtatgatgtgttct

SEQ ID NO: 295 - DNA, 31 bp, Homo sapiens
  chr18:20790735-20790766
  hypo
agctccattggcaaaccgtctgcagagcctc

SEQ ID NO: 296 - DNA, 31 bp, Homo sapiens
  chr18:21000859-21000890
  hypo
aaatcactaaacctcacggttagaagggaac

SEQ ID NO: 297 - DNA, 47 bp, Homo sapiens
  chr18:54398592-54398639
  hypo
gtgaatatatttttctcgcaggtgcattggatcgttgtgtgatgggg

SEQ ID NO: 298 - DNA, 31 bp, Homo sapiens
  chr18:54398646-54398677
  hypo
cagttgagattctaaacgcttgtgatgaagc

SEQ ID NO: 299 - DNA, 36 bp, Homo sapiens
  chr18:54398720-54398756
  hypo
ctaaaacaagctatgacgagacgtagtcttgctgct

SEQ ID NO: 300 - DNA, 31 bp, Homo sapiens
  chr18:54609486-54609517
  hypo
ccatgacacaaaatggcgaggtgttcttttg

SEQ ID NO: 301 - DNA, 31 bp, Homo sapiens
  chr18:56277829-56277860
  hypo
gcatccctgaagaaggcgtgcagaggagaga

SEQ ID NO: 302 - DNA, 31 bp, Homo sapiens
  chr18:73424173-73424204
  hypo
actctcagatcccaaacggctgctgcatggc

SEQ ID NO: 303 - DNA, 31 bp, Homo sapiens
  chr19:1055084-1055115
  hypo
attgtctgcaggttctcggcaccagaagttc

SEQ ID NO: 304 - DNA, 3 bp, Homo sapiens
  chr19:11565821-11565824
  hypo
ttt

SEQ ID NO: 305 - DNA, 31 bp, Homo sapiens; identical to SEQ ID NO: 48
  chr19:11950106-11950137
  hypo

SEQ ID NO: 306 - DNA, 37 bp, Homo sapiens
  chr19:18963996-18964033
  hypo
ctctccctggtggaagcgacggcgtgggttaaaatgg

SEQ ID NO: 307 - DNA, 31 bp, Homo sapiens
  chr19:18964686-18964717
  hypo
tcctgggagaagacaccgcgggtcagactca

SEQ ID NO: 308 - DNA, 34 bp, Homo sapiens
  chr19:21792702-21792736
  hypo
cagcagtgactcccaacgacgaacagtggattag

SEQ ID NO: 309 - DNA, 31 bp, Homo sapiens
  chr19:48145666-48145697
  hypo
aaactgcccacctgggcgcagtggctcacac

SEQ ID NO: 310 - DNA, 31 bp, Homo sapiens
  chr19:49969561-49969592
  hypo
gggccagctgggcaggcggggtggggctcag

SEQ ID NO: 311 - DNA, 31 bp, Homo sapiens
  chr19:56733401-56733432
  hypo
ggtgactgactgggctcgcagggcctgggga

SEQ ID NO: 312 - DNA, 64 bp, Homo sapiens
  chr20:1435436-1435500
  hypo
ccaaatcttggtttcacgttaaagggtgagataaactacactcgtgttccgcacagaagaccaa

SEQ ID NO: 313 - DNA, 31 bp, Homo sapiens
  chr20:1435521-1435552
  hypo
aaaaatcagtcactaccggggtgaagaaggt

SEQ ID NO: 314 - DNA, 31 bp, Homo sapiens
  chr20:1435598-1435629
  hypo
cccttatactcactctcggtttactggtctc

SEQ ID NO: 315 - DNA, 45 bp, Homo sapiens
  chr20:35929625-35929670
  hypo
ggtgagtcagaagagacgtcaggcagcaagcgacttgggccatgg

SEQ ID NO: 316 - DNA, 41 bp, Homo sapiens
  chr20:35929678-35929719
  hypo
ctagacttctcacctccggaggtgcccgagcccactttcct

SEQ ID NO: 317 - DNA, 43 bp, Homo sapiens
  chr20:39831201-39831244
  hypo
ctggacaaagagctgccgcagcaagtgccgctgctgggcagtc

SEQ ID NO: 318 - DNA, 31 bp, Homo sapiens
  chr20:47559246-47559277
  hypo
gcctctttcttaatggcgttaaaattcatat

SEQ ID NO: 319 - DNA, 34 bp, Homo sapiens
  chr20:49556445-49556479
  hypo
ccaccagccaacgcccatccgcaatcagagatct

SEQ ID NO: 320 - DNA, 31 bp, Homo sapiens
  chr20:62154842-62154873
  hypo
ggggaggggcactgcccgggagctggtgtct

SEQ ID NO: 321 - DNA, 31 bp, Homo sapiens
  chr21:30936923-30936954
  hypo
atgggaaaggatgacacgattcaactctaaa

SEQ ID NO: 322 - DNA, 61 bp, Homo sapiens
  chr21:43386122-43386183
  hypo
aggggggcccaccatgcgattgtccgggtgaggaggggaggttgggcgccttccctggcat

SEQ ID NO: 323 - DNA, 31 bp, Homo sapiens
  chr21:45585662-45585693
  hypo
cgggcggtggctgcagcgtggagattgttgt

SEQ ID NO: 324 - DNA, 31 bp, Homo sapiens
  chr21:46896050-46896081
  hypo
ctgggtcctggggagccggggagcccacagg

SEQ ID NO: 325 - DNA, 57 bp, Homo sapiens
  chr21:47965679-47965736
  hypo
ccccctggccagcaggcgcacacgtggtgctgagcctcctgccgcctgctgggtctt

SEQ ID NO: 326 - DNA, 62 bp, Homo sapiens
  chr21:47965753-47965815
  hypo
ttgtccacagcctgatcgtgcccctctccactttgtgcaggcagttccggtcaccacaggag

SEQ ID NO: 327 - DNA, 31 bp, Homo sapiens
  chr21:47965851-47965882
  hypo
gcctgctgggcttcatcgggcctgtgagtat

SEQ ID NO: 328 - DNA, 91 bp, Homo sapiens
  chr21:47965925-47966016
  hypo
tggctaagggacacctcgttgcagccccacccttgtcctggccgttcctgacctcccatgtggccttggtcggtggcgctgacctccctgc

SEQ ID NO: 329 - DNA, 31 bp, Homo sapiens
  chr22:18316174-18316205
  hypo
ctgccctgacctcctgcgagggtgtgtcctc

SEQ ID NO: 330 - DNA, 131 bp, Homo sapiens
  chr22:25016919-25017050
  hypo
gagagactgaccctgccgcagctggctgacacctacgagacgctggccatcgagggtgcccaggccttctacaacggcagcctcacggcccagattgtgaaggacatccaggcggccggtgagtgggtaac

SEQ ID NO: 331 - DNA, 31 bp, Homo sapiens
  chr22:26965254-26965285
  hypo
aggatggtggttaccccggtggggcaagggg

SEQ ID NO: 332 - DNA, 31 bp, Homo sapiens
  chr22:37790763-37790794
  hypo
agaactcttcactcctcgcctgggactgagc

SEQ ID NO: 333 - DNA, 31 bp, Homo sapiens
  chr22:38146719-38146750
  hypo
cagctgtcccaagccccggttggtccacttc

SEQ ID NO: 334 - DNA, 31 bp, Homo sapiens
  chr22:38633562-38633593
  hypo
tctgtatttcagataacgggtggatgagcct

SEQ ID NO: 335 - DNA, 31 bp, Homo sapiens; identical to SEQ ID NO: 54
  chr22:40280490-40280521
  hypo

SEQ ID NO: 336 - DNA, 31 bp, Homo sapiens
  chr22:43655459-43655490
  hypo
tgaattacgttctattcggttgacccctgag

SEQ ID NO: 337 - DNA, 31 bp, Homo sapiens
  chr22:44601832-44601863
  hypo
aggggtggagaatgggcgcttgccaaggttt

SEQ ID NO: 338 - DNA, 18 bp, Homo sapiens
  chr22:45969095-45969113
  hypo
ctccgtctcaaataaata

SEQ ID NO: 339 - DNA, 31 bp, Homo sapiens
  chrX:19530839-19530870
  hypo
gggctgggattacaggcgtgagccactgcac

SEQ ID NO: 340 - DNA, 80 bp, Homo sapiens
  chrY:15446138-15446218
  hypo
gaacttcaggtacccacgggtggtgatgaggctggaccccaacacgcagcaaaagaaactatcatcggaccgaacaggca

SEQ ID NO: 341 - DNA, 29 bp, Homo sapiens
  chrY:15446277-15446306
  hypo
gagactacaaggaacgtaaactcatttac

SEQ ID NO: 342 - DNA, 56 bp, Homo sapiens
  chrY:23568830-23568886
  hypo
ccagaccaaaggcctgcggggtagccctgccccacactctccgtgctcttgcaaag

SEQ ID NO: 343 - DNA, 31 bp, Homo sapiens
  NW_001838993.2_42143-59442:15876-15907
  hypo
cttcacacccagaatgcgggttctgggctca

SEQ ID NO: 344 - DNA, 37 bp, Homo sapiens
  NW_001838993.2_42143-59442:15918-15955
  hypo
tgctcctgccccatgacgctcccgggagaggggactg

SEQ ID NO: 345 - DNA, 61 bp, Homo sapiens
  NW_001838993.2_42143-59442:15958-16019
  hypo
cagtgcctctgcctaacgtgggccaccgtcagagcacctgcggccccgatggttgccacgg

SEQ ID NO: 346 - DNA, 36 bp, Homo sapiens
  chr1:2136303-2136339
  hyper
tcccgggcacctcccacgccccgccctcaagccccg

SEQ ID NO: 347 - DNA, 31 bp, Homo sapiens
  chr1:9600352-9600383
  hyper
ggctaagccagggacccgaactcatatgagg

SEQ ID NO: 348 - DNA, 54 bp, Homo sapiens
  chr1:9600393-9600447
  hyper
gtgttgagacacttctcgccggctggtagacgcttccaacgccagagaccgcag

SEQ ID NO: 349 - DNA, 34 bp, Homo sapiens
  chr1:21563184-21563218
  hyper
ctctatctgtgctggacgccgcagcaccccctcc

SEQ ID NO: 350 - DNA, 31 bp, Homo sapiens
  chr1:21563241-21563272
  hyper
ttccttggctgattttcgggtttcctcatcc

SEQ ID NO: 351 - DNA, 31 bp, Homo sapiens
  chr1:21563314-21563345
  hyper
atctccaggatgatctcggtggcctgaggag

SEQ ID NO: 352 - DNA, 31 bp, Homo sapiens
  chr1:21563354-21563385
  hyper
acagcagtaaggtctgcgcactggtctcagg

SEQ ID NO: 353 - DNA, 31 bp, Homo sapiens
  chr1:21563387-21563418
  hyper
aatgcaacaggcaccccgtgcagaacaatga

SEQ ID NO: 354 - DNA, 31 bp, Homo sapiens
  chr1:21563431-21563462
  hyper
aactcaattttccaagcgtcaggctgggtga

SEQ ID NO: 355 - DNA, 40 bp, Homo sapiens
  chr1:21563477-21563517
  hyper
ctgtgcttccaaaccacgctcctaacgtgaacaccctgca

SEQ ID NO: 356 - DNA, 31 bp, Homo sapiens
  chr1:85774285-85774316
  hyper
cctgtttttcaatgggcggtgtagagtaatg

SEQ ID NO: 357 - DNA, 31 bp, Homo sapiens
  chr1:114697994-114698025
  hyper
gcagacacgacgcaggcgatactgtgcaatc

SEQ ID NO: 358 - DNA, 31 bp, Homo sapiens
  chr1:155147403-155147434
  hyper
gatggagtgccaacctcgcctggctatcggg

SEQ ID NO: 359 - DNA, 31 bp, Homo sapiens
  chr1:207995366-207995397
  hyper
ctcccccaaccaaaggcggacagcctgctgc

SEQ ID NO: 360 - DNA, 218 bp, Homo sapiens
  chr1:225614687-225614905
  hyper
accagttactacaatgcgtaactacagatctacacgtgtttacgtgcaaggtccccgggggcctgttcaccctggcactgcccaggcgccgcgcctcgcgctgcaggtgtccacgcgcggaccacggtatctaccgcgccctcgtgtgaacacccgaccgggccccgtaatcactctgggaaagcgccttcaacaaagccctccgaaagcaagtgctt

SEQ ID NO: 361 - DNA, 31 bp, Homo sapiens
  chr1:225614920-225614951
  hyper
gaggctactggcagtgcgaggctggctgtca

SEQ ID NO: 362 - DNA, 113 bp, Homo sapiens
  chr1:225614979-225615092
  hyper
ggtgaaaaagcaggaccgtgctttagcaggaacacgcacacccgcctaaatacccgatttttgagactgtccgggcgaaggaattcaacgcataggagcgagcagccatgcag

SEQ ID NO: 363 - DNA, 74 bp, Homo sapiens
  chr1:225615218-225615292
  hyper
ctcctactgcaggaccgcggggccgcctgctcatctgtcagacgggcgctcggaggggccgggagccaggctgc

SEQ ID NO: 364 - DNA, 31 bp, Homo sapiens
  chr1:230468967-230468998
  hyper
ctctgttgtctctccccgtgacaatctcccc

SEQ ID NO: 365 - DNA, 18 bp, Homo sapiens
  chr2:11722-11740
  hyper
gcccgcctcctggcagct

SEQ ID NO: 366 - DNA, 31 bp, Homo sapiens
  chr2:38690639-38690670
  hyper
gaaggagtggaggactcgcagctggaagagc

SEQ ID NO: 367 - DNA, 31 bp, Homo sapiens
  chr2:102314986-102315017
  hyper
gacaagtctataaggtcggtgtgggcgcctt

SEQ ID NO: 368 - DNA, 31 bp, Homo sapiens
  chr2:102315115-102315146
  hyper
ggagaggggtttctttcgccttgcagtccct

SEQ ID NO: 369 - DNA, 31 bp, Homo sapiens
  chr2:127810838-127810869
  hyper
tcaccagctccctgtgcgtgagcacgtgcct

SEQ ID NO: 370 - DNA, 31 bp, Homo sapiens
  chr2:170430429-170430460
  hyper
ccagggtgggtcgcggcgaggtgggtgaaat

SEQ ID NO: 371 - DNA, 50 bp, Homo sapiens
  chr2:174220331-174220381
  hyper
gcttggtgggtcaaagcgttcgccgaccatttgctcgtttcctacttcct

SEQ ID NO: 372 - DNA, 31 bp, Homo sapiens
  chr2:181846233-181846264
  hyper
gtgtttaaaggctttacgtgcactgaggagg

SEQ ID NO: 373 - DNA, 52 bp, Homo sapiens
  chr2:211035493-211035545
  hyper
cgggtccaggaaaccacgtgttctgccttctgcgcacgcgccagccaaaaca

SEQ ID NO: 374 - DNA, 31 bp, Homo sapiens
  chr2:211035559-211035590
  hyper
caagccccaccccccacgtgaccggcgtcca

SEQ ID NO: 375 - DNA, 31 bp, Homo sapiens
  chr3:50526893-50526924
  hyper
agatggggctatggggcgccagacaggcagg

SEQ ID NO: 376 - DNA, 31 bp, Homo sapiens
  chr3:62254619-62254650
  hyper
tgtgttttaacattgtcgtttgaaattacat

SEQ ID NO: 377 - DNA, 31 bp, Homo sapiens
  chr3:62254693-62254724
  hyper
ttttttctttctgcagcgaaaatgtgatcag

SEQ ID NO: 378 - DNA, 31 bp, Homo sapiens
  chr3:62254754-62254785
  hyper
ggaaacattattgtcacgctgaagagcacaa

SEQ ID NO: 379 - DNA, 34 bp, Homo sapiens
  chr3:62254792-62254826
  hyper
tgcctgctacactgttcgtcgtttttcaatcaga

SEQ ID NO: 380 - DNA, 37 bp, Homo sapiens
  chr3:111393431-111393468
  hyper
gagagcgctggccaatcggagcgcgctccgccagcgg

SEQ ID NO: 381 - DNA, 41 bp, Homo sapiens
  chr3:179064153-179064194
  hyper
gatggattagctggcacgacccagaccgataaactggctca

SEQ ID NO: 382 - DNA, 51 bp, Homo sapiens
  chr3:182510947-182510998
  hyper
gtagagaccgaggaatcggccccaagctgcagactccggagatggccagac

SEQ ID NO: 383 - DNA, 115 bp, Homo sapiens
  chr3:182511044-182511159
  hyper
cagtggacagaaacagcgttcgagaacccggcacctttccacgctcgcttcttcccggacccacaacacagaaaccccccaactcggaacggcggcggggcgcgccaggcccccc

SEQ ID NO: 384 - DNA, 171 bp, Homo sapiens
  chr3:182511622-182511793
  hyper
tctcggcccggggtggcggggaaaggccggcggcgcggagccgggaggccagggcgtgggcgcccggctaggccgcagcggagacgggcgcggggcccagagccggagaagccccgtgcggctcccgggctcgtctcgcctccaagcccgggccgccgaggctggcgccga

SEQ ID NO: 385 - DNA, 42 bp, Homo sapiens
  chr3:185825548-185825590
  hyper
tttatgaatgggagagcgagccgcggccgccacatcaggtag

SEQ ID NO: 386 - DNA, 31 bp, Homo sapiens
  chr3:185825595-185825626
  hyper
gtaactggatctctagcgctgggccccattc

SEQ ID NO: 387 - DNA, 31 bp, Homo sapiens
  chr3:185825732-185825763
  hyper
aggcccctcaccccagcgttttaggaagaaa

SEQ ID NO: 388 - DNA, 34 bp, Homo sapiens
  chr3:185825863-185825897
  hyper
tcataaaaacgaggtgcggcgcccggcgctacca

SEQ ID NO: 389 - DNA, 31 bp, Homo sapiens
  chr3:185825931-185825962
  hyper
cctggcaccccctcgtcgaccaggagttcgg

SEQ ID NO: 390 - DNA, 31 bp, Homo sapiens
  chr3:185826142-185826173
  hyper
ctgggtgggagcagggcgactggatgtccac

SEQ ID NO: 391 - DNA, 171 bp, Homo sapiens
  chr3:185826424-185826595
  hyper
cgatcccccatccactcgggagcccccgcactcgcgctccggggcgcctcccccacgacgtgtggaaagccgctctccccgcgctccggaaccgttagccgcacccgcccgacgcctcccaggaaccaaaccggaccgggccgcggggggagggggcggtcaacccggggg

SEQ ID NO: 392 - DNA, 31 bp, Homo sapiens
  chr3:185826627-185826658
  hyper
agattctgaatcagcccgtgaactctagccg

SEQ ID NO: 393 - DNA, 147 bp, Homo sapiens
  chr3:185826750-185826897
  hyper
cttgcagcggccccggcggcgcaggcgcgctcacgcacgcgcgcagcgggcctgggcgcctgggcgaaaggctgggccgaaccgctccgaagacggtgaaccgctccgcgcaccagcggctggactctgcgccgcagctgccaacca

SEQ ID NO: 394 - DNA, 31 bp, Homo sapiens
  chr3:185827120-185827151
  hyper
tacataatttatgcaccgggggccattggcc

SEQ ID NO: 395 - DNA, 52 bp, Homo sapiens
  chr3:185827172-185827224
  hyper
ataatgaatgtaaggacgtttttcattcataaaaaacgcgacctgaggggga

SEQ ID NO: 396 - DNA, 78 bp, Homo sapiens
  chr3:185827258-185827336
  hyper
cgaggccaggaggagccgccgttacttcccttctcgccgctctcccgacttttcaccgaggcacgactcttccccctt

SEQ ID NO: 397 - DNA, 31 bp, Homo sapiens
  chr3:185827356-185827387
  hyper
ccatccagcaaagccccgaccagaattgggt

SEQ ID NO: 398 - DNA, 31 bp, Homo sapiens
  chr3:185827389-185827420
  hyper
cttggcgccagacgttcgcagctgcagcacc

SEQ ID NO: 399 - DNA, 28 bp, Homo sapiens
  chr3:189900046-189900074
  hyper
gcgcccagccggtcgtttatctcttgaa

SEQ ID NO: 400 - DNA, 31 bp, Homo sapiens
  chr3:192959658-192959689
  hyper
gactattaatatgactcgtgctggaaaaagt

SEQ ID NO: 401 - DNA, 31 bp, Homo sapiens
  chr3:196476222-196476253
  hyper
acgtttccaccagcagcgcacagcagttcag

SEQ ID NO: 402 - DNA, 31 bp, Homo sapiens
  chr4:6890788-6890819
  hyper
ctggcccaggagcacccggcagaggtgtgag

SEQ ID NO: 403 - DNA, 101 bp, Homo sapiens
  chr4:25864189-25864290
  hyper
ctagcagcggcgtccccgccccgcgtggcgggtgtccccggccgcccccacccgcgtccccggggccccgcgcggaggggaagacccgggcagggtccggc

SEQ ID NO: 404 - DNA, 62 bp, Homo sapiens
  chr4:25915658-25915720
  hyper
gcacagcacggaatcccggggaaggcggagggcggggtccgaggccccgcctgtgaccccac

SEQ ID NO: 405 - DNA, 31 bp, Homo sapiens
  chr4:25915879-25915910
  hyper
tggtttccgagagtgccgggcggtcggcggg

SEQ ID NO: 406 - DNA, 31 bp, Homo sapiens
  chr4:177240821-177240852
  hyper
cctctgaccaaagaaccgaaaaaggacagcg

SEQ ID NO: 407 - DNA, 31 bp, Homo sapiens
  chr4:183796433-183796464
  hyper
cgctgtctcaggaggacggctgaagggcaga

SEQ ID NO: 408 - DNA, 31 bp, Homo sapiens
  chr5:1174065-1174096
  hyper
gccgcccctggggtaccgtgggcactggggc

SEQ ID NO: 409 - DNA, 31 bp, Homo sapiens
  chr5:40797553-40797584
  hyper
tactcattaactgctccgaaggaaaccagtg

SEQ ID NO: 410 - DNA, 31 bp, Homo sapiens
  chr5:68179310-68179341
  hyper
ctaacagatttagtgccggattacaagtgag

SEQ ID NO: 411 - DNA, 31 bp, Homo sapiens
  chr5:68179381-68179412
  hyper
tgccccccaagacaatcggcttcaaatgcct

SEQ ID NO: 412 - DNA, 50 bp, Homo sapiens
  chr5:90678445-90678495
  hyper
atgcctgcatgcattacggcttaacacacgatgaacgtcaaggagaatcc

SEQ ID NO: 413 - DNA, 31 bp, Homo sapiens
  chr5:107359032-107359063
  hyper
tgattttggacataaacgtcatatatactga

SEQ ID NO: 414 - DNA, 67 bp, Homo sapiens
  chr5:107359172-107359239
  hyper
caccacctcatgttcccggctagtgtctaaagtctcgtaatccacctatgtcgcgtttccctggcag

SEQ ID NO: 415 - DNA, 31 bp, Homo sapiens
  chr5:158634800-158634831
  hyper
tcatcatctcccaaaccgcaaagacagggag

SEQ ID NO: 416 - DNA, 34 bp, Homo sapiens
  chr5:158635046-158635080
  hyper
tctttactgcagactgcgacgcaaggccatccac

SEQ ID NO: 417 - DNA, 31 bp, Homo sapiens
  chr5:158635109-158635140
  hyper
ccccttcctctctccccgcacctcctcccac

SEQ ID NO: 418 - DNA, 31 bp, Homo sapiens
  chr5:158635145-158635176
  hyper
ctgcagatctcagatgcgtttgaactacagt

SEQ ID NO: 419 - DNA, 63 bp, Homo sapiens
  chr5:158635215-158635278
  hyper
cagtagcagcagcaaccgggccgccgccgccgcggggctaagagattacgttcagcaaaaact

SEQ ID NO: 420 - DNA, 132 bp, Homo sapiens
  chr5:158635279-158635411
  hyper
ttccaggaaagaggctcgagagctcccctcctatctcgccaagggtgctgactctgtcgcgccacgccacgtaccaaaaggctcgcgaagaaaaacgcgggcgaagttcagcatccccgaacagaaagggaa

SEQ ID NO: 421 - DNA, 31 bp, Homo sapiens
  chr5:158635417-158635448
  hyper
ccagaaagggggttcacgggtctgagggtcc

SEQ ID NO: 422 - DNA, 119 bp, Homo sapiens
  chr5:158635545-158635664
  hyper
ctataaaagggactgacggacgggatgcagagcaatgggcccccctcgaaaaatggactggcaggcccttccgcacccccaaacaacctcgcaccacctgaaagcggggagcttgagtt

SEQ ID NO: 423 - DNA, 55 bp, Homo sapiens
  chr5:158635752-158635807
  hyper
aagttggaaatggaaacgagaaagggagctggaaaggggccgctctggaagggtc

SEQ ID NO: 424 - DNA, 31 bp, Homo sapiens
  chr5:158635981-158636012
  hyper
gaggggagagcagggtcggagggaggcgacc

SEQ ID NO: 425 - DNA, 31 bp, Homo sapiens
  chr5:178946790-178946821
  hyper
tgcacgccctagtccacgggtagatccatca

SEQ ID NO: 426 - DNA, 45 bp, Homo sapiens
  chr5:178946824-178946869
  hyper
acagtggaagcctcaccgactcaaggtgttcgtgtacaaattcag

SEQ ID NO: 427 - DNA, 31 bp, Homo sapiens
  chr5:179279346-179279377
  hyper
agtaaacagctggtcacgtggataaagaggt

SEQ ID NO: 428 - DNA, 31 bp, Homo sapiens
  chr6:3906687-3906718
  hyper
gaaagctgtcttctgtcgggggaccctgtgc

SEQ ID NO: 429 - DNA, 31 bp, Homo sapiens
  chr6:4949502-4949533
  hyper
gctggagaatgcccagcgagtacctgagggc

SEQ ID NO: 430 - DNA, 31 bp, Homo sapiens
  chr6:10125877-10125908
  hyper
ctctcctttcctgctccgtctctcttccctg

SEQ ID NO: 431 - DNA, 60 bp, Homo sapiens
  chr6:26027157-26027217
  hyper
tgacgaaaagattaaccgccgaagccgtacagagtgcgtccttgacgcttgagcgcgtaa

SEQ ID NO: 432 - DNA, 90 bp, Homo sapiens
  chr6:26027393-26027483
  hyper
gccttggatgttatcccgcagcacttttcggtgacgcttggcacctcccttacccaaacctttaccgcctttgccgcgaccagacatgtc

SEQ ID NO: 433 - DNA, 50 bp, Homo sapiens
  chr6:26027495-26027545
  hyper
aacaaaaaccaggtacgcgaaaagaaagcaagccacgagcatttatacac

SEQ ID NO: 434 - DNA, 31 bp, Homo sapiens
  chr6:26027632-26027663
  hyper
agtgacctaaggactgcgagggagaacacaa

SEQ ID NO: 435 - DNA, 34 bp, Homo sapiens
  chr6:27447498-27447532
  hyper
ccggggttcgattccccgacggggaggaggctta

SEQ ID NO: 436 - DNA, 31 bp, Homo sapiens
  chr6:27447542-27447573
  hyper
tagaaaagcacacttccggtaaacacagtct

SEQ ID NO: 437 - DNA, 31 bp, Homo sapiens
  chr6:43596712-43596743
  hyper
cctcggggggcaaatacggggggttgttggc

SEQ ID NO: 438 - DNA, 37 bp, Homo sapiens
  chr6:43596774-43596811
  hyper
tttccctttggccccccgcagccgctgctgctgccgg

SEQ ID NO: 439 - DNA, 87 bp, Homo sapiens
  chr6:71123137-71123224
  hyper
ccggggacctgttgatcgcaggtatagccggctggcccgggctccctcgggactggggcgactgcgcatgctcgctggccgcgctgg

SEQ ID NO: 440 - DNA, 56 bp, Homo sapiens
  chr6:71123642-71123698
  hyper
tcccggtgcccgcggccgcccctgcccctgcgcgcgtccctcgacccgttcttcct

SEQ ID NO: 441 - DNA, 31 bp, Homo sapiens
  chr6:71123827-71123858
  hyper
cctccttgggaagcagcgtatctctgtgctt

SEQ ID NO: 442 - DNA, 31 bp, Homo sapiens
  chr6:71123869-71123900
  hyper
ctggctcttccctgtccggagctccttaccc

SEQ ID NO: 443 - DNA, 83 bp, Homo sapiens
  chr6:150920981-150921064
  hyper
gcagtggggccgagcccgaggaagaggaagtcggagcccgagcctgagcccgagcccgagcccgacggcggctgcagggcgct

SEQ ID NO: 444 - DNA, 122 bp, Homo sapiens
  chr6:150921276-150921398
  hyper
ccgccggccccctgcgcgcccctccgcagtggggacggagggccttggggggcgccgagcggtggggacagagggcgccgggggcaccgcgcggtggggacggagggcgctggggggcgccg

SEQ ID NO: 445 - DNA, 207 bp, Homo sapiens
  chr6:150921400-150921607
  hyper
tctcgggggtcggagtcgggtcggggatgctgcccgccgccgccccgcttggggttccgcgcccccaagttcccggtgctcccgcccctcgccccagcggctgcaacatcagcgcgcagaggagtttctgcgagcacccgggagttgtagccaccgcttccccacccccgactcagcaggacagccccagaacgggaccccacagcc

SEQ ID NO: 446 - DNA, 79 bp, Homo sapiens
  chr6:150921617-150921696
  hyper
gtcagctccccagcagcgaagccgggagcccgaggacccggggacgcgcggtgggggcggcggccgagctgctgcggcg

SEQ ID NO: 447 - DNA, 31 bp, Homo sapiens
  chr6:150921714-150921745
  hyper
ccccgttctgcagatgcgcttttcagggggt

SEQ ID NO: 448 - DNA, 227 bp, Homo sapiens
  chr6:150921755-150921982
  hyper
gagcctgtggctcttccgtcacggggtaaacggtaacacctgggcggccgcgactctgcgagcgttctggcctcggcgggcggcggggaaccgcagtgatgcccgagctcgccccttttgtgtcctcgcggtgagccccgttccgaagccggaagcttgggaacgctctaactgggagaacggcgctcggctggtcaattcattccgctcctcggaaacaatgagct

SEQ ID NO: 449 - DNA, 53 bp, Homo sapiens
  chr6:150921990-150922043
  hyper
gacttgaatgtgctggcggagcggggtttgtaagccggcgtttcatccagctc

SEQ ID NO: 450 - DNA, 31 bp, Homo sapiens
  chr7:1147466-1147497
  hyper
ctggagacccgcaccccgggaggaagcagag

SEQ ID NO: 451 - DNA, 71 bp, Homo sapiens
  chr7:25019059-25019130
  hyper
gttgtctcagtctctccggcgcgccccatcccgcggatgtggtaaagcttcgcgctcgccccaatttacca

SEQ ID NO: 452 - DNA, 34 bp, Homo sapiens
  chr7:25019135-25019169
  hyper
cctgagcctctagccccggcgtagcgcctccccg

SEQ ID NO: 453 - DNA, 45 bp, Homo sapiens
  chr7:25019172-25019217
  hyper
cccaggacagctccgcgcgccgcgtcctcccgcacctgcgccgcg

SEQ ID NO: 454 - DNA, 31 bp, Homo sapiens
  chr7:25019308-25019339
  hyper
ccccgggagctgcagccggcacccaagctcc

SEQ ID NO: 455 - DNA, 31 bp, Homo sapiens
  chr7:25019447-25019478
  hyper
ccgccgccaggccccccgacacccaggcccc

SEQ ID NO: 456 - DNA, 284 bp, Homo sapiens
  chr7:25019493-25019777
  hyper
ccgccactcacctgagcgctgtgcagccggagacgctccctagttccccggggccgggctccggggttagcgcacagaaccgggagaaggcaaccccggcttctccggtacccccgcaacgtgcagctgacagctcccgcaccggccgcaggagtcgggggcggggatggccacttgcagacagactgcggggccggagccgcgctgcgcaccggccgcgaagcgctcaagtcccctctcccgggccggctggcgggcgccaccagcacgcggccagttctgag

SEQ ID NO: 457 - DNA, 127 bp, Homo sapiens
  chr7:25019780-25019907
  hyper
tttgcccagaacttctcggcgcgcgccgcccggcgattagcccgaggagccgcgcaagggcgggagcgcaggggaggggcctgagaggcccaggggcggggccccgagggggcgggagggcggcaga

SEQ ID NO: 458 - DNA, 242 bp, Homo sapiens
  chr7:25019919-25020161
  hyper
ctcaccaatcagaagtcgcctttcgggaaggaggtggggcgatgtcctcggaagaagccagcggattccatgacgcggcgggggaactagggaccccggattccggatgggttgggagggcggagggaggcgagtcctgcggcgaggcactgggtggggctcccggtggcccagctcggtgcctgcgcgcggtaggcgttcggtaaatgttcctctagtggcttttccgggccagggaagga

SEQ ID NO: 459 - DNA, 97 bp, Homo sapiens
  chr7:25020163-25020260
  hyper
aaaaagtgagggcagcgcgggaggggcaggtttacggagaaggctccaggggacccttgcggtcgcacaggctaggagaactcgacctcccgagaaa

SEQ ID NO: 460 - DNA, 71 bp, Homo sapiens
  chr7:25219593-25219664
  hyper
gacatgagcctgggggcgctgcgggaccgcgcctcccctcccctccccgcagctggcggccttcgcgggcc

SEQ ID NO: 461 - DNA, 398 bp, Homo sapiens
  chr7:25219702-25220100
  hyper
agctggcaggcaggggcgggggcgggagaaggacggcgggcaggccggggtggggtggggctgggggcgcttgtgacggtggccgtgaccgcggcattaggtgatgcgtccttgaggggctgggggcttccgggcggcgagcggggcgcagtaggaggctcttagagacctcggaggaaaccagcccagcgctacgggactggcaagaatgcgaagaggaaccgagagtgaacggagtgcgaggcgccgggtcggaggcgagaggggctcttccgccttgcgacccctggccccgcctcccggtcccttgccccgcccctctcggctcaccgccctgcctccagtcggaccccgccttgccccacccgcgccccgcccccaggcgccctctagcggcg

SEQ ID NO: 462 - DNA, 31 bp, Homo sapiens
  chr7:36217596-36217627
  hyper
acaggcatgagccaccgcgcctggcaccttc

SEQ ID NO: 463 - DNA, 31 bp, Homo sapiens
  chr7:51693437-51693468
  hyper
tctccatggacagaaccgggaaactgtgtca

SEQ ID NO: 464 - DNA, 31 bp, Homo sapiens
  chr7:51693487-51693518
  hyper
gacagtctgcagtgcacgctccacagggtgg

SEQ ID NO: 465 - DNA, 59 bp, Homo sapiens
  chr7:51693527-51693586
  hyper
tgaccctcttggcactcggtcttctcatttggccccgagaggcacgtttcttcttcttg

SEQ ID NO: 466 - DNA, 31 bp, Homo sapiens
  chr7:57714733-57714764
  hyper
ggcacagaaacacacacgcacacgggcacgc

SEQ ID NO: 467 - DNA, 38 bp, Homo sapiens
  chr7:92463862-92463900
  hyper
gtgttcgccacaatttcgcttgtcgtctccttaaagaa

SEQ ID NO: 468 - DNA, 37 bp, Homo sapiens
  chr7:92463911-92463948
  hyper
aggggatagcataatcgcgcctcgtccttaagtttta

SEQ ID NO: 469 - DNA, 37 bp, Homo sapiens
  chr7:101457689-101457726
  hyper
gccctgctgtgcgcggcgtcaccgcatctagggtgga

SEQ ID NO: 470 - DNA, 41 bp, Homo sapiens
  chr7:101457728-101457769
  hyper
ctcgcaacgtgccccccgacgccagcgcgctcccacccacc

SEQ ID NO: 471 - DNA, 38 bp, Homo sapiens
  chr7:101458245-101458283
  hyper
tgtaaacttgggaccacgctttccgttttcagtgagtg

SEQ ID NO: 472 - DNA, 31 bp, Homo sapiens
  chr7:101458290-101458321
  hyper
actttccaactttctgcgcccaaagttgcaa

SEQ ID NO: 473 - DNA, 43 bp, Homo sapiens
  chr7:101458348-101458391
  hyper
gtttcttgggctgttccgctgaagcggcgcggggggacacaga

SEQ ID NO: 474 - DNA, 31 bp, Homo sapiens
  chr7:101458451-101458482
  hyper
ctgccgggacccccagcgctaccgccgttgg

SEQ ID NO: 475 - DNA, 31 bp, Homo sapiens
  chr7:101458522-101458553
  hyper
tgtggggcatccacgcgcgcggccccctgag

SEQ ID NO: 476 - DNA, 103 bp, Homo sapiens
  chr7:101458610-101458713
  hyper
ggtcgtgtcggtgtcccggtcctcgctgggcgcagagggatcagagtgttgccgtccaccgtcggggcgcctcccacgcacgctgctgcggggggcctgggcc

SEQ ID NO: 477 - DNA, 53 bp, Homo sapiens
  chr7:121863465-121863518
  hyper
aactgaaagacagttccgactaacttaaaaaaataactcggaagttcaaggga

SEQ ID NO: 478 - DNA, 31 bp, Homo sapiens
  chr7:121863554-121863585
  hyper
tgatggcatcagcctacgtctctcctaccat

SEQ ID NO: 479 - DNA, 31 bp, Homo sapiens
  chr7:121863595-121863626
  hyper
tgccaccttctgtgttcgcttccttctcaaa

SEQ ID NO: 480 - DNA, 36 bp, Homo sapiens
  chr7:121863628-121863664
  hyper
tttattttttatgagacgatccgagggatgagcagc

SEQ ID NO: 481 - DNA, 31 bp, Homo sapiens
  chr8:10898619-10898650
  hyper
agagatgccactgagacgttagggacagctc

SEQ ID NO: 482 - DNA, 31 bp, Homo sapiens
  chr8:21966148-21966179
  hyper
gtcttggattgatttgcgtctgtacctgcca

SEQ ID NO: 483 - DNA, 36 bp, Homo sapiens
  chr8:22419404-22419440
  hyper
gacctgcccacaggcccggcccggcaacatcttcca

SEQ ID NO: 484 - DNA, 31 bp, Homo sapiens
  chr8:48604759-48604790
  hyper
ccctttttaaagtgtacgaatcattggtttt

SEQ ID NO: 485 - DNA, 31 bp, Homo sapiens
  chr8:48604865-48604896
  hyper
ccttcagcaggagctccgcactttctctccc

SEQ ID NO: 486 - DNA, 58 bp, Homo sapiens
  chr8:48604903-48604961
  hyper
ccactcctctgctttccgtctctgtggatttgcccgttctggacgtttcctgtcagtg

SEQ ID NO: 487 - DNA, 23 bp, Homo sapiens
  chr8:51149016-51149039
  hyper
ttttttttttttgagacgcagtc

SEQ ID NO: 488 - DNA, 591 bp, Homo sapiens
  chr8:56792360-56792951
  hyper
gctgggacctctcggccgagcccagagacagccagttcctctcccgccgcgccgggccgcgctgccgctcgctccccggccgtggcgcctccgggccagacgcgctgcagcctccagcccgcggcaagcggggcggccgcgccacccccggccccgcgccagcagcccctcgccgcgcgtccagcgttcccggccagcagcctccccatacgcaggtcctgctgggccgccccgtcgcgccccccactctgaactcaagtcaccgtggagctccgccgccccgaaactttcaccgcgagcgggtgagtcctctgcgcgagcccaggggtgggcgcgggcacgcgggcagtgggtgcaggggccgcggctgtgccaccagccggagtcccgggcgcagggtagactcggggccgggggcatcggcgcggcccgcggcggcttcctggccgcaccgcctctgggctccggcggcgaaggctcttagatgtcttcagccgacgggtgaccgggcccgggggagccagggcgcggggactgaggctccgcaggtgtccgccgcggagccgcgcaggggagcggtgggaggtgcgg

SEQ ID NO: 489 - DNA, 31 bp, Homo sapiens
  chr8:56792977-56793008
  hyper
cttcccggtgagggcccgagggccggctgct

SEQ ID NO: 490 - DNA, 81 bp, Homo sapiens
  chr8:56793031-56793112
  hyper
cacacagtggggaagccgctgcccttgcggagcgggcgcgcggcggggatactggagaggactcctcggattgtgcaatct

SEQ ID NO: 491 - DNA, 54 bp, Homo sapiens
  chr8:56793143-56793197
  hyper
agtgggagatggggctcggccggcgccctctcgaggcccgcggacagttgccct

SEQ ID NO: 492 - DNA, 44 bp, Homo sapiens
  chr8:67837265-67837309
  hyper
cctaagagcctgaaaccgccaaggccgcacgcacaactttgctg

SEQ ID NO: 493 - DNA, 55 bp, Homo sapiens
  chr8:70745719-70745774
  hyper
ggcagtgtcttttaatcgagtgaactaactgcagcctttccgtactcctactcca

SEQ ID NO: 494 - DNA, 31 bp, Homo sapiens
  chr8:144614550-144614581
  hyper
aagtccacagggcagtcgtccccagctggac

SEQ ID NO: 495 - DNA, 36 bp, Homo sapiens
  chr9:22447078-22447114
  hyper
gtgtggcagcagagaccgaggcgttagcggccgacc

SEQ ID NO: 496 - DNA, 45 bp, Homo sapiens
  chr9:31254845-31254890
  hyper
gcaaaccatcgacattcgagaaattccagtcgtctttttcccagc

SEQ ID NO: 497 - DNA, 42 bp, Homo sapiens
  chr9:34646960-34647002
  hyper
gcctctagctcctgagcgggacagggccgagagggcgctccc

SEQ ID NO: 498 - DNA, 31 bp, Homo sapiens
  chr9:34647276-34647307
  hyper
tctgcaggctgggccacggggagtagttccc

SEQ ID NO: 499 - DNA, 31 bp, Homo sapiens
  chr9:34996682-34996713
  hyper
gcacatagtcatcaagcgtggctggaaggaa

SEQ ID NO: 500 - DNA, 29 bp, Homo sapiens
  chr9:97287278-97287307
  hyper
caggcgtgagccaccgtgccctgccaatc

SEQ ID NO: 501 - DNA, 31 bp, Homo sapiens
  chr9:101558159-101558190
  hyper
tctctacaattctattcgctgtctccagatt

SEQ ID NO: 502 - DNA, 53 bp, Homo sapiens
  chr9:101558600-101558653
  hyper
ccgggcccggccacctcggcccccgccggctccgcgcccgcctccggctccgc

SEQ ID NO: 503 - DNA, 65 bp, Homo sapiens
  chr9:101558885-101558950
  hyper
actgtgtgccgggagcgcgccggggctagggccgcgcgcctgctgtgtgccgggagcgcgctagg

SEQ ID NO: 504 - DNA, 53 bp, Homo sapiens
  chr9:101866821-101866874
  hyper
actgaggagggatcttcgggggaatgctgaagttgatgcgtggacttggagag

SEQ ID NO: 505 - DNA, 31 bp, Homo sapiens
  chr9:101866887-101866918
  hyper
ggatgcaggggcctggcgctgcagcggatct

SEQ ID NO: 506 - DNA, 31 bp, Homo sapiens
  chr9:128096836-128096867
  hyper
gtatttcttatgaatacgtaattgggtattt

SEQ ID NO: 507 - DNA, 31 bp, Homo sapiens
  chr9:129296527-129296558
  hyper
gcagatgaaacgctcccggggtgggacatta

SEQ ID NO: 508 - DNA, 31 bp, Homo sapiens
  chr9:130320411-130320442
  hyper
agcccctcactgtctgcgcatagacgggcct

SEQ ID NO: 509 - DNA, 105 bp, Homo sapiens
  chr9:130679367-130679472
  hyper
cgggggcggggcctgcgcgccgcaggcggatcctacgagcgcggcctgcgcgacctggggagggctctgcgcggccgggacggggcgggacgtgaatggctggcg

SEQ ID NO: 510 - DNA, 31 bp, Homo sapiens
  chr9:130679510-130679541
  hyper
ggcggggcttcagagccggggcggagtctga

SEQ ID NO: 511 - DNA, 31 bp, Homo sapiens
  chr9:130679713-130679744
  hyper
aaattaagcagggcttcgggtcaggcagccc

SEQ ID NO: 512 - DNA, 31 bp, Homo sapiens
  chr9:132318706-132318737
  hyper
ctcttggggtctggatcgggatccatggtgg

SEQ ID NO: 513 - DNA, 31 bp, Homo sapiens
  chr9:135906525-135906556
  hyper
tgggcggcgaggaaggcgtctcccgggtaag

SEQ ID NO: 514 - DNA, 31 bp, Homo sapiens
  chr9:137580399-137580430
  hyper
aggtgccatacatgcccgagggggtgacaga

SEQ ID NO: 515 - DNA, 31 bp, Homo sapiens
  chr9:138120293-138120324
  hyper
ggggagggagggaagacgcctttgaagcggg

SEQ ID NO: 516 - DNA, 31 bp, Homo sapiens
  chr9:138169316-138169347
  hyper
cccggaatggcctcctcgctcagaccagagc

SEQ ID NO: 517 - DNA, 31 bp, Homo sapiens
  chr10:6018342-6018373
  hyper
aaattattcagggtctcgcttaaaaacacac

SEQ ID NO: 518 - DNA, 38 bp, Homo sapiens
  chr10:73113222-73113260
  hyper
catttacattggcaagcggtcctcgggttaatctgtcc

SEQ ID NO: 519 - DNA, 31 bp, Homo sapiens
  chr10:73437159-73437190
  hyper
agcctgttttaaaccacggtgttccttctct

SEQ ID NO: 520 - DNA, 40 bp, Homo sapiens
  chr10:75639672-75639712
  hyper
tgacaaaactcaccagcgtagctaacgtctagagaaagct

SEQ ID NO: 521 - DNA, 45 bp, Homo sapiens
  chr10:91403836-91403881
  hyper
gggtagttaaactccacgcctccagacttgcgctctccaatagac

SEQ ID NO: 522 - DNA, 31 bp, Homo sapiens
  chr10:103543155-103543186
  hyper
agccttcttcaaactccgcccccgacacgca

SEQ ID NO: 523 - DNA, 43 bp, Homo sapiens
  chr10:103543253-103543296
  hyper
aaaggcgccgagaccccgcagccctacccggagcccgcagctt

SEQ ID NO: 524 - DNA, 31 bp, Homo sapiens
  chr10:104951847-104951878
  hyper
cctaaagccttctctacgcaataacactaag

SEQ ID NO: 525 - DNA, 116 bp, Homo sapiens
  chr10:111767683-111767799
  hyper
gcggggcgttagggggcgggaccaagggacgctcgaggggcgctcggctagtcccgccagagcgcgagccgccagcccgtaacggtcgccagtgtgaggggcgggagggaaagaag

SEQ ID NO: 526 - DNA, 49 bp, Homo sapiens
  chr10:111968982-111969031
  hyper
aactaggcagacagaccgacagatagggggaaaccgggatgtttaatgt

SEQ ID NO: 527 - DNA, 47 bp, Homo sapiens
  chr10:111969324-111969371
  hyper
ttctcgcctgttttcccggagtgcctgggttgcgagaaaggcgcatc

SEQ ID NO: 528 - DNA, 31 bp, Homo sapiens
  chr10:128850483-128850514
  hyper
tttactgattagaaaacgttttacaggccgt

SEQ ID NO: 529 - DNA, 36 bp, Homo sapiens
  chr11:1856742-1856778
  hyper
ccagagcccagggcagcgaggcgagttcagccccag

SEQ ID NO: 530 - DNA, 31 bp, Homo sapiens
  chr11:44587386-44587417
  hyper
ggaactagtgacaggtcggggcagctggtgg

SEQ ID NO: 531 - DNA, 88 bp, Homo sapiens
  chr11:96122354-96122442
  hyper
caacagtccacaatttcgcaaagtggatcctgccagcatggtatccgggataactatattattcattaaaatccgttaacaatgaagg

SEQ ID NO: 532 - DNA, 31 bp, Homo sapiens
  chr11:96122484-96122515
  hyper
ctcaggaattaacacccggaagggtgacttt

SEQ ID NO: 533 - DNA, 69 bp, Homo sapiens
  chr11:96122520-96122589
  hyper
ttacaaacctctttggcgggacgcaggaacccagcgcccgctagcccactagtccgtcactctgcctcc

SEQ ID NO: 534 - DNA, 73 bp, Homo sapiens
  chr11:96122602-96122675
  hyper
acagtagctaggaaaccggaccctcaggccaagcttcgcgatgacgcgcgcaggacgacggaaacccccagac

SEQ ID NO: 535 - DNA, 31 bp, Homo sapiens
  chr11:96122677-96122708
  hyper
caaaagagctctgcaccgagaaaacaattac

SEQ ID NO: 536 - DNA, 46 bp, Homo sapiens
  chr11:96122716-96122762
  hyper
ggaaaggccagaaacccgagaaatcaccaaccgagctccctacatc

SEQ ID NO: 537 - DNA, 48 bp, Homo sapiens
  chr11:96122768-96122816
  hyper
aagcacctccccaaggcggaaataacgggcaccgcgcccactgcagct

SEQ ID NO: 538 - DNA, 98 bp, Homo sapiens
  chr11:96122820-96122918
  hyper
tgaggagggttagaggcgcaaagggctgaggggcgttctccggcccacccaaagagcgcccgcgggaatttttctcttagtccgcgaggaggcacggc

SEQ ID NO: 539 - DNA, 154 bp, Homo sapiens
  chr11:96122933-96123087
  hyper
cataaaccattagcaccgggagcgcgagcgagtcccagccgggagacagccccgcaccgccctcgcgctctcacctttcaaagcgcctccacctctgcctccgcctccgcccctgccccggcaaccagctcaggacaagcgatgctcctccccc

SEQ ID NO: 540 - DNA, 136 bp, Homo sapiens
  chr11:96123095-96123231
  hyper
ggaccaagggaagtcccgcctctgggtggggcgaggggtggggccaggcggcgggagggatcatcttccgggagcgtggctaggggcggagcgactgccgcgcgatagtcagggagctgtgcgggtcctggttgca

SEQ ID NO: 541 - DNA, 96 bp, Homo sapiens
  chr11:96123239-96123335
  hyper
ggggagaggggcctggcgggttttgagggactgggaggactgtcccggctaaagctggcgcgggaaactggggctgcgcggcgggagggccctgct

SEQ ID NO: 542 - DNA, 31 bp, Homo sapiens
  chr11:96123343-96123374
  hyper
aggaatctaatatatccgttcccctgaggaa

SEQ ID NO: 543 - DNA, 42 bp, Homo sapiens
  chr11:96123387-96123429
  hyper
tgactcctaggctcttcggctctctgtcgtaactttggggtg

SEQ ID NO: 544 - DNA, 41 bp, Homo sapiens
  chr11:96123431-96123472
  hyper
gcaggggttagtgacgcgcggttacccgggatctggacgtg

SEQ ID NO: 545 - DNA, 31 bp, Homo sapiens
  chr11:96123654-96123685
  hyper
ccagccaaccccagcccgggaggggatcagg

SEQ ID NO: 546 - DNA, 31 bp, Homo sapiens
  chr11:115936675-115936706
  hyper
tgctaacacaaagacacgccctgctgtgctc

SEQ ID NO: 547 - DNA, 658 bp, Homo sapiens
  chr11:128391966-128392624
  hyper
aacagggggaaggggacgggggaaatccgactttcttcccaaaaatctcaaattcccgctgcctttctttcccccgcgcccggacggtgcgcgcccggcactccaggggaagttggcactttgcggcgaagtgagcgcgctcgggtcccagcctcgcccgcgccgcgcccgctcctcctgcccggccctcgcccgctccctcctctccgccggcggctgcctcgttcgctctcgatctcccggccgctctccctccctctcgccctcccgcgctctcccctcctctttagggcgtttctcgcggcgccgcgtctcggccgctgggtccgcgcgccctgggccgggcgatgtccgcttgggggagcgaggggcggggcgtcggggcagggcggggagccgggggcggggccgagcaccgcggccaatctccgcccgcggcccaaagcgaaaggaagggctggcgagcgcggggccgggccgcgaccgcggaggagcagtgcgtggagccccgggcctcggagcccaggcaggggcgggaagggccgggagcgggtgtgcaggctgggtgcacaggccgcctccaccgtttcgggaaagtccgtctgattctccacgcattcttgagggcttggtcacccgctctcgccccctcccagta

SEQ ID NO: 548 - DNA, 31 bp, Homo sapiens
  chr11:128392628-128392659
  hyper
catagttttccaagtgcgtgtacatcattca

SEQ ID NO: 549 - DNA, 56 bp, Homo sapiens
  chr11:128392666-128392722
  hyper
agactgacacacaggacgtgaggcatgtggatgaaggcgagcgtgcaggcaggcgc

SEQ ID NO: 550 - DNA, 31 bp, Homo sapiens
  chr11:134738700-134738731
  hyper
ctcagaaaggaaaagccgggagcataaacac

SEQ ID NO: 551 - DNA, 55 bp, Homo sapiens
  chr12:5131853-5131908
  hyper
ttgacaggtaagatcccggacccatgggctcctgtatatccgtcagccaaatctg

SEQ ID NO: 552 - DNA, 31 bp, Homo sapiens
  chr12:66300831-66300862
  hyper
tccctgtacctgaaaacgagtgggagccaag

SEQ ID NO: 553 - DNA, 31 bp, Homo sapiens
  chr12:66300887-66300918
  hyper
aaggggttgctgggtgcggtggctcacacct

SEQ ID NO: 554 - DNA, 7 bp, Homo sapiens
  chr12:66300925-66300932
  hyper
cagcact

SEQ ID NO: 555 - DNA, 31 bp, Homo sapiens
  chr12:76954093-76954124
  hyper
tttttttttgaggaaacggtgtatttcaatc

SEQ ID NO: 556 - DNA, 38 bp, Homo sapiens
  chr12:109592370-109592408
  hyper
ggggcggggctccgtccggaaggcggggccctcctggg

SEQ ID NO: 557 - DNA, 31 bp, Homo sapiens
  chr12:110719374-110719405
  hyper
cccgccctgcggagctcggggccgcgcgagg

SEQ ID NO: 558 - DNA, 74 bp, Homo sapiens
  chr13:25497657-25497731
  hyper
tttttttgttttgtttcgttttaactgccacggccctttaatctaggaagttacagcaccgtgagttaccacag

SEQ ID NO: 559 - DNA, 49 bp, Homo sapiens
  chr13:25497799-25497848
  hyper
aagtgccatttataaccgttataactgaaacaaacgactgctaaagaca

SEQ ID NO: 560 - DNA, 19 bp, Homo sapiens
  chr13:31019964-31019983
  hyper
cagctggctggcttcccgg

SEQ ID NO: 561 - DNA, 31 bp, Homo sapiens
  chr13:79979539-79979570
  hyper
tttcactaaaataaaccgattttgaggcccc

SEQ ID NO: 562 - DNA, 40 bp, Homo sapiens
  chr14:62163204-62163244
  hyper
cgtgcaggttttgtttcgttttaatcgccttgaaaaactt

SEQ ID NO: 563 - DNA, 35 bp, Homo sapiens
  chr14:74111544-74111579
  hyper
ggcagccagcaacagccggacgggaggaccccggc

SEQ ID NO: 564 - DNA, 31 bp, Homo sapiens
  chr14:77680058-77680089
  hyper
ctggcagaaggcatgccgttgaagtgtactg

SEQ ID NO: 565 - DNA, 31 bp, Homo sapiens
  chr14:81685635-81685666
  hyper
aactgagctctgcacacgcctggctcttgcc

SEQ ID NO: 566 - DNA, 57 bp, Homo sapiens
  chr14:90085512-90085569
  hyper
gcgcccggcgcccgcccggggtcggcggcgcggctcccaccccggcctggagccctg

SEQ ID NO: 567 - DNA, 60 bp, Homo sapiens
  chr14:96152830-96152890
  hyper
aggggtgccccctggccgtctgtggatccagaggcctggcatctacgaagatgaggaggg

SEQ ID NO: 568 - DNA, 46 bp, Homo sapiens
  chr15:29248972-29249018
  hyper
ctgtctatgattttgacgacttcaggtgcctcgtatgagagcaatt

SEQ ID NO: 569 - DNA, 94 bp, Homo sapiens
  chr15:29249044-29249138
  hyper
catatttcactctcaacgtcctcacggtgcacacacgtcgtagtgtagcacgtgtcacagtctccttgtctgttaaggtcgaggaatacttcct

SEQ ID NO: 570 - DNA, 31 bp, Homo sapiens
  chr15:40074996-40075027
  hyper
ctcctgcctgtgggaccgctgtttccctggc

SEQ ID NO: 571 - DNA, 67 bp, Homo sapiens
  chr15:40075162-40075229
  hyper
cggtgggggttgggagcgatttttcgtctttaggttggattcggaacgcggacgtctggatgcttgt

SEQ ID NO: 572 - DNA, 50 bp, Homo sapiens
  chr15:40075265-40075315
  hyper
ggtcagttatcctctccgagcacagtttcctcctccgtaaaatgggaaca

SEQ ID NO: 573 - DNA, 61 bp, Homo sapiens
  chr15:43394929-43394990
  hyper
ttgcctattgtttccacgttcttacctcattcttccattttccacccgtttcaatcattcc

SEQ ID NO: 574 - DNA, 12 bp, Homo sapiens
  chr15:43395066-43395078
  hyper
cctcaaagatct

SEQ ID NO: 575 - DNA, 31 bp, Homo sapiens
  chr15:100107046-100107077
  hyper
cgtgcggggagacgtcgcggggacagagggg

SEQ ID NO: 576 - DNA, 60 bp, Homo sapiens
  chr16:896899-896959
  hyper
ccggtttcctgtaacccgtgtgtgtcccgtgtctgtaatgcgtcccggtttcctgtaacc

SEQ ID NO: 577 - DNA, 31 bp, Homo sapiens
  chr16:1420663-1420694
  hyper
aactaagccattggcacggtcctcccagcac

SEQ ID NO: 578 - DNA, 35 bp, Homo sapiens
  chr16:2533374-2533409
  hyper
aggagcgtggggttggcgggcgggagttggggctt

SEQ ID NO: 579 - DNA, 4 bp, Homo sapiens
  chr16:3078145-3078149
  hyper
gggc

SEQ ID NO: 580 - DNA, 94 bp, Homo sapiens
  chr16:3078252-3078346
  hyper
cgatcaccacctgcatgtcgtcctgcgggaggccgtggtcggctcagcgccggtcccgccccttgccccgccccgcacacgggccccgcccctc

SEQ ID NO: 581 - DNA, 31 bp, Homo sapiens
  chr16:4291946-4291977
  hyper
aaaaccttggaggaagcgtgggggaccagtc

SEQ ID NO: 582 - DNA, 31 bp, Homo sapiens
  chr16:11035551-11035582
  hyper
agaggggaacagcagtcgagaccctactcca

SEQ ID NO: 583 - DNA, 64 bp, Homo sapiens
  chr16:11035602-11035666
  hyper
agctccgagtcagcatcgtaaaggcccgagccggggtcggagagcacgccgaggtccacgagcg

SEQ ID NO: 584 - DNA, 19 bp, Homo sapiens
  chr16:13648595-13648614
  hyper
gcttcggcctcccaaagag

SEQ ID NO: 585 - DNA, 144 bp, Homo sapiens
  chr16:27121250-27121394
  hyper
cagccgccccacccgccgctccccgctcccgccccgccgcgcccgctgcaaactttggcctctgcagccccggcatccgctggacggaagagagagagaggagctcctcccgtagctttctcccgaaaacgttttctcttccct

SEQ ID NO: 586 - DNA, 31 bp, Homo sapiens
  chr16:29653961-29653992
  hyper
acactcactcgtttttcgttgtttttttttt

SEQ ID NO: 587 - DNA, 53 bp, Homo sapiens
  chr16:30620878-30620931
  hyper
gcggatctagagcagccggttcccagtcatcggtgtttcgttccaaccaggag

SEQ ID NO: 588 - DNA, 31 bp, Homo sapiens
  chr16:30620937-30620968
  hyper
gctggtttgggacctgcgcaccctggggaaa

SEQ ID NO: 589 - DNA, 52 bp, Homo sapiens
  chr16:30620984-30621036
  hyper
gccagctcctagatcacgccgagtagtatctccccgacggcacctcctgcta

SEQ ID NO: 590 - DNA, 15 bp, Homo sapiens
  chr16:30621051-30621066
  hyper
cccctgacaacctgg

SEQ ID NO: 591 - DNA, 407 bp, Homo sapiens
  chr16:30621123-30621530
  hyper
cgcgccccgcggcagcggatggggccggcctcaccgagcgcgcccaggtgaccgtaggtctcccgcatcacgtcccggtacagggccctctgcgcgggccgcaggcagccccactcctccggggagaagtacacggccacgtccacgaacttcagagccctcggcctcctgccccttttccgactgggtctggcctttcctggtccctgcgcagggagcggagccgaaggtggcgccatgggacccgagaagccggcgccacggccttccgtgtccaggcctcggccctcgggcgctggcggcccctgggatcgaggagcccctgccggaccagggctgagcgtggccggggaggcccggagggaatcggaattggtcgcccgcggggctaacggaaaccttttgct

SEQ ID NO: 592 - DNA, 93 bp, Homo sapiens
  chr16:30621535-30621628
  hyper
tcaggaaactcctgcccgaacttgggtgaaaggcaccggaagatgccttcggggaaaatggcggcgctgctaccgcaccgcctttgcctggaa

SEQ ID NO: 593 - DNA, 57 bp, Homo sapiens
  chr16:30621632-30621689
  hyper
ggcagcttccagctatcgattttattgaccggagcgccatgccggcttcctaacctc

SEQ ID NO: 594 - DNA, 146 bp, Homo sapiens
  chr16:30621693-30621839
  hyper
ccctcaagtgtaatggcgctgcgattgggcttcacgccgtcttttttcccctccccaatacgcgcgttcattggacgagagccgaagatcgagcgttctgattgggtgctagcaaaggcggtccgtttgaacgaagccaagagctg

SEQ ID NO: 595 - DNA, 106 bp, Homo sapiens
  chr16:30621857-30621963
  hyper
gactgctaggatcaggcgactacaaggagttgtgaagcgacttgcaccgacctgggggcagcaagaggccccggggctgctttccgctgttcgactctggcaggct

SEQ ID NO: 596 - DNA, 58 bp, Homo sapiens
  chr16:30621970-30622028
  hyper
tcactgaaggagggaacgatttgagcgatggagccactctggccgagttagagctgag

SEQ ID NO: 597 - DNA, 28 bp, Homo sapiens
  chr16:31276465-31276493
  hyper
agcatgagccaccgcgcctggtcctatt

SEQ ID NO: 598 - DNA, 31 bp, Homo sapiens
  chr16:67203649-67203680
  hyper
gcctcctacttgggcccggaagccagtccct

SEQ ID NO: 599 - DNA, 31 bp, Homo sapiens
  chr16:70472226-70472257
  hyper
caggagagaggagagacgaggttcagaccag

SEQ ID NO: 600 - DNA, 104 bp, Homo sapiens
  chr16:70472434-70472538
  hyper
tggccaagagtggggccggggtctcccaggtggagcagaggccgggagacccagggttagcggtacgaactagggagtggactggaagtcgggaccagggcaga

SEQ ID NO: 601 - DNA, 31 bp, Homo sapiens
  chr16:70472572-70472603
  hyper
tggggttgggggctgccggcaaaggagcgga

SEQ ID NO: 602 - DNA, 59 bp, Homo sapiens
  chr16:72699009-72699068
  hyper
acggcttccgggtgggcggcttgaggtggcttccggccgccaggcgagactccgcggga

SEQ ID NO: 603 - DNA, 31 bp, Homo sapiens
  chr16:74659594-74659625
  hyper
agtcaatgaaagttagcgctagcttctagag

SEQ ID NO: 604 - DNA, 31 bp, Homo sapiens
  chr16:76507679-76507710
  hyper
aaaataaaggagattgcggaaaccctattat

SEQ ID NO: 605 - DNA, 21 bp, Homo sapiens
  chr17:38383815-38383836
  hyper
tgttccaggctggttgcggtg

SEQ ID NO: 606 - DNA, 51 bp, Homo sapiens
  chr17:58676700-58676751
  hyper
cgtgcaaaggttttagcgttgggattgtgaccgactcggtgaagagagggg

SEQ ID NO: 607 - DNA, 31 bp, Homo sapiens
  chr17:62915937-62915968
  hyper
aagctgaaagagccagcgaaagaaaaaaaaa

SEQ ID NO: 608 - DNA, 34 bp, Homo sapiens
  chr17:63341481-63341515
  hyper
ccaccccaacccacctcgacgcatgccaaagaac

SEQ ID NO: 609 - DNA, 31 bp, Homo sapiens
  chr17:64257869-64257900
  hyper
tttagactcaggtattcggattccagaatcc

SEQ ID NO: 610 - DNA, 37 bp, Homo sapiens
  chr17:64257990-64258027
  hyper
atgcagtctccaggctcggcgcagtgactcacgcctg

SEQ ID NO: 611 - DNA, 36 bp, Homo sapiens
  chr17:80551802-80551838
  hyper
agcgggatcaggccacgcggacgaggaggtgcgagg

SEQ ID NO: 612 - DNA, 80 bp, Homo sapiens
  chr18:48494352-48494432
  hyper
catcctagagcggccgcgcgggacccggccggcggcgcacttccgcccgggcgcattgtagccccgcggacagctgggcc

SEQ ID NO: 613 - DNA, 31 bp, Homo sapiens
  chr19:10929999-10930030
  hyper
ccaagatgtcctaaagcggccaaggttgaaa

SEQ ID NO: 614 - DNA, 70 bp, Homo sapiens
  chr19:19729111-19729181
  hyper
tgctgaaaatccttcacgccactgctcggccccataaggcctatccagcccgttccgtttgaaccccata

SEQ ID NO: 615 - DNA, 31 bp, Homo sapiens
  chr19:36708803-36708834
  hyper
attcaaaagatacatacgaaataataaaact

SEQ ID NO: 616 - DNA, 31 bp, Homo sapiens
  chr19:40727912-40727943
  hyper
gatcccagttttatcccgctgaatgactctt

SEQ ID NO: 617 - DNA, 103 bp, Homo sapiens
  chr19:50016228-50016331
  hyper
aggggttgggggcccggactcctgggtccgagggtagagcggttgggggcccggactcctgggtccgagggtagagcggttgggggcccggactcctgggtcc

SEQ ID NO: 618 - DNA, 31 bp, Homo sapiens
  chr19:51527587-51527618
  hyper
ttggaggaggaaaggtcgggggagacatggg

SEQ ID NO: 619 - DNA, 64 bp, Homo sapiens
  chr19:51527641-51527705
  hyper
gaggatgaagaaacatcgctctgcttccaacctcttccacgtctcccaccgaagcccccttccc

SEQ ID NO: 620 - DNA, 31 bp, Homo sapiens
  chr19:51842631-51842662
  hyper
tatttctcttcccaaacgtaactcagcccct

SEQ ID NO: 621 - DNA, 31 bp, Homo sapiens
  chr19:51842817-51842848
  hyper
ctttccctggtgactccgccccccttgccag

SEQ ID NO: 622 - DNA, 49 bp, Homo sapiens
  chr19:51869773-51869822
  hyper
gcaaaccaatgggaagcggatctcggggagcgagcgggacctggagaga

SEQ ID NO: 623 - DNA, 31 bp, Homo sapiens
  chr19:51869963-51869994
  hyper
atcccccacttcttcccggcctctccaagtc

SEQ ID NO: 624 - DNA, 31 bp, Homo sapiens
  chr19:54415929-54415960
  hyper
gtcagatctgagatttcgatttgggagtcag

SEQ ID NO: 625 - DNA, 31 bp, Homo sapiens
  chr20:2627686-2627717
  hyper
aaggagtataaagtgccgccctcttgtggta

SEQ ID NO: 626 - DNA, 31 bp, Homo sapiens
  chr20:36235666-36235697
  hyper
ttagtcaacaacagaccgggacaggagtgtg

SEQ ID NO: 627 - DNA, 31 bp, Homo sapiens
  chr20:37274794-37274825
  hyper
gcagacagggacaaggcgggggacggcctcg

SEQ ID NO: 628 - DNA, 161 bp, Homo sapiens
  chr20:37274902-37275063
  hyper
ccttcctccaggtccccgctaccgggctgccagcaacggcccagtgaggccaccagggggcgttgcggcgccgtcacggggagcgaggaggcgtggctgcgaaacgagggcttagaagcgggttggggaggggaaatggagtgactcggagacttccccta

SEQ ID NO: 629 - DNA, 31 bp, Homo sapiens
  chr21:15270038-15270069
  hyper
ttctctacaactcactcggttacaacccttt

SEQ ID NO: 630 - DNA, 83 bp, Homo sapiens
  chr22:18441047-18441130
  hyper
ttgggtcctcaggccacgttgttatttgtgttctgttccctaaaaaccgtcagagagactgagttgaacgcactccacacact

SEQ ID NO: 631 - DNA, 31 bp, Homo sapiens
  chr22:18441145-18441176
  hyper
tggccagaggcagttacggaagaaagaaaag

SEQ ID NO: 632 - DNA, 31 bp, Homo sapiens
  chr22:18441211-18441242
  hyper
aaggtgtctcctgcatcggccttgggcctca

SEQ ID NO: 633 - DNA, 31 bp, Homo sapiens
  chr22:23254251-23254282
  hyper
aaggccttgacaggctcggttaatccatagt

SEQ ID NO: 634 - DNA, 23 bp, Homo sapiens
  chr22:32687449-32687472
  hyper
cactgcgccggggtcaactgttc

SEQ ID NO: 635 - DNA, 31 bp, Homo sapiens
  chr22:37172187-37172218
  hyper
accctcgattggttgccgccaaaagctccca

SEQ ID NO: 636 - DNA, 51 bp, Homo sapiens
  chr22:37172608-37172659
  hyper
acttgctctgacttcgcgcggttctcgcggcttccccggttcccgggttct

SEQ ID NO: 637 - DNA, 43 bp, Homo sapiens
  chr22:46512496-46512539
  hyper
cagcagcccccacctccgaggccagccccgcctgcaccccccc

SEQ ID NO: 638 - DNA, 61 bp, Homo sapiens
  chr22:46634891-46634952
  hyper
taaagcatcttcctaacgggtgtgtttgctatacgaacataatggacgtgaagtggggcag

SEQ ID NO: 639 - DNA, 45 bp, Homo sapiens
  chrX:10023768-10023813
  hyper
ccccaccttccaaaagcgctgtcaaacctccgctgtctccctacc

SEQ ID NO: 640 - DNA, 31 bp, Homo sapiens
  chrX:37765683-37765714
  hyper
ctcccccattttcctccggtgtaattcttag

SEQ ID NO: 641 - DNA, 38 bp, Homo sapiens
  chrX:54834567-54834605
  hyper
gggcagggtgtgcaaacgtaacacggaggaggatgtaa

SEQ ID NO: 642 - DNA, 183 bp, Homo sapiens
  chrX:73163987-73164170
  hyper
actgggggagggtccacggcaacggctgcggcacggcaacggctgcggcacggcaacggctggggcacggcaacggctggtgcatgttgccggcggaggcatttaggtagtgcacgacggctgggcgccgggcctgtttggctgtgacgcccacccccggctttcatccgcctatgccctagg

SEQ ID NO: 643 - DNA, 84 bp, Homo sapiens
  chrX:73164176-73164260
  hyper
ggaagacttaagatggcggcgtttgcacggagtgcaatcactgcgtccttacgggggttgcaaggcgtccgaagtatgagtcca

SEQ ID NO: 644 - DNA, 31 bp, Homo sapiens
  chrX:73164264-73164295
  hyper
caaaagtccagaaactcgccagttaatagta

SEQ ID NO: 645 - DNA, 91 bp, Homo sapiens
  chrX:73164301-73164392
  hyper
tgagtgatgagcctcacgttggctagagaagtggccgttagcgaggctacacactttgggatcgcgtggcctgagtcgggggagtaaccgg

SEQ ID NO: 646 - DNA, 31 bp, Homo sapiens
  chrX:96606843-96606874
  hyper
ttgaaaaatccataggcgtttgacaagcagg

SEQ ID NO: 647 - DNA, 73 bp, Homo sapiens
  chrX:100475065-100475138
  hyper
agaggcagcccagccccggcctcccagcttacagctgccgcctgcttctcagacctgacggaatcagaaggta

SEQ ID NO: 648 - DNA, 34 bp, Homo sapiens
  chrX:102941573-102941607
  hyper
agatcttcccagcagccgacgtgtgatcactgcc

SEQ ID NO: 649 - DNA, 31 bp, Homo sapiens
  chrX:107003133-107003164
  hyper
ggcgggaggaaattcacggtcctgagtgtct

SEQ ID NO: 650 - DNA, 50 bp, Homo sapiens
  chrX:107003204-107003254
  hyper
gggcaagtgctgccctcgggatcttctgccgagaccgggccagcttccta

SEQ ID NO: 651 - DNA, 40 bp, Homo sapiens
  chrX:107003266-107003306
  hyper
gactgaaggggagggccggatcctccgggagagcccagac

SEQ ID NO: 652 - DNA, 31 bp, Homo sapiens
  chrX:118101022-118101053
  hyper
tgtgtccatcaacagacgaattaataaacaa

SEQ ID NO: 653 - DNA, 21 bp, Homo sapiens
  chrX:118451726-118451747
  hyper
caaaataattttcactcgtgt

SEQ ID NO: 654 - DNA, 31 bp, Homo sapiens
  chrX:124338609-124338640
  hyper
ggtggggtggggggttcggatgagtatttgt

SEQ ID NO: 655 - DNA, 21 bp, Homo sapiens
  chrX:127856750-127856771
  hyper
tttaaagctcatcatccggct

SEQ ID NO: 656 - DNA, 52 bp, Homo sapiens
  chrX:130110129-130110181
  hyper
atatacaaacaggaaacgctgcgtgctatattcccgtcgagagtccaatata

SEQ ID NO: 657 - DNA, 31 bp, Homo sapiens
  chrX:133913512-133913543
  hyper
ctctcctagacattcacgggtctacagggta

SEQ ID NO: 658 - DNA, 31 bp, Homo sapiens
  chr1:1047358-1047389
  hypo
tgacatgcatggtagtcgctgcccacctacc

SEQ ID NO: 659 - DNA, 121 bp, Homo sapiens
  chr1:1047749-1047870
  hypo
tccagtgaacacacggcgcacggtccctccctccagtgaacacaacgcacacgctccctccctccagtgaacacacagcgcatgctccctccttccagtgaacacacggcacatgctacct

SEQ ID NO: 660 - DNA, 31 bp, Homo sapiens
  chr1:1047935-1047966
  hypo
tccagtgaacacacagcgcatgctccctccc

SEQ ID NO: 661 - DNA, 31 bp, Homo sapiens
  chr1:1047995-1048026
  hypo
cctccagtgaacacaccgggcatgctccctc

SEQ ID NO: 662 - DNA, 35 bp, Homo sapiens
  chr1:1048182-1048217
  hypo
acctgatctctcacatcgcccgtctggccctcctc

SEQ ID NO: 663 - DNA, 11 bp, Homo sapiens
  chr1:1048276-1048287
  hypo
taaaacttgcc

SEQ ID NO: 664 - DNA, 31 bp, Homo sapiens
  chr1:1979189-1979220
  hypo
gccccccaccttccctcgctgggactggggc

SEQ ID NO: 665 - DNA, 39 bp, Homo sapiens
  chr1:2329737-2329776
  hypo
tagccctcacatctggcgttcagccgtctgactggaaaa

SEQ ID NO: 666 - DNA, 31 bp, Homo sapiens
  chr1:11140984-11141015
  hypo
gaacattcaaaatcaacgggaatcaaaattg

SEQ ID NO: 667 - DNA, 31 bp, Homo sapiens
  chr1:17736663-17736694
  hypo
tggcccatgacaagcccggccacccttgcac

SEQ ID NO: 668 - DNA, 31 bp, Homo sapiens
  chr1:19664319-19664350
  hypo
gggaggctgcaacacccgtgtgcccatgggg

SEQ ID NO: 669 - DNA, 34 bp, Homo sapiens; identical to SEQ ID NO: 349
  chr1:21563184-21563218
  hypo

SEQ ID NO: 670 - DNA, 31 bp, Homo sapiens; identical to SEQ ID NO: 350
  chr1:21563241-21563272
  hypo

SEQ ID NO: 671 - DNA, 31 bp, Homo sapiens; identical to SEQ ID NO: 351
  chr1:21563314-21563345
  hypo

SEQ ID NO: 672 - DNA, 31 bp, Homo sapiens; identical to SEQ ID NO: 352
  chr1:21563354-21563385
  hypo

SEQ ID NO: 673 - DNA, 31 bp, Homo sapiens; identical to SEQ ID NO: 353
  chr1:21563387-21563418
  hypo

SEQ ID NO: 674 - DNA, 31 bp, Homo sapiens; identical to SEQ ID NO: 354
  chr1:21563431-21563462
  hypo

SEQ ID NO: 675 - DNA, 40 bp, Homo sapiens; identical to SEQ ID NO: 355
  chr1:21563477-21563517
  hypo

SEQ ID NO: 676 - DNA, 39 bp, Homo sapiens
  chr1:28857206-28857245
  hypo
ggcgccattggctgcccggggctgcgggttggggggccg

SEQ ID NO: 677 - DNA, 31 bp, Homo sapiens
  chr1:28857355-28857386
  hypo
ctgcagtggatttgcccgggagctgaactta

SEQ ID NO: 678 - DNA, 31 bp, Homo sapiens
  chr1:31732229-31732260
  hypo
acaggcatgagccaccgcgtctggcaaaacc

SEQ ID NO: 679 - DNA, 18 bp, Homo sapiens
  chr1:32307624-32307642
  hypo
ttttttttttttgagacg

SEQ ID NO: 680 - DNA, 31 bp, Homo sapiens
  chr1:35479658-35479689
  hypo
gataatatttagtaaccggcttaatccatta

SEQ ID NO: 681 - DNA, 31 bp, Homo sapiens
  chr1:41236636-41236667
  hypo
ccccatgcctgggggccgagattctccagca

SEQ ID NO: 682 - DNA, 84 bp, Homo sapiens
  chr1:46049071-46049155
  hypo
aagaggatgggatcagcggattgggccagccaaagggggcgggttcagagggaggagccagctgcctcccgctgcaagccccga

SEQ ID NO: 683 - DNA, 31 bp, Homo sapiens
  chr1:54260082-54260113
  hypo
gctgcagcaagcagcacgtgtctggttgggt

SEQ ID NO: 684 - DNA, 31 bp, Homo sapiens
  chr1:54417838-54417869
  hypo
gcatgaacagggaagacgacactgcacggaa

SEQ ID NO: 685 - DNA, 42 bp, Homo sapiens
  chr1:109609235-109609277
  hypo
gggcatggcagtggggcgttggaaaaacggcagactctttac

SEQ ID NO: 686 - DNA, 31 bp, Homo sapiens
  chr1:109795508-109795539
  hypo
tgggctagccgtggcccgggtcacagccact

SEQ ID NO: 687 - DNA, 31 bp, Homo sapiens
  chr1:109795680-109795711
  hypo
ctggtcatccaggccacgtcagctcctctgg

SEQ ID NO: 688 - DNA, 31 bp, Homo sapiens; identical to SEQ ID NO: 357
  chr1:114697994-114698025
  hypo

SEQ ID NO: 689 - DNA, 31 bp, Homo sapiens
  chr1:118147492-118147523
  hypo
ggttggaagagtagggcggaggagatgtaaa

SEQ ID NO: 690 - DNA, 40 bp, Homo sapiens
  chr1:120166426-120166466
  hypo
aggctatccagctccccgaggtccacggccatggggtggt

SEQ ID NO: 691 - DNA, 38 bp, Homo sapiens
  chr1:150579403-150579441
  hypo
ttttgtaaaatagggccgggcgccgtggctcaaccctg

SEQ ID NO: 692 - DNA, 39 bp, Homo sapiens
  chr1:150579452-150579491
  hypo
ctttgggaggctgaggcgggcagatcacttgaggtcagg

SEQ ID NO: 693 - DNA, 31 bp, Homo sapiens
  chr1:150941658-150941689
  hypo
gaagggggcagagagtcgaactctagatccc

SEQ ID NO: 694 - DNA, 31 bp, Homo sapiens
  chr1:155013028-155013059
  hypo
cagatcaacaacacccgcgcagcttggcgca

SEQ ID NO: 695 - DNA, 31 bp, Homo sapiens
  chr1:156754144-156754175
  hypo
agactggctcagaaggcgcccccactgtaag

SEQ ID NO: 696 - DNA, 61 bp, Homo sapiens
  chr1:160063719-160063780
  hypo
cacggccaagtctgaccggattcccaccacttcctgcagagttgaccgcccaactggtgcc

SEQ ID NO: 697 - DNA, 81 bp, Homo sapiens
  chr1:160293180-160293261
  hypo
agtttcttagatatggcgataatgtaaccggttcactcaccattcatgcgccagatcttcacttgacgatcatctgcccca

SEQ ID NO: 698 - DNA, 35 bp, Homo sapiens
  chr1:160293293-160293328
  hypo
agcccagtttactccacgatcgtgaccctgtagaa

SEQ ID NO: 699 - DNA, 31 bp, Homo sapiens
  chr1:204531125-204531156
  hypo
aggaagggaaaagtgccgtagttaggaggaa

SEQ ID NO: 700 - DNA, 31 bp, Homo sapiens
  chr1:204531202-204531233
  hypo
ctagaaagtttagtgtcgctgaaagcatgga

SEQ ID NO: 701 - DNA, 96 bp, Homo sapiens
  chr1:204531260-204531356
  hypo
ctgggcatcctgggaacgggaagacaccctgatggcagggaacccgcgcctgcgctttcggggtcaggtccaggtctgccccgccagggctgaagc

SEQ ID NO: 702 - DNA, 120 bp, Homo sapiens
  chr1:204531366-204531486
  hypo
tggggctgcagtgaggcggaagaggtgggatgctgctgcctggcggtgctgcggcggcagacctccacgaggaggtcctgggctaccgcggggtacacaggcgggcggaaaagggggagc

SEQ ID NO: 703 - DNA, 31 bp, Homo sapiens
  chr1:204531495-204531526
  hypo
gggcagttgggaagctcggagacaaaaggag

SEQ ID NO: 704 - DNA, 64 bp, Homo sapiens
  chr1:204531593-204531657
  hypo
cccgaccctgcttagtttccgagatctggcgtgttcagggtggtatggccgtagacactaatgg

SEQ ID NO: 705 - DNA, 182 bp, Homo sapiens
  chr1:204531668-204531850
  hypo
tgcctcttcaagagcccggcccagccacgcccgcccgactccaggcgtcactgccaccccagggtcgtggggctcggactggggacccctgagctgctcgcctgcggtcggactgctctccccttctacgcccaagcaccgccggtctgccctgctgcgccttccaccggcctcccagagcc

SEQ ID NO: 706 - DNA, 31 bp, Homo sapiens
  chr1:205042897-205042928
  hypo
ggaacccctccctctgcgccgcagctggacg

SEQ ID NO: 707 - DNA, 31 bp, Homo sapiens
  chr1:207063116-207063147
  hypo
accaattcttcattctcggtggacaccaaat

SEQ ID NO: 708 - DNA, 31 bp, Homo sapiens; identical to SEQ ID NO: 359
  chr1:207995366-207995397
  hypo

SEQ ID NO: 709 - DNA, 113 bp, Homo sapiens; identical to SEQ ID NO: 362
  chr1:225614979-225615092
  hypo

SEQ ID NO: 710 - DNA, 74 bp, Homo sapiens; identical to SEQ ID NO: 363
  chr1:225615218-225615292
  hypo

SEQ ID NO: 711 - DNA, 20 bp, Homo sapiens
  chr1:235447655-235447675
  hypo
cagagcgagactccgtctct

SEQ ID NO: 712 - DNA, 31 bp, Homo sapiens
  chr1:236903311-236903342
  hypo
gactccacatctcccacgagcaacttcttgg

SEQ ID NO: 713 - DNA, 31 bp, Homo sapiens
  chr1:240216145-240216176
  hypo
gaaacatcgggcaggacgtggtgtctcatgc

SEQ ID NO: 714 - DNA, 37 bp, Homo sapiens
  chr1:243566400-243566437
  hypo
ggtgatctgggctggacgttgccggttgcctcatgtg

SEQ ID NO: 715 - DNA, 39 bp, Homo sapiens
  chr1:243566493-243566532
  hypo
gattgagatgaggttccgccttgacgtgacacagctagc

SEQ ID NO: 716 - DNA, 35 bp, Homo sapiens
  chr2:3446896-3446931
  hypo
ttcttcctcttcttagcgcacgcaaagccaggcag

SEQ ID NO: 717 - DNA, 31 bp, Homo sapiens
  chr2:10732498-10732529
  hypo
aaaggggaagaaatcacgctccatttagggc

SEQ ID NO: 718 - DNA, 60 bp, Homo sapiens
  chr2:10732556-10732616
  hypo
agcaccaggattcagacggacaccactaggtgtctgggaacgatgcgccatgtctcagga

SEQ ID NO: 719 - DNA, 34 bp, Homo sapiens
  chr2:44113282-44113316
  hypo
acgccactgctctacaggccgggcaacagagtga

SEQ ID NO: 720 - DNA, 42 bp, Homo sapiens
  chr2:45940265-45940307
  hypo
gtaaatgatctgtagtcgctgtcacctcgaggctcttataaa

SEQ ID NO: 721 - DNA, 31 bp, Homo sapiens
  chr2:61135217-61135248
  hypo
catcttcctaattatacggtatactcagcaa

SEQ ID NO: 722 - DNA, 41 bp, Homo sapiens
  chr2:63272259-63272300
  hypo
gccctggtgaacaagcgcgatgcgctcgtcagggacctgga

SEQ ID NO: 723 - DNA, 25 bp, Homo sapiens
  chr2:128487353-128487378
  hypo
ccactgcacccggccaactattcat

SEQ ID NO: 724 - DNA, 57 bp, Homo sapiens
  chr2:129027718-129027775
  hypo
actgcatgcagactgccgaggaagggacaggcagctgtcatccgcccagtgttttct

SEQ ID NO: 725 - DNA, 31 bp, Homo sapiens
  chr2:139274945-139274976
  hypo
cttttgaggattgaatcgtagcagattaatt

SEQ ID NO: 726 - DNA, 31 bp, Homo sapiens; identical to SEQ ID NO: 370
  chr2:170430429-170430460
  hypo

SEQ ID NO: 727 - DNA, 31 bp, Homo sapiens; identical to SEQ ID NO: 372
  chr2:181846233-181846264
  hypo

SEQ ID NO: 728 - DNA, 31 bp, Homo sapiens
  chr2:208969265-208969296
  hypo
acagatctccagcccacgcctctttcttgag

SEQ ID NO: 729 - DNA, 31 bp, Homo sapiens
  chr2:220149375-220149406
  hypo
gggcttggagctgagccgtcgcgagcagcag

SEQ ID NO: 730 - DNA, 31 bp, Homo sapiens
  chr2:234389853-234389884
  hypo
ccttctccccagggcccgttgtttctgcttt

SEQ ID NO: 731 - DNA, 31 bp, Homo sapiens
  chr2:241073763-241073794
  hypo
gcgaaattgagcccatcgcctccactcagga

SEQ ID NO: 732 - DNA, 53 bp, Homo sapiens
  chr2:242616804-242616857
  hypo
actgctatcccacctgcgttccgggaaacgaaaagctgcgtgaccagcatcat

SEQ ID NO: 733 - DNA, 31 bp, Homo sapiens
  chr2:242617236-242617267
  hypo
atgcccagcgagaggccgcaccagaggacac

SEQ ID NO: 734 - DNA, 31 bp, Homo sapiens
  chr3:9188566-9188597
  hypo
gcctctggagacctgacgcccagcggtggca

SEQ ID NO: 735 - DNA, 31 bp, Homo sapiens
  chr3:9782959-9782990
  hypo
atcatcctctgatcttcgttttgcctctaca

SEQ ID NO: 736 - DNA, 85 bp, Homo sapiens
  chr3:9783029-9783114
  hypo
gctcaagtcctggcagcggctccggcatgacttggagcgagctcggctgctcgtggaattgatccgcaagcgggaaaaactcaaa

SEQ ID NO: 737 - DNA, 39 bp, Homo sapiens
  chr3:11606284-11606323
  hypo
ccggggtcagtgtgggcgagaggccggctggcctgctgg

SEQ ID NO: 738 - DNA, 31 bp, Homo sapiens
  chr3:11707855-11707886
  hypo
gctcctggagggcttccgaacagagcatggc

SEQ ID NO: 739 - DNA, 31 bp, Homo sapiens
  chr3:12660174-12660205
  hypo
caaaaccattgctgatcgtcttccaagctcc

SEQ ID NO: 740 - DNA, 53 bp, Homo sapiens
  chr3:40510131-40510184
  hypo
gatagaacaaactcaccgtcttcataatactacgtcttcgatccaggagcatg

SEQ ID NO: 741 - DNA, 31 bp, Homo sapiens
  chr3:40510190-40510221
  hypo
ttccaactacttgggccgtcattcttttcaa

SEQ ID NO: 742 - DNA, 20 bp, Homo sapiens
  chr3:47147381-47147401
  hypo
gactccgtctccaaaaaaaa

SEQ ID NO: 743 - DNA, 31 bp, Homo sapiens
  chr3:49034284-49034315
  hypo
actcagcttggggttccgaggcatgtgggca

SEQ ID NO: 744 - DNA, 31 bp, Homo sapiens
  chr3:56691375-56691406
  hypo
caatataatcttatttcgtgtatcatctccc

SEQ ID NO: 745 - DNA, 31 bp, Homo sapiens
  chr3:56691421-56691452
  hypo
cttccctggatttctacgtgccactgcaaaa

SEQ ID NO: 746 - DNA, 31 bp, Homo sapiens
  chr3:109061755-109061786
  hypo
cagcccaattcttgtccgttctcaggtcccc

SEQ ID NO: 747 - DNA, 18 bp, Homo sapiens
  chr3:109061883-109061901
  hypo
cattttatggctgggcgc

SEQ ID NO: 748 - DNA, 37 bp, Homo sapiens; identical to SEQ ID NO: 380
  chr3:111393431-111393468
  hypo

SEQ ID NO: 749 - DNA, 31 bp, Homo sapiens
  chr3:112539318-112539349
  hypo
tcaggctctagtgcagcggcgcaatctcggc

SEQ ID NO: 750 - DNA, 39 bp, Homo sapiens
  chr3:112543789-112543828
  hypo
aaattgcatgtaaggccgggcacggtggctcacgcctgg

SEQ ID NO: 751 - DNA, 31 bp, Homo sapiens
  chr3:126220860-126220891
  hypo
tggcagacaggttgctcgagacagttcctta

SEQ ID NO: 752 - DNA, 31 bp, Homo sapiens
  chr3:127395762-127395793
  hypo
atgacagctgaggtcccgcaggccctcatcc

SEQ ID NO: 753 - DNA, 26 bp, Homo sapiens
  chr3:142861655-142861681
  hypo
tgggagctgcccgccccatcttggga

SEQ ID NO: 754 - DNA, 31 bp, Homo sapiens
  chr3:142913605-142913636
  hypo
agtttgtgatttgagtcgggcagtatgattc

SEQ ID NO: 755 - DNA, 31 bp, Homo sapiens
  chr3:143027516-143027547
  hypo
tcatgactgtgaagctcgccatggtgataat

SEQ ID NO: 756 - DNA, 59 bp, Homo sapiens
  chr3:148867080-148867139
  hypo
aggctatttgtttttgcggtcatagctattctcatctgtccttccggtcccactgcagg

SEQ ID NO: 757 - DNA, 41 bp, Homo sapiens; identical to SEQ ID NO: 381
  chr3:179064153-179064194
  hypo

SEQ ID NO: 758 - DNA, 51 bp, Homo sapiens; identical to SEQ ID NO: 382
  chr3:182510947-182510998
  hypo

SEQ ID NO: 759 - DNA, 115 bp, Homo sapiens; identical to SEQ ID NO: 383
  chr3:182511044-182511159
  hypo

SEQ ID NO: 760 - DNA, 171 bp, Homo sapiens; identical to SEQ ID NO: 384
  chr3:182511622-182511793
  hypo

SEQ ID NO: 761 - DNA, 24 bp, Homo sapiens
  chr3:185317866-185317890
  hypo
gagccactgcgcccagcccaaaga

SEQ ID NO: 762 - DNA, 31 bp, Homo sapiens
  chr3:185317966-185317997
  hypo
gtttagaattgtttaccgttaagattgacac

SEQ ID NO: 763 - DNA, 31 bp, Homo sapiens; identical to SEQ ID NO: 387
  chr3:185825732-185825763
  hypo

SEQ ID NO: 764 - DNA, 34 bp, Homo sapiens; identical to SEQ ID NO: 388
  chr3:185825863-185825897
  hypo

SEQ ID NO: 765 - DNA, 31 bp, Homo sapiens; identical to SEQ ID NO: 389
  chr3:185825931-185825962
  hypo

SEQ ID NO: 766 - DNA, 171 bp, Homo sapiens; identical to SEQ ID NO: 391
  chr3:185826424-185826595
  hypo

SEQ ID NO: 767 - DNA, 31 bp, Homo sapiens; identical to SEQ ID NO: 392
  chr3:185826627-185826658
  hypo

SEQ ID NO: 768 - DNA, 147 bp, Homo sapiens; identical to SEQ ID NO: 393
  chr3:185826750-185826897
  hypo

SEQ ID NO: 769 - DNA, 31 bp, Homo sapiens; identical to SEQ ID NO: 394
  chr3:185827120-185827151
  hypo

SEQ ID NO: 770 - DNA, 52 bp, Homo sapiens; identical to SEQ ID NO: 395
  chr3:185827172-185827224
  hypo

SEQ ID NO: 771 - DNA, 78 bp, Homo sapiens; identical to SEQ ID NO: 396
  chr3:185827258-185827336
  hypo

SEQ ID NO: 772 - DNA, 28 bp, Homo sapiens
  chr3:189900046-189900074
  hypo
gcgcccagccggtcgtttatctcttgaa

SEQ ID NO: 773 - DNA, 31 bp, Homo sapiens
  chr4:756986-757017
  hypo
ttgcttttctgtgtagcgaaacagaaaagat

SEQ ID NO: 774 - DNA, 31 bp, Homo sapiens
  chr4:757027-757058
  hypo
tggggacagagcaggccgaggaagtccttgg

SEQ ID NO: 775 - DNA, 31 bp, Homo sapiens
  chr4:757121-757152
  hypo
gttggccatttcccagcgcagggctggttcc

SEQ ID NO: 776 - DNA, 49 bp, Homo sapiens
  chr4:757159-757208
  hypo
aagagtgtgaggtttgcgctgctgctgcgttaaccgtgcctctgagccc

SEQ ID NO: 777 - DNA, 57 bp, Homo sapiens
  chr4:757452-757509
  hypo
acacgaaacacactctcggcaaaccacccagcagccacacctcgtcatttacccact

SEQ ID NO: 778 - DNA, 52 bp, Homo sapiens
  chr4:1828220-1828272
  hypo
caccttccccagctcccggtgctgcccgttcacagacgcgcttgtctccatg

SEQ ID NO: 779 - DNA, 55 bp, Homo sapiens
  chr4:1828351-1828406
  hypo
ggtgctatgggtgtgccgggttaggcctctcactgccatgcggcattctgcagca

SEQ ID NO: 780 - DNA, 65 bp, Homo sapiens
  chr4:3944639-3944704
  hypo
gatgtggcagctgcagcgggcttggctttgtgaggaaccgggtgtgtccacgttgggggaacatc

SEQ ID NO: 781 - DNA, 101 bp, Homo sapiens; identical to SEQ ID NO: 403
  chr4:25864189-25864290
  hypo

SEQ ID NO: 782 - DNA, 31 bp, Homo sapiens
  chr4:39745201-39745232
  hypo
cgacagagcgagactccgtctcaaaaaaaaa

SEQ ID NO: 783 - DNA, 31 bp, Homo sapiens
  chr4:39745268-39745299
  hypo
aataactatcagctcacggccatctgtgatc

SEQ ID NO: 784 - DNA, 44 bp, Homo sapiens
  chr4:79832670-79832714
  hypo
caaaagtaatgggaagcggcatcatggcacgccaactagcacaa

SEQ ID NO: 785 - DNA, 73 bp, Homo sapiens
  chr4:79832721-79832794
  hypo
tttgaagcctacctatcgcactccagagagggctcgcaggcacaaaaaagtgggccgccgagactctcaaagt

SEQ ID NO: 786 - DNA, 45 bp, Homo sapiens
  chr4:88957313-88957358
  hypo
gtatgtgaatgtgtgccggttcccttggggcgttcatttggatct

SEQ ID NO: 787 - DNA, 31 bp, Homo sapiens
  chr4:88957362-88957393
  hypo
gtgttccagtgacctacggcatgatgagctc

SEQ ID NO: 788 - DNA, 31 bp, Homo sapiens
  chr4:88957396-88957427
  hypo
tgtgtactactacacccggatgatgtcacag

SEQ ID NO: 789 - DNA, 31 bp, Homo sapiens
  chr4:88957428-88957459
  hypo
tcttcctagacacccccgtgtccaaaacgga

SEQ ID NO: 790 - DNA, 31 bp, Homo sapiens
  chr4:106335586-106335617
  hypo
ctaagcctggatcccacgcatgccaagggca

SEQ ID NO: 791 - DNA, 44 bp, Homo sapiens
  chr4:108446494-108446538
  hypo
gcgcccagctgggaaatgaagcttttaagcgaagacttagagaa

SEQ ID NO: 792 - DNA, 37 bp, Homo sapiens
  chr4:111383531-111383568
  hypo
actcacactatctcttattaatcggtgctgctctgga

SEQ ID NO: 793 - DNA, 31 bp, Homo sapiens
  chr4:122854136-122854167
  hypo
gcgccggcccttctcccgcatcactgtcatg

SEQ ID NO: 794 - DNA, 79 bp, Homo sapiens
  chr4:141564110-141564189
  hypo
tactggtgctggacctcggcccgccacattctgaagtccagttccaggacgtccatgtcctccacggaggacttcatgg

SEQ ID NO: 795 - DNA, 55 bp, Homo sapiens
  chr4:141564741-141564796
  hypo
gggccaggccttcctccggcgctgcctctgccgcaggaaccgccacaggcacctc

SEQ ID NO: 796 - DNA, 36 bp, Homo sapiens
  chr4:141564807-141564843
  hypo
ccttggcctccactagcgtctcgggtgtcagctgca

SEQ ID NO: 797 - DNA, 48 bp, Homo sapiens
  chr4:141565181-141565229
  hypo
aggatgagcttgtcttcgggcgagagtgtcaggcgcttggtcccatca

SEQ ID NO: 798 - DNA, 31 bp, Homo sapiens
  chr4:141565245-141565276
  hypo
caggggccaggccatccgcatcggcggccac

SEQ ID NO: 799 - DNA, 31 bp, Homo sapiens; identical to SEQ ID NO: 406
  chr4:177240821-177240852
  hypo

SEQ ID NO: 800 - DNA, 31 bp, Homo sapiens; identical to SEQ ID NO: 407
  chr4:183796433-183796464
  hypo

SEQ ID NO: 801 - DNA, 31 bp, Homo sapiens
  chr5:236678-236709
  hypo
catgtgccctgagcatcgaagagtcatgcag

SEQ ID NO: 802 - DNA, 31 bp, Homo sapiens
  chr5:32443798-32443829
  hypo
aaggtacccgagacaacgacacgttatctgg

SEQ ID NO: 803 - DNA, 31 bp, Homo sapiens; identical to SEQ ID NO: 413
  chr5:107359032-107359063
  hypo

SEQ ID NO: 804 - DNA, 67 bp, Homo sapiens; identical to SEQ ID NO: 414
  chr5:107359172-107359239
  hypo

SEQ ID NO: 805 - DNA, 31 bp, Homo sapiens
  chr5:112255823-112255854
  hypo
gactaagtgtctgtaccggactaacacagta

SEQ ID NO: 806 - DNA, 31 bp, Homo sapiens
  chr5:132370349-132370380
  hypo
ggcaaatgttaagaagcgttggtaatatttc

SEQ ID NO: 807 - DNA, 31 bp, Homo sapiens
  chr5:132584999-132585030
  hypo
taaactaaaactctcccgtcctgccactgtc

SEQ ID NO: 808 - DNA, 31 bp, Homo sapiens; identical to SEQ ID NO: 417
  chr5:158635109-158635140
  hypo

SEQ ID NO: 809 - DNA, 31 bp, Homo sapiens; identical to SEQ ID NO: 418
  chr5:158635145-158635176
  hypo

SEQ ID NO: 810 - DNA, 63 bp, Homo sapiens; identical to SEQ ID NO: 419
  chr5:158635215-158635278
  hypo

SEQ ID NO: 811 - DNA, 132 bp, Homo sapiens; identical to SEQ ID NO: 420
  chr5:158635279-158635411
  hypo

SEQ ID NO: 812 - DNA, 31 bp, Homo sapiens; identical to SEQ ID NO: 421
  chr5:158635417-158635448
  hypo

SEQ ID NO: 813 - DNA, 31 bp, Homo sapiens; identical to SEQ ID NO: 424
  chr5:158635981-158636012
  hypo

SEQ ID NO: 814 - DNA, 31 bp, Homo sapiens
  chr5:170758643-170758674
  hypo
tgagcttatttgtacccgttgtggctgaccc

SEQ ID NO: 815 - DNA, 31 bp, Homo sapiens; identical to SEQ ID NO: 427
  chr5:179279346-179279377
  hypo

SEQ ID NO: 816 - DNA, 31 bp, Homo sapiens
  chr6:2906981-2907012
  hypo
aaacaatacagtataacggctatttgtacag

SEQ ID NO: 817 - DNA, 40 bp, Homo sapiens
  chr6:2907134-2907174
  hypo
ttgaggatccgcagagctcaatgttcgctaggatcctgga

SEQ ID NO: 818 - DNA, 31 bp, Homo sapiens
  chr6:2907196-2907227
  hypo
actgtatttgctgaagcgtatttgttgaatg

SEQ ID NO: 819 - DNA, 31 bp, Homo sapiens; identical to SEQ ID NO: 429
  chr6:4949502-4949533
  hypo

SEQ ID NO: 820 - DNA, 31 bp, Homo sapiens; identical to SEQ ID NO: 434
  chr6:26027632-26027663
  hypo

SEQ ID NO: 821 - DNA, 34 bp, Homo sapiens; identical to SEQ ID NO: 435
  chr6:27447498-27447532
  hypo

SEQ ID NO: 822 - DNA, 31 bp, Homo sapiens; identical to SEQ ID NO: 436
  chr6:27447542-27447573
  hypo

SEQ ID NO: 823 - DNA, 35 bp, Homo sapiens
  chr6:38118859-38118894
  hypo
tgctccacatgcgtatcggccgctctagagattgc

SEQ ID NO: 824 - DNA, 31 bp, Homo sapiens
  chr6:38119014-38119045
  hypo
gtaccggctccctgctcgataggcctcttga

SEQ ID NO: 825 - DNA, 52 bp, Homo sapiens
  chr6:41773946-41773998
  hypo
ccaggttgcgcaggcccgtgacgcctggggccatggccggctggcgacgcag

SEQ ID NO: 826 - DNA, 42 bp, Homo sapiens
  chr6:41774485-41774527
  hypo
cacaggtaacagaacacgtagagatcccggacttccatggct

SEQ ID NO: 827 - DNA, 31 bp, Homo sapiens; identical to SEQ ID NO: 437
  chr6:43596712-43596743
  hypo

SEQ ID NO: 828 - DNA, 37 bp, Homo sapiens; identical to SEQ ID NO: 438
  chr6:43596774-43596811
  hypo

SEQ ID NO: 829 - DNA, 68 bp, Homo sapiens
  chr6:52267966-52268034
  hypo
accctgtcctgagggcgcggcacggagtgcatgcgggccgctgccatgacgaccgccatcttggagcg

SEQ ID NO: 830 - DNA, 92 bp, Homo sapiens
  chr6:52268113-52268205
  hypo
tgcactgtcccagaaacggatgtgccccagctcttccgggagccttacatccgcaccggctaccgccccacggggcacgagtggcgctacta

SEQ ID NO: 831 - DNA, 87 bp, Homo sapiens; identical to SEQ ID NO: 439
  chr6:71123137-71123224
  hypo

SEQ ID NO: 832 - DNA, 56 bp, Homo sapiens; identical to SEQ ID NO: 440
  chr6:71123642-71123698
  hypo

SEQ ID NO: 833 - DNA, 19 bp, Homo sapiens
  chr6:89376381-89376400
  hypo
cctccgggacaaaccttgg

SEQ ID NO: 834 - DNA, 31 bp, Homo sapiens
  chr6:89376413-89376444
  hypo
gggagctgtatgtggacggaagcagcttcat

SEQ ID NO: 835 - DNA, 31 bp, Homo sapiens
  chr6:89376449-89376480
  hypo
cacagagagagatgtccgctggatatgcagt

SEQ ID NO: 836 - DNA, 5 bp, Homo sapiens
  chr6:89376497-89376502
  hypo
gttat

SEQ ID NO: 837 - DNA, 31 bp, Homo sapiens
  chr6:127536396-127536427
  hypo
agtactacttcccagccgttttctcaagcca

SEQ ID NO: 838 - DNA, 31 bp, Homo sapiens
  chr6:143031707-143031738
  hypo
tcacttatttgaataacgccagttatcaatg

SEQ ID NO: 839 - DNA, 31 bp, Homo sapiens
  chr6:143031742-143031773
  hypo
catcacgtgaatggcacggatcactctgcag

SEQ ID NO: 840 - DNA, 31 bp, Homo sapiens
  chr6:150596882-150596913
  hypo
accctttcaacttcatcgatgcctatggcaa

SEQ ID NO: 841 - DNA, 122 bp, Homo sapiens; identical to SEQ ID NO: 444
  chr6:150921276-150921398
  hypo

SEQ ID NO: 842 - DNA, 207 bp, Homo sapiens; identical to SEQ ID NO: 445
  chr6:150921400-150921607
  hypo

SEQ ID NO: 843 - DNA, 31 bp, Homo sapiens
  chr6:151726417-151726448
  hypo
gagaattatttcatgacgggcaaattatggg

SEQ ID NO: 844 - DNA, 31 bp, Homo sapiens
  chr6:153311586-153311617
  hypo
taatgcagtcatcttccgtggtaacaaggtg

SEQ ID NO: 845 - DNA, 31 bp, Homo sapiens; identical to SEQ ID NO: 450
  chr7:1147466-1147497
  hypo

SEQ ID NO: 846 - DNA, 48 bp, Homo sapiens
  chr7:2099513-2099561
  hypo
gacaacatgaaaactgcgtcgaatgttcaaatacgcagggcagaaagt

SEQ ID NO: 847 - DNA, 31 bp, Homo sapiens
  chr7:2113915-2113946
  hypo
caggtactgaggtcaccgagagcagaaggaa

SEQ ID NO: 848 - DNA, 38 bp, Homo sapiens
  chr7:2815343-2815381
  hypo
gcagagggccaggctccgaatcacgtcacaagtggaag

SEQ ID NO: 849 - DNA, 284 bp, Homo sapiens; identical to SEQ ID NO: 456
  chr7:25019493-25019777
  hypo

SEQ ID NO: 850 - DNA, 127 bp, Homo sapiens; identical to SEQ ID NO: 457
  chr7:25019780-25019907
  hypo

SEQ ID NO: 851 - DNA, 242 bp, Homo sapiens; identical to SEQ ID NO: 458
  chr7:25019919-25020161
  hypo

SEQ ID NO: 852 - DNA, 398 bp, Homo sapiens; identical to SEQ ID NO: 461
  chr7:25219702-25220100
  hypo

SEQ ID NO: 853 - DNA, 31 bp, Homo sapiens
  chr7:30656877-30656908
  hypo
aatccaaaacatcctacgtaagtggagtgct

SEQ ID NO: 854 - DNA, 41 bp, Homo sapiens
  chr7:92075853-92075894
  hypo
ataacagccagctattcgattttctccgcattctctaatcg

SEQ ID NO: 855 - DNA, 38 bp, Homo sapiens; identical to SEQ ID NO: 467
  chr7:92463862-92463900
  hypo

SEQ ID NO: 856 - DNA, 37 bp, Homo sapiens; identical to SEQ ID NO: 468
  chr7:92463911-92463948
  hypo

SEQ ID NO: 857 - DNA, 31 bp, Homo sapiens
  chr7:100076281-100076312
  hypo
gctccccagcctggcccggccactcagagag

SEQ ID NO: 858 - DNA, 37 bp, Homo sapiens; identical to SEQ ID NO: 469
  chr7:101457689-101457726
  hypo

SEQ ID NO: 859 - DNA, 41 bp, Homo sapiens; identical to SEQ ID NO: 470
  chr7:101457728-101457769
  hypo

SEQ ID NO: 860 - DNA, 43 bp, Homo sapiens; identical to SEQ ID NO: 473
  chr7:101458348-101458391
  hypo

SEQ ID NO: 861 - DNA, 31 bp, Homo sapiens; identical to SEQ ID NO: 474
  chr7:101458451-101458482
  hypo

SEQ ID NO: 862 - DNA, 31 bp, Homo sapiens; identical to SEQ ID NO: 475
  chr7:101458522-101458553
  hypo

SEQ ID NO: 863 - DNA, 103 bp, Homo sapiens; identical to SEQ ID NO: 476
  chr7:101458610-101458713
  hypo

SEQ ID NO: 864 - DNA, 31 bp, Homo sapiens
  chr7:102093187-102093218
  hypo
ccattctgttttttgtcggccactgaggtag

SEQ ID NO: 865 - DNA, 53 bp, Homo sapiens; identical to SEQ ID NO: 477
  chr7:121863465-121863518
  hypo

SEQ ID NO: 866 - DNA, 31 bp, Homo sapiens; identical to SEQ ID NO: 478
  chr7:121863554-121863585
  hypo

SEQ ID NO: 867 - DNA, 31 bp, Homo sapiens
  chr7:129800275-129800306
  hypo
gaagcagagtgtcatacggaatttaattttg

SEQ ID NO: 868 - DNA, 31 bp, Homo sapiens
  chr7:129800448-129800479
  hypo
acaaggggcctttcttcggaggtggagctca

SEQ ID NO: 869 - DNA, 31 bp, Homo sapiens
  chr7:132527722-132527753
  hypo
ttttggtatccactggcgagtcctgcctgca

SEQ ID NO: 870 - DNA, 31 bp, Homo sapiens
  chr7:132527779-132527810
  hypo
gtacatagatttctttcgtttttgtttattt

SEQ ID NO: 871 - DNA, 9 bp, Homo sapiens
  chr7:132527819-132527828
  hypo
tggaatctc

SEQ ID NO: 872 - DNA, 31 bp, Homo sapiens
  chr7:132527962-132527993
  hypo
taatttttgttgtgagcgcttggttcaaggt

SEQ ID NO: 873 - DNA, 54 bp, Homo sapiens
  chr7:148448803-148448857
  hypo
aagtattgtaaatgtgcgttacacagtatattacagctgcggctatgtcagata

SEQ ID NO: 874 - DNA, 39 bp, Homo sapiens
  chr7:148448916-148448955
  hypo
tagaacatggccagacgcggtggctcacgcctgtaatcc

SEQ ID NO: 875 - DNA, 31 bp, Homo sapiens
  chr7:148984551-148984582
  hypo
gacgtctcccccattccggagaatcctgacc

SEQ ID NO: 876 - DNA, 31 bp, Homo sapiens
  chr7:148984618-148984649
  hypo
tctggtggctgacttgcgaacttgtgtctgg

SEQ ID NO: 877 - DNA, 31 bp, Homo sapiens
  chr7:148984650-148984681
  hypo
tgcaggactggcattgcggactgacctccag

SEQ ID NO: 878 - DNA, 31 bp, Homo sapiens
  chr7:152455924-152455955
  hypo
ttagaaaaatttaggccgtgttaggtataat

SEQ ID NO: 879 - DNA, 90 bp, Homo sapiens
  chr8:10683499-10683589
  hypo
cacaccacagtcaatgcgaagactccagcgctgtttcacagcaatgcagtcggagctgtccataaagcatgaagtcgctattggcccaga

SEQ ID NO: 880 - DNA, 31 bp, Homo sapiens
  chr8:10683605-10683636
  hypo
caactcaggacaaacacgtagatttcaataa

SEQ ID NO: 881 - DNA, 31 bp, Homo sapiens
  chr8:10683671-10683702
  hypo
tttcatatagtgaacacggtttttggagatt

SEQ ID NO: 882 - DNA, 31 bp, Homo sapiens
  chr8:17453694-17453725
  hypo
acattcaatccaaggccgtccactgagcccc

SEQ ID NO: 883 - DNA, 31 bp, Homo sapiens
  chr8:42134200-42134231
  hypo
gccctgaagcacttcccgtatgttttcttgt

SEQ ID NO: 884 - DNA, 108 bp, Homo sapiens
  chr8:42294048-42294156
  hypo
cctgctcacagctccacggctcccctctcgaggcgaggccttccttcctgtgtccatcggccacgtgctctgcatccacgacctgcagaccggcgacctcctagcttg

SEQ ID NO: 885 - DNA, 591 bp, Homo sapiens; identical to SEQ ID NO: 488
  chr8:56792360-56792951
  hypo

SEQ ID NO: 886 - DNA, 31 bp, Homo sapiens; identical to SEQ ID NO: 489
  chr8:56792977-56793008
  hypo

SEQ ID NO: 887 - DNA, 81 bp, Homo sapiens; identical to SEQ ID NO: 490
  chr8:56793031-56793112
  hypo

SEQ ID NO: 888 - DNA, 54 bp, Homo sapiens; identical to SEQ ID NO: 491
  chr8:56793143-56793197
  hypo

SEQ ID NO: 889 - DNA, 24 bp, Homo sapiens
  chr8:95865516-95865540
  hypo
gtgacggagcgagactctatctca

SEQ ID NO: 890 - DNA, 31 bp, Homo sapiens
  chr8:95865603-95865634
  hypo
gattctgggactaaccgcgtgcttaagcttg

SEQ ID NO: 891 - DNA, 31 bp, Homo sapiens
  chr8:95865643-95865674
  hypo
ttcatacttaaatagccgtataatcttgaac

SEQ ID NO: 892 - DNA, 28 bp, Homo sapiens
  chr8:100118364-100118392
  hypo
aaaacacatagctggccgggtgtggtgg

SEQ ID NO: 893 - DNA, 48 bp, Homo sapiens
  chr8:100353991-100354039
  hypo
gggtcaaacccccaggcgtcccaccagagcccacgtggcactgggctg

SEQ ID NO: 894 - DNA, 31 bp, Homo sapiens
  chr8:100354045-100354076
  hypo
aggaaagaagatttaacgcaaaatagagacc

SEQ ID NO: 895 - DNA, 67 bp, Homo sapiens
  chr8:100354099-100354166
  hypo
agctgcaaggccaaaccgcagcctggcctggacagcgcagacacaaggctcccgactggggctggga

SEQ ID NO: 896 - DNA, 15 bp, Homo sapiens
  chr8:100900795-100900810
  hypo
cgtcttgaaaaaatt

SEQ ID NO: 897 - DNA, 31 bp, Homo sapiens
  chr8:100900844-100900875
  hypo
gccatcattacatgtacggttaatttggact

SEQ ID NO: 898 - DNA, 31 bp, Homo sapiens
  chr8:119096829-119096860
  hypo
ccagagcccagctcctcgaaatgctgggtcc

SEQ ID NO: 899 - DNA, 43 bp, Homo sapiens
  chr8:124412834-124412877
  hypo
gccagggcaccggctgcgtgcccgaggacgggctcaccacgca

SEQ ID NO: 900 - DNA, 31 bp, Homo sapiens
  chr8:141268121-141268152
  hypo
caaacaggccagtgaccgctctcccagggct

SEQ ID NO: 901 - DNA, 31 bp, Homo sapiens
  chr8:141268438-141268469
  hypo
aaactcctcacacacacggctgttgccatct

SEQ ID NO: 902 - DNA, 31 bp, Homo sapiens
  chr8:141535612-141535643
  hypo
ggacacttagctcttccggaatgaaagcacg

SEQ ID NO: 903 - DNA, 31 bp, Homo sapiens
  chr8:143415310-143415341
  hypo
tgcattagtagaacaacgagaatgaggatga

SEQ ID NO: 904 - DNA, 31 bp, Homo sapiens
  chr9:7128644-7128675
  hypo
tttgattaatctgactcgacagtgtatttaa

SEQ ID NO: 905 - DNA, 36 bp, Homo sapiens; identical to SEQ ID NO: 495
  chr9:22447078-22447114
  hypo

SEQ ID NO: 906 - DNA, 84 bp, Homo sapiens
  chr9:34224347-34224431
  hypo
ttgttatggaccagctcgttattaaacgcattgtagacaacatcgatgatccttgttttgcaaatacaacgctgagccccagga

SEQ ID NO: 907 - DNA, 31 bp, Homo sapiens
  chr9:34224443-34224474
  hypo
atgcagccttagggcacggtatttcttgtta

SEQ ID NO: 908 - DNA, 31 bp, Homo sapiens
  chr9:34224483-34224514
  hypo
acatggactgtgtggacgtggcaggggccaa

SEQ ID NO: 909 - DNA, 42 bp, Homo sapiens; identical to SEQ ID NO: 497
  chr9:34646960-34647002
  hypo

SEQ ID NO: 910 - DNA, 24 bp, Homo sapiens
  chr9:37227010-37227034
  hypo
gcgagactccgtctcaaaaaaaaa

SEQ ID NO: 911 - DNA, 52 bp, Homo sapiens
  chr9:74853848-74853900
  hypo
taactgatcaaaggtccgcaaagcaaaaagttccatgcgcacagtttaaaac

SEQ ID NO: 912 - DNA, 31 bp, Homo sapiens
  chr9:74853907-74853938
  hypo
gtaaaatgtagatattcgtgatttctctttc

SEQ ID NO: 913 - DNA, 41 bp, Homo sapiens
  chr9:74854021-74854062
  hypo
acaaagctaatccagtcgggaagaatcggcaagttactgtc

SEQ ID NO: 914 - DNA, 31 bp, Homo sapiens
  chr9:96357851-96357882
  hypo
tgcacatatgtctgagcgttgtgcatggctc

SEQ ID NO: 915 - DNA, 31 bp, Homo sapiens
  chr9:96357901-96357932
  hypo
cactttatacacagaccgagatttgcatctt

SEQ ID NO: 916 - DNA, 43 bp, Homo sapiens
  chr9:96357935-96357978
  hypo
tgaacaaggatgagtgcggctgtgcatgcgcccactgggcata

SEQ ID NO: 917 - DNA, 31 bp, Homo sapiens
  chr9:96357999-96358030
  hypo
tgcaggtaaatatgtgcgtaaccagagatgc

SEQ ID NO: 918 - DNA, 38 bp, Homo sapiens
  chr9:110096155-110096193
  hypo
ccagagcttcctaactcggcttgcgataggtgtagatg

SEQ ID NO: 919 - DNA, 62 bp, Homo sapiens
  chr9:110096359-110096421
  hypo
ttctagatgagctttgcgtaagtcatggttctccagaaaaaaacaaacggagatttattatg

SEQ ID NO: 920 - DNA, 31 bp, Homo sapiens
  chr9:116128844-116128875
  hypo
ccatgagttttgtcttcggtaccatagggca

SEQ ID NO: 921 - DNA, 25 bp, Homo sapiens
  chr9:128071898-128071923
  hypo
ccaccgtgcccgggcacttaatggt

SEQ ID NO: 922 - DNA, 31 bp, Homo sapiens
  chr9:131776673-131776704
  hypo
gagcggggacacctaccgtggctttggcttc

SEQ ID NO: 923 - DNA, 74 bp, Homo sapiens
  chr9:131776712-131776786
  hypo
tggccttcttcagcctcgctttgcaggcatccaagtccagacgccggttttggaggagccgcctctccttctac

SEQ ID NO: 924 - DNA, 31 bp, Homo sapiens; identical to SEQ ID NO: 513
  chr9:135906525-135906556
  hypo

SEQ ID NO: 925 - DNA, 31 bp, Homo sapiens; identical to SEQ ID NO: 515
  chr9:138120293-138120324
  hypo

SEQ ID NO: 926 - DNA, 45 bp, Homo sapiens
  chr9:139269294-139269339
  hypo
tgttctctaaccatatcggaagctaaaaatcggtaacagatatcg

SEQ ID NO: 927 - DNA, 31 bp, Homo sapiens
  chr9:139269360-139269391
  hypo
aaattaaataatataccgctaaataacccac

SEQ ID NO: 928 - DNA, 48 bp, Homo sapiens
  chr9:139269448-139269496
  hypo
tactcaggagtgaggtcggccatgggaccgtcccgtctgccaggtgcc

SEQ ID NO: 929 - DNA, 97 bp, Homo sapiens
  chr9:139351903-139352000
  hypo
gctggctgatcaacaccggggaatacaggtgcggctgcgtcaggatgctcttcgcgatggcctcacagtagtggaaggcttgcgtggccagccccat

SEQ ID NO: 930 - DNA, 31 bp, Homo sapiens
  chr9:139698437-139698468
  hypo
atcacctgggtatacccggggtggagaaggg

SEQ ID NO: 931 - DNA, 18 bp, Homo sapiens
  chr10:941141-941159
  hypo
taacgtaaaataaaataa

SEQ ID NO: 932 - DNA, 65 bp, Homo sapiens
  chr10:22047484-22047549
  hypo
gccgtggaaagtaagccgaaccctagctgtcgcctggcactgaccacatacggagatggcctcag

SEQ ID NO: 933 - DNA, 43 bp, Homo sapiens
  chr10:22047592-22047635
  hypo
attcacatggcagaatcgaagatgatcacggtaataccatcta

SEQ ID NO: 934 - DNA, 31 bp, Homo sapiens
  chr10:22288660-22288691
  hypo
cgtgagccaccacacccggctccttgactct

SEQ ID NO: 935 - DNA, 31 bp, Homo sapiens
  chr10:72288399-72288430
  hypo
agggtacaggctaggccgctgtcataaagta

SEQ ID NO: 936 - DNA, 88 bp, Homo sapiens
  chr10:72288440-72288528
  hypo
gatgccttcctcaggacgaagctcatctcttacatgcaagtccacgaggacatccaggctgggatggctgctccgtgatcatccaggc

SEQ ID NO: 937 - DNA, 31 bp, Homo sapiens
  chr10:72288554-72288585
  hypo
atcaacatgtggcttccgtcttatgatctaa

SEQ ID NO: 938 - DNA, 38 bp, Homo sapiens; identical to SEQ ID NO: 518
  chr10:73113222-73113260
  hypo

SEQ ID NO: 939 - DNA, 31 bp, Homo sapiens
  chr10:74115963-74115994
  hypo
tgctactacagtaatccggatgagagtcagg

SEQ ID NO: 940 - DNA, 31 bp, Homo sapiens
  chr10:76019175-76019206
  hypo
ggatgtgttataaactcgatgtaatcatttt

SEQ ID NO: 941 - DNA, 41 bp, Homo sapiens
  chr10:76780378-76780419
  hypo
ctgaaaagcctctctccgatctgggccgtctctcctacctg

SEQ ID NO: 942 - DNA, 31 bp, Homo sapiens
  chr10:93572697-93572728
  hypo
ttccttgttgaacttacgtgtggacaatttg

SEQ ID NO: 943 - DNA, 31 bp, Homo sapiens
  chr10:93572881-93572912
  hypo
tgcagaccccaatgctcgagataattggaat

SEQ ID NO: 944 - DNA, 31 bp, Homo sapiens
  chr10:103606761-103606792
  hypo
tctgagccaaaggtcccgatgactggacaaa

SEQ ID NO: 945 - DNA, 31 bp, Homo sapiens; identical to SEQ ID NO: 524
  chr10:104951847-104951878
  hypo

SEQ ID NO: 946 - DNA, 116 bp, Homo sapiens; identical to SEQ ID NO: 525
  chr10:111767683-111767799
  hypo

SEQ ID NO: 947 - DNA, 31 bp, Homo sapiens
  chr10:119904561-119904592
  hypo
tgcaaatacacacaagcgcacctcttttctc

SEQ ID NO: 948 - DNA, 17 bp, Homo sapiens
  chr10:120500413-120500430
  hypo
ggcgacagtgtgagatt

SEQ ID NO: 949 - DNA, 22 bp, Homo sapiens
  chr10:120937188-120937210
  hypo
ctccatgcgcttaaagcaacac

SEQ ID NO: 950 - DNA, 38 bp, Homo sapiens
  chr11:15962974-15963012
  hypo
gcccgggagttggctgcgggcagcggcttggcagcctg

SEQ ID NO: 951 - DNA, 38 bp, Homo sapiens
  chr11:34109551-34109589
  hypo
tttgtttatttagagacgcagtctcgctctatcgccag

SEQ ID NO: 952 - DNA, 53 bp, Homo sapiens
  chr11:46783058-46783111
  hypo
atgaggtaactgaagacggaggtccagactcactcaaacgaaataagaggtca

SEQ ID NO: 953 - DNA, 40 bp, Homo sapiens
  chr11:46783130-46783170
  hypo
gtgaaaaactggctcacggctgtagcgcaagatgtgatct

SEQ ID NO: 954 - DNA, 31 bp, Homo sapiens
  chr11:46783208-46783239
  hypo
tttttaaccaaaaactcgatgcagtaaaaat

SEQ ID NO: 955 - DNA, 34 bp, Homo sapiens
  chr11:64672164-64672198
  hypo
tttctctgcagctgcacgccgagacatataaaca

SEQ ID NO: 956 - DNA, 31 bp, Homo sapiens
  chr11:64672206-64672237
  hypo
taaactgattttaaaacgtacgcagtcctgt

SEQ ID NO: 957 - DNA, 31 bp, Homo sapiens
  chr11:75303122-75303153
  hypo
ttgcacactgccagcccgggctgtctgtttc

SEQ ID NO: 958 - DNA, 31 bp, Homo sapiens
  chr11:75303186-75303217
  hypo
ctgtccttgaaggctccgctcagctcccacc

SEQ ID NO: 959 - DNA, 74 bp, Homo sapiens
  chr11:75303242-75303316
  hypo
ctctccagattagtttcgtttgcatccctgctgcagcaccgtctcacagtctctctctccgctttctcacatat

SEQ ID NO: 960 - DNA, 31 bp, Homo sapiens
  chr11:96109568-96109599
  hypo
ttttaacctatcaagccgtgcttttcttttt

SEQ ID NO: 961 - DNA, 88 bp, Homo sapiens; identical to SEQ ID NO: 531
  chr11:96122354-96122442
  hypo

SEQ ID NO: 962 - DNA, 31 bp, Homo sapiens; identical to SEQ ID NO: 532
  chr11:96122484-96122515
  hypo

SEQ ID NO: 963 - DNA, 69 bp, Homo sapiens; identical to SEQ ID NO: 533
  chr11:96122520-96122589
  hypo

SEQ ID NO: 964 - DNA, 73 bp, Homo sapiens; identical to SEQ ID NO: 534
  chr11:96122602-96122675
  hypo

SEQ ID NO: 965 - DNA, 31 bp, Homo sapiens; identical to SEQ ID NO: 535
  chr11:96122677-96122708
  hypo

SEQ ID NO: 966 - DNA, 46 bp, Homo sapiens; identical to SEQ ID NO: 536
  chr11:96122716-96122762
  hypo

SEQ ID NO: 967 - DNA, 48 bp, Homo sapiens; identical to SEQ ID NO: 537
  chr11:96122768-96122816
  hypo

SEQ ID NO: 968 - DNA, 98 bp, Homo sapiens; identical to SEQ ID NO: 538
  chr11:96122820-96122918
  hypo

SEQ ID NO: 969 - DNA, 154 bp, Homo sapiens; identical to SEQ ID NO: 539
  chr11:96122933-96123087
  hypo

SEQ ID NO: 970 - DNA, 136 bp, Homo sapiens; identical to SEQ ID NO: 540
  chr11:96123095-96123231
  hypo

SEQ ID NO: 971 - DNA, 96 bp, Homo sapiens; identical to SEQ ID NO: 541
  chr11:96123239-96123335
  hypo

SEQ ID NO: 972 - DNA, 31 bp, Homo sapiens; identical to SEQ ID NO: 542
  chr11:96123343-96123374
  hypo

SEQ ID NO: 973 - DNA, 42 bp, Homo sapiens; identical to SEQ ID NO: 543
  chr11:96123387-96123429
  hypo

SEQ ID NO: 974 - DNA, 41 bp, Homo sapiens; identical to SEQ ID NO: 544
  chr11:96123431-96123472
  hypo

SEQ ID NO: 975 - DNA, 31 bp, Homo sapiens
  chr11:117860108-117860139
  hypo
ggattgagcacaagctcgtttccagtgccta

SEQ ID NO: 976 - DNA, 658 bp, Homo sapiens; identical to SEQ ID NO: 547
  chr11:128391966-128392624
  hypo

SEQ ID NO: 977 - DNA, 31 bp, Homo sapiens; identical to SEQ ID NO: 548
  chr11:128392628-128392659
  hypo

SEQ ID NO: 978 - DNA, 56 bp, Homo sapiens; identical to SEQ ID NO: 549
  chr11:128392666-128392722
  hypo

SEQ ID NO: 979 - DNA, 62 bp, Homo sapiens
  chr11:131648917-131648979
  hypo
cctggaaggaagcaaacggcaccattgtggactgccgatgggggctacgtggccaacaacca

SEQ ID NO: 980 - DNA, 31 bp, Homo sapiens
  chr11:131649038-131649069
  hypo
aggacctcagttccaacgccacagaaaatga

SEQ ID NO: 981 - DNA, 31 bp, Homo sapiens
  chr11:131649087-131649118
  hypo
agcctggaagaggattcgaaacctcaggtga

SEQ ID NO: 982 - DNA, 31 bp, Homo sapiens
  chr12:12184632-12184663
  hypo
ccttcatacatacagtcggtttttgactgaa

SEQ ID NO: 983 - DNA, 45 bp, Homo sapiens
  chr12:12184665-12184710
  hypo
atcattacattcagcacgtgaatgtaattgcgatgaagtgaaaga

SEQ ID NO: 984 - DNA, 51 bp, Homo sapiens
  chr12:12184770-12184821
  hypo
agaaaaatctccaccacggaaaaaatatttggcctgcgtcttgaaggataa

SEQ ID NO: 985 - DNA, 31 bp, Homo sapiens
  chr12:12618402-12618433
  hypo
tcacaggctggacacccggccctgcggagag

SEQ ID NO: 986 - DNA, 31 bp, Homo sapiens
  chr12:51479054-51479085
  hypo
agcagcctcaaactcccgggcacaaatgcct

SEQ ID NO: 987 - DNA, 31 bp, Homo sapiens
  chr12:51479139-51479170
  hypo
ttcttcttagcatccacgtatttgtttttgt

SEQ ID NO: 988 - DNA, 31 bp, Homo sapiens
  chr12:51479175-51479206
  hypo
ctcacttgactaaattcggtgagagcaagga

SEQ ID NO: 989 - DNA, 31 bp, Homo sapiens
  chr12:53899812-53899843
  hypo
gaactgtccacccagccggccactgtgtgtc

SEQ ID NO: 990 - DNA, 49 bp, Homo sapiens
  chr12:53899856-53899905
  hypo
caccagggaggcagcccgtggtgaggctgcccgccgtgccctgcagtac

SEQ ID NO: 991 - DNA, 31 bp, Homo sapiens
  chr12:53899986-53900017
  hypo
tgggctcatgtatctgcgcagctctggtacc

SEQ ID NO: 992 - DNA, 31 bp, Homo sapiens
  chr12:58190007-58190038
  hypo
tgccatctgggttctacgttggctcttatgt

SEQ ID NO: 993 - DNA, 37 bp, Homo sapiens
  chr12:63271245-63271282
  hypo
tgttccaaggtaccacgcgatacggtaatagtaatta

SEQ ID NO: 994 - DNA, 31 bp, Homo sapiens
  chr12:63271300-63271331
  hypo
aactctgctgaacactcgatgtactctctct

SEQ ID NO: 995 - DNA, 31 bp, Homo sapiens
  chr12:63271407-63271438
  hypo
tggctgttaagtggcccggcagatatcccct

SEQ ID NO: 996 - DNA, 31 bp, Homo sapiens
  chr12:109963007-109963038
  hypo
accgctgggagccctgcgtggcctgtcctcc

SEQ ID NO: 997 - DNA, 31 bp, Homo sapiens; identical to SEQ ID NO: 557
  chr12:110719374-110719405
  hypo

SEQ ID NO: 998 - DNA, 55 bp, Homo sapiens
  chr12:112194069-112194124
  hypo
tcattcctggggctctcggagacaagggctgacccagggccgcctccctccactc

SEQ ID NO: 999 - DNA, 31 bp, Homo sapiens
  chr12:112647931-112647962
  hypo
agggcctcaaagttagcgctgatctcttctg

SEQ ID NO: 1000 - DNA, 77 bp, Homo sapiens
  chr12:116443622-116443699
  hypo
aagtcctttcatgtagcgaaatttttgtttatgtagctacggcaaactcaccccaagttcgtcgtcatcagaattat

SEQ ID NO: 1001 - DNA, 31 bp, Homo sapiens
  chr12:116443775-116443806
  hypo
agcagcattatcctgccggacatctgtagga

SEQ ID NO: 1002 - DNA, 31 bp, Homo sapiens
  chr12:118590037-118590068
  hypo
ctcaaggtgtgctctgcgcagagacactctc

SEQ ID NO: 1003 - DNA, 31 bp, Homo sapiens
  chr12:118590073-118590104
  hypo
tagcttctggagctcacgttcatgttgtgcc

SEQ ID NO: 1004 - DNA, 31 bp, Homo sapiens
  chr12:118590119-118590150
  hypo
attttgctctggtaggcgttgagcagctcca

SEQ ID NO: 1005 - DNA, 58 bp, Homo sapiens
  chr12:118590193-118590251
  hypo
ttgagcctcatctagccgtaactgcggacacagaagacacacacggtcatgcaccctt

SEQ ID NO: 1006 - DNA, 37 bp, Homo sapiens
  chr12:120956374-120956411
  hypo
ttttttttccctgagacggaggctcgctctattccca

SEQ ID NO: 1007 - DNA, 56 bp, Homo sapiens
  chr12:122182116-122182172
  hypo
actgtgcctggccgagagtttctcgttcccagtacttcagccgacattctgggttc

SEQ ID NO: 1008 - DNA, 31 bp, Homo sapiens
  chr12:122182257-122182288
  hypo
agtctgtggccctgggcggtggagggatggc

SEQ ID NO: 1009 - DNA, 31 bp, Homo sapiens
  chr12:122182308-122182339
  hypo
aagataagtagtttcccgggtgaaagttggg

SEQ ID NO: 1010 - DNA, 50 bp, Homo sapiens
  chr12:122182347-122182397
  hypo
taggaaggtgccctgccggacaagtaagcaggcagcgtccttttgtgggt

SEQ ID NO: 1011 - DNA, 31 bp, Homo sapiens
  chr12:123688895-123688926
  hypo
aggatgagaaaactttcggccaaattaattt

SEQ ID NO: 1012 - DNA, 31 bp, Homo sapiens
  chr12:124850367-124850398
  hypo
ccagctgtgctctccccgccatcctcaaggt

SEQ ID NO: 1013 - DNA, 62 bp, Homo sapiens
  chr12:133277668-133277730
  hypo
gttggctccttagagccgcagtgctgagtacacatgtgtgctgtctgcgtacacacagaaca

SEQ ID NO: 1014 - DNA, 31 bp, Homo sapiens; identical to SEQ ID NO: 561
  chr13:79979539-79979570
  hypo

SEQ ID NO: 1015 - DNA, 23 bp, Homo sapiens
  chr13:113218174-113218197
  hypo
caagacttcgcctcaaaaaaaaa

SEQ ID NO: 1016 - DNA, 43 bp, Homo sapiens
  chr13:113887592-113887635
  hypo
cggcgaggccgtggaccggagcctgttgcggagcctcctgggc

SEQ ID NO: 1017 - DNA, 31 bp, Homo sapiens
  chr13:113887653-113887684
  hypo
gtgagtgctgcctgtgcggaagatacctggg

SEQ ID NO: 1018 - DNA, 31 bp, Homo sapiens
  chr13:113887884-113887915
  hypo
cactacataaaatgcacgtttttcatggaaa

SEQ ID NO: 1019 - DNA, 31 bp, Homo sapiens
  chr13:113887927-113887958
  hypo
acaaagccagatgacacgctgggggaaaata

SEQ ID NO: 1020 - DNA, 31 bp, Homo sapiens
  chr13:113887969-113888000
  hypo
cacaaaagacaaagggcgaagttctttagag

SEQ ID NO: 1021 - DNA, 31 bp, Homo sapiens
  chr14:23719830-23719861
  hypo
taagctactgtaaacccggaaaatctgagac

SEQ ID NO: 1022 - DNA, 22 bp, Homo sapiens
  chr14:39889602-39889624
  hypo
gaagaaagcggctgggcgccgg

SEQ ID NO: 1023 - DNA, 35 bp, Homo sapiens; identical to SEQ ID NO: 563
  chr14:74111544-74111579
  hypo

SEQ ID NO: 1024 - DNA, 31 bp, Homo sapiens
  chr14:78291539-78291570
  hypo
tgagtctttgatttttcgatctgtatctcta

SEQ ID NO: 1025 - DNA, 70 bp, Homo sapiens
  chr14:81231424-81231494
  hypo
gtaagtgattgcttctcggccttctggctaagatcgagtgtggagatagagtaaacgacacagacaggca

SEQ ID NO: 1026 - DNA, 39 bp, Homo sapiens
  chr14:81231593-81231632
  hypo
gtacccaatgaagtagcgctttctcgcagtttcatgttt

SEQ ID NO: 1027 - DNA, 31 bp, Homo sapiens; identical to SEQ ID NO: 565
  chr14:81685635-81685666
  hypo

SEQ ID NO: 1028 - DNA, 57 bp, Homo sapiens; identical to SEQ ID NO: 566
  chr14:90085512-90085569
  hypo

SEQ ID NO: 1029 - DNA, 60 bp, Homo sapiens; identical to SEQ ID NO: 567
  chr14:96152830-96152890
  hypo

SEQ ID NO: 1030 - DNA, 31 bp, Homo sapiens
  chr14:101177221-101177252
  hypo
atgacctctgtgtggtcgtcactgtcttgtg

SEQ ID NO: 1031 - DNA, 31 bp, Homo sapiens
  chr14:102365883-102365914
  hypo
ggcccgtgtgtgaatccgatcccagaaatga

SEQ ID NO: 1032 - DNA, 31 bp, Homo sapiens
  chr14:102939789-102939820
  hypo
tgttttatttgttcttcgacttgagcttctt

SEQ ID NO: 1033 - DNA, 55 bp, Homo sapiens
  chr14:104204086-104204141
  hypo
gcagcagtttcaatgtcgcttatggttgaggcaaaaatggcggcaccactctcca

SEQ ID NO: 1034 - DNA, 62 bp, Homo sapiens
  chr14:104204146-104204208
  hypo
tgtttgcagaggtgaacgctgttacaagaggcagcgcagtgcagcggcgtcctggaatagag

SEQ ID NO: 1035 - DNA, 45 bp, Homo sapiens
  chr14:105223768-105223813
  hypo
accacatgttacatctcgagtcctttctctcgagcctttcttcag

SEQ ID NO: 1036 - DNA, 95 bp, Homo sapiens
  chr14:105796584-105796679
  hypo
cgagaagcctggggtccgtgtgtgggacggaatggggacaggagcctccgagaagcctggggtccgtgtgtgggaaggaacggggacaggagcct

SEQ ID NO: 1037 - DNA, 37 bp, Homo sapiens
  chr15:39971425-39971462
  hypo
ccaagaagtccaaaaacgctaacggctaaggaataag

SEQ ID NO: 1038 - DNA, 31 bp, Homo sapiens; identical to SEQ ID NO: 570
  chr15:40074996-40075027
  hypo

SEQ ID NO: 1039 - DNA, 34 bp, Homo sapiens
  chr15:40782123-40782157
  hypo
ggcggaccgccatcgccggcgctggaaactgctt

SEQ ID NO: 1040 - DNA, 31 bp, Homo sapiens
  chr15:41732306-41732337
  hypo
gctgaatagtatttaccggtgccctgcatgt

SEQ ID NO: 1041 - DNA, 1 bp, Homo sapiens
  chr15:41732397-41732398
  hypo
t

SEQ ID NO: 1042 - DNA, 31 bp, Homo sapiens
  chr15:44037225-44037256
  hypo
actcctgatagtgtgtcgcagcacagcttgg

SEQ ID NO: 1043 - DNA, 78 bp, Homo sapiens
  chr15:44037259-44037337
  hypo
aagccttgcaaatgctcgatgagagagaaagtatcgatgagacgtgaacgaatggcatcagctcggggaagctgcatc

SEQ ID NO: 1044 - DNA, 25 bp, Homo sapiens
  chr15:49084196-49084221
  hypo
actcttttttttgaaacggagtttc

SEQ ID NO: 1045 - DNA, 38 bp, Homo sapiens
  chr15:51016479-51016517
  hypo
aaaatgaagaaggagccggcgcggtggctcacgcctgt

SEQ ID NO: 1046 - DNA, 14 bp, Homo sapiens
  chr15:64865095-64865109
  hypo
gtcttgagaaaaaa

SEQ ID NO: 1047 - DNA, 46 bp, Homo sapiens
  chr15:64865138-64865184
  hypo
aaggttgtggctccacgcgggacacgtagttcggctagaaaagcat

SEQ ID NO: 1048 - DNA, 41 bp, Homo sapiens
  chr15:89809025-89809066
  hypo
cacaggcgtgagccaccgtgcctggccggattttttgtttt

SEQ ID NO: 1049 - DNA, 31 bp, Homo sapiens
  chr15:94871784-94871815
  hypo
tgtattcccacatgtccgtgatttactcatg

SEQ ID NO: 1050 - DNA, 69 bp, Homo sapiens
  chr16:1668008-1668077
  hypo
tctaatacaccacccacgtgaccctgggacgcactggagatttcggcttagagccgcagaaaccatctg

SEQ ID NO: 1051 - DNA, 25 bp, Homo sapiens
  chr16:1668180-1668205
  hypo
acacctgcctcagaatcgcttgaac

SEQ ID NO: 1052 - DNA, 37 bp, Homo sapiens
  chr16:3189116-3189153
  hypo
ttgggtccaggctggccgcccccgattctgctggaac

SEQ ID NO: 1053 - DNA, 33 bp, Homo sapiens
  chr16:4887143-4887176
  hypo
tcatacatgtagggcccggtgcggtggctcatg

SEQ ID NO: 1054 - DNA, 31 bp, Homo sapiens
  chr16:4900578-4900609
  hypo
ctttaacatcttagtacgtgttgggagatgg

SEQ ID NO: 1055 - DNA, 31 bp, Homo sapiens
  chr16:7823780-7823811
  hypo
gggacacagatccaaacggtatcagatggta

SEQ ID NO: 1056 - DNA, 31 bp, Homo sapiens; identical to SEQ ID NO: 582
  chr16:11035551-11035582
  hypo

SEQ ID NO: 1057 - DNA, 64 bp, Homo sapiens; identical to SEQ ID NO: 583
  chr16:11035602-11035666
  hypo

SEQ ID NO: 1058 - DNA, 31 bp, Homo sapiens
  chr16:11265076-11265107
  hypo
gggaaggggacagccccgaggggtcactgac

SEQ ID NO: 1059 - DNA, 65 bp, Homo sapiens
  chr16:11265116-11265181
  hypo
acccagaggctccctccgtgtgcagcacctgcctctgagcctccttcgcacgccagaggcagagc

SEQ ID NO: 1060 - DNA, 19 bp, Homo sapiens
  chr16:13648595-13648614
  hypo
gcttcggcctcccaaagag

SEQ ID NO: 1061 - DNA, 31 bp, Homo sapiens
  chr16:20803230-20803261
  hypo
cagagtgagactgtctcggaaaaaaaaaaaa

SEQ ID NO: 1062 - DNA, 144 bp, Homo sapiens; identical to SEQ ID NO: 585
  chr16:27121250-27121394
  hypo

SEQ ID NO: 1063 - DNA, 31 bp, Homo sapiens
  chr16:30381967-30381998
  hypo
atctggaaagaggaaacggagaaagctaggg

SEQ ID NO: 1064 - DNA, 31 bp, Homo sapiens
  chr16:48290943-48290974
  hypo
tttgactgggtgctcacgcctgtagtcccag

SEQ ID NO: 1065 - DNA, 69 bp, Homo sapiens
  chr16:54128644-54128713
  hypo
ctggagtggcctaggacgccaccgaagaggcgtaagatattttgcttcatcaaacgaatactgtgtgta

SEQ ID NO: 1066 - DNA, 39 bp, Homo sapiens
  chr16:54128762-54128801
  hypo
atctagaggctttctgcggagcaccgtgacatagatcat

SEQ ID NO: 1067 - DNA, 34 bp, Homo sapiens
  chr16:54128809-54128843
  hypo
cctgcttaaaaccctccggcggttccccatctca

SEQ ID NO: 1068 - DNA, 31 bp, Homo sapiens; identical to SEQ ID NO: 598
  chr16:67203649-67203680
  hypo

SEQ ID NO: 1069 - DNA, 104 bp, Homo sapiens; identical to SEQ ID NO: 600
  chr16:70472434-70472538
  hypo

SEQ ID NO: 1070 - DNA, 31 bp, Homo sapiens; identical to SEQ ID NO: 601
  chr16:70472572-70472603
  hypo

SEQ ID NO: 1071 - DNA, 41 bp, Homo sapiens
  chr16:70508777-70508818
  hypo
catcggagccagggcacgccgcatcccggagcctgagctgt

SEQ ID NO: 1072 - DNA, 31 bp, Homo sapiens
  chr16:71705862-71705893
  hypo
attccaactgacaaaacgggaatcagtgcct

SEQ ID NO: 1073 - DNA, 59 bp, Homo sapiens; identical to SEQ ID NO: 602
  chr16:72699009-72699068
  hypo

SEQ ID NO: 1074 - DNA, 31 bp, Homo sapiens; identical to SEQ ID NO: 603
  chr16:74659594-74659625
  hypo

SEQ ID NO: 1075 - DNA, 31 bp, Homo sapiens; identical to SEQ ID NO: 604
  chr16:76507679-76507710
  hypo

SEQ ID NO: 1076 - DNA, 37 bp, Homo sapiens
  chr16:84749466-84749503
  hypo
gggctagtttcccccacgatggcggaatggccacagc

SEQ ID NO: 1077 - DNA, 31 bp, Homo sapiens
  chr16:84749518-84749549
  hypo
atttgggcacagcctccgtcacaccagcctg

SEQ ID NO: 1078 - DNA, 55 bp, Homo sapiens
  chr16:84749597-84749652
  hypo
ttcttgccctttgggtcgtccctcaaccagagcactgtggcgaggagggtggtat

SEQ ID NO: 1079 - DNA, 48 bp, Homo sapiens
  chr16:85699440-85699488
  hypo
ttacttaaatgttccccgggtcttggttctttgcgctaggtctttgtt

SEQ ID NO: 1080 - DNA, 31 bp, Homo sapiens
  chr16:88039775-88039806
  hypo
gcggctcggaggccagcgactctgtgtccag

SEQ ID NO: 1081 - DNA, 31 bp, Homo sapiens
  chr16:88049612-88049643
  hypo
tgccagcatgggcctccgcagcctctgcttg

SEQ ID NO: 1082 - DNA, 123 bp, Homo sapiens
  chr16:88049790-88049913
  hypo
ttaaggtcagcacaagcggggactatgtctggggcctcccgtccatgcaggagaagcatgtggcgctgggaaatgcgtggtgcaggtgccaatgctccagagccgcctcggccactgtcctcc

SEQ ID NO: 1083 - DNA, 124 bp, Homo sapiens
  chr16:88106136-88106260
  hypo
tgggggcccctttagccggagagctccctgccccactcgttgaaggtctcagctcggggcagagccagtacctcgggctgctgtggccctagcgtccacgaaaacaaagcgcagggctgctgtg

SEQ ID NO: 1084 - DNA, 31 bp, Homo sapiens
  chr16:88602844-88602875
  hypo
acattaggatgacaggcgcgagctaccattc

SEQ ID NO: 1085 - DNA, 104 bp, Homo sapiens
  chr16:90059131-90059235
  hypo
tcaactctgccaccaacgtcgtggtgttggctggcaccaaccgccctgacgtcctggacccggccctcatgcggcctggccggtttcatcgccagatttacact

SEQ ID NO: 1086 - DNA, 31 bp, Homo sapiens
  chr16:90059236-90059267
  hypo
gtgagtacccctttctcggggttgggccttt

SEQ ID NO: 1087 - DNA, 46 bp, Homo sapiens
  chr17:4161525-4161571
  hypo
atttcagaagtagggccgggcgcggtggctcacgcctgtaatccca

SEQ ID NO: 1088 - DNA, 31 bp, Homo sapiens
  chr17:4713424-4713455
  hypo
ttccacctccctggatcgggacatagttttg

SEQ ID NO: 1089 - DNA, 31 bp, Homo sapiens
  chr17:8139151-8139182
  hypo
cagacacactccaggtcgcatcacccgccta

SEQ ID NO: 1090 - DNA, 32 bp, Homo sapiens
  chr17:9393282-9393314
  hypo
gaatgagccaccgtgcccggcctataaagctt

SEQ ID NO: 1091 - DNA, 51 bp, Homo sapiens
  chr17:12517841-12517892
  hypo
agccaactgatcaacccgttgttttgccaggcagagcgaaacatttatgaa

SEQ ID NO: 1092 - DNA, 45 bp, Homo sapiens
  chr17:12517958-12518003
  hypo
gaggaacagtgctcttcgtccagactttatcgctttaggtacaag

SEQ ID NO: 1093 - DNA, 31 bp, Homo sapiens
  chr17:12518014-12518045
  hypo
acaagtttgtaccttacgagcaaaattgtga

SEQ ID NO: 1094 - DNA, 31 bp, Homo sapiens
  chr17:26959954-26959985
  hypo
ctcacttccactgtgccgagtcagatccatc

SEQ ID NO: 1095 - DNA, 44 bp, Homo sapiens
  chr17:26959992-26960036
  hypo
agagattgaggttctccgagcgaaaggcccggtaggagtcatga

SEQ ID NO: 1096 - DNA, 31 bp, Homo sapiens
  chr17:26960059-26960090
  hypo
caggaactctggggcccgcagagtgacacta

SEQ ID NO: 1097 - DNA, 31 bp, Homo sapiens
  chr17:26960858-26960889
  hypo
tttcacccatcacaaacgtccctcagccaaa

SEQ ID NO: 1098 - DNA, 72 bp, Homo sapiens
  chr17:26960947-26961019
  hypo
ttcctctccactgccacgttaccccacggaagccccaagtgcaagatctgacgccgacgggagcaaggctga

SEQ ID NO: 1099 - DNA, 70 bp, Homo sapiens
  chr17:26961027-26961097
  hypo
ctcggtgcccacaagtcgacccattagccgccagtcacggatctcaaacaggtaccgtggatagtccctg

SEQ ID NO: 1100 - DNA, 31 bp, Homo sapiens
  chr17:26962306-26962337
  hypo
cagggaacctccatgccggctcagtgacaca

SEQ ID NO: 1101 - DNA, 56 bp, Homo sapiens
  chr17:37880945-37881001
  hypo
tcccataccctctcagcgtacccttgtccccaggaagcatacgtgatggctggtgt

SEQ ID NO: 1102 - DNA, 21 bp, Homo sapiens
  chr17:38383815-38383836
  hypo
tgttccaggctggttgcggtg

SEQ ID NO: 1103 - DNA, 35 bp, Homo sapiens
  chr17:38513564-38513599
  hypo
acaccacacacatgcgcgtgcgcacacacacaaac

SEQ ID NO: 1104 - DNA, 47 bp, Homo sapiens
  chr17:38513609-38513656
  hypo
tggacagtagatgggccgacacacacttggcccgagttcctccattt

SEQ ID NO: 1105 - DNA, 31 bp, Homo sapiens
  chr17:38786988-38787019
  hypo
tcgtctttcttctcctcgcctttgttagctg

SEQ ID NO: 1106 - DNA, 25 bp, Homo sapiens
  chr17:42123310-42123335
  hypo
ttttttttttttgagacggagtctc

SEQ ID NO: 1107 - DNA, 34 bp, Homo sapiens
  chr17:43173432-43173466
  hypo
gatttgtgagactccacgtcgtttttggtagttt

SEQ ID NO: 1108 - DNA, 31 bp, Homo sapiens
  chr17:45599272-45599303
  hypo
atttttttggatttgacgtcaaggcaaacat

SEQ ID NO: 1109 - DNA, 3 bp, Homo sapiens
  chr17:45599351-45599354
  hypo
taa

SEQ ID NO: 1110 - DNA, 31 bp, Homo sapiens
  chr17:47442692-47442723
  hypo
cgtgagccatcgcatccggacttatgtccat

SEQ ID NO: 1111 - DNA, 41 bp, Homo sapiens
  chr17:48555661-48555702
  hypo
gctgaggcaggaggatcgcttgaggccgaggagttcaagac

SEQ ID NO: 1112 - DNA, 37 bp, Homo sapiens
  chr17:58590465-58590502
  hypo
agcgcctgaaacccagcgagctcggaaggtgtccaga

SEQ ID NO: 1113 - DNA, 31 bp, Homo sapiens
  chr17:60057207-60057238
  hypo
tttcaccttaatgtatcgaagtatttgatag

SEQ ID NO: 1114 - DNA, 31 bp, Homo sapiens; identical to SEQ ID NO: 607
  chr17:62915937-62915968
  hypo

SEQ ID NO: 1115 - DNA, 31 bp, Homo sapiens; identical to SEQ ID NO: 609
  chr17:64257869-64257900
  hypo

SEQ ID NO: 1116 - DNA, 31 bp, Homo sapiens
  chr17:64781441-64781472
  hypo
atccttctgactactgcgaagttacctgtga

SEQ ID NO: 1117 - DNA, 29 bp, Homo sapiens
  chr17:73352189-73352218
  hypo
caggcatgagccaccgcacctggccctat

SEQ ID NO: 1118 - DNA, 34 bp, Homo sapiens
  chr17:75473917-75473951
  hypo
gaacctttctgagagtcgacgtgggtactgctga

SEQ ID NO: 1119 - DNA, 31 bp, Homo sapiens
  chr17:75473952-75473983
  hypo
aattagtctggatacccgaaagaatggaaag

SEQ ID NO: 1120 - DNA, 106 bp, Homo sapiens
  chr17:75473995-75474101
  hypo
cagatccttgcacaaccgtgttcgtagcagggcgaggcctggaggtgcgatggggatctcaacggggcagctgccgtcttgctggagcccacggtctttggggggg

SEQ ID NO: 1121 - DNA, 31 bp, Homo sapiens
  chr17:80721019-80721050
  hypo
tgtcgaagttttcaaccgtgtctcctttcat

SEQ ID NO: 1122 - DNA, 8 bp, Homo sapiens
  chr18:196511-196519
  hypo
agactcca

SEQ ID NO: 1123 - DNA, 31 bp, Homo sapiens
  chr18:196565-196596
  hypo
aaattaatttacagtcgcgtgtattaaatat

SEQ ID NO: 1124 - DNA, 52 bp, Homo sapiens
  chr18:196811-196863
  hypo
ggtttcctacatttaccgtacttactggaacatagttcgaaatataaacatc

SEQ ID NO: 1125 - DNA, 52 bp, Homo sapiens
  chr18:196868-196920
  hypo
tctctagttcatgccacggctgtctcttgcctggagccgcacagtagtctta

SEQ ID NO: 1126 - DNA, 53 bp, Homo sapiens
  chr18:196954-197007
  hypo
gtttctctacacagcccgcaatgtcctttttaaaatgacgataggattatgtt

SEQ ID NO: 1127 - DNA, 31 bp, Homo sapiens
  chr18:197026-197057
  hypo
cctagtgattttctaccgcagtcctaaatcc

SEQ ID NO: 1128 - DNA, 31 bp, Homo sapiens
  chr18:45868799-45868830
  hypo
tgggggcaggcaggatcgggaggcagccagc

SEQ ID NO: 1129 - DNA, 44 bp, Homo sapiens
  chr18:46578115-46578159
  hypo
gggctgaggttccaggcgctgcccccgtccgtgctggctagtga

SEQ ID NO: 1130 - DNA, 61 bp, Homo sapiens
  chr18:46578225-46578286
  hypo
ggggggactgaaagagcgggtagagagagcagcgtgaacacacagccgttattggaaaacc

SEQ ID NO: 1131 - DNA, 41 bp, Homo sapiens
  chr18:46578299-46578340
  hypo
agcactgcgcattccccgaaccatagcgccagctcctctcc

SEQ ID NO: 1132 - DNA, 80 bp, Homo sapiens; identical to SEQ ID NO: 612
  chr18:48494352-48494432
  hypo

SEQ ID NO: 1133 - DNA, 31 bp, Homo sapiens
  chr18:74570065-74570096
  hypo
atctacacataataatcgggtagtaagtttt

SEQ ID NO: 1134 - DNA, 31 bp, Homo sapiens
  chr18:74570109-74570140
  hypo
ttgcaactagcatatgcgcagtttttaaaaa

SEQ ID NO: 1135 - DNA, 49 bp, Homo sapiens
  chr18:74570148-74570197
  hypo
ccttatatcatttattcgttttcatagtatgtagcgatggcatattcac

SEQ ID NO: 1136 - DNA, 40 bp, Homo sapiens
  chr18:77457660-77457700
  hypo
aaattgtggtcacaagcgaggttgccgtgaccaggttggt

SEQ ID NO: 1137 - DNA, 43 bp, Homo sapiens
  chr18:77457701-77457744
  hypo
acccagccctgcctctcggcctgtacggcgcagtccatggagc

SEQ ID NO: 1138 - DNA, 31 bp, Homo sapiens
  chr19:2808307-2808338
  hypo
cgccagatcgccatcgcggccatggtggcca

SEQ ID NO: 1139 - DNA, 75 bp, Homo sapiens
  chr19:4683996-4684071
  hypo
gaatggctggtgccatcgccgttgtcactaccagccacatccccaccaccgccactgccacgatttcaatgctgg

SEQ ID NO: 1140 - DNA, 37 bp, Homo sapiens
  chr19:4944431-4944468
  hypo
cgtgggcaccatgtggcggttccgagtccaggtacct

SEQ ID NO: 1141 - DNA, 43 bp, Homo sapiens
  chr19:4991093-4991136
  hypo
actcctgcctgggcgacagagtgagactcggtctcaaaaaata

SEQ ID NO: 1142 - DNA, 39 bp, Homo sapiens
  chr19:5023670-5023709
  hypo
aggtgggacaagaggacgagggctcgagggagcccccac

SEQ ID NO: 1143 - DNA, 23 bp, Homo sapiens
  chr19:8078955-8078978
  hypo
gtttgtttttttgagacggagtc

SEQ ID NO: 1144 - DNA, 31 bp, Homo sapiens; identical to SEQ ID NO: 613
  chr19:10929999-10930030
  hypo

SEQ ID NO: 1145 - DNA, 31 bp, Homo sapiens
  chr19:14517833-14517864
  hypo
gtgaggtgggggcccacgctgcaaccccgct

SEQ ID NO: 1146 - DNA, 39 bp, Homo sapiens
  chr19:14663941-14663980
  hypo
gcccaagccaggagctcgtgcgtccgatgaccatcttcc

SEQ ID NO: 1147 - DNA, 35 bp, Homo sapiens
  chr19:14663985-14664020
  hypo
tggattgctacctgctcgctcggggctctgctgga

SEQ ID NO: 1148 - DNA, 31 bp, Homo sapiens
  chr19:14664152-14664183
  hypo
gaagacaggagcagagcggtccagggacctg

SEQ ID NO: 1149 - DNA, 61 bp, Homo sapiens
  chr19:14664518-14664579
  hypo
ggcgaggtgatgggggcgaggtggccggcgtggctctgggcatgatcgggccaggcctccg

SEQ ID NO: 1150 - DNA, 55 bp, Homo sapiens
  chr19:16513150-16513205
  hypo
ctctctgccagggagacgccttcgctcaggttggccaggtcggtcaggctggcac

SEQ ID NO: 1151 - DNA, 38 bp, Homo sapiens
  chr19:17412027-17412065
  hypo
ggggccaagcggccatcgctgcccgccggatctgccag

SEQ ID NO: 1152 - DNA, 82 bp, Homo sapiens
  chr19:18675983-18676065
  hypo
tgggataaaatcttgacgtaagtttatttactgattgattaattgatcgagacagagttttttttttttttttggagacgga

SEQ ID NO: 1153 - DNA, 27 bp, Homo sapiens
  chr19:40756120-40756147
  hypo
acatcaaggccaggcacggtggctcac

SEQ ID NO: 1154 - DNA, 31 bp, Homo sapiens
  chr19:40828671-40828702
  hypo
gtacctggtcctaggccggcagtgctaggga

SEQ ID NO: 1155 - DNA, 38 bp, Homo sapiens
  chr19:40828712-40828750
  hypo
accaagacagcctcagcgctgcccgcatggggctcaca

SEQ ID NO: 1156 - DNA, 42 bp, Homo sapiens
  chr19:40828799-40828841
  hypo
gcaagaatgacagtaacgcattctagacggagaaggacagct

SEQ ID NO: 1157 - DNA, 31 bp, Homo sapiens
  chr19:40829488-40829519
  hypo
gtccatggtaactgtgcgagaccattcagga

SEQ ID NO: 1158 - DNA, 31 bp, Homo sapiens
  chr19:40952443-40952474
  hypo
cctcaccaactgtccacgcaggctcccaggc

SEQ ID NO: 1159 - DNA, 45 bp, Homo sapiens
  chr19:40995691-40995736
  hypo
gcgtggttatcaggttcgaagtggggcgcccgtggaaggggcaga

SEQ ID NO: 1160 - DNA, 40 bp, Homo sapiens
  chr19:45569128-45569168
  hypo
ggtgctggctaagtgccgttaatatcgtcagcatcattac

SEQ ID NO: 1161 - DNA, 41 bp, Homo sapiens
  chr19:46321115-46321156
  hypo
tccaccgggctccctccggggtcagacgggggaaggggagg

SEQ ID NO: 1162 - DNA, 31 bp, Homo sapiens; identical to SEQ ID NO: 618
  chr19:51527587-51527618
  hypo

SEQ ID NO: 1163 - DNA, 64 bp, Homo sapiens; identical to SEQ ID NO: 619
  chr19:51527641-51527705
  hypo

SEQ ID NO: 1164 - DNA, 31 bp, Homo sapiens; identical to SEQ ID NO: 624
  chr19:54415929-54415960
  hypo

SEQ ID NO: 1165 - DNA, 31 bp, Homo sapiens
  chr19:57617000-57617031
  hypo
taatgttggcggggggcgggggatgctgggg

SEQ ID NO: 1166 - DNA, 46 bp, Homo sapiens
  chr20:6022781-6022827
  hypo
agagtggtgctttggtcggactggcacactccgggcagctgggaga

SEQ ID NO: 1167 - DNA, 51 bp, Homo sapiens
  chr20:6022835-6022886
  hypo
gaggctgagaaggggccgctggatcccgcagctggcgcgcacatagtgtct

SEQ ID NO: 1168 - DNA, 79 bp, Homo sapiens
  chr20:6022904-6022983
  hypo
ccaaccagttagaagacgtctggcttcagggacacttctgcgcagagctttgaatcctcattgccgacgtcaccccctg

SEQ ID NO: 1169 - DNA, 31 bp, Homo sapiens
  chr20:6023267-6023298
  hypo
taataaaaatcatactcgggccggtgcgatg

SEQ ID NO: 1170 - DNA, 31 bp, Homo sapiens
  chr20:32301636-32301667
  hypo
gcattaaacactagaccgcaacccgttttct

SEQ ID NO: 1171 - DNA, 31 bp, Homo sapiens; identical to SEQ ID NO: 626
  chr20:36235666-36235697
  hypo

SEQ ID NO: 1172 - DNA, 31 bp, Homo sapiens; identical to SEQ ID NO: 627
  chr20:37274794-37274825
  hypo

SEQ ID NO: 1173 - DNA, 161 bp, Homo sapiens; identical to SEQ ID NO: 628
  chr20:37274902-37275063
  hypo

SEQ ID NO: 1174 - DNA, 24 bp, Homo sapiens
  chr20:39847848-39847872
  hypo
gtcagccaccgcacctggccttcc

SEQ ID NO: 1175 - DNA, 31 bp, Homo sapiens
  chr20:47601990-47602021
  hypo
aggtgatgtatgcctacgtggaccaacttga

SEQ ID NO: 1176 - DNA, 31 bp, Homo sapiens
  chr20:60772852-60772883
  hypo
aataggccatggttgtcgtaacacaaaggga

SEQ ID NO: 1177 - DNA, 69 bp, Homo sapiens
  chr20:60773847-60773916
  hypo
acagccaggacagcagcgagttctccacctggagctcaagacggtggcccacgccggaatggtaggtgt

SEQ ID NO: 1178 - DNA, 31 bp, Homo sapiens
  chr20:60773993-60774024
  hypo
gaagagaacagctttgcgactcacctttttc

SEQ ID NO: 1179 - DNA, 31 bp, Homo sapiens
  chr20:60774032-60774063
  hypo
acactgctgacttggtcgtgagcatgagccc

SEQ ID NO: 1180 - DNA, 31 bp, Homo sapiens
  chr20:61577748-61577779
  hypo
tccacagcattgttctcgcctctgaatgatg

SEQ ID NO: 1181 - DNA, 38 bp, Homo sapiens
  chr20:62180549-62180587
  hypo
ctctcctccccccacccgctgcccgtctcctcccgccc

SEQ ID NO: 1182 - DNA, 120 bp, Homo sapiens
  chr21:33711060-33711180
  hypo
gagtcggcagaaacagcgagtgctgcatgagcatcacgtagaccaccgggagctggatgagcttcgtgcgcacggagctttctgggctgtacaggagctgtacggcggtgaggagcatct

SEQ ID NO: 1183 - DNA, 45 bp, Homo sapiens
  chr21:33711187-33711232
  hypo
tgtgtggtcctggtaccgaaatctaggcggcgagagtcaaaggga

SEQ ID NO: 1184 - DNA, 31 bp, Homo sapiens
  chr21:40762656-40762687
  hypo
gagtcacagatgagagcggagatccaggaca

SEQ ID NO: 1185 - DNA, 31 bp, Homo sapiens
  chr21:40762705-40762736
  hypo
cagtcaacatgatggacgagtttgccagata

SEQ ID NO: 1186 - DNA, 31 bp, Homo sapiens
  chr21:40762752-40762783
  hypo
aagatcaacaagatgacggataagctcaaaa

SEQ ID NO: 1187 - DNA, 46 bp, Homo sapiens
  chr21:45374889-45374935
  hypo
cacacagaggctgggacgtgaatgtgcatcacggctctatctgtgg

SEQ ID NO: 1188 - DNA, 31 bp, Homo sapiens
  chr21:46277459-46277490
  hypo
ctgggcagtagattaccgcatgattcactgt

SEQ ID NO: 1189 - DNA, 31 bp, Homo sapiens
  chr21:46935334-46935365
  hypo
tccagcaacaaagcccgcggggcacagtgca

SEQ ID NO: 1190 - DNA, 51 bp, Homo sapiens
  chr21:46937009-46937060
  hypo
ctggggagctgtgccacgcaaggacagactgtgccacgcagagctccctgg

SEQ ID NO: 1191 - DNA, 21 bp, Homo sapiens
  chr21:47825322-47825343
  hypo
cttttatggccaggagcggtg

SEQ ID NO: 1192 - DNA, 31 bp, Homo sapiens
  chr21:48044003-48044034
  hypo
ccgtgtttgcctgagtcgcatgcatgcacct

SEQ ID NO: 1193 - DNA, 109 bp, Homo sapiens
  chr22:24459507-24459616
  hypo
cagctgtcatttgcctcgtcccagcgcgacctgttcgaggatggttggctggagtttgtggtccgtgtttactggctgaaggctcgcttcctggcgctgcaggttagtt

SEQ ID NO: 1194 - DNA, 31 bp, Homo sapiens
  chr22:25753157-25753188
  hypo
ggagcccagggacagccgggcagggccaggc

SEQ ID NO: 1195 - DNA, 31 bp, Homo sapiens
  chr22:25753207-25753238
  hypo
catgggagcctcacctcgatcttgtctgtct

SEQ ID NO: 1196 - DNA, 43 bp, Homo sapiens
  chr22:25753270-25753313
  hypo
aggtccagggccaggccgttgggccacccgagggaagcattga

SEQ ID NO: 1197 - DNA, 31 bp, Homo sapiens
  chr22:30090680-30090711
  hypo
accctgtgtgacagagcggaggtcttgtgcc

SEQ ID NO: 1198 - DNA, 31 bp, Homo sapiens
  chr22:30190729-30190760
  hypo
tctatttgtgctgatgcggaaagaattctca

SEQ ID NO: 1199 - DNA, 59 bp, Homo sapiens
  chr22:30190782-30190841
  hypo
aagctacagaaaaatgcgtacagtatgatcccaaaagcaaactacgctaactctgtttc

SEQ ID NO: 1200 - DNA, 31 bp, Homo sapiens
  chr22:37733865-37733896
  hypo
cagcaacttcctactacgctgtgatctcatt

SEQ ID NO: 1201 - DNA, 31 bp, Homo sapiens
  chr22:38380541-38380572
  hypo
cccgagactgactgagcgactgagcctgagc

SEQ ID NO: 1202 - DNA, 56 bp, Homo sapiens
  chr22:41656915-41656971
  hypo
cttctgctggcactcacgatcggggactcagcaatgtcctgcggggatggggagag

SEQ ID NO: 1203 - DNA, 54 bp, Homo sapiens
  chr22:41656995-41657049
  hypo
aggtcacctgagagcacgtcatttggcacctgagccctgcggctgcccctgcct

SEQ ID NO: 1204 - DNA, 31 bp, Homo sapiens
  chr22:41657476-41657507
  hypo
gccatcattctccagacggtttctgccagcc

SEQ ID NO: 1205 - DNA, 41 bp, Homo sapiens
  chr22:41657536-41657577
  hypo
ttgggcactggatttccggtgacattcggtcagagctgcag

SEQ ID NO: 1206 - DNA, 31 bp, Homo sapiens
  chr22:41657620-41657651
  hypo
gagccccttctcccagcggggtggccactgc

SEQ ID NO: 1207 - DNA, 58 bp, Homo sapiens
  chr22:41657660-41657718
  hypo
gctcttcaacatcccacgccacccatcggtgcaggtcaggggacgcaggactgctaac

SEQ ID NO: 1208 - DNA, 31 bp, Homo sapiens
  chr22:42473746-42473777
  hypo
gaagtctgttgccagccgctgtaagccccag

SEQ ID NO: 1209 - DNA, 52 bp, Homo sapiens
  chr22:43273689-43273741
  hypo
cctgagggctgggagccgggagctgagttacacactacgaagaccacaggca

SEQ ID NO: 1210 - DNA, 31 bp, Homo sapiens
  chr22:45594511-45594542
  hypo
gtcagcgaatccttcacgtcgtttttttttg

SEQ ID NO: 1211 - DNA, 14 bp, Homo sapiens
  chr22:45594562-45594576
  hypo
cactcttgcccagg

SEQ ID NO: 1212 - DNA, 35 bp, Homo sapiens
  chr22:50706160-50706195
  hypo
ccccatcgccagggctcgcccgcctattggctgcg

SEQ ID NO: 1213 - DNA, 31 bp, Homo sapiens
  chr22:50958186-50958217
  hypo
acagaggaaatgttaacgtttcttcactcta

SEQ ID NO: 1214 - DNA, 45 bp, Homo sapiens; identical to SEQ ID NO: 639
  chrX:10023768-10023813
  hypo

SEQ ID NO: 1215 - DNA, 31 bp, Homo sapiens
  chrX:18247380-18247411
  hypo
gcgcccatgggccctccgcaggcccccagca

SEQ ID NO: 1216 - DNA, 31 bp, Homo sapiens
  chrX:43773722-43773753
  hypo
ttacccctccaacacacgagcacacacacat

SEQ ID NO: 1217 - DNA, 183 bp, Homo sapiens; identical to SEQ ID NO: 642
  chrX:73163987-73164170
  hypo

SEQ ID NO: 1218 - DNA, 84 bp, Homo sapiens; identical to SEQ ID NO: 643
  chrX:73164176-73164260
  hypo

SEQ ID NO: 1219 - DNA, 31 bp, Homo sapiens; identical to SEQ ID NO: 644
  chrX:73164264-73164295
  hypo

SEQ ID NO: 1220 - DNA, 91 bp, Homo sapiens; identical to SEQ ID NO: 645
  chrX:73164301-73164392
  hypo

SEQ ID NO: 1221 - DNA, 31 bp, Homo sapiens
  chrX:73812147-73812178
  hypo
ccgatattctccaggacgaactcttcttact

SEQ ID NO: 1222 - DNA, 53 bp, Homo sapiens
  chrX:82762196-82762249
  hypo
actggggaagtgggggcggtacttgatgccaaacatcccgccatttctctctc

SEQ ID NO: 1223 - DNA, 52 bp, Homo sapiens
  chrX:82762264-82762316
  hypo
cacattaaatgcagggcgggtgaggagggtgggggagcggtgaaggttaaaa

SEQ ID NO: 1224 - DNA, 70 bp, Homo sapiens
  chrX:82762323-82762393
  hypo
tcctaggggatggcatcggggcgcggggtcacgaacgttttcctgtatacctattcgtagtgggtctgca

SEQ ID NO: 1225 - DNA, 39 bp, Homo sapiens
  chrX:101014376-101014415
  hypo
cagttttgtgtgagtgcgtttgtgcggatattttgtatt

SEQ ID NO: 1226 - DNA, 23 bp, Homo sapiens
  chrX:142200129-142200152
  hypo
gctggtctcgacaatgttgttca

SEQ ID NO: 1227 - DNA, 31 bp, Homo sapiens
  chr1:1434134-1434165
  hyper
tgcagtggtgagatctcggcggctcactgtg

SEQ ID NO: 1228 - DNA, 80 bp, Homo sapiens
  chr5:34486430-34486510
  hyper
ctcagaataaaaagctcgagaatccgtgcccagtaggtggcgctgctcttccttctgttgggattcgattcagacccgct

SEQ ID NO: 1229 - DNA, 31 bp, Homo sapiens
  chr11:66107464-66107495
  hyper
tgacaccaagcaaccacgagtgcatctagtg

SEQ ID NO: 1230 - DNA, 56 bp, Homo sapiens
  chr15:80285824-80285880
  hyper
ttattggggcttctgccgttgctgggcttggcagactatcacgtaggaaaatgtcc

SEQ ID NO: 1231 - DNA, 31 bp, Homo sapiens; identical to SEQ ID NO: 1227
  chr1:1434134-1434165
  hypo

SEQ ID NO: 1232 - DNA, 31 bp, Homo sapiens
  chr6:24434291-24434322
  hypo
cataagaaaatgttctcggtatattgttagg

SEQ ID NO: 1233 - DNA, 31 bp, Homo sapiens; identical to SEQ ID NO: 1229
  chr11:66107464-66107495
  hypo

SEQ ID NO: 1234 - DNA, 31 bp, Homo sapiens
  chr12:133148107-133148138
  hypo
ccggtgcgtaggcccgcgtgctggcaggggg

SEQ ID NO: 1235 - DNA, 43 bp, Homo sapiens
  chr1:11740564-11740607
  hyper
agcccgccggcccagacgcccccgcccccgggcccgcaggtcc

SEQ ID NO: 1236 - DNA, 31 bp, Homo sapiens
  chr1:23000015-23000046
  hyper
gaactgctgactgccccgagtccctcaggat

SEQ ID NO: 1237 - DNA, 31 bp, Homo sapiens
  chr1:33219373-33219404
  hyper
gagagagtgggcaacccgcctgccccacctg

SEQ ID NO: 1238 - DNA, 80 bp, Homo sapiens
  chr1:33219497-33219577
  hyper
ggccccgcccctcctccgggcccgcccccggcctggccattggccgcagagctcgggggcgtggtcgagctggggctggg

SEQ ID NO: 1239 - DNA, 52 bp, Homo sapiens
  chr1:33219734-33219786
  hyper
ggtccgcagcttctggcggttcgggcggtcggcgaagcggccggcaggtagg

SEQ ID NO: 1240 - DNA, 31 bp, Homo sapiens
  chr1:65614106-65614137
  hyper
tgcgcgcggtcatcctcgggccgcccggctc

SEQ ID NO: 1241 - DNA, 31 bp, Homo sapiens
  chr1:117695844-117695875
  hyper
tggtattggagacttccgagaagttggctcc

SEQ ID NO: 1242 - DNA, 31 bp, Homo sapiens
  chr1:209364335-209364366
  hyper
tgtatacccaggaattcgggtcacttaaaat

SEQ ID NO: 1243 - DNA, 31 bp, Homo sapiens
  chr2:11621382-11621413
  hyper
tgagaaaagtcaaatgcgggtgtttgagcta

SEQ ID NO: 1244 - DNA, 52 bp, Homo sapiens
  chr2:11621445-11621497
  hyper
gccaatcagagtatggcgagctgcaggggttcactcacgatgcacttttact

SEQ ID NO: 1245 - DNA, 59 bp, Homo sapiens
  chr2:11621526-11621585
  hyper
gctataacctcactcccggcttcttttgtttaaccgcccagattcgtgaactgtgactt

SEQ ID NO: 1246 - DNA, 31 bp, Homo sapiens
  chr2:12857006-12857037
  hyper
ggcggcggggggggggcggaggctccgtgga

SEQ ID NO: 1247 - DNA, 41 bp, Homo sapiens
  chr2:12857159-12857200
  hyper
cgccgggggatgcgggcgtgctgagcgcggggattggcctc

SEQ ID NO: 1248 - DNA, 31 bp, Homo sapiens
  chr2:12857307-12857338
  hyper
ccaaaacaaaccccaccgggcaatttggtct

SEQ ID NO: 1249 - DNA, 37 bp, Homo sapiens
  chr2:12858219-12858256
  hyper
gaggacccccgggagccgggctcggagcagacgaggt

SEQ ID NO: 1250 - DNA, 92 bp, Homo sapiens
  chr2:33171659-33171751
  hyper
tatctgaattcaaccccgcagcaagtatcacagcaaacacggataagaaaatgccggggcttccaaacaatatcaaacgcatggggcttctg

SEQ ID NO: 1251 - DNA, 31 bp, Homo sapiens
  chr2:33172104-33172135
  hyper
cggaccctcaccttgcgcggcccgctcccct

SEQ ID NO: 1252 - DNA, 60 bp, Homo sapiens
  chr2:33172187-33172247
  hyper
tgctcccagccacaatcggccggggtctggggccgctcagctgcccgcagagcctcctcc

SEQ ID NO: 1253 - DNA, 47 bp, Homo sapiens
  chr2:55646793-55646840
  hyper
gcagacaccattcctccgccgccctcaagcctcgcctccagccccct

SEQ ID NO: 1254 - DNA, 31 bp, Homo sapiens
  chr2:74153737-74153768
  hyper
ttggattgtggaattacgtcttttaaaatgt

SEQ ID NO: 1255 - DNA, 120 bp, Homo sapiens
  chr2:74153778-74153898
  hyper
atgaacaaaaaccactcgcaccgcaactccttttactatcaaattctgcaccgttgcaaaacttccttcactcaacgcttctttacaaacatcgcgatagcggagcggtctcttgggcgc

SEQ ID NO: 1256 - DNA, 46 bp, Homo sapiens
  chr2:74154120-74154166
  hyper
ctccagaggcctgcacgcggggcgcgggccccgaaggctctccatc

SEQ ID NO: 1257 - DNA, 31 bp, Homo sapiens
  chr2:86428203-86428234
  hyper
gggtatgtgtgaaaatcgctgtggaattgcc

SEQ ID NO: 1258 - DNA, 31 bp, Homo sapiens
  chr2:132431406-132431437
  hyper
cgcctgagttaggggacgcggcggcttttgg

SEQ ID NO: 1259 - DNA, 31 bp, Homo sapiens
  chr2:133426939-133426970
  hyper
ggctgttctcggtgtacgcgctcctgtctag

SEQ ID NO: 1260 - DNA, 31 bp, Homo sapiens
  chr2:201828570-201828601
  hyper
tttcctttcttctttccgtttccggggaagg

SEQ ID NO: 1261 - DNA, 35 bp, Homo sapiens
  chr2:201828685-201828720
  hyper
aagtgttctttggggtcgggcgcagtgtctcacgc

SEQ ID NO: 1262 - DNA, 31 bp, Homo sapiens
  chr3:141121566-141121597
  hyper
aggttgcgccgcatcccgtggcccaactgcg

SEQ ID NO: 1263 - DNA, 31 bp, Homo sapiens
  chr3:179169756-179169787
  hyper
ttgtaggaccgtgtaccgtctcgggcctaag

SEQ ID NO: 1264 - DNA, 31 bp, Homo sapiens
  chr4:824547-824578
  hyper
gccaggctcagaacgccgaatgccccttccc

SEQ ID NO: 1265 - DNA, 31 bp, Homo sapiens
  chr4:2965932-2965963
  hyper
catccccggagaaccccgatttccctggaga

SEQ ID NO: 1266 - DNA, 108 bp, Homo sapiens
  chr4:71767777-71767885
  hyper
ctggagcccagctgagcggctccgagagctctgccatgactcctaaccgggtggacaggggggccgggcagccgcggcgcacacgctgggcgtcgtccctagcagcag

SEQ ID NO: 1267 - DNA, 129 bp, Homo sapiens
  chr4:71767898-71768027
  hyper
gtgagagtccccatgccgcagccggagggccggggtgggcttgcaccgctatcgcgagagctcgtgaggtgggggcggcggggagctggggaggggctcgcggagagcctgccccgcctccctttcctt

SEQ ID NO: 1268 - DNA, 48 bp, Homo sapiens
  chr4:71768035-71768083
  hyper
ctggagtgattcaagacgagcgctacccacttccgccccctccccctg

SEQ ID NO: 1269 - DNA, 173 bp, Homo sapiens
  chr4:71768086-71768259
  hyper
ttggaactagctgagccgaactagttgcggccaccgagcagccggctctcggcacctcctcctccgcctccctgtctcctgttccattcgcctttcctcttctttcctggcccacgccgctccgaggcctcgcgaccgccgagcctgcagcctgccccgcggccaacatgagc

SEQ ID NO: 1270 - DNA, 219 bp, Homo sapiens
  chr4:71768267-71768486
  hyper
gtgagtagccaggccccgcacgcgccggctttgttcgggtggacctgggcccccgcccgccgcccgccgcccgtcgcccgccctcgtcccgaccctcctggcccagcgctcccggggcccggcgtcaccaccaagcggggccccgggactgcgcggagcgctcggactacctaaccgccgcctccccatagggcttcgagtactcgtgggctcctgcag

SEQ ID NO: 1271 - DNA, 15 bp, Homo sapiens
  chr4:71768492-71768507
  hyper
ggaggttcttccccc

SEQ ID NO: 1272 - DNA, 31 bp, Homo sapiens
  chr4:83719233-83719264
  hyper
gggggcggggggggggcggaagttgaaatac

SEQ ID NO: 1273 - DNA, 31 bp, Homo sapiens
  chr4:113431455-113431486
  hyper
gaaggcagcagcttaacgctgctatttctga

SEQ ID NO: 1274 - DNA, 31 bp, Homo sapiens
  chr4:113431493-113431524
  hyper
ccccacacactgtcagcgaagtgaaagatct

SEQ ID NO: 1275 - DNA, 31 bp, Homo sapiens
  chr4:141678190-141678221
  hyper
cccagggcaagtcatgcgctaaacttgtcac

SEQ ID NO: 1276 - DNA, 34 bp, Homo sapiens
  chr5:92556-92590
  hyper
taggggcgggtgggggcgccggggtaggggcggg

SEQ ID NO: 1277 - DNA, 110 bp, Homo sapiens
  chr5:53813488-53813598
  hyper
cctggcaaggggctctcggccgtggattagcgcagctggagacgtgggaggccgcgggccccgcccccgaccggcggcggctgcggcggcccagcgcggcagtcggcgct

SEQ ID NO: 1278 - DNA, 31 bp, Homo sapiens
  chr5:88184852-88184883
  hyper
ttaaaaaatctttacccggggttgtggtgga

SEQ ID NO: 1279 - DNA, 103 bp, Homo sapiens
  chr6:37665398-37665501
  hyper
cggcgcgggcgccgctcgccgcctccgctcgccgcgctcctctcccgccgtctggccgcggccgtagccctcccgggctccgagctctcgggagagcggggct

SEQ ID NO: 1280 - DNA, 31 bp, Homo sapiens
  chr6:37665676-37665707
  hyper
ccgagcttttcattccgcgctcctcccgcct

SEQ ID NO: 1281 - DNA, 31 bp, Homo sapiens
  chr6:40763876-40763907
  hyper
ttcacaactgccttatcggatgggtattatt

SEQ ID NO: 1282 - DNA, 48 bp, Homo sapiens
  chr6:43423047-43423095
  hyper
gtcccctttctatctccgccgcgctgggttcggcggcggcgcggggcc

SEQ ID NO: 1283 - DNA, 31 bp, Homo sapiens
  chr6:84564098-84564129
  hyper
cttgatgaatatattacgaagagggaaaggg

SEQ ID NO: 1284 - DNA, 31 bp, Homo sapiens
  chr6:99293408-99293439
  hyper
gtgttgggtggcgggtcggggaaggtaccct

SEQ ID NO: 1285 - DNA, 31 bp, Homo sapiens
  chr6:99293445-99293476
  hyper
acctatctcccctcctcgctagcccttttaa

SEQ ID NO: 1286 - DNA, 82 bp, Homo sapiens
  chr6:99293495-99293577
  hyper
tgagaataagccccagcgtctctgaagccacgaggaccgtttgtgctcccaagtcaactcagtattccgagattttcttctt

SEQ ID NO: 1287 - DNA, 31 bp, Homo sapiens
  chr6:99293601-99293632
  hyper
acaccctccttctttccgtctaacaaagtct

SEQ ID NO: 1288 - DNA, 79 bp, Homo sapiens
  chr7:44924271-44924350
  hyper
tgatggaggtgccctccgggagctctccatacaggccgccccctgggcccccggcgccgcctcccgggccgcctgccag

SEQ ID NO: 1289 - DNA, 66 bp, Homo sapiens
  chr7:44924476-44924542
  hyper
gaagccgccaccgccgcggttgaccgtttggcggatgcgcaggaagcggccgcgctggttctcctt

SEQ ID NO: 1290 - DNA, 233 bp, Homo sapiens
  chr7:44924545-44924778
  hyper
gtccaggtagtacttgcggttctcacgcaccaagaattcgctcttgagcgcgcgccgcggcccgccgccctcctcggcgccagccgccagctgctcggggctgctagggcccagctgcgcgtagtgttctatgaagtcgcccagcgagtcgcggaactcggcggccaccgccatggacagcgtgaggcggctcttggaaccgcccgcgcccacctcggcgatcttgaggaagc

SEQ ID NO: 1291 - DNA, 31 bp, Homo sapiens
  chr7:99775637-99775668
  hyper
ttccctgaaccctgctcggccagaagtcact

SEQ ID NO: 1292 - DNA, 72 bp, Homo sapiens
  chr7:101007055-101007127
  hyper
gggctggggctctgcccggggcgttcggccgctcacgtggctctgccgctcacctgcgcggctgcggctttg

SEQ ID NO: 1293 - DNA, 31 bp, Homo sapiens
  chr7:157477010-157477041
  hyper
cgggaggcggtggagccgccgcggagaggga

SEQ ID NO: 1294 - DNA, 44 bp, Homo sapiens
  chr8:5997931-5997975
  hyper
gatgctaatatagaaacgtggaaacgcaacggctttggaatcag

SEQ ID NO: 1295 - DNA, 56 bp, Homo sapiens
  chr8:28258794-28258850
  hyper
cccaagcagcgttgcccggacgcgccgctcggggcccagagcgctgcgtgcacgca

SEQ ID NO: 1296 - DNA, 64 bp, Homo sapiens
  chr8:30891027-30891091
  hyper
gggaatgaggaccgggcggcgggaatgttctcacttctccggattccaccgggatgcaggactc

SEQ ID NO: 1297 - DNA, 36 bp, Homo sapiens
  chr8:144099879-144099915
  hyper
gtcccgcccctgcccccgccccggggccgcgcggct

SEQ ID NO: 1298 - DNA, 31 bp, Homo sapiens
  chr9:77112361-77112392
  hyper
gctctgccatccacaccgcctttctttcttt

SEQ ID NO: 1299 - DNA, 31 bp, Homo sapiens
  chr9:131843184-131843215
  hyper
ctcgccccagattgggcgccagctggggcgg

SEQ ID NO: 1300 - DNA, 267 bp, Homo sapiens
  chr9:131843220-131843487
  hyper
tggctcccaggggccccgctctctgattcgccgctcgggccagcccccacggcctgcacgctgaatggctgcgccgctacctatattggcctccgattgggtgcacggcgcctccccggcgtgataggtcaggaccaccgcccccctggctccccattggctgctcgaagaagcccggtctccgggtaagatggcagcggacggacagtgctcgctccccgcttcatggcggccggtgaccctcacccacgtcgaatatcctgcagg

SEQ ID NO: 1301 - DNA, 63 bp, Homo sapiens
  chr9:132373578-132373641
  hyper
gcttcagggaaagaggcggcggctcaaactttctccagggggctggaacgcaggtgtggcagg

SEQ ID NO: 1302 - DNA, 31 bp, Homo sapiens
  chr9:132373662-132373693
  hyper
ctgccaccttgtctttcgccacctcctgatg

SEQ ID NO: 1303 - DNA, 31 bp, Homo sapiens
  chr9:132373722-132373753
  hyper
agactaggagagaaaccgtgggccccagccc

SEQ ID NO: 1304 - DNA, 31 bp, Homo sapiens
  chr9:134158022-134158053
  hyper
gtccctcgctgcccaccgagggtcccaggta

SEQ ID NO: 1305 - DNA, 31 bp, Homo sapiens
  chr9:135037501-135037532
  hyper
agcggctcgcagccctcggcccgcgccccca

SEQ ID NO: 1306 - DNA, 35 bp, Homo sapiens
  chr9:138800245-138800280
  hyper
tcgagcttccagggagcgggcgcccggcgcggggc

SEQ ID NO: 1307 - DNA, 52 bp, Homo sapiens
  chr9:138800286-138800338
  hyper
cctgtctgtacctggtcgagacaccccgtgccagaggcggaacatgtatgaa

SEQ ID NO: 1308 - DNA, 15 bp, Homo sapiens
  chr9:140023901-140023916
  hyper
cgcaggctgggaggg

SEQ ID NO: 1309 - DNA, 93 bp, Homo sapiens
  chr10:6245446-6245539
  hyper
gtccttggccgggcggcgggggcgctgtggcccttgtcccggtggctgccccgccggcccggaaacggcgagtgcgcccggccgggctgcgta

SEQ ID NO: 1310 - DNA, 31 bp, Homo sapiens
  chr10:14995744-14995775
  hyper
gagaggctgaagagcccgactgggacaaggc

SEQ ID NO: 1311 - DNA, 31 bp, Homo sapiens
  chr10:14995816-14995847
  hyper
ctccttgctccagggccggccccctcctgtc

SEQ ID NO: 1312 - DNA, 50 bp, Homo sapiens
  chr10:14995848-14995898
  hyper
tctctccagcccccagcgccccgggagcgggcgacgcgcagccctcactc

SEQ ID NO: 1313 - DNA, 298 bp, Homo sapiens
  chr10:14995912-14996210
  hyper
gggacaggaagtaggcgcgggccctcaggttctccctatcgaagcggtctatggagatagttggatactcggccatctgcccctcgaaagaactcatagcgccgccgatcccagagtccgggaccccaaaaccgcagctgaagccaaggccagccctgaccgcgccgccacttccgggaagccgcgcgctgcctcgccattgggcggccgaacgcagccacgtccaatcagaggagtccggagaccgggggcaaagtcaaggagcatccggtcgggttctaggcgcccgctgcttggg

SEQ ID NO: 1314 - DNA, 62 bp, Homo sapiens
  chr10:14996382-14996444
  hyper
cgaggtgagtgggctgcggaactgcgcttagaaatcattcttcgttccgcttcctgcttgtc

SEQ ID NO: 1315 - DNA, 68 bp, Homo sapiens
  chr10:23002244-23002312
  hyper
cccacaccccccacagcgggtgcggccaactcgggaccccctccgcccgcgcccgccgggacccccgc

SEQ ID NO: 1316 - DNA, 31 bp, Homo sapiens
  chr10:49731808-49731839
  hyper
ggcggaccctcccctccgctctacccactcc

SEQ ID NO: 1317 - DNA, 37 bp, Homo sapiens
  chr10:103348787-103348824
  hyper
ccaccctaggattggccgatgccggcccctttgtgca

SEQ ID NO: 1318 - DNA, 31 bp, Homo sapiens
  chr10:103348850-103348881
  hyper
tagccaggatgaattgcgtctgaagttcctg

SEQ ID NO: 1319 - DNA, 35 bp, Homo sapiens
  chr10:103348955-103348990
  hyper
attaaaatcatttactcgttcgtgcaacatttagg

SEQ ID NO: 1320 - DNA, 31 bp, Homo sapiens
  chr10:132050986-132051017
  hyper
agtccatgttagagggcgtgagagtggactc

SEQ ID NO: 1321 - DNA, 40 bp, Homo sapiens
  chr11:57417003-57417043
  hyper
aaccgagagagaggagcggaggcagcggggagggggaagg

SEQ ID NO: 1322 - DNA, 31 bp, Homo sapiens
  chr11:64512373-64512404
  hyper
cccccctccgcccctgcgcggagctccgcac

SEQ ID NO: 1323 - DNA, 31 bp, Homo sapiens
  chr11:119187862-119187893
  hyper
gctgacgtcaggggggcgggggagggggccc

SEQ ID NO: 1324 - DNA, 31 bp, Homo sapiens
  chr12:11653356-11653387
  hyper
cccaccgccgcccaggcgcaggaagggctca

SEQ ID NO: 1325 - DNA, 45 bp, Homo sapiens
  chr12:26111917-26111962
  hyper
cagccggtgcggggcgcgcggcgcggggagcgccggggagtgccg

SEQ ID NO: 1326 - DNA, 31 bp, Homo sapiens
  chr12:117536861-117536892
  hyper
cccgcgaggtggccagcggggacccatttga

SEQ ID NO: 1327 - DNA, 65 bp, Homo sapiens
  chr12:117537064-117537129
  hyper
gacgcggagtgggcagcgcccatggtgcccgcggcgggggccccggggcgcgcgtccctctcagg

SEQ ID NO: 1328 - DNA, 31 bp, Homo sapiens
  chr12:130136921-130136952
  hyper
taagccctggaacctgcgaatgtattatgtt

SEQ ID NO: 1329 - DNA, 31 bp, Homo sapiens
  chr12:133175116-133175147
  hyper
gtcccctcctctccgcgcgcccctgctcctc

SEQ ID NO: 1330 - DNA, 31 bp, Homo sapiens
  chr13:19918627-19918658
  hyper
ggggacaggggtgagccgagagcaggaaagg

SEQ ID NO: 1331 - DNA, 31 bp, Homo sapiens
  chr13:21345744-21345775
  hyper
ctgcaattttaggaatcgtagaagtttccta

SEQ ID NO: 1332 - DNA, 31 bp, Homo sapiens
  chr13:22553926-22553957
  hyper
tgacaccatgtacatccggtctgtgtgtagg

SEQ ID NO: 1333 - DNA, 40 bp, Homo sapiens
  chr13:98085204-98085244
  hyper
gtccctgtctccatcccgccggcctcggtggcaaggggct

SEQ ID NO: 1334 - DNA, 31 bp, Homo sapiens
  chr13:98085419-98085450
  hyper
gcgctctcttattggtcgtgaatggtacctt

SEQ ID NO: 1335 - DNA, 61 bp, Homo sapiens
  chr14:21439058-21439119
  hyper
cacatccagccacctccgcaatggaaagctcgtggcatacagcaggcgctcattatttgaa

SEQ ID NO: 1336 - DNA, 31 bp, Homo sapiens
  chr14:21439126-21439157
  hyper
cattctcctgcttcctcggtggttaaggagg

SEQ ID NO: 1337 - DNA, 98 bp, Homo sapiens
  chr14:21439159-21439257
  hyper
tttggaagttcaagtccgtctcagctaagaaccaggagacacggctttggtgcctctcggcccgctgggtctcggcggcgcagcgtcccctgccggcc

SEQ ID NO: 1338 - DNA, 31 bp, Homo sapiens
  chr14:21439284-21439315
  hyper
agcacttaaggggccgcgcgggaggagttgc

SEQ ID NO: 1339 - DNA, 41 bp, Homo sapiens
  chr14:21439365-21439406
  hyper
atctccataaaggaagcgaggtggctcggtggaggggcttc

SEQ ID NO: 1340 - DNA, 37 bp, Homo sapiens
  chr14:21439417-21439454
  hyper
ccaggaccctgtgacccgccatcggaagagagtggac

SEQ ID NO: 1341 - DNA, 74 bp, Homo sapiens
  chr14:21439488-21439562
  hyper
tttgctgtgggcaaatcggacccatgagcccagagagcatcatcccgggaaagctttcccgaagcacaggcttc

SEQ ID NO: 1342 - DNA, 45 bp, Homo sapiens
  chr14:21439563-21439608
  hyper
ctgcaccaccatacacgcgcacacccgcacgcgctcactccccca

SEQ ID NO: 1343 - DNA, 45 bp, Homo sapiens
  chr14:21439615-21439660
  hyper
tcccctccctcactcccgccctggaagaagcggggagctgagggg

SEQ ID NO: 1344 - DNA, 119 bp, Homo sapiens
  chr14:21439666-21439785
  hyper
ggaaccagcagagaaacgggccgggcaggagcccgcaccagcccggcttgggacaccgcagccgctcctgccctctgctggctggaaggcgcacttacacattgcggtcatcgcggatc

SEQ ID NO: 1345 - DNA, 31 bp, Homo sapiens
  chr14:89952768-89952799
  hyper
gaagattggggggaggcgggggaggatacca

SEQ ID NO: 1346 - DNA, 31 bp, Homo sapiens
  chr14:100437405-100437436
  hyper
tgcaactctccggccccgccacggctcctta

SEQ ID NO: 1347 - DNA, 31 bp, Homo sapiens
  chr15:29107370-29107401
  hyper
actgggattccaggcacgagacactgggcct

SEQ ID NO: 1348 - DNA, 31 bp, Homo sapiens
  chr15:63130455-63130486
  hyper
tggacagccacattgccgctgctagggatgc

SEQ ID NO: 1349 - DNA, 57 bp, Homo sapiens
  chr15:65067771-65067828
  hyper
ctgcgaccggcgagtgcgccgcggcggcggcggcggcggcagcggcggcggggggcg

SEQ ID NO: 1350 - DNA, 42 bp, Homo sapiens
  chr16:11762782-11762824
  hyper
ataggggtccaggtgacgtccggcgcccgtctcgcgggtagg

SEQ ID NO: 1351 - DNA, 51 bp, Homo sapiens
  chr16:11762925-11762976
  hyper
ctccgtcgggccgattcgagctacctccccagctgccgtcccctctccagc

SEQ ID NO: 1352 - DNA, 56 bp, Homo sapiens
  chr16:14396709-14396765
  hyper
tgggcttggaaattgacgaggcggtggagcgtccgcgtccccgcccccaccccgga

SEQ ID NO: 1353 - DNA, 31 bp, Homo sapiens
  chr16:30380257-30380288
  hyper
ggaaaaaactgaggcacggaaatggggaagc

SEQ ID NO: 1354 - DNA, 58 bp, Homo sapiens
  chr16:67571310-67571368
  hyper
ggcgggctgagtcaggcggcaggaactgggcggggggcggcgccgggaggagccgaag

SEQ ID NO: 1355 - DNA, 31 bp, Homo sapiens
  chr16:67571883-67571914
  hyper
gacctccttgggctcccggggtggggggccc

SEQ ID NO: 1356 - DNA, 31 bp, Homo sapiens
  chr17:28088116-28088147
  hyper
gagcaaactttctgagcgttcgcggaggcgg

SEQ ID NO: 1357 - DNA, 37 bp, Homo sapiens
  chr17:30592879-30592916
  hyper
ggagcgcggggagcggcggggccggggccggcccaag

SEQ ID NO: 1358 - DNA, 31 bp, Homo sapiens
  chr17:30846711-30846742
  hyper
gtttgtctgtctttcccgagaaggtgatgat

SEQ ID NO: 1359 - DNA, 31 bp, Homo sapiens
  chr17:46662739-46662770
  hyper
tggagcaggggctcctcgggagcagaagggg

SEQ ID NO: 1360 - DNA, 31 bp, Homo sapiens
  chr17:46755696-46755727
  hyper
aaacccaggagatgctcggggtcggggccca

SEQ ID NO: 1361 - DNA, 43 bp, Homo sapiens
  chr17:56429043-56429086
  hyper
ccactccttcctctctcgttcccaattccgttttatctattcc

SEQ ID NO: 1362 - DNA, 108 bp, Homo sapiens
  chr17:56429104-56429212
  hyper
ggtcaggcatcctttccgactactcactcagcagcggatccccacccgcctctgactcccagtgtctttcggctccaacgtaagttcaccgaacgtctaagagctgag

SEQ ID NO: 1363 - DNA, 92 bp, Homo sapiens
  chr17:56429216-56429308
  hyper
caaaggcatgtaagaccgcccctgccctcagctgcaagacctgtccgcgatcctacgaggtaaacgatggcctccttcggcttctcactccc

SEQ ID NO: 1364 - DNA, 44 bp, Homo sapiens
  chr17:56429351-56429395
  hyper
tcccacagccccattccgccctctttccccgaccttggtccccc

SEQ ID NO: 1365 - DNA, 226 bp, Homo sapiens
  chr17:56429401-56429627
  hyper
cctacaaccaggtccccgactgacaccttgaccagcgaacacagcaaacaggcccgcagatgccgcaggtccttcggcaccgtctccagggccatcttcgccgatgggaagaacaacagggagatagacgaccacagcctgtgcacccgcaggaagtaaatagctcgttacccagaatgcccaccacttccggcgcttagacttcctcttccggtgtgggcggacg

SEQ ID NO: 1366 - DNA, 54 bp, Homo sapiens
  chr17:56429652-56429706
  hyper
aggagatggtttctcccgccagcaggcggggaggctgggcggccggccgccacc

SEQ ID NO: 1367 - DNA, 80 bp, Homo sapiens
  chr17:56429779-56429859
  hyper
ccccggggcgggggggcggctgcgcttgcgcgggagtgtgtcgggctgagccgcagcgccgagacgcgggctgtttgatc

SEQ ID NO: 1368 - DNA, 88 bp, Homo sapiens
  chr17:56429861-56429949
  hyper
ggctggtggccctgggcgtcggtcctgttccccgatggtaacccgaagtttgtttttttttgttttgtctccccgttttagaagcatt

SEQ ID NO: 1369 - DNA, 31 bp, Homo sapiens
  chr17:56429980-56430011
  hyper
ttgtctctgcagagaccgagaagaaatccag

SEQ ID NO: 1370 - DNA, 37 bp, Homo sapiens
  chr17:56430023-56430060
  hyper
ccctccttcctaactgcgagagcgctatagggtttcc

SEQ ID NO: 1371 - DNA, 127 bp, Homo sapiens
  chr17:56430079-56430206
  hyper
gctggcctgggagctacggcggaaaaaaatgcgtatttatcttttaaaactccgtctgtttgctcgttccggctgataatttatactttgcgcagttcttagcgcttagacacggttcctttactaa

SEQ ID NO: 1372 - DNA, 31 bp, Homo sapiens
  chr17:80156992-80157023
  hyper
gcagtcattataaaagcgcttcaagtaatct

SEQ ID NO: 1373 - DNA, 31 bp, Homo sapiens
  chr18:43678696-43678727
  hyper
agcagggagcctcccacggagcccgttaatc

SEQ ID NO: 1374 - DNA, 31 bp, Homo sapiens
  chr18:55021325-55021356
  hyper
ctggtcctcgcagcgccgcgggctccagccc

SEQ ID NO: 1375 - DNA, 41 bp, Homo sapiens
  chr18:77156453-77156494
  hyper
agagaacgaggtcggccgggtctgtgcgcccagggaggggc

SEQ ID NO: 1376 - DNA, 55 bp, Homo sapiens
  chr19:1546216-1546271
  hyper
gtgcgcccgtttgtgcgcgggggaagctcgcagccacgagcgaagggacctgtgt

SEQ ID NO: 1377 - DNA, 69 bp, Homo sapiens
  chr19:1546276-1546345
  hyper
ctttggacaaatctcccgggaatttcccgggggttcagagctccgatgtcggggcggggaggggcaggg

SEQ ID NO: 1378 - DNA, 31 bp, Homo sapiens
  chr19:5293377-5293408
  hyper
gggcagggcggggccccggccggaagtgggg

SEQ ID NO: 1379 - DNA, 31 bp, Homo sapiens
  chr19:6801936-6801967
  hyper
gatttgcatatgggcacgatgccagcacagt

SEQ ID NO: 1380 - DNA, 49 bp, Homo sapiens
  chr19:8273922-8273971
  hyper
gcagagatgggcggagcgggaacgggggcgggggcgagaatgggggggc

SEQ ID NO: 1381 - DNA, 36 bp, Homo sapiens
  chr19:8274334-8274370
  hyper
ccccgccgccggccctcggtgcgcccggccgcctgc

SEQ ID NO: 1382 - DNA, 49 bp, Homo sapiens
  chr19:8274395-8274444
  hyper
gccgcgaacaccgccccgaacgccaccctcacggcggtccccggccccg

SEQ ID NO: 1383 - DNA, 41 bp, Homo sapiens
  chr19:10024727-10024768
  hyper
tggcattccccagccccgccccccaacggtattcccggccc

SEQ ID NO: 1384 - DNA, 31 bp, Homo sapiens
  chr19:11593855-11593886
  hyper
ggccctccctgaccaccgacctaaacagcat

SEQ ID NO: 1385 - DNA, 90 bp, Homo sapiens
  chr19:18062903-18062993
  hyper
tagaggagacgccttgcgggggggagggccccggctgtggccgcgacggactgcctccctcggcctgcggggtccgcgccccctccccgg

SEQ ID NO: 1386 - DNA, 31 bp, Homo sapiens
  chr19:18343302-18343333
  hyper
ggacattccacaaccccgaaaaccttcggac

SEQ ID NO: 1387 - DNA, 31 bp, Homo sapiens
  chr19:30156048-30156079
  hyper
cgcaggtctcgcagtcgcgggcgcccccacc

SEQ ID NO: 1388 - DNA, 88 bp, Homo sapiens
  chr19:30156298-30156386
  hyper
cgagccaccgcgggggcgtgtccggcggagctggccgggacccgggcggagcgggcggggacccgggctactgcggtgtggactcgag

SEQ ID NO: 1389 - DNA, 40 bp, Homo sapiens
  chr19:40022936-40022976
  hyper
atgtcatcatcacagccgactcagtcggccagaggactga

SEQ ID NO: 1390 - DNA, 31 bp, Homo sapiens
  chr19:41074216-41074247
  hyper
tgaggggaggggaaagcggagagctcctaga

SEQ ID NO: 1391 - DNA, 69 bp, Homo sapiens
  chr19:41870307-41870376
  hyper
aaatccctaactgctccgtgctgcgcctaccccaccgaagagctctctgtggtccgggatcacaaatca

SEQ ID NO: 1392 - DNA, 31 bp, Homo sapiens
  chr19:41870401-41870432
  hyper
attccttccaggacctcgtgtacatccccgg

SEQ ID NO: 1393 - DNA, 31 bp, Homo sapiens
  chr19:42444455-42444486
  hyper
cgggggggccattaggcgctaatgggaagat

SEQ ID NO: 1394 - DNA, 125 bp, Homo sapiens
  chr19:42444518-42444643
  hyper
catttgtcctgcttcccgctccattggccgctgcccccgccccgcccctcccccgccgccgcgcgccccatttccgcttcaaacctttggaggggacgtgggggggatcccgggggctgctgaaa

SEQ ID NO: 1395 - DNA, 37 bp, Homo sapiens
  chr19:44008521-44008558
  hyper
cccctactgacctcttcgaccccgcctcccctccctc

SEQ ID NO: 1396 - DNA, 42 bp, Homo sapiens
  chr19:45755077-45755119
  hyper
gcccgacccctgggggcgcccctctctcgggacccctctctt

SEQ ID NO: 1397 - DNA, 70 bp, Homo sapiens
  chr19:46405102-46405172
  hyper
ggggctggctggggttcggggtccccccgccgccgcctctcccagaccgccgggccgagagctccttagt

SEQ ID NO: 1398 - DNA, 31 bp, Homo sapiens
  chr19:46476432-46476463
  hyper
gcccttgcacctgccacgggagggggggaaa

SEQ ID NO: 1399 - DNA, 31 bp, Homo sapiens
  chr19:47778088-47778119
  hyper
agagcggggcggtctgcggggtgggggcggg

SEQ ID NO: 1400 - DNA, 54 bp, Homo sapiens
  chr19:50317014-50317068
  hyper
tctcccctacaaccttcgagggtggttgagtccagcgatcgttgcctagtaacc

SEQ ID NO: 1401 - DNA, 31 bp, Homo sapiens
  chr19:51815072-51815103
  hyper
ccctccccctccgcgccgcctctgccgcgat

SEQ ID NO: 1402 - DNA, 31 bp, Homo sapiens
  chr19:52800383-52800414
  hyper
ccgcccccgccccgctcggacccctccgctg

SEQ ID NO: 1403 - DNA, 55 bp, Homo sapiens
  chr19:57683439-57683494
  hyper
ggggcgcgcgagggggcggggcgcgcgagggggcggggcgcgcgagggggcgggg

SEQ ID NO: 1404 - DNA, 123 bp, Homo sapiens
  chr19:57702751-57702874
  hyper
aaggctgtgcattatgcgtacggcgggagctgggccaacgacggcctaggacggggacgtttccgacggctcacgccggtgggggcgggacttccgggttgctcgctgcggacgccattttct

SEQ ID NO: 1405 - DNA, 48 bp, Homo sapiens
  chr19:57703054-57703102
  hyper
cccgcccttcagccccgcggtctccaggggcggcgccctgggtctgga

SEQ ID NO: 1406 - DNA, 31 bp, Homo sapiens
  chr19:57703139-57703170
  hyper
ggaacgccgttgccaccgaggaggcggcggc

SEQ ID NO: 1407 - DNA, 48 bp, Homo sapiens
  chr19:57703193-57703241
  hyper
ggcaaccggccagggtcgggcacaggtggggtccgtcaggccgcccgg

SEQ ID NO: 1408 - DNA, 46 bp, Homo sapiens
  chr19:57831527-57831573
  hyper
agcccatgatctcaatcggggcgaatatccccgcctcctgacctca

SEQ ID NO: 1409 - DNA, 136 bp, Homo sapiens
  chr19:57831583-57831719
  hyper
gctagaaaggacctttcgaccctccgacttgtgcccatagtaaagcggcggccctaagacgacgcgggggtccttgtgcgcacttaaatggagtcggctgcgcttggtgagttcccacacccggtagatgtgaggg

SEQ ID NO: 1410 - DNA, 135 bp, Homo sapiens
  chr19:57831737-57831872
  hyper
aaggcaccaccccttgcgtcggccgcggactctaggccaatgacgggccaggacacgggcgatttctgcgggccagggcggcggaggtgggacttccgcttcgtcgcgtgacgtcatctccgtgagcaggattgg

SEQ ID NO: 1411 - DNA, 51 bp, Homo sapiens
  chr19:57831881-57831932
  hyper
agtgtggggcctggaccgctgggtaggcgcgtccagcggcctgagcagggg

SEQ ID NO: 1412 - DNA, 51 bp, Homo sapiens
  chr19:57831935-57831986
  hyper
gtaatgaggctgttacgcgccttctccgcatcttggcgggagcctgacgcc

SEQ ID NO: 1413 - DNA, 189 bp, Homo sapiens
  chr19:57832024-57832213
  hyper
cgaggcctaggcctccgcagccgccctccgtctcctcagccccgacgctgcgcccgctttgtgcgcatttttctctggggaaactgaggctccgagtgcgaaagtcagccgaggtcgccccgcccaggacagagaagggctgggggtcggctgagccgcggcattcccgggccccgctagggctgcagg

SEQ ID NO: 1414 - DNA, 48 bp, Homo sapiens
  chr19:57832215-57832263
  hyper
ctcaggatggcagcctcggcgcaggtgagtggacgaggttttggcctt

SEQ ID NO: 1415 - DNA, 68 bp, Homo sapiens
  chr19:57874396-57874464
  hyper
tagtgtgtccctttggcggtgtagccgttgagaacttgctgtgcttcacaatccgatatcataggtcc

SEQ ID NO: 1416 - DNA, 31 bp, Homo sapiens
  chr19:57875153-57875184
  hyper
gtcaggccccttgtctcgaagagaggggcgt

SEQ ID NO: 1417 - DNA, 31 bp, Homo sapiens
  chr19:57901091-57901122
  hyper
cgctctaagacaagtccggaagcggtgtcga

SEQ ID NO: 1418 - DNA, 31 bp, Homo sapiens
  chr19:57901384-57901415
  hyper
gcgctggggacagtggcgtccttgtcttgcc

SEQ ID NO: 1419 - DNA, 31 bp, Homo sapiens
  chr19:57901437-57901468
  hyper
tccctggctgggctggcggaggccttgctga

SEQ ID NO: 1420 - DNA, 63 bp, Homo sapiens
  chr20:3451348-3451411
  hyper
agttagggcagagtgccgggtctctaggagggcaacactcaacgcagtcggctcctaggcatc

SEQ ID NO: 1421 - DNA, 50 bp, Homo sapiens
  chr20:3451412-3451462
  hyper
agtggggctgcaaccccgccgccggggacgaaaggcgaagggggaaaact

SEQ ID NO: 1422 - DNA, 58 bp, Homo sapiens
  chr20:3451571-3451629
  hyper
cgcacgcacgcacccacgtactcgcgcacgcgcgcgccggccccgcccaccgccccgc

SEQ ID NO: 1423 - DNA, 113 bp, Homo sapiens
  chr20:3451672-3451785
  hyper
gccccgcacggccaggcgaagcggagccggccgtgcggtgtgtgtgtatgtgttcgcggggcgccgtctcagccccgggaagatggtggctgcagcggcggcaactgaggcaa

SEQ ID NO: 1424 - DNA, 31 bp, Homo sapiens
  chr20:3452294-3452325
  hyper
gagggccatttgcttccggggagatcatcgt

SEQ ID NO: 1425 - DNA, 39 bp, Homo sapiens
  chr20:21378678-21378717
  hyper
ggctcttgggtcccaccgtaagagcgcataaagagagga

SEQ ID NO: 1426 - DNA, 31 bp, Homo sapiens
  chr20:24564177-24564208
  hyper
ggcagggtggccctggcgtttggaagagttg

SEQ ID NO: 1427 - DNA, 41 bp, Homo sapiens
  chr20:42296222-42296263
  hyper
atgtcattttgtctcccgcctaattgcgggatgggggtggg

SEQ ID NO: 1428 - DNA, 35 bp, Homo sapiens
  chr20:44937332-44937367
  hyper
cagcctttccctctctcgggcggcccagtcccagg

SEQ ID NO: 1429 - DNA, 31 bp, Homo sapiens
  chr20:48098878-48098909
  hyper
gccagagtacctcgtgcgccagccccccgac

SEQ ID NO: 1430 - DNA, 31 bp, Homo sapiens
  chr20:61640692-61640723
  hyper
attctgcgcaggtggacgctgggggctgttt

SEQ ID NO: 1431 - DNA, 31 bp, Homo sapiens
  chr20:61885918-61885949
  hyper
tcctccccgcaacccccggcccagccccagc

SEQ ID NO: 1432 - DNA, 31 bp, Homo sapiens
  chr20:62467675-62467706
  hyper
gcaggggcagggagagcgcaggcagggcagg

SEQ ID NO: 1433 - DNA, 31 bp, Homo sapiens
  chr20:62694895-62694926
  hyper
gccgagacccctgccccgggccagccctgcc

SEQ ID NO: 1434 - DNA, 31 bp, Homo sapiens
  chr21:33058220-33058251
  hyper
aatcaaagctgtgggccgggtgtggtggctc

SEQ ID NO: 1435 - DNA, 38 bp, Homo sapiens
  chr21:46825929-46825967
  hyper
tgccaaccgagcgccgcgcggtccgagaacaatgccca

SEQ ID NO: 1436 - DNA, 31 bp, Homo sapiens
  chr22:39268734-39268765
  hyper
aatttctttaaaacatcgccccccacccatt

SEQ ID NO: 1437 - DNA, 31 bp, Homo sapiens
  chr22:42322868-42322899
  hyper
tgccctgccccgcccccgcctgctgggtggg

SEQ ID NO: 1438 - DNA, 36 bp, Homo sapiens
  chr22:43116705-43116741
  hyper
cctgcccctgccttcccgaggcgcctcctccccact

SEQ ID NO: 1439 - DNA, 1 bp, Homo sapiens
  AC209420.3_23583-33864:1608-1609
  hyper
a

SEQ ID NO: 1440 - DNA, 61 bp, Homo sapiens
  AC209420.3_23583-33864:1652-1713
  hyper
atggttgccaggggttcgggaagcaagaggcatatatgactgtatacgggtagcatgaagg

SEQ ID NO: 1441 - DNA, 78 bp, Homo sapiens
  JH636052.4:789298-789376
  hyper
ggcgacggctgccttccgctcgccgccccccggttttcccggctccgaccctatcctctaacccgtttcctgcttcag

SEQ ID NO: 1442 - DNA, 36 bp, Homo sapiens
  JH636052.4:789389-789425
  hyper
tttcctggatgtgtcccgtgccgagcaggctttttc

SEQ ID NO: 1443 - DNA, 31 bp, Homo sapiens
  JH636052.4:790113-790144
  hyper
gggacacagctgggcgcgtccacacccccgc

SEQ ID NO: 1444 - DNA, 31 bp, Homo sapiens
  JH636052.4:3185459-3185490
  hyper
ggaagtttcgtgcgtgcgcccttcctatagc

SEQ ID NO: 1445 - DNA, 31 bp, Homo sapiens
  chr1:1095519-1095550
  hypo
cagacgttgctccaagcgtttcgtctgcggg

SEQ ID NO: 1446 - DNA, 31 bp, Homo sapiens
  chr1:1095729-1095760
  hypo
gagggcacgcgggggccgctgtctgtcctcc

SEQ ID NO: 1447 - DNA, 31 bp, Homo sapiens
  chr1:1647564-1647595
  hypo
tcaatcaaatcacacccgttcttacttccag

SEQ ID NO: 1448 - DNA, 31 bp, Homo sapiens
  chr1:1647625-1647656
  hypo
ttctcttggtcagcctcgtccagcgttcact

SEQ ID NO: 1449 - DNA, 31 bp, Homo sapiens
  chr1:1647727-1647758
  hypo
acaggacacactaccacggccctttcataaa

SEQ ID NO: 1450 - DNA, 31 bp, Homo sapiens
  chr1:2273548-2273579
  hypo
gcaagataaaggtcaccgtacgacctcgggg

SEQ ID NO: 1451 - DNA, 31 bp, Homo sapiens
  chr1:6342819-6342850
  hypo
ggagctgtgtggtcagcgccagcaggcatta

SEQ ID NO: 1452 - DNA, 49 bp, Homo sapiens
  chr1:6405730-6405779
  hypo
tcaccatgcccagccccggccgtcttctggctgacggcagctctgagga

SEQ ID NO: 1453 - DNA, 31 bp, Homo sapiens
  chr1:6871009-6871040
  hypo
cgggagctttcagaggcggaagttttggaag

SEQ ID NO: 1454 - DNA, 31 bp, Homo sapiens
  chr1:6871062-6871093
  hypo
gatagtcaggtggtgacgcttctcaggaggc

SEQ ID NO: 1455 - DNA, 31 bp, Homo sapiens
  chr1:8394042-8394073
  hypo
aaagaggttttctaatcgctcaggttgaggg

SEQ ID NO: 1456 - DNA, 31 bp, Homo sapiens
  chr1:10997238-10997269
  hypo
ttcagacatgggagaccggtgtcaggagcca

SEQ ID NO: 1457 - DNA, 35 bp, Homo sapiens
  chr1:10997332-10997367
  hypo
cccccagcttccagagcgtgcgcaggtgagagggt

SEQ ID NO: 1458 - DNA, 31 bp, Homo sapiens
  chr1:10997368-10997399
  hypo
ccagccccctttctctcggcctagcagagcc

SEQ ID NO: 1459 - DNA, 31 bp, Homo sapiens
  chr1:10997419-10997450
  hypo
gccttgcccagcctctcgcacacagccagga

SEQ ID NO: 1460 - DNA, 31 bp, Homo sapiens
  chr1:11129009-11129040
  hypo
ctacagcagtggcccccgcacataaggaaat

SEQ ID NO: 1461 - DNA, 31 bp, Homo sapiens
  chr1:16828209-16828240
  hypo
gacccccaagacaacccgccagaaaagaatc

SEQ ID NO: 1462 - DNA, 31 bp, Homo sapiens
  chr1:26121477-26121508
  hypo
aagccttctccccagccggggtccctccagg

SEQ ID NO: 1463 - DNA, 50 bp, Homo sapiens
  chr1:26121564-26121614
  hypo
tggtctttcctcttgccgtccacttctgacccatccgcaaatcctgtctg

SEQ ID NO: 1464 - DNA, 31 bp, Homo sapiens
  chr1:26121628-26121659
  hypo
tcatatatcttgtccacgcctgcccaatccc

SEQ ID NO: 1465 - DNA, 31 bp, Homo sapiens
  chr1:26121661-26121692
  hypo
ccatcttatgtctgggcgactgcattagcct

SEQ ID NO: 1466 - DNA, 31 bp, Homo sapiens
  chr1:26502463-26502494
  hypo
tatgtaagaggaggggcgtcaaagaccaccc

SEQ ID NO: 1467 - DNA, 31 bp, Homo sapiens
  chr1:26828980-26829011
  hypo
ctttgcaatgtcctcccgagaactttggtaa

SEQ ID NO: 1468 - DNA, 31 bp, Homo sapiens
  chr1:36984328-36984359
  hypo
acagagacaaggccctcgtgctgtggctcgg

SEQ ID NO: 1469 - DNA, 31 bp, Homo sapiens
  chr1:52082113-52082144
  hypo
gcatttgctattccttcgtcttggaaggctc

SEQ ID NO: 1470 - DNA, 31 bp, Homo sapiens
  chr1:54725169-54725200
  hypo
gagacaggcctccattcgctcttccccaccc

SEQ ID NO: 1471 - DNA, 22 bp, Homo sapiens
  chr1:68958070-68958092
  hypo
ctttatagttttgttacgatcg

SEQ ID NO: 1472 - DNA, 31 bp, Homo sapiens
  chr1:78458352-78458383
  hypo
ccaggttgagaatcagcgtataagttttatt

SEQ ID NO: 1473 - DNA, 22 bp, Homo sapiens
  chr1:93542194-93542216
  hypo
ttttttcttttttcttcgagac

SEQ ID NO: 1474 - DNA, 17 bp, Homo sapiens
  chr1:109423193-109423210
  hypo
tccgtctcaaaaaaaaa

SEQ ID NO: 1475 - DNA, 31 bp, Homo sapiens
  chr1:113774557-113774588
  hypo
tgatgaggtttattgccggccaatacgctgg

SEQ ID NO: 1476 - DNA, 31 bp, Homo sapiens; identical to SEQ ID NO: 1241
  chr1:117695844-117695875
  hypo

SEQ ID NO: 1477 - DNA, 31 bp, Homo sapiens
  chr1:151699288-151699319
  hypo
ggccaataaccatctgcggtccatcttttag

SEQ ID NO: 1478 - DNA, 42 bp, Homo sapiens
  chr1:151699388-151699430
  hypo
catatctcccaccattcgtgggccggccggcatgttcttcat

SEQ ID NO: 1479 - DNA, 25 bp, Homo sapiens
  chr1:151699460-151699485
  hypo
gttcagtgaaaatgatcgttgaggc

SEQ ID NO: 1480 - DNA, 57 bp, Homo sapiens
  chr1:167524972-167525029
  hypo
acattaagcttggggtcggcggtttcatgaatttattgcccccgctgcccttccctg

SEQ ID NO: 1481 - DNA, 31 bp, Homo sapiens
  chr1:167525070-167525101
  hypo
ctgtctcattctctcacgggtgctcctgatt

SEQ ID NO: 1482 - DNA, 31 bp, Homo sapiens
  chr1:167525158-167525189
  hypo
ctttaagctttggtcacgtctttttggagca

SEQ ID NO: 1483 - DNA, 31 bp, Homo sapiens
  chr1:183338871-183338902
  hypo
ctgtacccattaaacacgaactccccattcc

SEQ ID NO: 1484 - DNA, 31 bp, Homo sapiens
  chr1:225608025-225608056
  hypo
caactttgatctttcacgtaatcagactgaa

SEQ ID NO: 1485 - DNA, 31 bp, Homo sapiens
  chr1:226077114-226077145
  hypo
gtagaggtggggctctcgttctctgcaagag

SEQ ID NO: 1486 - DNA, 31 bp, Homo sapiens
  chr1:226077220-226077251
  hypo
agaatggctcaggcaacgccagggctctaag

SEQ ID NO: 1487 - DNA, 53 bp, Homo sapiens
  chr1:226077264-226077317
  hypo
tgcagggatgagcatccgggcccgtgctcagagggtcccggggcctcatgaga

SEQ ID NO: 1488 - DNA, 31 bp, Homo sapiens
  chr1:226908274-226908305
  hypo
tacataaagtatttgacggaacatgcctggc

SEQ ID NO: 1489 - DNA, 31 bp, Homo sapiens
  chr1:231122191-231122222
  hypo
agaaggtttttacactcgcaactcttctatt

SEQ ID NO: 1490 - DNA, 61 bp, Homo sapiens
  chr1:231122235-231122296
  hypo
gtttccaaatgttatgcgtttgaattgtagccattccagtagtccccgttctctttggggt

SEQ ID NO: 1491 - DNA, 47 bp, Homo sapiens
  chr1:231122346-231122393
  hypo
cccaattaccatccatcggaacacgtttctgttcgtgccttccaccc

SEQ ID NO: 1492 - DNA, 31 bp, Homo sapiens
  chr1:234962495-234962526
  hypo
atcatggttacagtgccgggcagtgctgctg

SEQ ID NO: 1493 - DNA, 24 bp, Homo sapiens
  chr2:11527872-11527896
  hypo
gtgagccaccgtgcccagccaacc

SEQ ID NO: 1494 - DNA, 37 bp, Homo sapiens; identical to SEQ ID NO: 1249
  chr2:12858219-12858256
  hypo

SEQ ID NO: 1495 - DNA, 31 bp, Homo sapiens
  chr2:32580137-32580168
  hypo
tatgagtcaccgcacccggccaagtattcct

SEQ ID NO: 1496 - DNA, 17 bp, Homo sapiens
  chr2:44332906-44332923
  hypo
cccggaaagaaatatct

SEQ ID NO: 1497 - DNA, 24 bp, Homo sapiens
  chr2:74323598-74323622
  hypo
gaaaagcaggtcaggccgggcgca

SEQ ID NO: 1498 - DNA, 31 bp, Homo sapiens
  chr2:86344874-86344905
  hypo
ctgcttgctcttgatccgcttctttttttgt

SEQ ID NO: 1499 - DNA, 31 bp, Homo sapiens
  chr2:86345268-86345299
  hypo
tcttctgtttcagtgacgcttataatccatt

SEQ ID NO: 1500 - DNA, 31 bp, Homo sapiens; identical to SEQ ID NO: 1257
  chr2:86428203-86428234
  hypo

SEQ ID NO: 1501 - DNA, 31 bp, Homo sapiens
  chr2:97479659-97479690
  hypo
tgaataataaaaaacacggagatgccccatt

SEQ ID NO: 1502 - DNA, 44 bp, Homo sapiens
  chr2:101022687-101022731
  hypo
agagaattcccaactgcgagcctgagaggcgccctgctgcaagg

SEQ ID NO: 1503 - DNA, 46 bp, Homo sapiens
  chr2:111935998-111936044
  hypo
tgggcagcaggctttgcgaacactctgggagcgccagctttaatgt

SEQ ID NO: 1504 - DNA, 9 bp, Homo sapiens
  chr2:122102163-122102172
  hypo
cccaaagtg

SEQ ID NO: 1505 - DNA, 31 bp, Homo sapiens
  chr2:122102176-122102207
  hypo
gattacaggtatgagccgtgcccagccttca

SEQ ID NO: 1506 - DNA, 31 bp, Homo sapiens
  chr2:122102221-122102252
  hypo
ttaagcaaaaggagagcgtgttcccataggc

SEQ ID NO: 1507 - DNA, 31 bp, Homo sapiens
  chr2:165637157-165637188
  hypo
tggacaagagctgcagcgctcctatttattc

SEQ ID NO: 1508 - DNA, 43 bp, Homo sapiens
  chr2:165637252-165637295
  hypo
ccctgggtggtgctgccggagtatctgccgggctaagtggaaa

SEQ ID NO: 1509 - DNA, 31 bp, Homo sapiens
  chr2:165637297-165637328
  hypo
cacaaggcagggtaggcgacagacagagtgt

SEQ ID NO: 1510 - DNA, 31 bp, Homo sapiens
  chr2:165637341-165637372
  hypo
tcatggagactgctgtcgccttgtgaggtct

SEQ ID NO: 1511 - DNA, 13 bp, Homo sapiens
  chr2:175255417-175255430
  hypo
gtatcgtgggagg

SEQ ID NO: 1512 - DNA, 31 bp, Homo sapiens
  chr2:175927665-175927696
  hypo
gctgcactctcctgctcgctctgccttcagg

SEQ ID NO: 1513 - DNA, 26 bp, Homo sapiens
  chr2:191374476-191374502
  hypo
attttccagctgggtgcggtggctca

SEQ ID NO: 1514 - DNA, 31 bp, Homo sapiens
  chr2:201712541-201712572
  hypo
ttacagcaatctcattcgcagagttttacaa

SEQ ID NO: 1515 - DNA, 48 bp, Homo sapiens
  chr2:208410313-208410361
  hypo
ctgaaaatgctgtagtcgttactacgtagtaggcgcagaatatttgtt

SEQ ID NO: 1516 - DNA, 31 bp, Homo sapiens
  chr2:208623136-208623167
  hypo
cctttctccctaactacgtttaagatagcta

SEQ ID NO: 1517 - DNA, 17 bp, Homo sapiens
  chr2:217488116-217488133
  hypo
accgcgcccggccggaa

SEQ ID NO: 1518 - DNA, 31 bp, Homo sapiens
  chr2:234206549-234206580
  hypo
ggattgtaccccatttcgcaaatggggaaat

SEQ ID NO: 1519 - DNA, 31 bp, Homo sapiens
  chr2:234206592-234206623
  hypo
agcaagaagttatcctcgtcctagagtcctg

SEQ ID NO: 1520 - DNA, 31 bp, Homo sapiens
  chr2:234206702-234206733
  hypo
atgggctgtactcctccgcatggctttttct

SEQ ID NO: 1521 - DNA, 31 bp, Homo sapiens
  chr2:239188970-239189001
  hypo
tggagaacagcagggccgactagacctcgcc

SEQ ID NO: 1522 - DNA, 49 bp, Homo sapiens
  chr2:241543041-241543090
  hypo
actggactggacaggacgaccaccttgtgccaggcgccagctatctccc

SEQ ID NO: 1523 - DNA, 34 bp, Homo sapiens
  chr2:242610781-242610815
  hypo
cacatctggcctgccccgacgtcctgaacctgtc

SEQ ID NO: 1524 - DNA, 39 bp, Homo sapiens
  chr2:242610835-242610874
  hypo
tccaggtggggtccctcggaggtacgatctgtgcccttg

SEQ ID NO: 1525 - DNA, 52 bp, Homo sapiens
  chr2:242610914-242610966
  hypo
gtgtgtgagcctgagccgtgagcacttggcagtggttcgcctgtgagaccag

SEQ ID NO: 1526 - DNA, 31 bp, Homo sapiens
  chr2:242735171-242735202
  hypo
acgtgggtgtctccagcgggaccctgatccc

SEQ ID NO: 1527 - DNA, 71 bp, Homo sapiens
  chr3:3179062-3179133
  hypo
aaggagatgtttcagtcggctgggattcggatgataaacaacagaggagaaaagcacggaacaattactgc

SEQ ID NO: 1528 - DNA, 31 bp, Homo sapiens
  chr3:3179204-3179235
  hypo
agttaaaagcaaataacgaaaagtctaataa

SEQ ID NO: 1529 - DNA, 31 bp, Homo sapiens
  chr3:3179241-3179272
  hypo
cagtctcttctatgcccgtcataaaccctgc

SEQ ID NO: 1530 - DNA, 31 bp, Homo sapiens
  chr3:23750592-23750623
  hypo
tctatattgaacaagacgcaagaataacata

SEQ ID NO: 1531 - DNA, 31 bp, Homo sapiens
  chr3:23750656-23750687
  hypo
taaaaaagccatatgccgtaatatttttacc

SEQ ID NO: 1532 - DNA, 27 bp, Homo sapiens
  chr3:23750728-23750755
  hypo
aagtggtggccaggcacggtggctcac

SEQ ID NO: 1533 - DNA, 31 bp, Homo sapiens
  chr3:31717146-31717177
  hypo
aaactgcagggccaggcgcagtggctcacgc

SEQ ID NO: 1534 - DNA, 31 bp, Homo sapiens
  chr3:33012352-33012383
  hypo
gaggttcatattaaatcggagagagaaaaag

SEQ ID NO: 1535 - DNA, 10 bp, Homo sapiens
  chr3:36984641-36984651
  hypo
cattgcactc

SEQ ID NO: 1536 - DNA, 31 bp, Homo sapiens
  chr3:36984652-36984683
  hypo
agcctgggtgacagagcgagaatccctctgg

SEQ ID NO: 1537 - DNA, 31 bp, Homo sapiens
  chr3:43655461-43655492
  hypo
gatgggagccacacagcgttcaacttagact

SEQ ID NO: 1538 - DNA, 31 bp, Homo sapiens
  chr3:43655531-43655562
  hypo
gggaagaataactatgcgtgaaaaaaatagc

SEQ ID NO: 1539 - DNA, 65 bp, Homo sapiens
  chr3:43655590-43655655
  hypo
gaacaataaagtgttccgcagagtatctggggacacgcatcaaaggtcaacgtttttgaacattt

SEQ ID NO: 1540 - DNA, 31 bp, Homo sapiens
  chr3:49145905-49145936
  hypo
cgttcaggggctgtccgcgtgggggccacct

SEQ ID NO: 1541 - DNA, 31 bp, Homo sapiens
  chr3:71567986-71568017
  hypo
tttgatgaacttctaacgagatgccagacac

SEQ ID NO: 1542 - DNA, 31 bp, Homo sapiens
  chr3:72877850-72877881
  hypo
aaagagagagaaaagccgtgtggtataggtg

SEQ ID NO: 1543 - DNA, 31 bp, Homo sapiens
  chr3:72877902-72877933
  hypo
ttgctgtggtgtaaaacgtgagcagggagtg

SEQ ID NO: 1544 - DNA, 50 bp, Homo sapiens
  chr3:72877948-72877998
  hypo
cagaggtaggcagggtcgggatcacagagaaattgcgatgacacacaaag

SEQ ID NO: 1545 - DNA, 31 bp, Homo sapiens
  chr3:121438458-121438489
  hypo
atgacagtcattctaccgagttttagcaaca

SEQ ID NO: 1546 - DNA, 64 bp, Homo sapiens
  chr3:121438540-121438604
  hypo
ctcatcttcatgaagacgaacttgtgtttcaaagcgggcatctttctctcggaccacctgctgc

SEQ ID NO: 1547 - DNA, 31 bp, Homo sapiens
  chr3:121438640-121438671
  hypo
tgcaagttacactccccgaatattgcacaaa

SEQ ID NO: 1548 - DNA, 62 bp, Homo sapiens
  chr3:128785029-128785091
  hypo
atggactggaagtgagcggaaggtggaagctctgtcctggctcagctcggcctatgctggga

SEQ ID NO: 1549 - DNA, 31 bp, Homo sapiens
  chr3:128785099-128785130
  hypo
ggtggtgtggaaagtccgctgggactcagca

SEQ ID NO: 1550 - DNA, 31 bp, Homo sapiens
  chr3:128785146-128785177
  hypo
ttgttagctttctaaccggctctggggctgc

SEQ ID NO: 1551 - DNA, 31 bp, Homo sapiens
  chr3:157866890-157866921
  hypo
gtatttgctgtactttcggtttactacttta

SEQ ID NO: 1552 - DNA, 37 bp, Homo sapiens
  chr3:186271904-186271941
  hypo
gggattataggcgtgagccaccgcgcccagccttaca

SEQ ID NO: 1553 - DNA, 31 bp, Homo sapiens; identical to SEQ ID NO: 1264
  chr4:824547-824578
  hypo

SEQ ID NO: 1554 - DNA, 31 bp, Homo sapiens
  chr4:7775800-7775831
  hypo
gccatgcgtaggtaagcggtgccaccccagg

SEQ ID NO: 1555 - DNA, 31 bp, Homo sapiens
  chr4:26823269-26823300
  hypo
tccctgcacttgcctgcgaatgcaggtcctg

SEQ ID NO: 1556 - DNA, 41 bp, Homo sapiens
  chr4:26823343-26823384
  hypo
gagtcagaagccatggcggggctcaccgtggtcatgctgga

SEQ ID NO: 1557 - DNA, 31 bp, Homo sapiens
  chr4:26823413-26823444
  hypo
caggtcagcaggtacccgttctttatgtgtg

SEQ ID NO: 1558 - DNA, 31 bp, Homo sapiens
  chr4:26823448-26823479
  hypo
acctctggtggccaggcggaccacttttctc

SEQ ID NO: 1559 - DNA, 31 bp, Homo sapiens
  chr4:40510717-40510748
  hypo
aatgggaggagaggcacgacgatactgagat

SEQ ID NO: 1560 - DNA, 29 bp, Homo sapiens
  chr4:48678684-48678713
  hypo
ggcgtgagccactgcgcctggccaagttt

SEQ ID NO: 1561 - DNA, 31 bp, Homo sapiens
  chr4:48678802-48678833
  hypo
aaatgcacatttttctcgggaattaatcttt

SEQ ID NO: 1562 - DNA, 50 bp, Homo sapiens
  chr4:48679319-48679369
  hypo
aagctagacttattctcggttgattctctcacaaacgtacaactgtcagt

SEQ ID NO: 1563 - DNA, 31 bp, Homo sapiens
  chr4:48679394-48679425
  hypo
tcttaggaaaaaataacgattttttgtgtgt

SEQ ID NO: 1564 - DNA, 46 bp, Homo sapiens
  chr4:48679695-48679741
  hypo
gggattacaagcgtgagccaccgcgtcagcccgaaaaaataacttt

SEQ ID NO: 1565 - DNA, 31 bp, Homo sapiens
  chr4:48679861-48679892
  hypo
agtctctccatatcatcgagttctcctttca

SEQ ID NO: 1566 - DNA, 129 bp, Homo sapiens; identical to SEQ ID NO: 1267
  chr4:71767898-71768027
  hypo

SEQ ID NO: 1567 - DNA, 48 bp, Homo sapiens; identical to SEQ ID NO: 1268
  chr4:71768035-71768083
  hypo

SEQ ID NO: 1568 - DNA, 173 bp, Homo sapiens; identical to SEQ ID NO: 1269
  chr4:71768086-71768259
  hypo

SEQ ID NO: 1569 - DNA, 219 bp, Homo sapiens; identical to SEQ ID NO: 1270
  chr4:71768267-71768486
  hypo

SEQ ID NO: 1570 - DNA, 38 bp, Homo sapiens
  chr4:76917506-76917544
  hypo
ttacaggcgtgagccaccgcacccggccttttattgta

SEQ ID NO: 1571 - DNA, 35 bp, Homo sapiens
  chr4:122924454-122924489
  hypo
ggtcattgtccacaaccgtacggccttctttcggg

SEQ ID NO: 1572 - DNA, 31 bp, Homo sapiens; identical to SEQ ID NO: 1275
  chr4:141678190-141678221
  hypo

SEQ ID NO: 1573 - DNA, 31 bp, Homo sapiens
  chr4:170566082-170566113
  hypo
tggaagctagaaaaggcgaggaaacagattc

SEQ ID NO: 1574 - DNA, 71 bp, Homo sapiens
  chr4:170566223-170566294
  hypo
ttatggcagtgtgttacgataacagtaggaaacggacacggatatcttagtattatcgaaagtgttgtttt

SEQ ID NO: 1575 - DNA, 60 bp, Homo sapiens
  chr5:18482070-18482130
  hypo
aaagaatctattagttcgctagttgaaaaaaatcctgaaatataccgagcaaatgttgca

SEQ ID NO: 1576 - DNA, 50 bp, Homo sapiens
  chr5:18482190-18482240
  hypo
tgatgatcccaggctacgaacatggaggaagacgccgggtaaggtatctg

SEQ ID NO: 1577 - DNA, 2 bp, Homo sapiens
  chr5:43147786-43147788
  hypo
tg

SEQ ID NO: 1578 - DNA, 31 bp, Homo sapiens
  chr5:43147861-43147892
  hypo
tttttggttttatggccgggtgtggtggttt

SEQ ID NO: 1579 - DNA, 31 bp, Homo sapiens
  chr5:60676648-60676679
  hypo
cgggcgaggtggctcacgcctatagtcccag

SEQ ID NO: 1580 - DNA, 41 bp, Homo sapiens
  chr5:78264549-78264590
  hypo
gtctctgagagtacagcggtctccaacgtggatagtaaact

SEQ ID NO: 1581 - DNA, 39 bp, Homo sapiens
  chr5:108730037-108730076
  hypo
catgcccagccacatgctagttctcgacttggctggtgt

SEQ ID NO: 1582 - DNA, 27 bp, Homo sapiens
  chr5:130530661-130530688
  hypo
gcaaaataaaattggccgggatcgctg

SEQ ID NO: 1583 - DNA, 31 bp, Homo sapiens
  chr5:137403227-137403258
  hypo
taaggaaaatccaccacgcatgctcagtcct

SEQ ID NO: 1584 - DNA, 31 bp, Homo sapiens
  chr5:159600447-159600478
  hypo
tcccacctcagctccccgctcacggctaata

SEQ ID NO: 1585 - DNA, 49 bp, Homo sapiens
  chr5:177637069-177637118
  hypo
tccatcctagctcctgcgtatgctaaatggtccacgggcccctgtgccc

SEQ ID NO: 1586 - DNA, 31 bp, Homo sapiens
  chr5:177653944-177653975
  hypo
aatacacacacacacacgccaccacaaagcc

SEQ ID NO: 1587 - DNA, 31 bp, Homo sapiens
  chr5:177653993-177654024
  hypo
atttttctaagtgctacgatggatgccctgg

SEQ ID NO: 1588 - DNA, 31 bp, Homo sapiens
  chr5:177654157-177654188
  hypo
tacattaagatgaggccgtcagggggcccct

SEQ ID NO: 1589 - DNA, 31 bp, Homo sapiens
  chr6:571736-571767
  hypo
gctcttggtgtagagtcggtctcctgcagag

SEQ ID NO: 1590 - DNA, 35 bp, Homo sapiens
  chr6:4889731-4889766
  hypo
caggcgtgagccaccgtgcccggcccacatttttt

SEQ ID NO: 1591 - DNA, 31 bp, Homo sapiens
  chr6:4909754-4909785
  hypo
cttaagggtgtgtcttcgctttctggtgtac

SEQ ID NO: 1592 - DNA, 103 bp, Homo sapiens; identical to SEQ ID NO: 1279
  chr6:37665398-37665501
  hypo

SEQ ID NO: 1593 - DNA, 31 bp, Homo sapiens; identical to SEQ ID NO: 1280
  chr6:37665676-37665707
  hypo

SEQ ID NO: 1594 - DNA, 31 bp, Homo sapiens; identical to SEQ ID NO: 1281
  chr6:40763876-40763907
  hypo

SEQ ID NO: 1595 - DNA, 58 bp, Homo sapiens
  chr6:74025142-74025200
  hypo
tggctccttcacaattcgccagagctgctaggaggagcggggacgtgggaacagatag

SEQ ID NO: 1596 - DNA, 17 bp, Homo sapiens
  chr6:108555477-108555494
  hypo
tgggtgcagtggctcac

SEQ ID NO: 1597 - DNA, 31 bp, Homo sapiens
  chr6:130454500-130454531
  hypo
ctcccacctccagtctcgttatctgggagat

SEQ ID NO: 1598 - DNA, 35 bp, Homo sapiens
  chr6:138055139-138055174
  hypo
catgagccactgtgcccggccgacacttctaaact

SEQ ID NO: 1599 - DNA, 23 bp, Homo sapiens
  chr6:156909901-156909924
  hypo
agatgaatgaatcttacggcagg

SEQ ID NO: 1600 - DNA, 39 bp, Homo sapiens
  chr6:160512214-160512253
  hypo
gtgccctggtgctgagcgcatcgccgagaaggagcaggt

SEQ ID NO: 1601 - DNA, 49 bp, Homo sapiens
  chr7:300511-300560
  hypo
gtggttttggaggacccgatgaccaggcgtcctgcgagtccgcccgctg

SEQ ID NO: 1602 - DNA, 31 bp, Homo sapiens
  chr7:1563389-1563420
  hypo
ggggccacctctcacacgccatgctcagggc

SEQ ID NO: 1603 - DNA, 31 bp, Homo sapiens
  chr7:7824632-7824663
  hypo
actgtgttggagatttcgtggcatgtgtagt

SEQ ID NO: 1604 - DNA, 38 bp, Homo sapiens
  chr7:21501379-21501417
  hypo
agagtgagccagggctgccagcacgctgtcacctctca

SEQ ID NO: 1605 - DNA, 31 bp, Homo sapiens
  chr7:37299039-37299070
  hypo
atacaaaagccaaaagcgcaagactatctgc

SEQ ID NO: 1606 - DNA, 31 bp, Homo sapiens
  chr7:37299077-37299108
  hypo
agagtgggcatctcaacgacaggcttcaagg

SEQ ID NO: 1607 - DNA, 31 bp, Homo sapiens
  chr7:39761549-39761580
  hypo
aattctgaagtggctacgttgtctgggttac

SEQ ID NO: 1608 - DNA, 79 bp, Homo sapiens; identical to SEQ ID NO: 1288
  chr7:44924271-44924350
  hypo

SEQ ID NO: 1609 - DNA, 66 bp, Homo sapiens; identical to SEQ ID NO: 1289
  chr7:44924476-44924542
  hypo

SEQ ID NO: 1610 - DNA, 233 bp, Homo sapiens; identical to SEQ ID NO: 1290
  chr7:44924545-44924778
  hypo

SEQ ID NO: 1611 - DNA, 29 bp, Homo sapiens
  chr7:65937775-65937804
  hypo
ttttttttttttgagacggagtctcactc

SEQ ID NO: 1612 - DNA, 29 bp, Homo sapiens
  chr7:65938043-65938072
  hypo
caggcatgagccaccgtgccaggccctct

SEQ ID NO: 1613 - DNA, 31 bp, Homo sapiens
  chr7:66412369-66412400
  hypo
ggcataaggacaccttcgggattttttgttg

SEQ ID NO: 1614 - DNA, 18 bp, Homo sapiens
  chr7:77296352-77296370
  hypo
ccccgtcagtcagtatat

SEQ ID NO: 1615 - DNA, 31 bp, Homo sapiens
  chr7:77413232-77413263
  hypo
tgaacatgtgagaactcgatccttctgtaca

SEQ ID NO: 1616 - DNA, 31 bp, Homo sapiens
  chr7:77413266-77413297
  hypo
tgaaattcagaacttacgcatctatgttgtt

SEQ ID NO: 1617 - DNA, 31 bp, Homo sapiens
  chr7:99589185-99589216
  hypo
acttgggtccaaccaccgggtgctgcaaaca

SEQ ID NO: 1618 - DNA, 31 bp, Homo sapiens
  chr7:121756493-121756524
  hypo
caccaaaagcactaagcgagactactccaaa

SEQ ID NO: 1619 - DNA, 31 bp, Homo sapiens
  chr7:127693976-127694007
  hypo
gcccacacactggagccgctctgcaataaaa

SEQ ID NO: 1620 - DNA, 31 bp, Homo sapiens
  chr7:127694019-127694050
  hypo
aggtaatgggaatggccggtacagggggcag

SEQ ID NO: 1621 - DNA, 60 bp, Homo sapiens
  chr7:127694084-127694144
  hypo
tcccagcaccactgatcgccgctaaggccactgtcagtaagtcatcggcagtaccctggg

SEQ ID NO: 1622 - DNA, 31 bp, Homo sapiens
  chr7:127694179-127694210
  hypo
tggtcagatggagtggcggtggcatgtacac

SEQ ID NO: 1623 - DNA, 42 bp, Homo sapiens
  chr7:132637909-132637951
  hypo
agagtccttcactccacgtaactttccgcggccttactaagt

SEQ ID NO: 1624 - DNA, 57 bp, Homo sapiens
  chr7:132638056-132638113
  hypo
gtcacctgtctaccttcggggaggctctatttctccccacaacgaggctcctatgtc

SEQ ID NO: 1625 - DNA, 56 bp, Homo sapiens
  chr7:140027766-140027822
  hypo
gcagacctgggtcagccgggcacgtgaaacagtcacacctccgctgactgtgcaga

SEQ ID NO: 1626 - DNA, 31 bp, Homo sapiens
  chr7:140169421-140169452
  hypo
gcccatgtgggccaggcggggtggctcacgc

SEQ ID NO: 1627 - DNA, 31 bp, Homo sapiens
  chr7:149420319-149420350
  hypo
tgttgctttgcattgacgccaggcatgatgc

SEQ ID NO: 1628 - DNA, 57 bp, Homo sapiens
  chr7:149420374-149420431
  hypo
agcatggtggaggggccggggcacaggtcttggagtcagacccggagaggctcctga

SEQ ID NO: 1629 - DNA, 31 bp, Homo sapiens
  chr7:149420449-149420480
  hypo
ttcccactcacagggccgcagtgagcttagc

SEQ ID NO: 1630 - DNA, 31 bp, Homo sapiens
  chr7:150087538-150087569
  hypo
gacacagcacagccaccggtctcagattggt

SEQ ID NO: 1631 - DNA, 43 bp, Homo sapiens
  chr7:150100653-150100696
  hypo
cagtgttgatgtgctccgagtggaggcacgggtggggttggtc

SEQ ID NO: 1632 - DNA, 25 bp, Homo sapiens
  chr7:158556264-158556289
  hypo
tgtgagccaccgcacccagccagta

SEQ ID NO: 1633 - DNA, 31 bp, Homo sapiens
  chr7:158556328-158556359
  hypo
acacacctcttgaggacgggaggtcactgaa

SEQ ID NO: 1634 - DNA, 59 bp, Homo sapiens
  chr7:158556369-158556428
  hypo
cacagtaacagtctaccgtgcttgtttctagggatcctggattgcgtctcaatagatca

SEQ ID NO: 1635 - DNA, 64 bp, Homo sapiens
  chr8:1878064-1878128
  hypo
tgctgggtgccttagacgaggccctccctggcccatcccgcctggtccccgcagccgctggggg

SEQ ID NO: 1636 - DNA, 31 bp, Homo sapiens
  chr8:21969268-21969299
  hypo
ggcagctgagggaggacgggaggctagatag

SEQ ID NO: 1637 - DNA, 31 bp, Homo sapiens
  chr8:22871287-22871318
  hypo
cgtgagccaccgtgcccggccagttgtttgt

SEQ ID NO: 1638 - DNA, 56 bp, Homo sapiens; identical to SEQ ID NO: 1295
  chr8:28258794-28258850
  hypo

SEQ ID NO: 1639 - DNA, 31 bp, Homo sapiens
  chr8:134478324-134478355
  hypo
ctggagcctctgtgggcggaggacagaaggt

SEQ ID NO: 1640 - DNA, 31 bp, Homo sapiens
  chr8:134478399-134478430
  hypo
ctgagctacctgctgtcgtttactggggccc

SEQ ID NO: 1641 - DNA, 43 bp, Homo sapiens
  chr8:134478444-134478487
  hypo
ctctctgctgggcccccggagatggaggcggctcacacacaga

SEQ ID NO: 1642 - DNA, 31 bp, Homo sapiens
  chr8:134507967-134507998
  hypo
tgttcctgtcctatatcgtaacccatagcat

SEQ ID NO: 1643 - DNA, 31 bp, Homo sapiens
  chr8:141594931-141594962
  hypo
cagtatatacatttgtcgaaattcttccagt

SEQ ID NO: 1644 - DNA, 31 bp, Homo sapiens
  chr9:12910323-12910354
  hypo
attaacaaaaaatgtacgtatgctttattta

SEQ ID NO: 1645 - DNA, 45 bp, Homo sapiens
  chr9:14316249-14316294
  hypo
gtccgttttcaaagagcgctcttaatgaggcgagcttgccaagtt

SEQ ID NO: 1646 - DNA, 36 bp, Homo sapiens
  chr9:34276111-34276147
  hypo
ataatgaggctgggcacggtggctcacgcctataat

SEQ ID NO: 1647 - DNA, 2 bp, Homo sapiens
  chr9:37871178-37871180
  hypo
cc

SEQ ID NO: 1648 - DNA, 54 bp, Homo sapiens
  chr9:37871207-37871261
  hypo
caggcagtgaggtgggcgggtcacctgagcccaggaggtcgaggcagccttgat

SEQ ID NO: 1649 - DNA, 31 bp, Homo sapiens
  chr9:80015335-80015366
  hypo
ctgtttatttgcttatcgttttgccattcag

SEQ ID NO: 1650 - DNA, 31 bp, Homo sapiens
  chr9:95965599-95965630
  hypo
ttgggggcattggtggcgggtggtagcagag

SEQ ID NO: 1651 - DNA, 31 bp, Homo sapiens
  chr9:128908570-128908601
  hypo
ctcgcactcggtatcccgtgactcatgagag

SEQ ID NO: 1652 - DNA, 31 bp, Homo sapiens; identical to SEQ ID NO: 1299
  chr9:131843184-131843215
  hypo

SEQ ID NO: 1653 - DNA, 267 bp, Homo sapiens; identical to SEQ ID NO: 1300
  chr9:131843220-131843487
  hypo

SEQ ID NO: 1654 - DNA, 31 bp, Homo sapiens
  chr9:132821075-132821106
  hypo
tttcttttttgagcttcgttcattttgtgcc

SEQ ID NO: 1655 - DNA, 31 bp, Homo sapiens
  chr9:132821135-132821166
  hypo
ttgaatggtcttccagcgtgtggatatatct

SEQ ID NO: 1656 - DNA, 31 bp, Homo sapiens
  chr9:132821174-132821205
  hypo
ttagcagttcaccagtcgatggatgtttggg

SEQ ID NO: 1657 - DNA, 41 bp, Homo sapiens
  chr9:133606662-133606703
  hypo
gggttacagacgtgagccactgcgtccggctgctttttcac

SEQ ID NO: 1658 - DNA, 31 bp, Homo sapiens; identical to SEQ ID NO: 1305
  chr9:135037501-135037532
  hypo

SEQ ID NO: 1659 - DNA, 31 bp, Homo sapiens
  chr9:136568774-136568805
  hypo
agacaaccccccaccccgccacctgccctcc

SEQ ID NO: 1660 - DNA, 31 bp, Homo sapiens
  chr9:139417760-139417791
  hypo
gatcctcaggacctgccgtgagaccggtcgc

SEQ ID NO: 1661 - DNA, 31 bp, Homo sapiens
  chr9:139420230-139420261
  hypo
ggtgggggttcctgtgcgtttctcagcagcc

SEQ ID NO: 1662 - DNA, 31 bp, Homo sapiens
  chr9:139421469-139421500
  hypo
gaggttccgtgagacgcgctagctgggggga

SEQ ID NO: 1663 - DNA, 31 bp, Homo sapiens
  chr9:139429159-139429190
  hypo
tcacagactgtgattgcgaggaccccgatgg

SEQ ID NO: 1664 - DNA, 31 bp, Homo sapiens
  chr9:139687078-139687109
  hypo
aaggccacagcagccacgtgggcacccgaga

SEQ ID NO: 1665 - DNA, 31 bp, Homo sapiens
  chr9:139700525-139700556
  hypo
ccaggacatcactagccgcttcctggcccag

SEQ ID NO: 1666 - DNA, 31 bp, Homo sapiens
  chr9:140133735-140133766
  hypo
aggagactgtcagggccgacctgatggtgta

SEQ ID NO: 1667 - DNA, 31 bp, Homo sapiens
  chr9:140198309-140198340
  hypo
cttaaggagggggagccgctgggctgcctgc

SEQ ID NO: 1668 - DNA, 31 bp, Homo sapiens
  chr10:1166112-1166143
  hypo
gggtgatgagaaaggccgggatggagcttcg

SEQ ID NO: 1669 - DNA, 31 bp, Homo sapiens
  chr10:14735179-14735210
  hypo
atttaaggtatatggccgggcgcggtggctc

SEQ ID NO: 1670 - DNA, 68 bp, Homo sapiens; identical to SEQ ID NO: 1315
  chr10:23002244-23002312
  hypo

SEQ ID NO: 1671 - DNA, 31 bp, Homo sapiens
  chr10:32332318-32332349
  hypo
taagatgaagctgagacgcaaatgcaaatag

SEQ ID NO: 1672 - DNA, 5 bp, Homo sapiens
  chr10:32333608-32333613
  hypo
taaaa

SEQ ID NO: 1673 - DNA, 31 bp, Homo sapiens
  chr10:32333614-32333645
  hypo
aaaaaaaagaagacaacgacagaggacacaa

SEQ ID NO: 1674 - DNA, 31 bp, Homo sapiens
  chr10:52180039-52180070
  hypo
gttcactaccaataggcgtaacatgaaggct

SEQ ID NO: 1675 - DNA, 31 bp, Homo sapiens
  chr10:52180098-52180129
  hypo
tcctggttcaggcattcgtcccctctgcctg

SEQ ID NO: 1676 - DNA, 46 bp, Homo sapiens
  chr10:52180140-52180186
  hypo
ttgagtgtcttctagccgctgttccagcaggcgggcccctccctct

SEQ ID NO: 1677 - DNA, 31 bp, Homo sapiens
  chr10:52180218-52180249
  hypo
tgacaaatgtcaaagtcgagcatgccatcat

SEQ ID NO: 1678 - DNA, 35 bp, Homo sapiens
  chr10:70266165-70266200
  hypo
ctgtaccccagcctgggcagcgagactctgtctca

SEQ ID NO: 1679 - DNA, 31 bp, Homo sapiens
  chr10:76998105-76998136
  hypo
tgcatgcgtgccctttcggccctcctgggac

SEQ ID NO: 1680 - DNA, 31 bp, Homo sapiens
  chr10:81153953-81153984
  hypo
ggagtaaactgaggtccggtaagggaaaagt

SEQ ID NO: 1681 - DNA, 31 bp, Homo sapiens
  chr10:81921253-81921284
  hypo
gtgccctgccccccaccgtggccccacacct

SEQ ID NO: 1682 - DNA, 38 bp, Homo sapiens
  chr10:88200327-88200365
  hypo
ttacaggcgtgagccactgcgcccggccttttttcact

SEQ ID NO: 1683 - DNA, 37 bp, Homo sapiens; identical to SEQ ID NO: 1317
  chr10:103348787-103348824
  hypo

SEQ ID NO: 1684 - DNA, 31 bp, Homo sapiens; identical to SEQ ID NO: 1318
  chr10:103348850-103348881
  hypo

SEQ ID NO: 1685 - DNA, 35 bp, Homo sapiens; identical to SEQ ID NO: 1319
  chr10:103348955-103348990
  hypo

SEQ ID NO: 1686 - DNA, 31 bp, Homo sapiens
  chr10:126727934-126727965
  hypo
atgcacacaagacaatcgtcagttatttctg

SEQ ID NO: 1687 - DNA, 31 bp, Homo sapiens
  chr10:134747808-134747839
  hypo
gtgcttctgaaagcctcgggctcagcttcct

SEQ ID NO: 1688 - DNA, 31 bp, Homo sapiens
  chr11:1749038-1749069
  hypo
agtttctttgtgattgcgatgactctttagg

SEQ ID NO: 1689 - DNA, 31 bp, Homo sapiens
  chr11:1749131-1749162
  hypo
atcagtgtattaaactcgggttcctatttta

SEQ ID NO: 1690 - DNA, 47 bp, Homo sapiens
  chr11:1749204-1749251
  hypo
ctcaagttgtctctggcgtggccggtgggaagcgactcctgcgtgtt

SEQ ID NO: 1691 - DNA, 31 bp, Homo sapiens
  chr11:1829205-1829236
  hypo
gctgttcctcatcccccgtgagacttgggga

SEQ ID NO: 1692 - DNA, 31 bp, Homo sapiens
  chr11:12823850-12823881
  hypo
aatgtgtgtgggacttcgaaatatggaataa

SEQ ID NO: 1693 - DNA, 31 bp, Homo sapiens
  chr11:12823919-12823950
  hypo
cactttttttttaacccgaggaagttgaatc

SEQ ID NO: 1694 - DNA, 38 bp, Homo sapiens
  chr11:12824028-12824066
  hypo
gttccccccatctcaccgccgcccgacccttcacagat

SEQ ID NO: 1695 - DNA, 31 bp, Homo sapiens
  chr11:62532993-62533024
  hypo
tgattttatgactttacgatggtgtgaaagt

SEQ ID NO: 1696 - DNA, 31 bp, Homo sapiens
  chr11:62533029-62533060
  hypo
gcattcaatatgcccccgggcttacagtgaa

SEQ ID NO: 1697 - DNA, 54 bp, Homo sapiens
  chr11:64088214-64088268
  hypo
atgcctttgtgactggcgagtggggccgagcccacaaggcggaaggcaaggtga

SEQ ID NO: 1698 - DNA, 31 bp, Homo sapiens
  chr11:64088323-64088354
  hypo
actttctctgcaggttcggctcctggctgat

SEQ ID NO: 1699 - DNA, 52 bp, Homo sapiens
  chr11:64088376-64088428
  hypo
tgagtgttcccctgaccgccacagggacatggcagtgcggggagcagtgggg

SEQ ID NO: 1700 - DNA, 57 bp, Homo sapiens
  chr11:64088487-64088544
  hypo
ttattactagatgattcgctggtgtccatctttgggaatcgacgtctcaagaggtaa

SEQ ID NO: 1701 - DNA, 31 bp, Homo sapiens; identical to SEQ ID NO: 1322
  chr11:64512373-64512404
  hypo

SEQ ID NO: 1702 - DNA, 26 bp, Homo sapiens
  chr11:65258596-65258622
  hypo
gtgagccaccacgcccagcctggctt

SEQ ID NO: 1703 - DNA, 31 bp, Homo sapiens
  chr11:66266000-66266031
  hypo
ggacatcttttaagaacgaaggacatttttg

SEQ ID NO: 1704 - DNA, 31 bp, Homo sapiens
  chr11:66631858-66631889
  hypo
gtgggctcccagacagcgaggggacggcagg

SEQ ID NO: 1705 - DNA, 39 bp, Homo sapiens
  chr11:73643143-73643182
  hypo
gctgggatgacaggcgtgagccaccgtgcccagcccagt

SEQ ID NO: 1706 - DNA, 31 bp, Homo sapiens
  chr11:113712909-113712940
  hypo
aaaagtgaaactcacacgtgatacaaaatac

SEQ ID NO: 1707 - DNA, 31 bp, Homo sapiens; identical to SEQ ID NO: 1323
  chr11:119187862-119187893
  hypo

SEQ ID NO: 1708 - DNA, 42 bp, Homo sapiens
  chr11:129859712-129859754
  hypo
aaacagtgtaactactcgttcactctacgactcctgaaacat

SEQ ID NO: 1709 - DNA, 9 bp, Homo sapiens
  chr11:129859802-129859811
  hypo
agaagaaaa

SEQ ID NO: 1710 - DNA, 38 bp, Homo sapiens
  chr12:1411785-1411823
  hypo
gcatattgtaataaggcgagtcacgcaaatttattggt

SEQ ID NO: 1711 - DNA, 31 bp, Homo sapiens
  chr12:1411854-1411885
  hypo
agggtggaatgggtcacgcctgtaatcccag

SEQ ID NO: 1712 - DNA, 17 bp, Homo sapiens
  chr12:1840272-1840289
  hypo
ctggagtgcagtgatgc

SEQ ID NO: 1713 - DNA, 54 bp, Homo sapiens
  chr12:1840408-1840462
  hypo
atcttattatgttgtctaggctggtctcgaactttctcccgcttcagcctccca

SEQ ID NO: 1714 - DNA, 24 bp, Homo sapiens
  chr12:1840505-1840529
  hypo
attgtgggaaaatacacgtaacat

SEQ ID NO: 1715 - DNA, 31 bp, Homo sapiens
  chr12:1840705-1840736
  hypo
ctattacactttctgacgctatcagtttgcc

SEQ ID NO: 1716 - DNA, 31 bp, Homo sapiens
  chr12:6623436-6623467
  hypo
tactggctgttgctaccgccttctggagaat

SEQ ID NO: 1717 - DNA, 31 bp, Homo sapiens
  chr12:6876862-6876893
  hypo
ggagaggggctgtgtgcgatctgccaaggtg

SEQ ID NO: 1718 - DNA, 37 bp, Homo sapiens
  chr12:8423885-8423922
  hypo
gtctcaaaaacaaaacaaaaaacggatgctatgtccc

SEQ ID NO: 1719 - DNA, 31 bp, Homo sapiens
  chr12:10317434-10317465
  hypo
tctgagtccctttagacggctaaaattaact

SEQ ID NO: 1720 - DNA, 31 bp, Homo sapiens
  chr12:13057640-13057671
  hypo
acactatacataatatcgtgataatatatat

SEQ ID NO: 1721 - DNA, 56 bp, Homo sapiens
  chr12:16150421-16150477
  hypo
tgctcagcaaggtgttcggtaaaaatacttgagttagggggcgttcttgaaatcat

SEQ ID NO: 1722 - DNA, 37 bp, Homo sapiens
  chr12:16150488-16150525
  hypo
gcagtcatgactttaacggaatcgtatgcaaaagagt

SEQ ID NO: 1723 - DNA, 31 bp, Homo sapiens
  chr12:16150587-16150618
  hypo
tctttttaaattttaacgtggctctaaaaaa

SEQ ID NO: 1724 - DNA, 31 bp, Homo sapiens
  chr12:31382410-31382441
  hypo
cccacccagaagaagacggaggattctagtt

SEQ ID NO: 1725 - DNA, 51 bp, Homo sapiens
  chr12:32864282-32864333
  hypo
tttatggctttaactacgtaaggctctgtatattgacggcattcaaatatc

SEQ ID NO: 1726 - DNA, 31 bp, Homo sapiens
  chr12:32864344-32864375
  hypo
atatctagttgctattcgacatatacactta

SEQ ID NO: 1727 - DNA, 31 bp, Homo sapiens
  chr12:32864390-32864421
  hypo
tttcaaactctaataccgaattcctgacctg

SEQ ID NO: 1728 - DNA, 31 bp, Homo sapiens
  chr12:32864445-32864476
  hypo
tatagtcttcccccatcgcaataaatggcaa

SEQ ID NO: 1729 - DNA, 5 bp, Homo sapiens
  chr12:42857518-42857523
  hypo
cctca

SEQ ID NO: 1730 - DNA, 31 bp, Homo sapiens
  chr12:42857577-42857608
  hypo
tacagaataattcaagcgtacaatatctttc

SEQ ID NO: 1731 - DNA, 31 bp, Homo sapiens
  chr12:54813173-54813204
  hypo
gggcgtggggggggggcgcacccctccaacc

SEQ ID NO: 1732 - DNA, 17 bp, Homo sapiens
  chr12:57063685-57063702
  hypo
cccggccaaaagtttat

SEQ ID NO: 1733 - DNA, 31 bp, Homo sapiens
  chr12:60507736-60507767
  hypo
tgtctagtttcatgaacgaggcttctggtga

SEQ ID NO: 1734 - DNA, 31 bp, Homo sapiens
  chr12:60507784-60507815
  hypo
tatttactttgaaatacgcttcactaattag

SEQ ID NO: 1735 - DNA, 75 bp, Homo sapiens
  chr12:60507859-60507934
  hypo
aaaccacccacttatccgtaagctgtgcccggcaacctaaggatttagatataaacataacggtgaattgtggga

SEQ ID NO: 1736 - DNA, 23 bp, Homo sapiens
  chr12:62898313-62898336
  hypo
accgcacccggcctgtttttatg

SEQ ID NO: 1737 - DNA, 31 bp, Homo sapiens
  chr12:68646672-68646703
  hypo
gacatgtgccccatcccgtctccccagagca

SEQ ID NO: 1738 - DNA, 31 bp, Homo sapiens
  chr12:93797480-93797511
  hypo
caattttatttgtagacgtgatttcccccac

SEQ ID NO: 1739 - DNA, 31 bp, Homo sapiens
  chr12:110378986-110379017
  hypo
aaattcactatgaactcgtgcatcctgaagc

SEQ ID NO: 1740 - DNA, 31 bp, Homo sapiens
  chr12:110379030-110379061
  hypo
ctggcaaatgattaaacgttagcttggagcc

SEQ ID NO: 1741 - DNA, 31 bp, Homo sapiens
  chr12:112288206-112288237
  hypo
agactctaatatttttcgagaaaaagtcatt

SEQ ID NO: 1742 - DNA, 31 bp, Homo sapiens
  chr12:120117937-120117968
  hypo
ggttctgaagctggcccgggaatttgtggtt

SEQ ID NO: 1743 - DNA, 59 bp, Homo sapiens
  chr12:121166588-121166647
  hypo
cgtgagccaccacacccggccttaaaaatgagttttaaaagggacgtaaaacattgttt

SEQ ID NO: 1744 - DNA, 31 bp, Homo sapiens
  chr12:121166652-121166683
  hypo
tgagggacccactaaccgtttcccagatatg

SEQ ID NO: 1745 - DNA, 31 bp, Homo sapiens
  chr12:121203844-121203875
  hypo
tctgtcagtggctgcacgaatctggaagcgt

SEQ ID NO: 1746 - DNA, 31 bp, Homo sapiens; identical to SEQ ID NO: 1328
  chr12:130136921-130136952
  hypo

SEQ ID NO: 1747 - DNA, 60 bp, Homo sapiens
  chr12:133220202-133220262
  hypo
ccacgtgacttctgcccgggatgtggctgtgcccctgcagctgcccggcccactgcccaa

SEQ ID NO: 1748 - DNA, 82 bp, Homo sapiens
  chr12:133225890-133225972
  hypo
cctgcacaatctgccacggaaggtccaggatgctgcgggcagttcttcgcaagaagctccccagccccgtggcaggaccatc

SEQ ID NO: 1749 - DNA, 31 bp, Homo sapiens
  chr12:133226137-133226168
  hypo
gtgagatgggaatgcccgccatgactttctc

SEQ ID NO: 1750 - DNA, 31 bp, Homo sapiens
  chr13:21597467-21597498
  hypo
acactgggaccacaggcgctcgccccctctc

SEQ ID NO: 1751 - DNA, 31 bp, Homo sapiens; identical to SEQ ID NO: 1332
  chr13:22553926-22553957
  hypo

SEQ ID NO: 1752 - DNA, 31 bp, Homo sapiens
  chr13:28777902-28777933
  hypo
ttgtttagtgagaaagcgtctctgcttttct

SEQ ID NO: 1753 - DNA, 31 bp, Homo sapiens
  chr13:29241509-29241540
  hypo
gccacatagcaagacccgtctcttagaataa

SEQ ID NO: 1754 - DNA, 31 bp, Homo sapiens
  chr13:29920652-29920683
  hypo
cccatacagccagcaacgccagtctcactcc

SEQ ID NO: 1755 - DNA, 31 bp, Homo sapiens
  chr13:29920688-29920719
  hypo
tgtccccccaacagcacgagagggacatgcc

SEQ ID NO: 1756 - DNA, 59 bp, Homo sapiens
  chr13:29920738-29920797
  hypo
gctgagaaaggtttcacgtctccccacctgcagcagcttctgtgcgcctgtctgtactc

SEQ ID NO: 1757 - DNA, 31 bp, Homo sapiens
  chr13:29920826-29920857
  hypo
aggaaactgcacaaatcgtttcaaagttcag

SEQ ID NO: 1758 - DNA, 31 bp, Homo sapiens
  chr13:46037987-46038018
  hypo
atggtcaaaattgctacgaagctgtttccac

SEQ ID NO: 1759 - DNA, 37 bp, Homo sapiens
  chr13:49848523-49848560
  hypo
aacatagttcagtcttcggtgcattacaggttactga

SEQ ID NO: 1760 - DNA, 31 bp, Homo sapiens
  chr13:52732303-52732334
  hypo
gtccggccctagtgttcgttttttaattaca

SEQ ID NO: 1761 - DNA, 31 bp, Homo sapiens
  chr13:70989770-70989801
  hypo
ggcaaagtaaaatcaacgttgttaaagaagc

SEQ ID NO: 1762 - DNA, 31 bp, Homo sapiens
  chr13:96061945-96061976
  hypo
ttaaaataagtaacttcgtcttagatagcac

SEQ ID NO: 1763 - DNA, 31 bp, Homo sapiens
  chr13:96062052-96062083
  hypo
cactccttaaaggcaacgtctgtcctaggcc

SEQ ID NO: 1764 - DNA, 52 bp, Homo sapiens
  chr13:96062103-96062155
  hypo
tggacagggctgtacccgtcgtttcctcttcttcacccgagcatccccagcc

SEQ ID NO: 1765 - DNA, 44 bp, Homo sapiens
  chr13:98917860-98917904
  hypo
ccgcgcccagcccttcctgaatttatatacgacatgtgagatca

SEQ ID NO: 1766 - DNA, 31 bp, Homo sapiens
  chr13:114190125-114190156
  hypo
ttcgctgtgtctgtatcggcacctgagtggg

SEQ ID NO: 1767 - DNA, 66 bp, Homo sapiens
  chr13:114190168-114190234
  hypo
ggatggggatggcattcgctgtgtttgctgtgtctatatcggcacctgagtcggggtctggggagg

SEQ ID NO: 1768 - DNA, 49 bp, Homo sapiens
  chr13:114190238-114190287
  hypo
ggggatggatggcactcgctgtctttgctgtgtccgtatcagcacctga

SEQ ID NO: 1769 - DNA, 28 bp, Homo sapiens
  chr14:23469629-23469657
  hypo
aaaggagaggaggagccgggcatggtgg

SEQ ID NO: 1770 - DNA, 31 bp, Homo sapiens
  chr14:23470948-23470979
  hypo
caggtgtgagccactgcgcccagctccttct

SEQ ID NO: 1771 - DNA, 27 bp, Homo sapiens
  chr14:34918991-34919018
  hypo
agccaccacacccgacctaggcattgg

SEQ ID NO: 1772 - DNA, 31 bp, Homo sapiens
  chr14:55772519-55772550
  hypo
tcccccacatttctcccggttactgcaagta

SEQ ID NO: 1773 - DNA, 31 bp, Homo sapiens
  chr14:59706174-59706205
  hypo
tcagttttattcaccacgctcttacctagtc

SEQ ID NO: 1774 - DNA, 31 bp, Homo sapiens
  chr14:59961996-59962027
  hypo
attatagattttatggcgtttggagacaaaa

SEQ ID NO: 1775 - DNA, 31 bp, Homo sapiens
  chr14:59962043-59962074
  hypo
gttctgggtctgccagcggctttattacctt

SEQ ID NO: 1776 - DNA, 27 bp, Homo sapiens
  chr14:64955675-64955702
  hypo
tgaaatcagcagggtgcggtggctcac

SEQ ID NO: 1777 - DNA, 31 bp, Homo sapiens
  chr14:69666739-69666770
  hypo
acgcattgtgcagcaacgttaggacggttag

SEQ ID NO: 1778 - DNA, 31 bp, Homo sapiens
  chr14:69666848-69666879
  hypo
gtcatctgttgttgaccgaaacattgttata

SEQ ID NO: 1779 - DNA, 31 bp, Homo sapiens
  chr14:74113148-74113179
  hypo
tttaaacatagaaaagcggccagggtgtggt

SEQ ID NO: 1780 - DNA, 29 bp, Homo sapiens
  chr14:74113213-74113242
  hypo
cagcactttgtgaggccgaggcgggcaga

SEQ ID NO: 1781 - DNA, 31 bp, Homo sapiens
  chr14:77935682-77935713
  hypo
gctgctaacttggggccggggcccctccctt

SEQ ID NO: 1782 - DNA, 31 bp, Homo sapiens; identical to SEQ ID NO: 1346
  chr14:100437405-100437436
  hypo

SEQ ID NO: 1783 - DNA, 35 bp, Homo sapiens
  chr14:100754245-100754280
  hypo
ctggctcagtggctcacggccgtggtctctcccac

SEQ ID NO: 1784 - DNA, 31 bp, Homo sapiens
  chr14:102360719-102360750
  hypo
agggctttgtctgtaccgtgggtccttgtct

SEQ ID NO: 1785 - DNA, 31 bp, Homo sapiens
  chr14:102360754-102360785
  hypo
gtgggaaggtgtttaacgatgattctagaag

SEQ ID NO: 1786 - DNA, 57 bp, Homo sapiens
  chr14:102360873-102360930
  hypo
aaggacagcaccctcacggaaccagtaagtactgatgctagcgcgtcttgtaagatg

SEQ ID NO: 1787 - DNA, 31 bp, Homo sapiens
  chr14:105603443-105603474
  hypo
gaaagccattttgtgccgcactttgatcacg

SEQ ID NO: 1788 - DNA, 31 bp, Homo sapiens
  chr15:28365195-28365226
  hypo
cgcgggggttagacaacgcagaagccatcag

SEQ ID NO: 1789 - DNA, 31 bp, Homo sapiens; identical to SEQ ID NO: 1347
  chr15:29107370-29107401
  hypo

SEQ ID NO: 1790 - DNA, 31 bp, Homo sapiens
  chr15:59847661-59847692
  hypo
cagcagcaaacaaaaccgaccatccctgccc

SEQ ID NO: 1791 - DNA, 31 bp, Homo sapiens; identical to SEQ ID NO: 1348
  chr15:63130455-63130486
  hypo

SEQ ID NO: 1792 - DNA, 31 bp, Homo sapiens
  chr15:75221152-75221183
  hypo
tttggttgtcatgatacgaatgtgtgcatac

SEQ ID NO: 1793 - DNA, 37 bp, Homo sapiens
  chr15:75726681-75726718
  hypo
cactagtaataaaaaacgtgtaaagtaggccgggcgc

SEQ ID NO: 1794 - DNA, 31 bp, Homo sapiens
  chr16:4641210-4641241
  hypo
aataaataaataaatacgattgattatgatg

SEQ ID NO: 1795 - DNA, 31 bp, Homo sapiens
  chr16:4878735-4878766
  hypo
gtgaacctaggaggcacgtactgttgtaatt

SEQ ID NO: 1796 - DNA, 31 bp, Homo sapiens
  chr16:9019562-9019593
  hypo
tagtgcactgcacactcgatttcagcctcac

SEQ ID NO: 1797 - DNA, 31 bp, Homo sapiens
  chr16:9020778-9020809
  hypo
acaattacctacagcacgaagttcccactgt

SEQ ID NO: 1798 - DNA, 31 bp, Homo sapiens
  chr16:14763026-14763057
  hypo
gttgcatctggaagttcgaagaaattacttg

SEQ ID NO: 1799 - DNA, 24 bp, Homo sapiens
  chr16:14763155-14763179
  hypo
ctagccatgggccgagcgtggtgg

SEQ ID NO: 1800 - DNA, 4 bp, Homo sapiens
  chr16:23689248-23689252
  hypo
ccag

SEQ ID NO: 1801 - DNA, 31 bp, Homo sapiens
  chr16:28128820-28128851
  hypo
ggtgaaaatatattagcgttcaactcatttt

SEQ ID NO: 1802 - DNA, 25 bp, Homo sapiens
  chr16:28344914-28344939
  hypo
gaccctgtctcgaaaaaaaaaaaaa

SEQ ID NO: 1803 - DNA, 42 bp, Homo sapiens
  chr16:66781397-66781439
  hypo
gccctcattatataatcgcccatacatcgtaatctttactgt

SEQ ID NO: 1804 - DNA, 31 bp, Homo sapiens; identical to SEQ ID NO: 1355
  chr16:67571883-67571914
  hypo

SEQ ID NO: 1805 - DNA, 31 bp, Homo sapiens
  chr16:67709088-67709119
  hypo
aggttctggttggtgtcgggctcctccgtca

SEQ ID NO: 1806 - DNA, 159 bp, Homo sapiens
  chr16:67709127-67709286
  hypo
acagcctcccactccccggatcggctcgacctcttgatggcatccaccacgctctgcatgtacagcccatcctcgaaggaggcggccatggagacaggggtgcggtcccaggtgcggcggtcgccctgcccctggaaggactggcgcaaggcctgcacc

SEQ ID NO: 1807 - DNA, 31 bp, Homo sapiens
  chr16:67709299-67709330
  hypo
ccttcaggtacagcagcgggacatcctgggg

SEQ ID NO: 1808 - DNA, 44 bp, Homo sapiens
  chr16:67709334-67709378
  hypo
tgctcaggcagtcctgcgcccactgccagcgagtccctcaagag

SEQ ID NO: 1809 - DNA, 27 bp, Homo sapiens
  chr16:71716784-71716811
  hypo
gtcattcatggctaggcgtggtggctc

SEQ ID NO: 1810 - DNA, 31 bp, Homo sapiens
  chr16:73232149-73232180
  hypo
tgaagaatcatgtcaccgttatcacaaagac

SEQ ID NO: 1811 - DNA, 34 bp, Homo sapiens
  chr16:78159168-78159202
  hypo
tcatacaggtcttgggcggcgggtgcctgcagga

SEQ ID NO: 1812 - DNA, 31 bp, Homo sapiens
  chr16:81453687-81453718
  hypo
ttctcaccgttttggtcgaaggtgtgggcag

SEQ ID NO: 1813 - DNA, 31 bp, Homo sapiens
  chr16:82054048-82054079
  hypo
cacccgttcctgcattcgacaagcatttatg

SEQ ID NO: 1814 - DNA, 39 bp, Homo sapiens
  chr16:88683896-88683935
  hypo
gctcaccgccgaggcacgtcattacgatgctctttggct

SEQ ID NO: 1815 - DNA, 31 bp, Homo sapiens
  chr16:88712307-88712338
  hypo
atgcaaggaaatgacccgacacactagacac

SEQ ID NO: 1816 - DNA, 46 bp, Homo sapiens
  chr16:89697116-89697162
  hypo
ccggggctgggggtgccggggctgggggtgccggggctgggggagt

SEQ ID NO: 1817 - DNA, 31 bp, Homo sapiens
  chr16:89697188-89697219
  hypo
agctgggggtgagactcgtgtgtgcttggct

SEQ ID NO: 1818 - DNA, 31 bp, Homo sapiens
  chr16:89697232-89697263
  hypo
ctctgggggtgagactcgtgtgcccttgggt

SEQ ID NO: 1819 - DNA, 50 bp, Homo sapiens
  chr17:591790-591840
  hypo
attgttaaacagttaacggacattttatgagtccccgcctcaactacaac

SEQ ID NO: 1820 - DNA, 31 bp, Homo sapiens
  chr17:1112805-1112836
  hypo
ggtgattcacctgtctcggcctcccagtgag

SEQ ID NO: 1821 - DNA, 150 bp, Homo sapiens
  chr17:1412247-1412397
  hypo
agcgtggggcagagggcggggaacagtctgcagacccaggctcactcgtggcggtcagcgtggggcagagggcggggaacagtctgcagacccaggctcactcgtgggggtcagcgtggggcagagggcggggagcggtctgcagaccca

SEQ ID NO: 1822 - DNA, 31 bp, Homo sapiens
  chr17:3576583-3576614
  hypo
ggcaggtcccagaaagcgtctgccatctccc

SEQ ID NO: 1823 - DNA, 11 bp, Homo sapiens
  chr17:5317809-5317820
  hypo
aggccctgaag

SEQ ID NO: 1824 - DNA, 31 bp, Homo sapiens
  chr17:26874434-26874465
  hypo
agaggcccagccaggccgggcaaaggtcagg

SEQ ID NO: 1825 - DNA, 27 bp, Homo sapiens
  chr17:27686897-27686924
  hypo
tgggcaacagagcgagactgtctcaaa

SEQ ID NO: 1826 - DNA, 44 bp, Homo sapiens; identical to SEQ ID NO: 1364
  chr17:56429351-56429395
  hypo

SEQ ID NO: 1827 - DNA, 226 bp, Homo sapiens; identical to SEQ ID NO: 1365
  chr17:56429401-56429627
  hypo

SEQ ID NO: 1828 - DNA, 54 bp, Homo sapiens; identical to SEQ ID NO: 1366
  chr17:56429652-56429706
  hypo

SEQ ID NO: 1829 - DNA, 80 bp, Homo sapiens; identical to SEQ ID NO: 1367
  chr17:56429779-56429859
  hypo

SEQ ID NO: 1830 - DNA, 88 bp, Homo sapiens; identical to SEQ ID NO: 1368
  chr17:56429861-56429949
  hypo

SEQ ID NO: 1831 - DNA, 31 bp, Homo sapiens; identical to SEQ ID NO: 1369
  chr17:56429980-56430011
  hypo

SEQ ID NO: 1832 - DNA, 31 bp, Homo sapiens
  chr17:56906694-56906725
  hypo
gcctggcccgtgtttacgttttctttattgt

SEQ ID NO: 1833 - DNA, 20 bp, Homo sapiens
  chr17:57768696-57768716
  hypo
ccattatggctgggtgcggt

SEQ ID NO: 1834 - DNA, 33 bp, Homo sapiens
  chr17:60084914-60084947
  hypo
tgagttagaccttggccgggcgtggtggttcac

SEQ ID NO: 1835 - DNA, 31 bp, Homo sapiens
  chr17:61447304-61447335
  hypo
caaaaaaaagaccaagcgcttttgagtatca

SEQ ID NO: 1836 - DNA, 31 bp, Homo sapiens
  chr17:62783043-62783074
  hypo
gggtactgaggtcactcggggcttatgggat

SEQ ID NO: 1837 - DNA, 38 bp, Homo sapiens
  chr17:73830727-73830765
  hypo
ggcctgaagagagctcgcgggcccgggcctttataagg

SEQ ID NO: 1838 - DNA, 31 bp, Homo sapiens
  chr17:73830770-73830801
  hypo
gtacaccagggccaggcgacaggtgtcctag

SEQ ID NO: 1839 - DNA, 31 bp, Homo sapiens
  chr17:73830862-73830893
  hypo
ggcatgggaatttcagcgacttgggggattt

SEQ ID NO: 1840 - DNA, 31 bp, Homo sapiens
  chr17:76994831-76994862
  hypo
ctcccggtgcttcgatcgagaacactggccc

SEQ ID NO: 1841 - DNA, 31 bp, Homo sapiens
  chr17:78611563-78611594
  hypo
tgtcatcccaagggaacgtttgggaggtctt

SEQ ID NO: 1842 - DNA, 62 bp, Homo sapiens
  chr17:80030811-80030873
  hypo
agtttccttgagccctcggtgacatacatttccttgttccttgttgacgtatattttacagc

SEQ ID NO: 1843 - DNA, 29 bp, Homo sapiens
  chr17:80030920-80030949
  hypo
tgcagtcatggttcaccgcagccttgacc

SEQ ID NO: 1844 - DNA, 31 bp, Homo sapiens; identical to SEQ ID NO: 1372
  chr17:80156992-80157023
  hypo

SEQ ID NO: 1845 - DNA, 31 bp, Homo sapiens
  chr17:80773303-80773334
  hypo
atgaggctcacgccagcgtgaaaccagggtg

SEQ ID NO: 1846 - DNA, 41 bp, Homo sapiens
  chr17:80773427-80773468
  hypo
agaccagctcttgtgccgtggccacacgcagccctgtctgt

SEQ ID NO: 1847 - DNA, 31 bp, Homo sapiens
  chr18:10078821-10078852
  hypo
gataagcatccataggcgatttcatcattgt

SEQ ID NO: 1848 - DNA, 26 bp, Homo sapiens
  chr18:19267459-19267485
  hypo
ccacacccagccgcctctgttaaact

SEQ ID NO: 1849 - DNA, 31 bp, Homo sapiens
  chr18:61261736-61261767
  hypo
gcccttagtttattttcgtgatgtgcttaca

SEQ ID NO: 1850 - DNA, 31 bp, Homo sapiens
  chr18:77713636-77713667
  hypo
cctgtaaatattacctcgtatgggaaaacaa

SEQ ID NO: 1851 - DNA, 31 bp, Homo sapiens
  chr19:1213488-1213519
  hypo
tcctgaacatttcacacgagtggtgtcacac

SEQ ID NO: 1852 - DNA, 55 bp, Homo sapiens; identical to SEQ ID NO: 1376
  chr19:1546216-1546271
  hypo

SEQ ID NO: 1853 - DNA, 69 bp, Homo sapiens; identical to SEQ ID NO: 1377
  chr19:1546276-1546345
  hypo

SEQ ID NO: 1854 - DNA, 17 bp, Homo sapiens
  chr19:1899115-1899132
  hypo
tccgtctcaaaacaaac

SEQ ID NO: 1855 - DNA, 31 bp, Homo sapiens
  chr19:2339722-2339753
  hypo
cccgggttttctgccccgttcccccgggtgg

SEQ ID NO: 1856 - DNA, 56 bp, Homo sapiens
  chr19:2812072-2812128
  hypo
tccgtgtcttcccatacgagtccttccgggatctgcgtgatcggcctcagagccat

SEQ ID NO: 1857 - DNA, 31 bp, Homo sapiens
  chr19:2812147-2812178
  hypo
tctggagaaggcttggcgtttgccattcatt

SEQ ID NO: 1858 - DNA, 62 bp, Homo sapiens
  chr19:2812198-2812260
  hypo
tcctcactatgaagtgcggccgttacgccatgtgagcctgtgcctcccgctgacttggtgtg

SEQ ID NO: 1859 - DNA, 67 bp, Homo sapiens
  chr19:3577590-3577657
  hypo
tcaccccacctccccacgcccccgtcacccatccctccccacgccccgctgacgcctgagccccctc

SEQ ID NO: 1860 - DNA, 54 bp, Homo sapiens
  chr19:4962294-4962348
  hypo
gagacccaggagatgacggtgacgggctgaggtcctaaccgcagcctgggaggt

SEQ ID NO: 1861 - DNA, 55 bp, Homo sapiens
  chr19:4962353-4962408
  hypo
gctgttcactttgcagcgtcaagttgcaggggtcagcaaacgacagccaatggga

SEQ ID NO: 1862 - DNA, 72 bp, Homo sapiens
  chr19:5925830-5925902
  hypo
gctgcatggagctgctcggagccatgaaccctctcctgtacccgcctgtgtgtgtgcgcgtgcatgtgctgg

SEQ ID NO: 1863 - DNA, 66 bp, Homo sapiens
  chr19:5925990-5926056
  hypo
ccttgttacaaaaccacgccttgttataaaaccacgcctaagctggcctctcggtcaatgcttcat

SEQ ID NO: 1864 - DNA, 176 bp, Homo sapiens
  chr19:7493829-7494005
  hypo
ggaggtcaaggtgcagcgaggctgtgcaataaagtcgggagtgtggtgagctgtaaaggaagcccgcaggcctaggccacgggcccgagggcaggggcacgccatgcagaaggactctgacccggccccacagctggccagataagagagacgccttgagtcgaggggccgggggc

SEQ ID NO: 1865 - DNA, 36 bp, Homo sapiens; identical to SEQ ID NO: 1381
  chr19:8274334-8274370
  hypo

SEQ ID NO: 1866 - DNA, 49 bp, Homo sapiens; identical to SEQ ID NO: 1382
  chr19:8274395-8274444
  hypo

SEQ ID NO: 1867 - DNA, 49 bp, Homo sapiens
  chr19:16235971-16236020
  hypo
catgaggggagccagccgggcttgtcagcgagtgcgtggcaggggctgg

SEQ ID NO: 1868 - DNA, 36 bp, Homo sapiens
  chr19:16236030-16236066
  hypo
agaagggtcacctcagcggcccggggggcaggacaa

SEQ ID NO: 1869 - DNA, 31 bp, Homo sapiens
  chr19:17430595-17430626
  hypo
ccaacctcataggagccgatgtatttatttt

SEQ ID NO: 1870 - DNA, 31 bp, Homo sapiens
  chr19:19040158-19040189
  hypo
cagtccctttccaggacgaatgggcccaact

SEQ ID NO: 1871 - DNA, 31 bp, Homo sapiens
  chr19:39306256-39306287
  hypo
agcttggagaaggtgacggttttcagttcct

SEQ ID NO: 1872 - DNA, 31 bp, Homo sapiens
  chr19:39306628-39306659
  hypo
tttgtctgggaacacccggctgcagtgaaag

SEQ ID NO: 1873 - DNA, 31 bp, Homo sapiens
  chr19:40015706-40015737
  hypo
aaaaaaactttgtgcacgcaggcccagatag

SEQ ID NO: 1874 - DNA, 31 bp, Homo sapiens
  chr19:40015744-40015775
  hypo
agctaggaatactctgcgtatcaccacaaat

SEQ ID NO: 1875 - DNA, 31 bp, Homo sapiens
  chr19:40015804-40015835
  hypo
ctccacagggagaggacgtggaaactgtgca

SEQ ID NO: 1876 - DNA, 31 bp, Homo sapiens
  chr19:40015838-40015869
  hypo
ggaccatcccagacctcgccatgtgtgtgtt

SEQ ID NO: 1877 - DNA, 31 bp, Homo sapiens
  chr19:47384471-47384502
  hypo
taggcgtgagccactgcgtccagctcaagtg

SEQ ID NO: 1878 - DNA, 31 bp, Homo sapiens; identical to SEQ ID NO: 1399
  chr19:47778088-47778119
  hypo

SEQ ID NO: 1879 - DNA, 31 bp, Homo sapiens
  chr19:50223822-50223853
  hypo
aaatgcatgcttatgacgcttatttcactgt

SEQ ID NO: 1880 - DNA, 31 bp, Homo sapiens
  chr19:50914693-50914724
  hypo
tcttttctctctcagccgcttccctctgtca

SEQ ID NO: 1881 - DNA, 51 bp, Homo sapiens; identical to SEQ ID NO: 1411
  chr19:57831881-57831932
  hypo

SEQ ID NO: 1882 - DNA, 51 bp, Homo sapiens; identical to SEQ ID NO: 1412
  chr19:57831935-57831986
  hypo

SEQ ID NO: 1883 - DNA, 189 bp, Homo sapiens; identical to SEQ ID NO: 1413
  chr19:57832024-57832213
  hypo

SEQ ID NO: 1884 - DNA, 31 bp, Homo sapiens
  chr19:58416014-58416045
  hypo
acggattttgtaatctcgtaactttccaagc

SEQ ID NO: 1885 - DNA, 58 bp, Homo sapiens; identical to SEQ ID NO: 1422
  chr20:3451571-3451629
  hypo

SEQ ID NO: 1886 - DNA, 113 bp, Homo sapiens; identical to SEQ ID NO: 1423
  chr20:3451672-3451785
  hypo

SEQ ID NO: 1887 - DNA, 35 bp, Homo sapiens
  chr20:5734497-5734532
  hypo
ccaaatgggggagatccgttcggaacccccctccc

SEQ ID NO: 1888 - DNA, 31 bp, Homo sapiens
  chr20:5734586-5734617
  hypo
actccttgtgtgttagcgtctttgatttcct

SEQ ID NO: 1889 - DNA, 47 bp, Homo sapiens
  chr20:5734631-5734678
  hypo
gaaccttgggtattaccgcagacaaacgacgccgcttcagaagtgct

SEQ ID NO: 1890 - DNA, 39 bp, Homo sapiens; identical to SEQ ID NO: 1425
  chr20:21378678-21378717
  hypo

SEQ ID NO: 1891 - DNA, 31 bp, Homo sapiens; identical to SEQ ID NO: 1426
  chr20:24564177-24564208
  hypo

SEQ ID NO: 1892 - DNA, 38 bp, Homo sapiens
  chr20:24950216-24950254
  hypo
acagctggactccattcgggaaccgcagctggtccaat

SEQ ID NO: 1893 - DNA, 31 bp, Homo sapiens
  chr20:31547891-31547922
  hypo
gtataagcccaaggaacgcttgcagaatacc

SEQ ID NO: 1894 - DNA, 31 bp, Homo sapiens
  chr20:32413014-32413045
  hypo
ttgtacttttaatacccgttaattgagaaga

SEQ ID NO: 1895 - DNA, 79 bp, Homo sapiens
  chr20:32413051-32413130
  hypo
attaattcccttcaaccgatattcactatatacccaccgtctttcttccctaggattgtgtctgcgtaaatggtagatg

SEQ ID NO: 1896 - DNA, 31 bp, Homo sapiens
  chr20:32413198-32413229
  hypo
gggcacattcacagagcgctggagtgaccac

SEQ ID NO: 1897 - DNA, 18 bp, Homo sapiens
  chr20:42998544-42998562
  hypo
gcccggccctgggctctt

SEQ ID NO: 1898 - DNA, 35 bp, Homo sapiens; identical to SEQ ID NO: 1428
  chr20:44937332-44937367
  hypo

SEQ ID NO: 1899 - DNA, 41 bp, Homo sapiens
  chr20:45880360-45880401
  hypo
gaaaactctttatacccgtctctgtccggcaagaaatctga

SEQ ID NO: 1900 - DNA, 31 bp, Homo sapiens
  chr20:57009362-57009393
  hypo
ctgtagcagacatttacggtaggcttgcagt

SEQ ID NO: 1901 - DNA, 56 bp, Homo sapiens
  chr20:57009418-57009474
  hypo
cagaagactgggtcctcggccttattcccagctctgtcatgcgtgattttgtggct

SEQ ID NO: 1902 - DNA, 58 bp, Homo sapiens
  chr20:57009517-57009575
  hypo
cttacttcaccaggggcgtccatcctaagacataagagaatgccggtaaattgcttta

SEQ ID NO: 1903 - DNA, 31 bp, Homo sapiens
  chr20:60893765-60893796
  hypo
gtctccacttggtgcccgccagatccatctg

SEQ ID NO: 1904 - DNA, 39 bp, Homo sapiens
  chr20:61470100-61470139
  hypo
caggggccccaaggtacgagtccacggccagcaaggctt

SEQ ID NO: 1905 - DNA, 31 bp, Homo sapiens; identical to SEQ ID NO: 1431
  chr20:61885918-61885949
  hypo

SEQ ID NO: 1906 - DNA, 31 bp, Homo sapiens; identical to SEQ ID NO: 1432
  chr20:62467675-62467706
  hypo

SEQ ID NO: 1907 - DNA, 31 bp, Homo sapiens; identical to SEQ ID NO: 1433
  chr20:62694895-62694926
  hypo

SEQ ID NO: 1908 - DNA, 31 bp, Homo sapiens; identical to SEQ ID NO: 1434
  chr21:33058220-33058251
  hypo

SEQ ID NO: 1909 - DNA, 31 bp, Homo sapiens
  chr21:33058554-33058585
  hypo
aaagaaatcaaagttgcgctcttcactttat

SEQ ID NO: 1910 - DNA, 31 bp, Homo sapiens
  chr21:33642643-33642674
  hypo
ttagttctgacaattccgtgccttaactttc

SEQ ID NO: 1911 - DNA, 31 bp, Homo sapiens
  chr21:38140416-38140447
  hypo
aggtgctgcgcaggcgcggttcgaggtagga

SEQ ID NO: 1912 - DNA, 31 bp, Homo sapiens
  chr21:42953696-42953727
  hypo
cagggtggtgaaggcccgaggccaggagggc

SEQ ID NO: 1913 - DNA, 31 bp, Homo sapiens
  chr21:43393500-43393531
  hypo
gaggtgcggagctgaacgcttcccgcctgag

SEQ ID NO: 1914 - DNA, 50 bp, Homo sapiens
  chr21:45360446-45360496
  hypo
tcctgaaggagctgagcggtttcataccatctgggcggtgtttgtagatg

SEQ ID NO: 1915 - DNA, 31 bp, Homo sapiens
  chr21:45360497-45360528
  hypo
ctggcatgtcctgggacggacaagtgcctga

SEQ ID NO: 1916 - DNA, 31 bp, Homo sapiens
  chr21:45360620-45360651
  hypo
gttaccatcaaagtggcgctgctctgtcaca

SEQ ID NO: 1917 - DNA, 37 bp, Homo sapiens
  chr21:45360666-45360703
  hypo
gctggtttatggtgatcgcaggcgatttcccagctgc

SEQ ID NO: 1918 - DNA, 48 bp, Homo sapiens
  chr22:18352968-18353016
  hypo
gcctctcactgccacccgatctcccaccaggtgcgcacctctgccctc

SEQ ID NO: 1919 - DNA, 60 bp, Homo sapiens
  chr22:18353508-18353568
  hypo
tgccttatctaaacagcgtcctaattctttcattcttccccgactcgggagtgcttttta

SEQ ID NO: 1920 - DNA, 31 bp, Homo sapiens
  chr22:18353599-18353630
  hypo
aggagtcagcctttctcggctcacctctctg

SEQ ID NO: 1921 - DNA, 31 bp, Homo sapiens
  chr22:18353689-18353720
  hypo
agtgactaggtcctaacggcatggcatccct

SEQ ID NO: 1922 - DNA, 36 bp, Homo sapiens
  chr22:18400897-18400933
  hypo
tacaaggccctataaacgtgtcgtaaacattttggt

SEQ ID NO: 1923 - DNA, 41 bp, Homo sapiens
  chr22:18400962-18401003
  hypo
aaggaggaccagagttcgaggctgcagtgagctacgatcat

SEQ ID NO: 1924 - DNA, 31 bp, Homo sapiens
  chr22:20929348-20929379
  hypo
ctgagtttctttgttgcgatcaccttgtctg

SEQ ID NO: 1925 - DNA, 31 bp, Homo sapiens
  chr22:30363112-30363143
  hypo
tgtaacttttttgcagcgtttatttttatct

SEQ ID NO: 1926 - DNA, 18 bp, Homo sapiens
  chr22:31925244-31925262
  hypo
tttatcaggtcaggtacg

SEQ ID NO: 1927 - DNA, 18 bp, Homo sapiens
  chr22:40487229-40487247
  hypo
gcccgcctcagcctccca

SEQ ID NO: 1928 - DNA, 31 bp, Homo sapiens
  chr22:40543468-40543499
  hypo
gatagttctagaggccgcgaataacaagatc

SEQ ID NO: 1929 - DNA, 31 bp, Homo sapiens
  chr22:40707968-40707999
  hypo
accaataaaaaaattccgagcccttatgtat

SEQ ID NO: 1930 - DNA, 31 bp, Homo sapiens
  chr22:42669779-42669810
  hypo
tcctctggctcaaagacggcttttggaaaca

SEQ ID NO: 1931 - DNA, 31 bp, Homo sapiens
  chr22:42669838-42669869
  hypo
tctgccctcctccaggcgcctgggccactcc

SEQ ID NO: 1932 - DNA, 61 bp, Homo sapiens
  chr22:42669910-42669971
  hypo
tactaccatctgtcagcgtggattgattgaggagactggccctgctcggcagatcagtgac

SEQ ID NO: 1933 - DNA, 31 bp, Homo sapiens
  chr22:46598486-46598517
  hypo
tagctgggcgtggaggcgtgcacctcttaag

SEQ ID NO: 1934 - DNA, 34 bp, Homo sapiens
  chr22:47056193-47056227
  hypo
ctgctttacatgggggcggcgcttaggaaccttc

SEQ ID NO: 1935 - DNA, 31 bp, Homo sapiens
  chrX:71485180-71485211
  hypo
gtaagttttgacagagcgagactgtctcaaa

SEQ ID NO: 1936 - DNA, 31 bp, Homo sapiens
  chr1:2477831-2477862
  hyper
cgccgccgccgcctcccggccgccctccgcc

SEQ ID NO: 1937 - DNA, 31 bp, Homo sapiens
  chr1:17278332-17278363
  hyper
tgggtggttgttaccacgcttctccaggagg

SEQ ID NO: 1938 - DNA, 38 bp, Homo sapiens
  chr1:161368923-161368961
  hyper
tgataccggcaatcagcgcaaagcgagataatcaccag

SEQ ID NO: 1939 - DNA, 47 bp, Homo sapiens
  chr1:161369158-161369205
  hyper
actgagcagccatttccggttcccagtgtgtccgaagttccttctgg

SEQ ID NO: 1940 - DNA, 146 bp, Homo sapiens
  chr1:161369219-161369365
  hyper
acaaaaactgacagggcggaaccgcgacacggtgcctgatgatatcaaaaggtctcacggctccggagggacccagtcgcccacagccgccaggggcgccgccggctccgagcccgttgtcgagagccgctcggctgctggggtct

SEQ ID NO: 1941 - DNA, 86 bp, Homo sapiens
  chr1:161369374-161369460
  hyper
tccttccaactctcctcggacctagagttccgggatctcactgcgatctgggcgaattcttacgtagaattcgaaaggatatgggg

SEQ ID NO: 1942 - DNA, 40 bp, Homo sapiens
  chr1:161369461-161369501
  hyper
aggaaaaaaacaaaaacgggaaccactttgtttccgcccg

SEQ ID NO: 1943 - DNA, 21 bp, Homo sapiens
  chr1:161369560-161369581
  hyper
accaggcggtggcaggttttc

SEQ ID NO: 1944 - DNA, 77 bp, Homo sapiens
  chr1:161369614-161369691
  hyper
ctgtgtctctgacccacgagaaaagtacccgggcgggccacccacagcttcgggatcggggcgcgcagggaagtagc

SEQ ID NO: 1945 - DNA, 45 bp, Homo sapiens
  chr1:161369694-161369739
  hyper
caaagcaggtaagtcccgggctgctcgcggcggggtcatgactga

SEQ ID NO: 1946 - DNA, 219 bp, Homo sapiens
  chr1:161369765-161369984
  hyper
ttcctcaggaaacttccggcgcagtcagggctgcagccagagcccggagatagttgggcagggctccaggcgtccccgaatgctcgtcgtggagttttcctgatcctgtcgggtccctaaggaacgcttggcggggagcgtggacgccctggggccaggccaccgcggtcactgagagccacccccccggaaactggagaaaaacggagtagaagagac

SEQ ID NO: 1947 - DNA, 31 bp, Homo sapiens
  chr1:161369986-161370017
  hyper
aggggacagacttggccgggtcaagggaaac

SEQ ID NO: 1948 - DNA, 31 bp, Homo sapiens
  chr1:161370024-161370055
  hyper
tatttggaacaaaatacgccttatgtttgcc

SEQ ID NO: 1949 - DNA, 76 bp, Homo sapiens
  chr1:161370071-161370147
  hyper
agcattttcacattctcgagtttaactagttttgcaacagtgccacgagcaaattattaaacgtgttttaaagatg

SEQ ID NO: 1950 - DNA, 84 bp, Homo sapiens
  chr1:161370174-161370258
  hyper
ttgggtaagatggaagcgctacttaacgttaaggagagtctgcgaccctgatgttctcaggctgtatctcgcttagtgggacta

SEQ ID NO: 1951 - DNA, 31 bp, Homo sapiens
  chr1:247241958-247241989
  hyper
agcaacagaagctgccgcgggaccacttgga

SEQ ID NO: 1952 - DNA, 110 bp, Homo sapiens
  chr1:247242000-247242110
  hyper
taaggggaaggagcagcggagacgcaccgagctcgccacattcgcgctgcccaacacaaaagccgcgccaggtcccggaagctgctccctcctttcgcggcgcgcttgag

SEQ ID NO: 1953 - DNA, 101 bp, Homo sapiens
  chr1:247242113-247242214
  hyper
acagtccccttcccagcgcccgattggacagggccttaggccccgccccttcagtcctgagtgacgggagatgcaatcagacacggcgctgagtgaggcca

SEQ ID NO: 1954 - DNA, 34 bp, Homo sapiens
  chr2:24307618-24307652
  hyper
cccatgcaccaggcggcgccgagtggttctggct

SEQ ID NO: 1955 - DNA, 38 bp, Homo sapiens
  chr2:102637362-102637400
  hyper
acagacatgcaaatctcgggtcccgtggagacctactg

SEQ ID NO: 1956 - DNA, 31 bp, Homo sapiens
  chr2:102637430-102637461
  hyper
gtgtctcacaagcccccgggtgatgctgggg

SEQ ID NO: 1957 - DNA, 31 bp, Homo sapiens
  chr2:102637520-102637551
  hyper
agctccatagggcagcgcgtgacttggagga

SEQ ID NO: 1958 - DNA, 22 bp, Homo sapiens
  chr2:112791985-112792007
  hyper
ttttgagatggagtctcgctct

SEQ ID NO: 1959 - DNA, 57 bp, Homo sapiens
  chr3:32433287-32433344
  hyper
ccgggcgccccgccctcgccagcgcccgcccccgcccgcccccggcccgccctctgt

SEQ ID NO: 1960 - DNA, 53 bp, Homo sapiens
  chr3:150481641-150481694
  hyper
ggctcgtatagcaggccgaggagggagctcatgggcagcgttggctaagagtt

SEQ ID NO: 1961 - DNA, 34 bp, Homo sapiens
  chr4:13655882-13655916
  hyper
cttcctcagtagagggcgccggaggacaccgcag

SEQ ID NO: 1962 - DNA, 139 bp, Homo sapiens
  chr4:16228990-16229129
  hyper
cgagcgtggtgtcgagaccaccaccagctggggcggtgggagcgaaggtgccccaggctcggggaaggtggaaaccttttccccgctccccaagtgattgttgcgcgctccggtgaggggacagtggtacctcgatttc

SEQ ID NO: 1963 - DNA, 36 bp, Homo sapiens
  chr4:42659637-42659673
  hyper
ctctgcacgcccagcccgactcgtggcctgagccgc

SEQ ID NO: 1964 - DNA, 36 bp, Homo sapiens
  chr5:1140551-1140587
  hyper
acaggtgcagctccagcgaggcggtgctccctgctg

SEQ ID NO: 1965 - DNA, 46 bp, Homo sapiens
  chr5:1345797-1345843
  hyper
gaggccctcgggcagccggtggatgggccggcgacctccccgactc

SEQ ID NO: 1966 - DNA, 31 bp, Homo sapiens
  chr5:75698715-75698746
  hyper
gaagaacaaaagtcaacgtgaaatctcccca

SEQ ID NO: 1967 - DNA, 73 bp, Homo sapiens
  chr5:75698911-75698984
  hyper
caggccaccagctgtgcgggggccccagctgcagggggtcccggcccagcgtccctctcggccccttccctct

SEQ ID NO: 1968 - DNA, 57 bp, Homo sapiens
  chr5:124082613-124082670
  hyper
tataacagcattcgctcggggcggggggcggggggcttggggcggtggggtggggaa

SEQ ID NO: 1969 - DNA, 31 bp, Homo sapiens
  chr5:124082982-124083013
  hyper
tttagtcagatggccccggagcttggcttag

SEQ ID NO: 1970 - DNA, 53 bp, Homo sapiens
  chr5:180594971-180595024
  hyper
cctgggaagcacagtgcgaccctccccttacccctgcccgggcagtcccccta

SEQ ID NO: 1971 - DNA, 31 bp, Homo sapiens
  chr5:180595032-180595063
  hyper
ctctactgccccctgccggtgtctcaaaaaa

SEQ ID NO: 1972 - DNA, 31 bp, Homo sapiens
  chr6:21783024-21783055
  hyper
gctagcttcacaaaatcgtttcaaaggttaa

SEQ ID NO: 1973 - DNA, 39 bp, Homo sapiens
  chr6:26383467-26383506
  hyper
catgggtgagttgtatcggaaaatcgtcatgtgaggatc

SEQ ID NO: 1974 - DNA, 31 bp, Homo sapiens
  chr6:26383555-26383586
  hyper
ggaggcgctacagctccggggtgggggcggt

SEQ ID NO: 1975 - DNA, 46 bp, Homo sapiens
  chr6:26458294-26458340
  hyper
ttggagagaagagggacgactggagaatcgtcgagaaccagcggag

SEQ ID NO: 1976 - DNA, 31 bp, Homo sapiens
  chr7:47621315-47621346
  hyper
gtcctgggactcctgccgagcccccgccccc

SEQ ID NO: 1977 - DNA, 31 bp, Homo sapiens
  chr7:131630395-131630426
  hyper
acccgcgcgggaaccccggagcagtagattt

SEQ ID NO: 1978 - DNA, 31 bp, Homo sapiens
  chr8:29939478-29939509
  hyper
tttaaattcttctctacggtgaaagccaatg

SEQ ID NO: 1979 - DNA, 31 bp, Homo sapiens
  chr8:101920381-101920412
  hyper
ggactccactgggaaccgacaggccccaggc

SEQ ID NO: 1980 - DNA, 31 bp, Homo sapiens
  chr8:102219053-102219084
  hyper
ctgacaagagcaatggcgattataaccatga

SEQ ID NO: 1981 - DNA, 46 bp, Homo sapiens
  chr8:145734031-145734077
  hyper
cacccgcgcaggacctcggtgggagcgcgcacgtggcggggcgggg

SEQ ID NO: 1982 - DNA, 45 bp, Homo sapiens
  chr9:35814745-35814790
  hyper
cctcaccacacagccccggagcttgtgcctcggaggggcagaggc

SEQ ID NO: 1983 - DNA, 31 bp, Homo sapiens
  chr9:35814791-35814822
  hyper
acaggcaggagctctgcgcggctctgcgcgc

SEQ ID NO: 1984 - DNA, 91 bp, Homo sapiens
  chr9:86238305-86238396
  hyper
cagcctgctcgcggggcgcccatcctgggaccgcatccgagctccgggttcccgctctaagacggggaggctgcggcgaccgcaggctcag

SEQ ID NO: 1985 - DNA, 31 bp, Homo sapiens
  chr9:86238614-86238645
  hyper
attttggaaagtgaatcgttttccccttcct

SEQ ID NO: 1986 - DNA, 72 bp, Homo sapiens
  chr10:7729412-7729484
  hyper
atcagctggaaacaggcgagcacctcacgccatctagcggagacacactttgaagaccgcttcaagggattt

SEQ ID NO: 1987 - DNA, 37 bp, Homo sapiens
  chr11:450010-450047
  hyper
gctgggctccgggatccgtcggcgaggaaggggcgaa

SEQ ID NO: 1988 - DNA, 31 bp, Homo sapiens
  chr11:67141092-67141123
  hyper
ctttaataatcccatccgccaggcccactcg

SEQ ID NO: 1989 - DNA, 31 bp, Homo sapiens
  chr11:71163704-71163735
  hyper
gaaaaggcaaacagtgcgctacctgagctac

SEQ ID NO: 1990 - DNA, 254 bp, Homo sapiens
  chr13:37393237-37393491
  hyper
gccgcggccgcacatgcgcagtcagtcccgttggttgtgcgctcagccccgcccccagaggcgccgcgctccctgacagcccgcgggcgtacacacgctgacgcgcaggctgcggtcgcgcaggcgcagtcggggcgccttcccggtataggcgccttttaccccagcgtgtcctgagtctttggttcgcgaagtgccgttaggccaagcaggtgctaaaagcccggggtcgtggaccccggccaggtcttagc

SEQ ID NO: 1991 - DNA, 31 bp, Homo sapiens
  chr15:43312163-43312194
  hyper
gcttatttaattcactcgtctccaaaggcaa

SEQ ID NO: 1992 - DNA, 31 bp, Homo sapiens
  chr15:43397759-43397790
  hyper
aaaataccaggtgctgcgttcccatcatcaa

SEQ ID NO: 1993 - DNA, 60 bp, Homo sapiens
  chr15:43397801-43397861
  hyper
tagtactgcttctatacgaaaatggctcttgctccaaccccgcctcggcccccacatcaa

SEQ ID NO: 1994 - DNA, 41 bp, Homo sapiens
  chr15:68521277-68521318
  hyper
tcattcattctctggacggcagcttccgcccttccccgctg

SEQ ID NO: 1995 - DNA, 63 bp, Homo sapiens
  chr16:12211190-12211253
  hyper
gaaccgtggaaacaggcgtggtcaatacgtgcttcagtgcggacgaaccgtggaaacaggcgt

SEQ ID NO: 1996 - DNA, 31 bp, Homo sapiens
  chr17:38776490-38776521
  hyper
cgggttagaaaacaaccgatctccttaaccc

SEQ ID NO: 1997 - DNA, 40 bp, Homo sapiens
  chr17:70553091-70553131
  hyper
cctccgagactggaaccgtagagagcgaccacctctttct

SEQ ID NO: 1998 - DNA, 31 bp, Homo sapiens
  chr19:12551332-12551363
  hyper
aaatccctcagggaggcggatctggggtgtc

SEQ ID NO: 1999 - DNA, 54 bp, Homo sapiens
  chr19:12551369-12551423
  hyper
tctcctcctgttaaaccgtttctgctgcagccctcggcgtctcggtgcagtgag

SEQ ID NO: 2000 - DNA, 74 bp, Homo sapiens
  chr19:12721073-12721147
  hyper
aactcctggagtcaagcgatccacccgcctcagcccacccaccccccgacctcccccaccgcccccaccacgca

SEQ ID NO: 2001 - DNA, 31 bp, Homo sapiens
  chr19:45418213-45418244
  hyper
tgggatgggagaattgcggagttggagattt

SEQ ID NO: 2002 - DNA, 46 bp, Homo sapiens
  chr19:51869655-51869701
  hyper
cccgcgcccctctctgcgcctgcgcgcagcacggtcagccagtcaa

SEQ ID NO: 2003 - DNA, 31 bp, Homo sapiens
  chr19:51925343-51925374
  hyper
cgccgcccccagggggcgctccaccttcaga

SEQ ID NO: 2004 - DNA, 30 bp, Homo sapiens
  chr19:58330901-58330931
  hyper
gagttcctgacatgacggtgggcttttcct

SEQ ID NO: 2005 - DNA, 78 bp, Homo sapiens
  chr19:58331142-58331220
  hyper
tggccccggactgctacgtgggactgcggtgaatgaacccagaaggtggagaggaaccgttctcggtgcacagaggcg

SEQ ID NO: 2006 - DNA, 64 bp, Homo sapiens
  chr21:45553435-45553499
  hyper
ctggatagggctgagacgggggcgggtcttggctccgcccagaaggctgcgcaggcgcagtccc

SEQ ID NO: 2007 - DNA, 86 bp, Homo sapiens
  chr22:37252547-37252633
  hyper
aacctcctctaggtggcgctgcggagcggggactcggctgctgatcgcggcgccccctggcggtctgttcccgtcaacatttagat

SEQ ID NO: 2008 - DNA, 31 bp, Homo sapiens
  chr22:37713069-37713100
  hyper
gggggctcccaccacacgtggataagaggtt

SEQ ID NO: 2009 - DNA, 44 bp, Homo sapiens
  chr22:41682702-41682746
  hyper
gggaaatagtaactatcgtagagaagctccgcagacaccacttg

SEQ ID NO: 2010 - DNA, 31 bp, Homo sapiens
  chr22:41682903-41682934
  hyper
ctgatctgtacccttccggaaatgtctgtat

SEQ ID NO: 2011 - DNA, 81 bp, Homo sapiens
  chr22:42228657-42228738
  hyper
ggtccaggtttgactccgctggctttctcaggcgggcagggcgggggtaggcagctgggaagatgacgtaatgtgctccca

SEQ ID NO: 2012 - DNA, 31 bp, Homo sapiens
  chrY:14533225-14533256
  hyper
gtacgccacccaccctcgagacctcctaggc

SEQ ID NO: 2013 - DNA, 88 bp, Homo sapiens
  chr1:1421577-1421665
  hypo
atgggccaccaggcaccgggaagacgctgtttgccaaggtgagagcgcctggctgaacaggtgggccaggggccgctggggtctcacc

SEQ ID NO: 2014 - DNA, 31 bp, Homo sapiens; identical to SEQ ID NO: 1936
  chr1:2477831-2477862
  hypo

SEQ ID NO: 2015 - DNA, 219 bp, Homo sapiens; identical to SEQ ID NO: 1946
  chr1:161369765-161369984
  hypo

SEQ ID NO: 2016 - DNA, 31 bp, Homo sapiens; identical to SEQ ID NO: 1947
  chr1:161369986-161370017
  hypo

SEQ ID NO: 2017 - DNA, 31 bp, Homo sapiens; identical to SEQ ID NO: 1948
  chr1:161370024-161370055
  hypo

SEQ ID NO: 2018 - DNA, 76 bp, Homo sapiens; identical to SEQ ID NO: 1949
  chr1:161370071-161370147
  hypo

SEQ ID NO: 2019 - DNA, 84 bp, Homo sapiens; identical to SEQ ID NO: 1950
  chr1:161370174-161370258
  hypo

SEQ ID NO: 2020 - DNA, 31 bp, Homo sapiens
  chr1:201058353-201058384
  hypo
agatggttctgcaggcgcgggcccagaccca

SEQ ID NO: 2021 - DNA, 31 bp, Homo sapiens
  chr2:11243180-11243211
  hypo
ggacagaggcctgggccgtgtctgtgaacag

SEQ ID NO: 2022 - DNA, 24 bp, Homo sapiens
  chr2:205341736-205341760
  hypo
taggaaagtaacaggccgggcgcg

SEQ ID NO: 2023 - DNA, 31 bp, Homo sapiens
  chr2:232553412-232553443
  hypo
gtgtttctggccctcccgagggcaggcaggg

SEQ ID NO: 2024 - DNA, 31 bp, Homo sapiens
  chr2:242608420-242608451
  hypo
cctacatttaaacacacgggcggcccctcca

SEQ ID NO: 2025 - DNA, 31 bp, Homo sapiens
  chr3:17643205-17643236
  hypo
gtaggggaaaaccccacgttattattaacat

SEQ ID NO: 2026 - DNA, 23 bp, Homo sapiens
  chr3:58484907-58484930
  hypo
gctgatctcgaactcctgacctc

SEQ ID NO: 2027 - DNA, 27 bp, Homo sapiens
  chr3:138442408-138442435
  hypo
tcatgctttatacggttacatgtttta

SEQ ID NO: 2028 - DNA, 139 bp, Homo sapiens; identical to SEQ ID NO: 1962
  chr4:16228990-16229129
  hypo

SEQ ID NO: 2029 - DNA, 36 bp, Homo sapiens; identical to SEQ ID NO: 1963
  chr4:42659637-42659673
  hypo

SEQ ID NO: 2030 - DNA, 31 bp, Homo sapiens
  chr5:909582-909613
  hypo
gtctcaccacagagagcgtatctggcttcct

SEQ ID NO: 2031 - DNA, 46 bp, Homo sapiens
  chr5:39808821-39808867
  hypo
gatgcaagattgaccccgggtgaaaaagagacggagagaaggttgg

SEQ ID NO: 2032 - DNA, 31 bp, Homo sapiens
  chr5:39808941-39808972
  hypo
tgtccatcagcagtaccgtgttgtccaagaa

SEQ ID NO: 2033 - DNA, 58 bp, Homo sapiens
  chr5:39808987-39809045
  hypo
tcctgttatactcagtcgctggccaggaacagtctgtgaaaaccgtggcttctgttct

SEQ ID NO: 2034 - DNA, 31 bp, Homo sapiens; identical to SEQ ID NO: 1966
  chr5:75698715-75698746
  hypo

SEQ ID NO: 2035 - DNA, 31 bp, Homo sapiens
  chr5:172234014-172234045
  hypo
ccacatttggaggaagcgagatgactacaca

SEQ ID NO: 2036 - DNA, 31 bp, Homo sapiens
  chr6:14203394-14203425
  hypo
actcgtcactctccgacgctgcagtaaactg

SEQ ID NO: 2037 - DNA, 31 bp, Homo sapiens; identical to SEQ ID NO: 1972
  chr6:21783024-21783055
  hypo

SEQ ID NO: 2038 - DNA, 18 bp, Homo sapiens
  chr6:37011430-37011448
  hypo
gcccggccccagactcac

SEQ ID NO: 2039 - DNA, 31 bp, Homo sapiens
  chr6:158140715-158140746
  hypo
atgctcaaaggaaggacggtgtgaaggtgaa

SEQ ID NO: 2040 - DNA, 31 bp, Homo sapiens
  chr7:76632094-76632125
  hypo
ctggtcctgggccccacggtagcctacacat

SEQ ID NO: 2041 - DNA, 31 bp, Homo sapiens
  chr7:99538810-99538841
  hypo
cgtgagccaccatgcccggccaagccatcta

SEQ ID NO: 2042 - DNA, 31 bp, Homo sapiens
  chr7:100025444-100025475
  hypo
tctctctcagggatagcggttcaagtcggtg

SEQ ID NO: 2043 - DNA, 31 bp, Homo sapiens
  chr8:125364993-125365024
  hypo
cagaagcctagaacagcgttttagagctcaa

SEQ ID NO: 2044 - DNA, 45 bp, Homo sapiens; identical to SEQ ID NO: 1982
  chr9:35814745-35814790
  hypo

SEQ ID NO: 2045 - DNA, 31 bp, Homo sapiens; identical to SEQ ID NO: 1983
  chr9:35814791-35814822
  hypo

SEQ ID NO: 2046 - DNA, 91 bp, Homo sapiens; identical to SEQ ID NO: 1984
  chr9:86238305-86238396
  hypo

SEQ ID NO: 2047 - DNA, 31 bp, Homo sapiens
  chr9:97844496-97844527
  hypo
gccacacaggctctccgcgtggtaattctgg

SEQ ID NO: 2048 - DNA, 31 bp, Homo sapiens
  chr9:139101083-139101114
  hypo
ctgaagctttggaaaccggggatcctcactc

SEQ ID NO: 2049 - DNA, 31 bp, Homo sapiens
  chr9:139101158-139101189
  hypo
aggctttgtgcagccacgtgcagcgtgcggc

SEQ ID NO: 2050 - DNA, 31 bp, Homo sapiens
  chr9:139731838-139731869
  hypo
ccccactggcggccaacgggcagagcccatc

SEQ ID NO: 2051 - DNA, 31 bp, Homo sapiens
  chr9:139732505-139732536
  hypo
cagcctccagggtgcccgagcagcaggtggg

SEQ ID NO: 2052 - DNA, 31 bp, Homo sapiens
  chr9:139803919-139803950
  hypo
taaactgtcagatggacgggcctgaccatag

SEQ ID NO: 2053 - DNA, 38 bp, Homo sapiens
  chr9:139804356-139804394
  hypo
tcccttcttttgaaggcgcaccacgaggtctgccccaa

SEQ ID NO: 2054 - DNA, 56 bp, Homo sapiens
  chr9:139804396-139804452
  hypo
tccccttaacttgtgacggctgcggcaagaagaagatcccccgggagaaggtgagt

SEQ ID NO: 2055 - DNA, 67 bp, Homo sapiens
  chr9:139804458-139804525
  hypo
cacctccttggaggaccgcagggcggggcccatgtgttggacgtgagggtcccgtgggtgggggtgg

SEQ ID NO: 2056 - DNA, 80 bp, Homo sapiens
  chr9:139804561-139804641
  hypo
tgcaaagcccctgtaacgttgggtcatggatgcgttcagggtggcggccgctctcctgagtgggccgggggccaggtggc

SEQ ID NO: 2057 - DNA, 31 bp, Homo sapiens
  chr9:139805156-139805187
  hypo
ctggccaggcctgcccgcgggctcagcctga

SEQ ID NO: 2058 - DNA, 31 bp, Homo sapiens
  chr9:139805253-139805284
  hypo
gggtagggctgggggacgggacagggctgtc

SEQ ID NO: 2059 - DNA, 48 bp, Homo sapiens
  chr9:139805302-139805350
  hypo
tgtctgttaaatgtcccgcactgtgagcttggccgagtgctgtctgaa

SEQ ID NO: 2060 - DNA, 31 bp, Homo sapiens
  chr9:139805365-139805396
  hypo
cacctggagactggagcgccatagaggctat

SEQ ID NO: 2061 - DNA, 46 bp, Homo sapiens
  chr9:139805412-139805458
  hypo
ccttcagaggccaggacgcctgcctggggcccgtgtctgtgaggct

SEQ ID NO: 2062 - DNA, 31 bp, Homo sapiens
  chr9:139805475-139805506
  hypo
ggcctggaggtgcccccgagaggtgccctct

SEQ ID NO: 2063 - DNA, 31 bp, Homo sapiens
  chr9:139814739-139814770
  hypo
gccatgctactgagctcggtgctggaggcaa

SEQ ID NO: 2064 - DNA, 102 bp, Homo sapiens
  chr9:139814780-139814882
  hypo
gggagaccagagccacgcggggtcagagctcctgcagaggtgcgagagcctggagaagaagacggccacttttgagaacattgtctgcgtcctgaaccggga

SEQ ID NO: 2065 - DNA, 31 bp, Homo sapiens
  chr9:139817151-139817182
  hypo
aggatgggcctgggcacgtggtggaggacgg

SEQ ID NO: 2066 - DNA, 31 bp, Homo sapiens
  chr9:139835148-139835179
  hypo
aagttgcccaggaggccgagggggccttggg

SEQ ID NO: 2067 - DNA, 31 bp, Homo sapiens
  chr9:140728257-140728288
  hypo
ttctgtgggcagcctccgcctgacggtcctc

SEQ ID NO: 2068 - DNA, 31 bp, Homo sapiens
  chr10:27978842-27978873
  hypo
gacagctcttgctaaccggaagcatctgatt

SEQ ID NO: 2069 - DNA, 31 bp, Homo sapiens
  chr10:27978902-27978933
  hypo
cacacctattaaattccgatggcatacagat

SEQ ID NO: 2070 - DNA, 31 bp, Homo sapiens
  chr10:73767276-73767307
  hypo
agccgctgtggcacatcgagcgcacagtgtc

SEQ ID NO: 2071 - DNA, 107 bp, Homo sapiens
  chr10:73767528-73767635
  hypo
gcaagaaccgccgctgcggccccctcaacgtgacgctggccgcagaggcctgccgccgcaaggagcacatggccctcaaggcggtgcgcatccggcagctggagttc

SEQ ID NO: 2072 - DNA, 56 bp, Homo sapiens
  chr10:73767880-73767936
  hypo
ccgctacatgctggtgcgctacgaggacgtggcacgcgggccgctgcagaaggccc

SEQ ID NO: 2073 - DNA, 59 bp, Homo sapiens
  chr10:126312439-126312498
  hypo
cagttctggggggctgcggtgaaacaggaatgctcctaacacttcgtccacagcctttc

SEQ ID NO: 2074 - DNA, 37 bp, Homo sapiens; identical to SEQ ID NO: 1987
  chr11:450010-450047
  hypo

SEQ ID NO: 2075 - DNA, 31 bp, Homo sapiens
  chr11:63988353-63988384
  hypo
caccttggcggccccacgtgggcactgcccc

SEQ ID NO: 2076 - DNA, 31 bp, Homo sapiens
  chr11:63988412-63988443
  hypo
tggggaggtgggggctcggtgactctggagg

SEQ ID NO: 2077 - DNA, 31 bp, Homo sapiens
  chr11:63988449-63988480
  hypo
atagtgcctggcagcccgtcaccagtatggt

SEQ ID NO: 2078 - DNA, 31 bp, Homo sapiens; identical to SEQ ID NO: 1988
  chr11:67141092-67141123
  hypo

SEQ ID NO: 2079 - DNA, 31 bp, Homo sapiens
  chr11:68223648-68223679
  hypo
ccagcccgtggatcagcgccagcctgggatg

SEQ ID NO: 2080 - DNA, 31 bp, Homo sapiens
  chr11:68356341-68356372
  hypo
taattctagctcttaacgttaaatagtatta

SEQ ID NO: 2081 - DNA, 31 bp, Homo sapiens
  chr11:75338638-75338669
  hypo
tggtaatggtgatgatcgtgaaggtagatga

SEQ ID NO: 2082 - DNA, 31 bp, Homo sapiens
  chr12:31791719-31791750
  hypo
gagttacctctttcatcgacctcaggcttat

SEQ ID NO: 2083 - DNA, 31 bp, Homo sapiens
  chr12:94658438-94658469
  hypo
gcatttttttaaatgtcgtttatttctggct

SEQ ID NO: 2084 - DNA, 37 bp, Homo sapiens
  chr12:124514724-124514761
  hypo
gcaggctctgaaggaacgcctgcgctgtttcagaagg

SEQ ID NO: 2085 - DNA, 254 bp, Homo sapiens; identical to SEQ ID NO: 1990
  chr13:37393237-37393491
  hypo

SEQ ID NO: 2086 - DNA, 31 bp, Homo sapiens
  chr13:99329817-99329848
  hypo
ataatacagggccccacgctggcctccagaa

SEQ ID NO: 2087 - DNA, 94 bp, Homo sapiens
  chr14:102973467-102973561
  hypo
gcccagcagctcctggcgggccgagccggcggcacccacgggggtgtacagcgccaggaggtccagcagcagcaggcggcgctggcgcggctcc

SEQ ID NO: 2088 - DNA, 31 bp, Homo sapiens; identical to SEQ ID NO: 1991
  chr15:43312163-43312194
  hypo

SEQ ID NO: 2089 - DNA, 73 bp, Homo sapiens
  chr16:1560936-1561009
  hypo
caggcccctcaggggtcgtcatctgcctcttccaccacctcctcgtccagctccctggcgtcctccatgctgt

SEQ ID NO: 2090 - DNA, 31 bp, Homo sapiens
  chr16:2281031-2281062
  hypo
gggattttcccctttgcgggcatcctgggta

SEQ ID NO: 2091 - DNA, 41 bp, Homo sapiens
  chr16:11968753-11968794
  hypo
atattaacagctgggccgggcacggtggctcacgcctgtaa

SEQ ID NO: 2092 - DNA, 63 bp, Homo sapiens; identical to SEQ ID NO: 1995
  chr16:12211190-12211253
  hypo

SEQ ID NO: 2093 - DNA, 31 bp, Homo sapiens
  chr16:81730091-81730122
  hypo
gtgtgcagatcatggtcgcccttgtcaccgg

SEQ ID NO: 2094 - DNA, 31 bp, Homo sapiens
  chr17:3844262-3844293
  hypo
accatagcagtgatctcgttaaaggactgca

SEQ ID NO: 2095 - DNA, 35 bp, Homo sapiens
  chr17:3844906-3844941
  hypo
gcggactgagctacagcgctcgatcacactctcag

SEQ ID NO: 2096 - DNA, 31 bp, Homo sapiens
  chr17:7496152-7496183
  hypo
ggggctctggttcagacgtgtccaataggct

SEQ ID NO: 2097 - DNA, 59 bp, Homo sapiens
  chr17:18024774-18024833
  hypo
gcgcctgcccttccaccgaccgcccagggccggggcctggcgggcgcccctggaacacc

SEQ ID NO: 2098 - DNA, 31 bp, Homo sapiens
  chr17:55753743-55753774
  hypo
atgaatctaatcccttcggatcaactgtggt

SEQ ID NO: 2099 - DNA, 31 bp, Homo sapiens
  chr17:73117396-73117427
  hypo
tcctagggtagatgtgcgtttaacgtcatga

SEQ ID NO: 2100 - DNA, 31 bp, Homo sapiens
  chr19:3192318-3192349
  hypo
gaccctgggagcttctcgaatcggtggtctt

SEQ ID NO: 2101 - DNA, 41 bp, Homo sapiens
  chr19:14225012-14225053
  hypo
ggctcatgagacctgccgtgtctgttcggctgtctgtcccc

SEQ ID NO: 2102 - DNA, 41 bp, Homo sapiens
  chr19:19625744-19625785
  hypo
gtagccatgggcctggcggccgaagccgaagtcggtgagct

SEQ ID NO: 2103 - DNA, 31 bp, Homo sapiens
  chr19:38572719-38572750
  hypo
gcgagatcaccctcagcgagtgtgacgcgga

SEQ ID NO: 2104 - DNA, 31 bp, Homo sapiens
  chr20:31629661-31629692
  hypo
tcctgcatcagggaggcgttggggtgcttgg

SEQ ID NO: 2105 - DNA, 31 bp, Homo sapiens
  chr20:42565991-42566022
  hypo
gctgataaccttcccacgggcagctcctggg

SEQ ID NO: 2106 - DNA, 31 bp, Homo sapiens
  chr20:62572478-62572509
  hypo
tgccccgtacctgcggcgtgctcttcaggac

SEQ ID NO: 2107 - DNA, 31 bp, Homo sapiens
  chr21:44831112-44831143
  hypo
gcccttgtcacgggagcggcctgctgacccg

SEQ ID NO: 2108 - DNA, 64 bp, Homo sapiens; identical to SEQ ID NO: 2006
  chr21:45553435-45553499
  hypo

SEQ ID NO: 2109 - DNA, 42 bp, Homo sapiens
  chr21:47833020-47833062
  hypo
agcaaggtgtggggagcggggaaggcacgaggcccacccggg

SEQ ID NO: 2110 - DNA, 22 bp, Homo sapiens
  chr22:31701868-31701890
  hypo
gccactgcgcctggactctttt

SEQ ID NO: 2111 - DNA, 31 bp, Homo sapiens
  chr22:41649014-41649045
  hypo
aggctctggagaattccggaccccagactcc

SEQ ID NO: 2112 - DNA, 31 bp, Homo sapiens
  chr22:46521304-46521335
  hypo
ggtaacctctggctggcggggctttgggtca

SEQ ID NO: 2113 - DNA, 79 bp, Homo sapiens
  chr1:6052047-6052126
  hyper
gccaaacggcacccagcggccccgaccccaagtgtcccgacgaggggggacgcctgcgactaacgcggggacagccccc

SEQ ID NO: 2114 - DNA, 31 bp, Homo sapiens
  chr1:27719136-27719167
  hyper
cgcttctcccgcggccgcgggggcttctcgg

SEQ ID NO: 2115 - DNA, 35 bp, Homo sapiens
  chr1:27719181-27719216
  hyper
ctgcgccgccaggacccgagcggagcctccccgcg

SEQ ID NO: 2116 - DNA, 31 bp, Homo sapiens
  chr1:27986513-27986544
  hyper
ggcgcggccgccccaccgccccaccgcccca

SEQ ID NO: 2117 - DNA, 31 bp, Homo sapiens
  chr1:155164561-155164592
  hyper
ggacatctgacgtcagcgcgcccgggagcgc

SEQ ID NO: 2118 - DNA, 114 bp, Homo sapiens
  chr1:155164605-155164719
  hyper
ggggagccccccaactcgcaggccggagaaaacacgagtagctaggtgggcggccccaaacctcaactcccggcattgccaagcaacagccattcagttcggttgctgggacac

SEQ ID NO: 2119 - DNA, 35 bp, Homo sapiens
  chr1:155164852-155164887
  hyper
cattccctttgccttccgggcgccaagtctctctg

SEQ ID NO: 2120 - DNA, 65 bp, Homo sapiens
  chr1:155164899-155164964
  hyper
aacccaactccccagcgcgccccgggttcccgggtcgggccggcttcaggcggtggggagcggga

SEQ ID NO: 2121 - DNA, 138 bp, Homo sapiens
  chr1:180123500-180123638
  hyper
gtggggtcttggtggtcgcagaccaagcgtccctcttctcacatctaattcacaacgtctcatcgctccgcgggagcccaggaactgccctacaacagccgaaatccgggtcgtctattccaacggactcctcttccg

SEQ ID NO: 2122 - DNA, 28 bp, Homo sapiens
  chr1:180123658-180123686
  hyper
aggccaaacaacctccgcgaggctaccc

SEQ ID NO: 2123 - DNA, 132 bp, Homo sapiens
  chr1:180123700-180123832
  hyper
cggcgggcgctccattcctttaccggactgtacacctcgcctcctggggcctgaggcgggaacccgggtcgcgctgctccgaggcctcggcggaccgcgaaaggatggctcaccacccggccagggccagcc

SEQ ID NO: 2124 - DNA, 514 bp, Homo sapiens
  chr1:180123835-180124349
  hyper
gcaacaagctcagccccgcccgctcccgcgcccaggagcggccggcggggcggggtggctgggccggcctcgggggcgggggctcgggggcgggggctcaggggcggggccacgtggctcctccttgcgggcggaggcaggcggtgccgcggcgccgggacccgactcatccggtgcttgcgtgtggtggtgagcgcagcgccgaggatgaggaggtgcaacagcggctccgggccgccgccgtcgctgctgctgctgctgctgtggctgctcgcggttcccggcgctaacgcggccccgcggtcggcgctctattcgccttccgacccgctgacgctgctgcaggcggacacggtgcgcggcgcggtgctgggctcccgcagcgcctgggccgtggagttcttcgcctcctggtgcggccactgcatcgccttcgccccgacgtggaaggcgctggccgaagacgtcaaaggtgagaagcgggggcggcccgctcccccgtgccccgccgccc

SEQ ID NO: 2125 - DNA, 37 bp, Homo sapiens
  chr1:249167851-249167888
  hyper
tcccggcctgggagagcgctatcggccactcctggct

SEQ ID NO: 2126 - DNA, 31 bp, Homo sapiens
  chr2:263890-263921
  hyper
gcatcgccggttttcccgtcctcctcctccc

SEQ ID NO: 2127 - DNA, 35 bp, Homo sapiens
  chr2:24299776-24299811
  hyper
gggcccaggtgagtagcgggcgaaggcggggcctg

SEQ ID NO: 2128 - DNA, 31 bp, Homo sapiens
  chr2:24299813-24299844
  hyper
gaggactgagctggggcgggacccaggtgag

SEQ ID NO: 2129 - DNA, 31 bp, Homo sapiens
  chr2:24300006-24300037
  hyper
gggcccaggtgagtagcgggcagggctgggg

SEQ ID NO: 2130 - DNA, 51 bp, Homo sapiens
  chr2:24300044-24300095
  hyper
tggtgcccactggttgcggggcgcgcgggcaggtgccggaggtggtgggcc

SEQ ID NO: 2131 - DNA, 31 bp, Homo sapiens
  chr2:25142652-25142683
  hyper
cgccccggcagcgcctcggggcccggccgga

SEQ ID NO: 2132 - DNA, 57 bp, Homo sapiens
  chr2:74426090-74426147
  hyper
gcctttcggagggagccgctctcctgcgactcggggcgtcgccggggcccgtggcca

SEQ ID NO: 2133 - DNA, 45 bp, Homo sapiens
  chr2:74426349-74426394
  hyper
gcggagccgacttgctcggggtccccgcgccgccctcctccctcc

SEQ ID NO: 2134 - DNA, 31 bp, Homo sapiens
  chr2:106362017-106362048
  hyper
gccagggcgcgtgtgccggggaagaatagcc

SEQ ID NO: 2135 - DNA, 31 bp, Homo sapiens
  chr2:106362070-106362101
  hyper
agggacgggggaggccgcgatcggccgggag

SEQ ID NO: 2136 - DNA, 205 bp, Homo sapiens
  chr2:172750702-172750907
  hyper
ttggagtcaccttgaccgccatgctgtgctcggaagccggggacgagcgagtgagcgagcagggccgagctgtcagggcgcgcgcgcgccgtcttcccggccgcgcccgccctccctctcgccggcgccgcgcgcgtccctatgcaaatgaactcggggcgcgccgcgtgcggaaaggggcccggcgtcccggccagaaaggcag

SEQ ID NO: 2137 - DNA, 80 bp, Homo sapiens
  chr2:172750953-172751033
  hyper
cacggggaaaacaagcgcgacccatgggatcccgacgcgccgcgtggttgccacagctaggtcgccgccaggaaagcccc

SEQ ID NO: 2138 - DNA, 45 bp, Homo sapiens
  chr2:172751057-172751102
  hyper
gtgtggctttgggcaccgaccagccaaagtcgttttccccgaggc

SEQ ID NO: 2139 - DNA, 84 bp, Homo sapiens
  chr2:191745040-191745124
  hyper
tgtccggggctgctctcggaggagtcgccagacgccctgacctgggggccagatgcgagctgggatcggctgagttccgacagc

SEQ ID NO: 2140 - DNA, 39 bp, Homo sapiens
  chr2:191745184-191745223
  hyper
cgcccatgagtctccccaacagctcgaattcccagagtg

SEQ ID NO: 2141 - DNA, 31 bp, Homo sapiens
  chr2:191745231-191745262
  hyper
cactgcttcataaatgcgagaacccagagcc

SEQ ID NO: 2142 - DNA, 71 bp, Homo sapiens
  chr2:191745270-191745341
  hyper
ccaactaggctagcctcggagttggcacggcgtgcagaaagtggctactgagcagccgggcctggctcacc

SEQ ID NO: 2143 - DNA, 44 bp, Homo sapiens
  chr2:191745386-191745430
  hyper
ccccgccctactctccgcgcacccagagccgagagaaatttgac

SEQ ID NO: 2144 - DNA, 120 bp, Homo sapiens
  chr2:191745477-191745597
  hyper
cagcgggcgaaaggggcgggccgtcggcgagcgctgaaggtctctagccctcccctgcgctttagcctcagtgcggagccttaggcggagcgaagagaaccggtcgcggcaatcctagcg

SEQ ID NO: 2145 - DNA, 277 bp, Homo sapiens
  chr2:191745702-191745979
  hyper
tcttctgtcatctcaccgccccaccacagaccgcgttccccgaggaaaccggccgcccacgcccggagcatcctcccctgttgagcgggcgctgacggacccggcggcatgatgcggctgcgaggctcggggatgctgcgggacctgctcctgcggtcgcccgccggcgtgagcgcgactctgcggcgggcacagcccttggtcaccctgtgccggcgtccccgaggcgggggacggccggccgcgggcccggctgccgccgcgcgactccacccgt

SEQ ID NO: 2146 - DNA, 37 bp, Homo sapiens
  chr2:191746056-191746093
  hyper
ctgggcaaggggagcacgcatccgcagcccggggtgt

SEQ ID NO: 2147 - DNA, 81 bp, Homo sapiens
  chr2:191746518-191746599
  hyper
tcagctccctggcttgcggctgcagcgcctggccgcccgccccagccattcgtgggcgatgctgcacgaacatctccaccg

SEQ ID NO: 2148 - DNA, 70 bp, Homo sapiens
  chr2:197035641-197035711
  hyper
agaggctagggggaccgcgtggccttgctgtggaagggacccgcgcgggcccgccgcgaagggggccctg

SEQ ID NO: 2149 - DNA, 109 bp, Homo sapiens
  chr2:197035853-197035962
  hyper
gaacccggactccagccgcaaagcggagaggcgccagcagcaatcagccacctcaggggcggcggagtccaagcccctctcagccggaccgtaccgcctaaaccctcct

SEQ ID NO: 2150 - DNA, 100 bp, Homo sapiens
  chr3:14444315-14444415
  hyper
gcctgagcagatgctgcgggcggcgccgcagccaccccaggtaccggagggaccgggagctgggcgcgcagccggcgctgcccgccgtctgcagcccctc

SEQ ID NO: 2151 - DNA, 95 bp, Homo sapiens
  chr3:32148436-32148531
  hyper
ggaggcgctgggctcgcgtgcgtgcgggggacagcgcggagagagggcaccccgagcacgcgggcacctgtctgcgcccccgttactgagcgcac

SEQ ID NO: 2152 - DNA, 40 bp, Homo sapiens
  chr3:44803218-44803258
  hyper
tgcgggcgtcaacgtccgatccaagcgccaaattcaaatt

SEQ ID NO: 2153 - DNA, 92 bp, Homo sapiens
  chr3:107940928-107941020
  hyper
cccgggcgctcggggacgccggcacccacctggacggggccttcaggttgctcttccggaggaactcctcctcgtagcggagcagcttcagc

SEQ ID NO: 2154 - DNA, 34 bp, Homo sapiens
  chr3:119041463-119041497
  hyper
ggtgtggagggaccagcgtcgaagacaaaggaat

SEQ ID NO: 2155 - DNA, 58 bp, Homo sapiens
  chr3:140660222-140660280
  hyper
cctatataggagtatccgtgcacaaacctttttatgcattgtgcgagggttactctga

SEQ ID NO: 2156 - DNA, 299 bp, Homo sapiens
  chr3:140660318-140660617
  hyper
tttttcaaagtaaatccgcttgcgaacccggaaccaagtcgatttttcccgccccgccagttccctgttcaggagagtgcagccgtgattggcgcgttcactcaggccaggggcgccccaggtctcaggtgctaggagcgcggtgacctaccaccctccgggcacgcgttctggccacgcctcgcggcccctttcattgaaagagcccgtagggatcacgtgaaagaacactgcagagtgcgtgacgtcacgacgctcacaccaatgggagcctctgtttatgtcgggagccatcaaat

SEQ ID NO: 2157 - DNA, 375 bp, Homo sapiens
  chr3:140660636-140661011
  hyper
tcccccgcccactctccgtcgcgctgcgctgcgtcgctttcagcctctggtgaagggcggcgcgcttaggcaggcggtggcgcggctggagtgccgcggggagggctgtgccggttgctttctgcagccgcatctcggccagctctcctcgccgtccccggggcgctgtgcgtctccagtccgggaccgaagccgcctgccgtagcgggcggccagatccgcgtcccgcctcagcggccggaggacatgcgggagagagaatgagccagagggacacgctggtgcatctgtttgccggagggtaaggtcctggcggggcgtgcgcactggggctgagggtgctggggccgaagacgcaggcgaggggggcgaggg

SEQ ID NO: 2158 - DNA, 36 bp, Homo sapiens
  chr3:140661106-140661142
  hyper
gtggtgaggggggctccggttcggggaagcaagggg

SEQ ID NO: 2159 - DNA, 215 bp, Homo sapiens
  chr3:140661189-140661404
  hyper
gttgaggcatgaaacccgggccgggagtgaggttttgggcccgcggggccggggtgaggcggaggccgaatccatgcgtctgaggagacgcgggcaagagctggggtcggcgcttgattacccggacgccgctggacctggccgcacgccgcaatctagcaggcgtcggggatccagggccgctttgaggagcctggcttcggatttcgcgtagg

SEQ ID NO: 2160 - DNA, 105 bp, Homo sapiens
  chr3:140661406-140661511
  hyper
gcatggcccaaggggacggggcggaaagtgcggaggctgaggacaaaatgggcgccggagactcctttagccctcgctccttgcagcgctcgcttgggcctctgc

SEQ ID NO: 2161 - DNA, 71 bp, Homo sapiens
  chr4:174089921-174089992
  hyper
aggagggaggggagagcggtggcggcggctgcgccgggctgtgagtctctcgccgccggaggaagatgagg

SEQ ID NO: 2162 - DNA, 31 bp, Homo sapiens
  chr4:174089997-174090028
  hyper
gattgggttcatcttacgcagtttgctggtg

SEQ ID NO: 2163 - DNA, 58 bp, Homo sapiens
  chr4:174090106-174090164
  hyper
atgagggtgagtgacccgcccggccccctccggcggcagcgaccggcaacttgttttg

SEQ ID NO: 2164 - DNA, 51 bp, Homo sapiens
  chr4:174090211-174090262
  hyper
gtgggcaccgcagctccgcaggtggtgctggcgcagcgcgggccgaggggg

SEQ ID NO: 2165 - DNA, 222 bp, Homo sapiens
  chr4:174090300-174090522
  hyper
cggcccgccccctcgccgccccttcctccgctcttccccgccccgggctccgtcgccgacacccgcgctgccgcggcagcggctcgggcggccgctctccgcgccgggactgcgggcggagcgggcggagagccgggtccggggggctgcggccgcccggcgtcccgctctggggggccgggaccgcagcgctcacggcccggggacgcggggttggtccag

SEQ ID NO: 2166 - DNA, 106 bp, Homo sapiens
  chr4:174090690-174090796
  hyper
gatggcgccccgcctccggctcttacggagagcgcgcctccccctcaactccggcggcggggagccggggtgcgatgcgcggccgaggcctcgcccggaccgccgg

SEQ ID NO: 2167 - DNA, 192 bp, Homo sapiens
  chr4:174090949-174091141
  hyper
tcctcttccttggctgcggcagggctgcttgggccggaaaactaacttgtgtcggcgcccggccgccccgcgccggctgccggctagctcaggccgacgccgaggggagcggcggcgcggagctcgcggcggctccgctgggacgcatttgtctgccgcccagggcgcgagtgttagcgctgacattccttg

SEQ ID NO: 2168 - DNA, 69 bp, Homo sapiens
  chr4:174091167-174091236
  hyper
cggaacattagttacccggagccgcgccgcgcggggaagggaccgcgggcactgcggcttccctgaccc

SEQ ID NO: 2169 - DNA, 31 bp, Homo sapiens
  chr5:78810400-78810431
  hyper
cttctctccgcacacacgtcacccgcagctc

SEQ ID NO: 2170 - DNA, 73 bp, Homo sapiens
  chr5:114632074-114632147
  hyper
gcagcccctcgcctgccgccagagcagctctcggttctcccggatttacctgttgaggcgctggcgtcgctcc

SEQ ID NO: 2171 - DNA, 121 bp, Homo sapiens
  chr5:114632194-114632315
  hyper
ccgcggtggccgcagccgctaccacaaccgtcgtcagtgcggccatgtttacccgccgagctactcgggccgcggcggccaccggtgcctggggattcgtggcaggcgcaccctggcctct

SEQ ID NO: 2172 - DNA, 62 bp, Homo sapiens
  chr5:139091110-139091172
  hyper
tcctttccacttactgcggcaagtactgcgaggaagcttaaccctctcgctacttggagggt

SEQ ID NO: 2173 - DNA, 140 bp, Homo sapiens
  chr6:53659860-53660000
  hyper
acggggcaggggctcccgctccaggttccttgaagcacttccgaccgcgaagcccggcgcgagaagcgagctaacccaagagccaacaacgagcgcggagagggcagcggactgagcggagccgccggccagagcgggct

SEQ ID NO: 2174 - DNA, 90 bp, Homo sapiens
  chr6:53660062-53660152
  hyper
ctgcatccccctgtggcggtgcaaccgtcatgtggagagcatcgacaagcgccactgctcgctggtctacgtccccgaggagatctaccg

SEQ ID NO: 2175 - DNA, 54 bp, Homo sapiens
  chr6:109776897-109776951
  hyper
agccggctccgctggacgacttaccggcggctccgaagccgggaggggccgctt

SEQ ID NO: 2176 - DNA, 31 bp, Homo sapiens
  chr6:109777176-109777207
  hyper
gggacagtcttgggcccgcccatgcctgcag

SEQ ID NO: 2177 - DNA, 59 bp, Homo sapiens
  chr7:20370483-20370542
  hyper
ccggcctcgcctctctcgcatcctagccgtgtgcaccccagagcgcgccagcaactcgg

SEQ ID NO: 2178 - DNA, 69 bp, Homo sapiens
  chr7:20370687-20370756
  hyper
gggagcggcgatgcctcgctctgtgcctgcgggtgtcggcgggtgcttctagggcgctcccagagccgc

SEQ ID NO: 2179 - DNA, 148 bp, Homo sapiens
  chr7:86848938-86849086
  hyper
gtcggggaagcgctggcgccagggatgggtgggggctcacacgcggggaacgcgactgctccgccccggccccgcgcacctcctcatcttgagcagctgccgcaggaagtgaaaggaaacaaacactgcgtggcagactctcagcggg

SEQ ID NO: 2180 - DNA, 103 bp, Homo sapiens
  chr7:86849533-86849636
  hyper
ccagggccggcgtgctcgccgcagctcccgccgctgctctccccgcgctctctgccggaactgcagcaggagtacggtctaggcacagcgagagggagaatcc

SEQ ID NO: 2181 - DNA, 188 bp, Homo sapiens
  chr7:87849419-87849607
  hyper
gggggccgccccagagcgcaccacgcgggcgtgggggacgcgctccgcagtcgtctccagctcttgcctgtgcgcgcggccgtggctcccctgcctgcgcgcttcttcgtatctttgccattacggcgctaatgcagtgcacgactgaaggtccagtggcggcctacgacctgcgaggcaattcacac

SEQ ID NO: 2182 - DNA, 45 bp, Homo sapiens
  chr7:87849746-87849791
  hyper
acggagctattataagcggagcgcaccatcgcgaggcaggggctg

SEQ ID NO: 2183 - DNA, 41 bp, Homo sapiens
  chr8:94929136-94929177
  hyper
gggcggggcagggtggcggccccgcacggtaggggagcaga

SEQ ID NO: 2184 - DNA, 31 bp, Homo sapiens
  chr8:94929315-94929346
  hyper
tccctactccctgccacgagccgccccgtcc

SEQ ID NO: 2185 - DNA, 10 bp, Homo sapiens
  chr8:94929748-94929758
  hyper
gccgggcagg

SEQ ID NO: 2186 - DNA, 4 bp, Homo sapiens
  chr8:94929775-94929779
  hyper
cggg

SEQ ID NO: 2187 - DNA, 153 bp, Homo sapiens
  chr8:142138355-142138508
  hyper
tcggttccccagggagcgggcggccggcggggctgggcggggccgaaggaaggggccgcttgctccgacgccgcgcacgcgccagggcccgcaggcgggttaggaaatgacgaccgcgcgcgggtctccagcagcacccgccctaggaccggc

SEQ ID NO: 2188 - DNA, 35 bp, Homo sapiens
  chr8:142138705-142138740
  hyper
gcccccggcccccaggcggcgcggctggtccccag

SEQ ID NO: 2189 - DNA, 54 bp, Homo sapiens
  chr8:142317851-142317905
  hyper
ctgatgggtgcgaaagcgggccgggtccaaatgaaggcgcgcgccccggggtgg

SEQ ID NO: 2190 - DNA, 88 bp, Homo sapiens
  chr8:142318141-142318229
  hyper
tgcgaggtgcagggggcggcggggcaggcggctgcgggcggcaggccactcacctgtctcctccggccggggccgcgggggcggcggg

SEQ ID NO: 2191 - DNA, 111 bp, Homo sapiens
  chr8:142318261-142318372
  hyper
ggcgcggagccccgggcgcaccggggtcgggaggcggctgcgggtccgggcgggggctgctccctcggccggccggccgggcggtcagtcagcgacgcgggcgcggagaga

SEQ ID NO: 2192 - DNA, 70 bp, Homo sapiens
  chr8:142318416-142318486
  hyper
tcgggtcggaaacagccgctccgcgccgcttccgctgacgcagcgccggcccctgcgcctcatgactatg

SEQ ID NO: 2193 - DNA, 60 bp, Homo sapiens
  chr8:142318537-142318597
  hyper
cgcgctcattggcctccgctgccgcccaccccgcccccgaacggccgccccgcccccgcc

SEQ ID NO: 2194 - DNA, 49 bp, Homo sapiens
  chr9:504129-504178
  hyper
aggcgctgggggaggacgtcgagcaggccagcctcgttgccagaacccc

SEQ ID NO: 2195 - DNA, 166 bp, Homo sapiens
  chr9:504191-504357
  hyper
gatgggagcaccgcaccgtctcacgggggctggatttcttctccccttgcgggtgtgtgtgcgaggatggacgtggtaaatacgggttggcagaaggagcgaaccgcggtggaggaagttcttctgcttagttctcgccgcggcgaggcccgcgggccaggcgcgg

SEQ ID NO: 2196 - DNA, 59 bp, Homo sapiens
  chr9:504456-504515
  hyper
cgcccccgcggggagccgggcgtcctctgggcggagggagcagccggggcttcgccggc

SEQ ID NO: 2197 - DNA, 209 bp, Homo sapiens
  chr9:504517-504726
  hyper
gcgccgttcttctcacgcgccgctccggggcgcagccacagctgtcgcccaccgcgggtgagaggcttgctggtccgccccggcttccccgccccggcggcggccgtgcggttcgggctttaattctggcgcttgccagccggggccgactccgccccctgcgccccgcccttccccgagctccgggtccgcggcggagcgagcgagcg

SEQ ID NO: 2198 - DNA, 35 bp, Homo sapiens
  chr9:504729-504764
  hyper
ggcaggttgggaggagcggccgaaggtgagtgacg

SEQ ID NO: 2199 - DNA, 31 bp, Homo sapiens
  chr9:504994-505025
  hyper
gccgtcggagtttggcgcgctctgcagcggc

SEQ ID NO: 2200 - DNA, 35 bp, Homo sapiens
  chr9:505040-505075
  hyper
tggaggagggagaggcgcgccgggcacggagcagc

SEQ ID NO: 2201 - DNA, 39 bp, Homo sapiens
  chr9:6414291-6414330
  hyper
cggtttaaccgggggccgggtttacgaatgccctatata

SEQ ID NO: 2202 - DNA, 36 bp, Homo sapiens
  chr9:71320185-71320221
  hyper
caccaagcgggaacccgcgcccgagcccggcgggcg

SEQ ID NO: 2203 - DNA, 31 bp, Homo sapiens
  chr9:92112685-92112716
  hyper
ggctcctgcaggggttcggggagggccccga

SEQ ID NO: 2204 - DNA, 43 bp, Homo sapiens
  chr9:131219334-131219377
  hyper
ttcccccggtagccaccggcagtcctccgcgtgggacccgggc

SEQ ID NO: 2205 - DNA, 31 bp, Homo sapiens
  chr9:139964409-139964440
  hyper
gccgcctcagccggggcgcacagctgctccg

SEQ ID NO: 2206 - DNA, 16 bp, Homo sapiens
  chr9:139964698-139964714
  hyper
agccctccagcacccc

SEQ ID NO: 2207 - DNA, 18 bp, Homo sapiens
  chr9:139964731-139964749
  hyper
cgtcggtgccctgccagc

SEQ ID NO: 2208 - DNA, 61 bp, Homo sapiens
  chr9:139964787-139964848
  hyper
cggtcgtccaggatgtcgaacagggtgcgcaggctctgcaggaaggcgcgcggcagcccct

SEQ ID NO: 2209 - DNA, 74 bp, Homo sapiens
  chr10:3109645-3109719
  hyper
gggccccgcccgtcaccgcccattggcgctggggccgggcgggggcgcgggcggggcggcggttccgagtcagg

SEQ ID NO: 2210 - DNA, 31 bp, Homo sapiens
  chr10:3109996-3110027
  hyper
agcgatgggggggacccggggaaaggtggcg

SEQ ID NO: 2211 - DNA, 92 bp, Homo sapiens
  chr10:3111190-3111282
  hyper
gtgccgcaggttgaggcgctgtgggcgccgccccgcccgccacgagcgcctacgtgatgcccggcccgtcgtctccacgagccccggccccg

SEQ ID NO: 2212 - DNA, 549 bp, Homo sapiens
  chr10:71078203-71078752
  hyper
agccctaggggcttctcgtcccggcggagccgggcggtgcctcctgcctgcgcctcgcacctccccgcctggcacggcccacccgggcacggcgccgccacgcgtgaaggcccgcatcggctccctacgtgggggacgtgcaggatgatgcggggtcgggggggatttcgctgcgtcgcccgccccctttccggcgcaggagggagcggccgccgcgtccccgctccccggccgggacgccaccgccgggcgttgcagaggcgcgccgcaaccaatgggcgtggaggaggtgggtcggctggcggctgtcaccctccaggggacgggagcgcggagaccgggagcgcgcgagctgtcgccgcgccccgggccgagggggaggagccgggggaggaggaggaggaggagccgccgagcagccgccggaggaccacggctcgccagggctgcggaggaccgaccgtccccacgcctgccgccccgcgaccccgaccgccagcatgatcgccgcgcagctcctggcctattacttcacggagctgaaggatg

SEQ ID NO: 2213 - DNA, 43 bp, Homo sapiens
  chr10:71078759-71078802
  hyper
caaaaaggtgagcccccgcccgcgccgccgctggtcctggccg

SEQ ID NO: 2214 - DNA, 113 bp, Homo sapiens
  chr10:71078819-71078932
  hyper
atccgctcgccgcctccgctgcctccatcctccggcgcccggccttctccgggccagcatcgagttggactgcagggcgcaaggaaagccttcgccttcgattctaccggcat

SEQ ID NO: 2215 - DNA, 37 bp, Homo sapiens
  chr10:71078974-71079011
  hyper
tcgggcggaagacccccgagaccgggctgcctgctgc

SEQ ID NO: 2216 - DNA, 40 bp, Homo sapiens
  chr10:71079034-71079074
  hyper
atgtcagataggcccccgggctgtgcggggaggtggccgg

SEQ ID NO: 2217 - DNA, 31 bp, Homo sapiens
  chr11:13690195-13690226
  hyper
ggcctcagccaatgggcgtgccactgcccgt

SEQ ID NO: 2218 - DNA, 57 bp, Homo sapiens
  chr11:45907276-45907333
  hyper
gcggcggctgccctctcgccgcgcctccgcctccttcgcagccgccgcctcctccgc

SEQ ID NO: 2219 - DNA, 42 bp, Homo sapiens
  chr11:73694395-73694437
  hyper
gtcgattggttacagccgccgcgttgtcgggggaaggaacca

SEQ ID NO: 2220 - DNA, 48 bp, Homo sapiens
  chr11:73694446-73694494
  hyper
gcagcaacaggtggcccggcaaccgacaacagccgttgggctcggctg

SEQ ID NO: 2221 - DNA, 31 bp, Homo sapiens
  chr13:45149890-45149921
  hyper
tttttcatttgagttccgcctggcgcaagag

SEQ ID NO: 2222 - DNA, 34 bp, Homo sapiens
  chr13:45150766-45150800
  hyper
cggccctccccccgcgccccgcagaccctttcaa

SEQ ID NO: 2223 - DNA, 61 bp, Homo sapiens
  chr13:45150809-45150870
  hyper
gctcgcggcggctgctcggtgaggaaacgctggccgcggctggggccggggcgacgcggct

SEQ ID NO: 2224 - DNA, 210 bp, Homo sapiens
  chr13:50570751-50570961
  hyper
cgctgcccagcctctgcgggggggctttgggcgggcgcaggactctggaagggagaaaagcccgcagcccggccctccccgtcccaggcggcccgcgcgggtggacggcgggagcaggcggcggttggagacgccggaaggaacgcggtctcaccacccggctccctccgccaaggcgaggcgcggccggggaggcgggacacaggcgaa

SEQ ID NO: 2225 - DNA, 93 bp, Homo sapiens
  chr13:50571253-50571346
  hyper
cccactagccggaggtcggagataagtacccgccgcccggctcctctcgggaaagcggggtggtcctcgaaccttcagcgagggtggggagtt

SEQ ID NO: 2226 - DNA, 114 bp, Homo sapiens
  chr13:50571377-50571491
  hyper
gggggctggcgaaggccgtctgagctccagtccggcagcgcggcagaaaccagcggggcactgtcatgggcctggggaggagcggcctgcggagggcgccggggcagtgtgtct

SEQ ID NO: 2227 - DNA, 40 bp, Homo sapiens
  chr13:50571616-50571656
  hyper
tggcgccgggggagggcgccctaaccgagaagctgcttaa

SEQ ID NO: 2228 - DNA, 72 bp, Homo sapiens
  chr13:50571663-50571735
  hyper
agctccaggctcctggcggttcaccaggtctaaacagccgggctttatttgtgggggcgattgaaaaaattg

SEQ ID NO: 2229 - DNA, 31 bp, Homo sapiens
  chr14:24036950-24036981
  hyper
gcttctgcctcaactccgctcctctgccccc

SEQ ID NO: 2230 - DNA, 31 bp, Homo sapiens
  chr14:64805630-64805661
  hyper
cagcagcaactccctacgttgaagtcgtctc

SEQ ID NO: 2231 - DNA, 40 bp, Homo sapiens
  chr15:59396924-59396964
  hyper
gcatccctgagcaacccggaggggccggttcctgcaccca

SEQ ID NO: 2232 - DNA, 82 bp, Homo sapiens
  chr15:59397169-59397251
  hyper
gaaaaaacaccccaaccggctgttgtgacaatcaaacgtgtctaagaaaattcagccaatgagagtgcgagagtgcatcttg

SEQ ID NO: 2233 - DNA, 104 bp, Homo sapiens
  chr15:59397254-59397358
  hyper
tggccaatgagaacagcgacccgtgcgcagggccgcccaatggggcgcaagcgacgcggtatttgaatcctggaacaaggctacagcgtcgaagatccccagcg

SEQ ID NO: 2234 - DNA, 168 bp, Homo sapiens
  chr15:59397455-59397623
  hyper
tccccgtccctcatggcgctgctccgacgcccgacggtgagtgtgcccggggaccgctctcagaggcgagtccgtcggccccacagctcccctgtcgcttctctcatctgctccgagcttctccgtcccaaccggggctgcttttctcttctccggagctcactgctt

SEQ ID NO: 2235 - DNA, 86 bp, Homo sapiens
  chr15:72409509-72409595
  hyper
aagaacaccatgacagcggctatctgaaagccgtgatggctagggttagtgctagtcggcttggtgatgagcgagctgggaggggt

SEQ ID NO: 2236 - DNA, 31 bp, Homo sapiens
  chr15:72409598-72409629
  hyper
actaagaagagtagggcgaggggcacatggg

SEQ ID NO: 2237 - DNA, 53 bp, Homo sapiens
  chr15:72522449-72522502
  hyper
ggagcgtggtccctggcggccacccggcaagggccggtcgagctctcgggccc

SEQ ID NO: 2238 - DNA, 39 bp, Homo sapiens
  chr15:72523105-72523144
  hyper
agggtggaatcaatcacgagggaccgagagaaggcaggc

SEQ ID NO: 2239 - DNA, 79 bp, Homo sapiens
  chr15:72523318-72523397
  hyper
tccactgcatcccagacgccctggatcctgcgccgccctgcctgcgtgcccggggccggccggcgcgccgggattccgc

SEQ ID NO: 2240 - DNA, 111 bp, Homo sapiens
  chr15:72523418-72523529
  hyper
tggtggggactgatggcgtagcctcctgcaccgctcacctccggcgctgaccgactcgggctacgctgcaaagacgaagagatccggagccacggcgcgtgcagctgctgt

SEQ ID NO: 2241 - DNA, 91 bp, Homo sapiens
  chr15:72523662-72523753
  hyper
accttcaggaggaagcgcggcggcggcggcggaacgcgcgggcaggttgccctttcggtgggactaaattctgcggcggaaggacacagat

SEQ ID NO: 2242 - DNA, 54 bp, Homo sapiens
  chr15:72523972-72524026
  hyper
agcattctcccggccccgccctgccactccccactcctccgggtgtctgctctg

SEQ ID NO: 2243 - DNA, 75 bp, Homo sapiens
  chr16:16043202-16043277
  hyper
ccccaaagatcccaggcgcttccggaaggcgagccaacgctccccaggcccgtccgcgagcgggtgggcctaagc

SEQ ID NO: 2244 - DNA, 217 bp, Homo sapiens
  chr16:21531390-21531607
  hyper
cccacgatggagaagacgccgcacgcggcccacaccaccagcgccagccccggcgagcctgcctccttgagcacgcccgtgggcgtcacgaagatgcccgagctcatgatggcgaccacgatgacggccacgcccttgagtagcgtgatgttcccctgcagggtcacgccctcgccctcgcctgccggcgccgcgccgtccgcgcgcttggcggcca

SEQ ID NO: 2245 - DNA, 31 bp, Homo sapiens
  chr16:29624653-29624684
  hyper
tagcagagcgcgcccacgatggagaagacgc

SEQ ID NO: 2246 - DNA, 43 bp, Homo sapiens
  chr16:29624690-29624733
  hyper
cggcccacatcaccagcgccagccccggcgagcctgcctcctt

SEQ ID NO: 2247 - DNA, 41 bp, Homo sapiens
  chr16:30935602-30935643
  hyper
ccactcgccgccgtcccggcctccgccggagggaggggccg

SEQ ID NO: 2248 - DNA, 75 bp, Homo sapiens
  chr16:67280818-67280893
  hyper
agccaccctggcagaccgacggcgagtggaactcgagcacctccccaggtgcgcctaattcgaagggcagtcaga

SEQ ID NO: 2249 - DNA, 50 bp, Homo sapiens
  chr16:67281139-67281189
  hyper
caccgcgggtatctgcgcgcccaagggcagcgccccgtccaggctgcagg

SEQ ID NO: 2250 - DNA, 157 bp, Homo sapiens
  chr16:67281209-67281366
  hyper
ggaaagttggcacatgcgaaggggtcggtgtcttccaggtactgcaccctcacggtcaccactgataccggctctccgtccccgcggtcttccccgcccgccatggctctgcggccggctcacgcagcgcgcctccgagtcccggccccagtgcagc

SEQ ID NO: 2251 - DNA, 46 bp, Homo sapiens
  chr16:67281377-67281423
  hyper
gcacactgtagctccgcggttcgggcccggccggaccggacgcggc

SEQ ID NO: 2252 - DNA, 74 bp, Homo sapiens
  chr16:67281468-67281542
  hyper
agccaagattagtccccgagtgcgcgccaggaggtaaccactgccggaggcggggccgccgctagccactcaca

SEQ ID NO: 2253 - DNA, 54 bp, Homo sapiens
  chr16:67281543-67281597
  hyper
ggcccaatgggaatcccgttagttcactggctaggagggcgggaaaaaccgagc

SEQ ID NO: 2254 - DNA, 94 bp, Homo sapiens
  chr17:20059179-20059273
  hyper
atacagatgaggtgggcggacagtatgcagatgacgggggcgggccgcgcctggcgggcggtgtgcagttgaggtggtccggcaggatgcagat

SEQ ID NO: 2255 - DNA, 31 bp, Homo sapiens
  chr17:20059278-20059309
  hyper
gggcgggccgcgagggcgggcttgatgcaga

SEQ ID NO: 2256 - DNA, 31 bp, Homo sapiens
  chr17:20059315-20059346
  hyper
ggcggggcccacgggcgcgggagagcagcgg

SEQ ID NO: 2257 - DNA, 64 bp, Homo sapiens
  chr17:29298098-29298162
  hyper
gcctgggcctgggctccgccgttcccgtgtggctggccgaggacgacctcggctgcatcatctg

SEQ ID NO: 2258 - DNA, 302 bp, Homo sapiens
  chr17:29298224-29298526
  hyper
tggaggccctgtggggcgcccgcgacgcccgccgctgggcctgccccacttgccgccagggcgccgcgcagcagccgcacctgcggaagaacacgctactgcaggacctggccgacaagtaccgccgcgccgcacgcgagatacaggcgggctccgaccctgcccactgcccctgcccgggctccagttccctctccagcgcggccgcgaggccccggcgccgcccggaactgcagcgggtagggaggccgggcccgcagctcccctggctcccccgggctgcccgccgcctgaccctttcc

SEQ ID NO: 2259 - DNA, 42 bp, Homo sapiens
  chr17:42634025-42634067
  hyper
tcctttgtgttggctacggggcaattacgcctcggagtcctg

SEQ ID NO: 2260 - DNA, 34 bp, Homo sapiens
  chr18:12658129-12658163
  hyper
gcctcgcgccgtccagcgccgcccagcgcccgcc

SEQ ID NO: 2261 - DNA, 36 bp, Homo sapiens
  chr19:3721530-3721566
  hyper
ttgctggcagccttgtcgggccgggctctggccgcg

SEQ ID NO: 2262 - DNA, 81 bp, Homo sapiens
  chr19:38754970-38755051
  hyper
ggtggcaggtgctcagcgggcagacgccccgccccgccccgccaggttctgttgggggcgaggcccgcgcaagccccgcct

SEQ ID NO: 2263 - DNA, 31 bp, Homo sapiens
  chr19:41859851-41859882
  hyper
gttttgaagccgcccccggccccacccagga

SEQ ID NO: 2264 - DNA, 244 bp, Homo sapiens
  chr19:42901229-42901473
  hyper
ggcagcgataggctttcggagacgccagtctctgccaggcccagtcagtcggccaatagacccggaacctgagggatcggaatcctggtccactccgcagaggcccgagcgggctcgcgagggaacgggttctccgagtctggccgggtaagccctttccagcacgcctagtattaggattctgcacatagctcgggtggaaaaccgtgaggcttagtgaggcttgaggcggaggggggaggag

SEQ ID NO: 2265 - DNA, 154 bp, Homo sapiens
  chr19:49314167-49314321
  hyper
aggccagtggtcttcccggaagtgcgcctcccccggttatttcccagaccccggcgcggggctgcgaacccacctgccccagagcggctgcggccatgatccgtgcggcgcgtaactgtgcccgcccggggcgcggctccgaagagagacgttc

SEQ ID NO: 2266 - DNA, 90 bp, Homo sapiens
  chr22:24236848-24236938
  hyper
gaacggagctggggggcggggcggggggaggacggtggctcgggcccgaagtggacgttcggggcccgacgaggtcgctggggcgggctg

SEQ ID NO: 2267 - DNA, 31 bp, Homo sapiens
  chr22:26825081-26825112
  hyper
cggagcggcggcgggcgcggcctcgggtcgc

SEQ ID NO: 2268 - DNA, 31 bp, Homo sapiens
  chr1:5922753-5922784
  hypo
gcatgggctgcctgaccggcccccaccatgt

SEQ ID NO: 2269 - DNA, 31 bp, Homo sapiens
  chr1:5923674-5923705
  hypo
aaggcacacttatttccgagactgagctgtc

SEQ ID NO: 2270 - DNA, 31 bp, Homo sapiens
  chr1:5928199-5928230
  hypo
actgccattattcctcgcgagtacagcacac

SEQ ID NO: 2271 - DNA, 31 bp, Homo sapiens
  chr1:5933171-5933202
  hypo
gccattcccaggcccacgccacccctgccct

SEQ ID NO: 2272 - DNA, 70 bp, Homo sapiens
  chr1:5935553-5935623
  hypo
ccctgcctgggcccagcgtccacaggagaggacatgcccccggcctgctgagtctcggtcacaccgggtc

SEQ ID NO: 2273 - DNA, 31 bp, Homo sapiens
  chr1:5940498-5940529
  hypo
gtcttcattctcctgccgtgtcagtggcagc

SEQ ID NO: 2274 - DNA, 31 bp, Homo sapiens
  chr1:5940675-5940706
  hypo
cctgtgtgcatttacacgtgcaaatgtctgg

SEQ ID NO: 2275 - DNA, 31 bp, Homo sapiens
  chr1:5942315-5942346
  hypo
gccatctctcagtggcgcgcttacccagcca

SEQ ID NO: 2276 - DNA, 58 bp, Homo sapiens
  chr1:5942369-5942427
  hypo
gccatctctcagtggcgcgcttacccagccatctctcagtgacgcgcttacccagcca

SEQ ID NO: 2277 - DNA, 31 bp, Homo sapiens
  chr1:5943158-5943189
  hypo
cactacaaagaagccacgatcagggtcctca

SEQ ID NO: 2278 - DNA, 42 bp, Homo sapiens
  chr1:5943225-5943267
  hypo
aacaagcaggctggggcgaggaagggacggcagcctgaacca

SEQ ID NO: 2279 - DNA, 58 bp, Homo sapiens
  chr1:5943282-5943340
  hypo
gccagggccagagctgcgggcaccagcactgatgttcacactccgggccacgctgccc

SEQ ID NO: 2280 - DNA, 44 bp, Homo sapiens
  chr1:5944298-5944342
  hypo
cagctggaccaaagcccgccaccgccaaccgtgtgaccccacag

SEQ ID NO: 2281 - DNA, 78 bp, Homo sapiens
  chr1:5950964-5951042
  hypo
gagtctccgtcccagacgtcaatctgcagggtctgcacggccaggtagcgggcaaagcagcgccgctcacctggcttc

SEQ ID NO: 2282 - DNA, 94 bp, Homo sapiens
  chr1:5958566-5958660
  hypo
ggcacgagccccccagcggctctgccgggcagacagccacgcctcagatgccgctctctgagtggatcttcctcctgatcgggacatggcaaag

SEQ ID NO: 2283 - DNA, 31 bp, Homo sapiens
  chr1:5958681-5958712
  hypo
gcattctcccatctacgcgcattcactcaga

SEQ ID NO: 2284 - DNA, 31 bp, Homo sapiens
  chr1:6005139-6005170
  hypo
aaaaagaataaagtatcgctaagacatcttg

SEQ ID NO: 2285 - DNA, 31 bp, Homo sapiens
  chr1:6013728-6013759
  hypo
ccagggacccagctcacggtctcgtgcaaag

SEQ ID NO: 2286 - DNA, 31 bp, Homo sapiens; identical to SEQ ID NO: 2114
  chr1:27719136-27719167
  hypo

SEQ ID NO: 2287 - DNA, 35 bp, Homo sapiens; identical to SEQ ID NO: 2115
  chr1:27719181-27719216
  hypo

SEQ ID NO: 2288 - DNA, 31 bp, Homo sapiens; identical to SEQ ID NO: 2117
  chr1:155164561-155164592
  hypo

SEQ ID NO: 2289 - DNA, 114 bp, Homo sapiens; identical to SEQ ID NO: 2118
  chr1:155164605-155164719
  hypo

SEQ ID NO: 2290 - DNA, 35 bp, Homo sapiens; identical to SEQ ID NO: 2119
  chr1:155164852-155164887
  hypo

SEQ ID NO: 2291 - DNA, 65 bp, Homo sapiens; identical to SEQ ID NO: 2120
  chr1:155164899-155164964
  hypo

SEQ ID NO: 2292 - DNA, 138 bp, Homo sapiens; identical to SEQ ID NO: 2121
  chr1:180123500-180123638
  hypo

SEQ ID NO: 2293 - DNA, 28 bp, Homo sapiens
  chr1:180123658-180123686
  hypo
aggccaaacaacctccgcgaggctaccc

SEQ ID NO: 2294 - DNA, 132 bp, Homo sapiens; identical to SEQ ID NO: 2123
  chr1:180123700-180123832
  hypo

SEQ ID NO: 2295 - DNA, 514 bp, Homo sapiens; identical to SEQ ID NO: 2124
  chr1:180123835-180124349
  hypo

SEQ ID NO: 2296 - DNA, 31 bp, Homo sapiens
  chr1:247482929-247482960
  hypo
tatatactatctaggccgggtgcagtggctc

SEQ ID NO: 2297 - DNA, 37 bp, Homo sapiens; identical to SEQ ID NO: 2125
  chr1:249167851-249167888
  hypo

SEQ ID NO: 2298 - DNA, 31 bp, Homo sapiens
  chr2:22237527-22237558
  hypo
acttgtagacctaagccgcttttaaaaaact

SEQ ID NO: 2299 - DNA, 92 bp, Homo sapiens
  chr2:25057322-25057414
  hypo
aactcgtggccctccccggcccctccctcaccaggggtcgatgagtatctcgaccagggccgtgcagagcaggacgacgcaggagcagctga

SEQ ID NO: 2300 - DNA, 57 bp, Homo sapiens; identical to SEQ ID NO: 2132
  chr2:74426090-74426147
  hypo

SEQ ID NO: 2301 - DNA, 45 bp, Homo sapiens; identical to SEQ ID NO: 2133
  chr2:74426349-74426394
  hypo

SEQ ID NO: 2302 - DNA, 31 bp, Homo sapiens; identical to SEQ ID NO: 2134
  chr2:106362017-106362048
  hypo

SEQ ID NO: 2303 - DNA, 31 bp, Homo sapiens; identical to SEQ ID NO: 2135
  chr2:106362070-106362101
  hypo

SEQ ID NO: 2304 - DNA, 70 bp, Homo sapiens; identical to SEQ ID NO: 2148
  chr2:197035641-197035711
  hypo

SEQ ID NO: 2305 - DNA, 100 bp, Homo sapiens; identical to SEQ ID NO: 2150
  chr3:14444315-14444415
  hypo

SEQ ID NO: 2306 - DNA, 40 bp, Homo sapiens; identical to SEQ ID NO: 2152
  chr3:44803218-44803258
  hypo

SEQ ID NO: 2307 - DNA, 37 bp, Homo sapiens
  chr3:44808574-44808611
  hypo
tacaggtgtgagccaccgtgcccggccaactttcttt

SEQ ID NO: 2308 - DNA, 37 bp, Homo sapiens
  chr3:44816760-44816797
  hypo
catcaaagtttttgtgcgaattcgtcctcctgcagaa

SEQ ID NO: 2309 - DNA, 39 bp, Homo sapiens
  chr3:44816836-44816875
  hypo
tctgtgctgtcctccacgagtctccggctgcactccaac

SEQ ID NO: 2310 - DNA, 31 bp, Homo sapiens
  chr3:44816878-44816909
  hypo
gagcccaagaccttcacgtttgatcatgttg

SEQ ID NO: 2311 - DNA, 24 bp, Homo sapiens
  chr3:44818860-44818884
  hypo
tttttatgtggagcatcgctggcc

SEQ ID NO: 2312 - DNA, 20 bp, Homo sapiens
  chr3:44821037-44821057
  hypo
tatttgtggctgggcacggt

SEQ ID NO: 2313 - DNA, 18 bp, Homo sapiens
  chr3:44825669-44825687
  hypo
tctttttgttttgagacg

SEQ ID NO: 2314 - DNA, 31 bp, Homo sapiens
  chr3:44834019-44834050
  hypo
agggttataacagctacgaattttttttttt

SEQ ID NO: 2315 - DNA, 19 bp, Homo sapiens
  chr3:44836158-44836177
  hypo
atgtacccctgttagccgg

SEQ ID NO: 2316 - DNA, 28 bp, Homo sapiens
  chr3:44876135-44876163
  hypo
tgggcactgtggctcacgcctgtaatct

SEQ ID NO: 2317 - DNA, 31 bp, Homo sapiens
  chr3:44882448-44882479
  hypo
agccaccatgcccagccgtagctagaatatt

SEQ ID NO: 2318 - DNA, 31 bp, Homo sapiens
  chr3:44882483-44882514
  hypo
atgtacttgacatttacgtttaaaagaaatc

SEQ ID NO: 2319 - DNA, 24 bp, Homo sapiens
  chr3:44882895-44882919
  hypo
tgttttttttttgagacggagtct

SEQ ID NO: 2320 - DNA, 31 bp, Homo sapiens
  chr3:73232504-73232535
  hypo
acaagcgtgcaccgaccggcgatggacttca

SEQ ID NO: 2321 - DNA, 58 bp, Homo sapiens; identical to SEQ ID NO: 2155
  chr3:140660222-140660280
  hypo

SEQ ID NO: 2322 - DNA, 299 bp, Homo sapiens; identical to SEQ ID NO: 2156
  chr3:140660318-140660617
  hypo

SEQ ID NO: 2323 - DNA, 375 bp, Homo sapiens; identical to SEQ ID NO: 2157
  chr3:140660636-140661011
  hypo

SEQ ID NO: 2324 - DNA, 36 bp, Homo sapiens; identical to SEQ ID NO: 2158
  chr3:140661106-140661142
  hypo

SEQ ID NO: 2325 - DNA, 215 bp, Homo sapiens; identical to SEQ ID NO: 2159
  chr3:140661189-140661404
  hypo

SEQ ID NO: 2326 - DNA, 105 bp, Homo sapiens; identical to SEQ ID NO: 2160
  chr3:140661406-140661511
  hypo

SEQ ID NO: 2327 - DNA, 31 bp, Homo sapiens
  chr4:3208226-3208257
  hypo
agaacctccatgactccgagcacttaacgtg

SEQ ID NO: 2328 - DNA, 31 bp, Homo sapiens
  chr4:57400757-57400788
  hypo
attgatttatcgtccccgcttgaatatcaat

SEQ ID NO: 2329 - DNA, 71 bp, Homo sapiens; identical to SEQ ID NO: 2161
  chr4:174089921-174089992
  hypo

SEQ ID NO: 2330 - DNA, 31 bp, Homo sapiens; identical to SEQ ID NO: 2162
  chr4:174089997-174090028
  hypo

SEQ ID NO: 2331 - DNA, 58 bp, Homo sapiens; identical to SEQ ID NO: 2163
  chr4:174090106-174090164
  hypo

SEQ ID NO: 2332 - DNA, 51 bp, Homo sapiens; identical to SEQ ID NO: 2164
  chr4:174090211-174090262
  hypo

SEQ ID NO: 2333 - DNA, 222 bp, Homo sapiens; identical to SEQ ID NO: 2165
  chr4:174090300-174090522
  hypo

SEQ ID NO: 2334 - DNA, 106 bp, Homo sapiens; identical to SEQ ID NO: 2166
  chr4:174090690-174090796
  hypo

SEQ ID NO: 2335 - DNA, 31 bp, Homo sapiens
  chr5:16679600-16679631
  hypo
cacaaatttaaccaagcgctagttttttggg

SEQ ID NO: 2336 - DNA, 31 bp, Homo sapiens; identical to SEQ ID NO: 2169
  chr5:78810400-78810431
  hypo

SEQ ID NO: 2337 - DNA, 31 bp, Homo sapiens
  chr6:4494277-4494308
  hypo
ttatttctggcccatacgatcatcatgacct

SEQ ID NO: 2338 - DNA, 31 bp, Homo sapiens
  chr6:4494353-4494384
  hypo
ggatggcattcagctgcgtacaacagaaaac

SEQ ID NO: 2339 - DNA, 60 bp, Homo sapiens
  chr6:4494419-4494479
  hypo
tttctcaaaactacagcgtcctgggctgatgcggcagccccaggacgacctcagcatctc

SEQ ID NO: 2340 - DNA, 36 bp, Homo sapiens
  chr6:4549976-4550012
  hypo
cctggccagtggtttccggggcgcactggggcttgc

SEQ ID NO: 2341 - DNA, 31 bp, Homo sapiens
  chr6:159299253-159299284
  hypo
tcaatgtgaggatttacgttaatttggccag

SEQ ID NO: 2342 - DNA, 31 bp, Homo sapiens
  chr6:159299286-159299317
  hypo
gcagacctgtgtttaacgtttgctgtacctg

SEQ ID NO: 2343 - DNA, 31 bp, Homo sapiens
  chr7:20628396-20628427
  hypo
ggagccccagaatcatcgtcctcctccagcc

SEQ ID NO: 2344 - DNA, 103 bp, Homo sapiens; identical to SEQ ID NO: 2180
  chr7:86849533-86849636
  hypo

SEQ ID NO: 2345 - DNA, 188 bp, Homo sapiens; identical to SEQ ID NO: 2181
  chr7:87849419-87849607
  hypo

SEQ ID NO: 2346 - DNA, 86 bp, Homo sapiens
  chr8:833588-833674
  hypo
ttcgttacataggaacgcgtgtgccgcggcggttcgttacgtaggagcgcgggtgccgcggcggttcgttacgtaggtgcgcgtgt

SEQ ID NO: 2347 - DNA, 41 bp, Homo sapiens; identical to SEQ ID NO: 2183
  chr8:94929136-94929177
  hypo

SEQ ID NO: 2348 - DNA, 31 bp, Homo sapiens; identical to SEQ ID NO: 2184
  chr8:94929315-94929346
  hypo

SEQ ID NO: 2349 - DNA, 10 bp, Homo sapiens
  chr8:94929748-94929758
  hypo
gccgggcagg

SEQ ID NO: 2350 - DNA, 4 bp, Homo sapiens
  chr8:94929775-94929779
  hypo
cggg

SEQ ID NO: 2351 - DNA, 153 bp, Homo sapiens; identical to SEQ ID NO: 2187
  chr8:142138355-142138508
  hypo

SEQ ID NO: 2352 - DNA, 35 bp, Homo sapiens; identical to SEQ ID NO: 2188
  chr8:142138705-142138740
  hypo

SEQ ID NO: 2353 - DNA, 31 bp, Homo sapiens
  chr8:142161895-142161926
  hypo
tgatgggctgccatctcgaccacttcgaaga

SEQ ID NO: 2354 - DNA, 35 bp, Homo sapiens
  chr8:142190006-142190041
  hypo
acgcaggaggtcgaggcgcccgcaggggctggcag

SEQ ID NO: 2355 - DNA, 62 bp, Homo sapiens
  chr8:142203889-142203951
  hypo
cagcacttttccagcacgcagtgcagtcttcttccccagaggcccctcggccattaggttct

SEQ ID NO: 2356 - DNA, 31 bp, Homo sapiens
  chr8:142204676-142204707
  hypo
cgagtcacaggtgacccgtggccctcacgtc

SEQ ID NO: 2357 - DNA, 31 bp, Homo sapiens
  chr8:142205350-142205381
  hypo
gtgtggttgttggagccggagggagcgtgtc

SEQ ID NO: 2358 - DNA, 31 bp, Homo sapiens
  chr8:142226754-142226785
  hypo
ggttcctggtgagcctcgctgcaggacggaa

SEQ ID NO: 2359 - DNA, 31 bp, Homo sapiens
  chr8:142228045-142228076
  hypo
gagcttctccgtgagccgcaggtgggcagag

SEQ ID NO: 2360 - DNA, 48 bp, Homo sapiens
  chr8:142228299-142228347
  hypo
ctggaggtggtggccccgctctggttccggtgccggtgctgccgctgc

SEQ ID NO: 2361 - DNA, 55 bp, Homo sapiens
  chr8:142228542-142228597
  hypo
gtgtagccgccgagggcgtcttttgtgggggagccacttccgtttgggactttag

SEQ ID NO: 2362 - DNA, 108 bp, Homo sapiens
  chr8:142228611-142228719
  hypo
ttatccagcaaggtctcgtcctccttggcggcttccttgaggaaggtggccaggcggggcagcttggtcttggcgagctcctggctggtgctgcggggggtggcgggg

SEQ ID NO: 2363 - DNA, 31 bp, Homo sapiens
  chr8:142228780-142228811
  hypo
ggtccagcgcggtgtccggcacgtgcaatgc

SEQ ID NO: 2364 - DNA, 31 bp, Homo sapiens
  chr8:142242138-142242169
  hypo
ccacacgccaagtgcccgactcaggctctgc

SEQ ID NO: 2365 - DNA, 31 bp, Homo sapiens
  chr8:142253705-142253736
  hypo
tgtgctccagcctgggcgacagagaccctgt

SEQ ID NO: 2366 - DNA, 31 bp, Homo sapiens
  chr8:142254341-142254372
  hypo
ctgtgcctcctccaagcgagcagctccagat

SEQ ID NO: 2367 - DNA, 153 bp, Homo sapiens
  chr8:142263134-142263287
  hypo
tgtgtctgtgaatttccgtgttttcacgcccacctgcgagtgtctgtgaatttccgtgttttcacgcccacctgcgagtgtctgtgaatttccgtgttttcacgcccacctgcaagtctatgaatttccgtgttttcatgcccacctgcgggt

SEQ ID NO: 2368 - DNA, 3 bp, Homo sapiens
  chr8:142263346-142263349
  hypo
ccc

SEQ ID NO: 2369 - DNA, 51 bp, Homo sapiens
  chr8:142263354-142263405
  hypo
tgtgtctgtgaatttccgtgttttcatgcccacctgcgtgtgtctgtgaat

SEQ ID NO: 2370 - DNA, 67 bp, Homo sapiens
  chr8:142263414-142263481
  hypo
ttcatgcccacctgtgcgtctgtgattttccgtgttttcatgcccacctgtgcgtgcctgtgaattt

SEQ ID NO: 2371 - DNA, 157 bp, Homo sapiens
  chr8:142264101-142264258
  hypo
attggtgtgaccagagcggtttccatggcgtaacagaactccctgccaaacatcaccgccccgtgcatcacccacaggcgcatggggattcggtctatggacccctcgctgatggtctcgcagttctcggcctctgcgcctccggctttctgcgggt

SEQ ID NO: 2372 - DNA, 31 bp, Homo sapiens
  chr8:142264394-142264425
  hypo
taatgataaattaagacgtcttctctttctg

SEQ ID NO: 2373 - DNA, 31 bp, Homo sapiens
  chr8:142277816-142277847
  hypo
aaagatactccacactcgaggtcctcaaggg

SEQ ID NO: 2374 - DNA, 31 bp, Homo sapiens
  chr8:142280195-142280226
  hypo
gaccctgagggcacagcgcagttggactacc

SEQ ID NO: 2375 - DNA, 66 bp, Homo sapiens
  chr8:142280227-142280293
  hypo
ctgggtccagcacacacgcagcgcaggcacccagatggtctttaaaagaaacgaatccctaagtgc

SEQ ID NO: 2376 - DNA, 15 bp, Homo sapiens
  chr8:142280336-142280351
  hypo
aaagaaaaccagggg

SEQ ID NO: 2377 - DNA, 31 bp, Homo sapiens
  chr8:142295925-142295956
  hypo
cctaaagatgtgagatcgtgagttctagcca

SEQ ID NO: 2378 - DNA, 31 bp, Homo sapiens
  chr8:142296006-142296037
  hypo
cacaacagaacagggccgggcacctccttga

SEQ ID NO: 2379 - DNA, 31 bp, Homo sapiens
  chr8:142304055-142304086
  hypo
aaaaaaaaaatcatccgcggtaaagatctac

SEQ ID NO: 2380 - DNA, 57 bp, Homo sapiens
  chr8:142305924-142305981
  hypo
gccagcagccctgcaccgcccaggatggtgcggagctcatctcgtaaggtcagaggc

SEQ ID NO: 2381 - DNA, 42 bp, Homo sapiens
  chr8:142306027-142306069
  hypo
caaggtgtccacagcccggggtcagcccgacaagaccaccat

SEQ ID NO: 2382 - DNA, 54 bp, Homo sapiens; identical to SEQ ID NO: 2189
  chr8:142317851-142317905
  hypo

SEQ ID NO: 2383 - DNA, 88 bp, Homo sapiens; identical to SEQ ID NO: 2190
  chr8:142318141-142318229
  hypo

SEQ ID NO: 2384 - DNA, 111 bp, Homo sapiens; identical to SEQ ID NO: 2191
  chr8:142318261-142318372
  hypo

SEQ ID NO: 2385 - DNA, 70 bp, Homo sapiens; identical to SEQ ID NO: 2192
  chr8:142318416-142318486
  hypo

SEQ ID NO: 2386 - DNA, 60 bp, Homo sapiens; identical to SEQ ID NO: 2193
  chr8:142318537-142318597
  hypo

SEQ ID NO: 2387 - DNA, 49 bp, Homo sapiens; identical to SEQ ID NO: 2194
  chr9:504129-504178
  hypo

SEQ ID NO: 2388 - DNA, 166 bp, Homo sapiens; identical to SEQ ID NO: 2195
  chr9:504191-504357
  hypo

SEQ ID NO: 2389 - DNA, 59 bp, Homo sapiens; identical to SEQ ID NO: 2196
  chr9:504456-504515
  hypo

SEQ ID NO: 2390 - DNA, 209 bp, Homo sapiens; identical to SEQ ID NO: 2197
  chr9:504517-504726
  hypo

SEQ ID NO: 2391 - DNA, 35 bp, Homo sapiens; identical to SEQ ID NO: 2198
  chr9:504729-504764
  hypo

SEQ ID NO: 2392 - DNA, 31 bp, Homo sapiens; identical to SEQ ID NO: 2199
  chr9:504994-505025
  hypo

SEQ ID NO: 2393 - DNA, 35 bp, Homo sapiens; identical to SEQ ID NO: 2200
  chr9:505040-505075
  hypo

SEQ ID NO: 2394 - DNA, 44 bp, Homo sapiens
  chr9:92049380-92049424
  hypo
tcctgttactgtctttcgtcagtttaattcgcaggccctagaaa

SEQ ID NO: 2395 - DNA, 31 bp, Homo sapiens; identical to SEQ ID NO: 2205
  chr9:139964409-139964440
  hypo

SEQ ID NO: 2396 - DNA, 74 bp, Homo sapiens; identical to SEQ ID NO: 2209
  chr10:3109645-3109719
  hypo

SEQ ID NO: 2397 - DNA, 31 bp, Homo sapiens; identical to SEQ ID NO: 2210
  chr10:3109996-3110027
  hypo

SEQ ID NO: 2398 - DNA, 92 bp, Homo sapiens; identical to SEQ ID NO: 2211
  chr10:3111190-3111282
  hypo

SEQ ID NO: 2399 - DNA, 549 bp, Homo sapiens; identical to SEQ ID NO: 2212
  chr10:71078203-71078752
  hypo

SEQ ID NO: 2400 - DNA, 43 bp, Homo sapiens; identical to SEQ ID NO: 2213
  chr10:71078759-71078802
  hypo

SEQ ID NO: 2401 - DNA, 113 bp, Homo sapiens; identical to SEQ ID NO: 2214
  chr10:71078819-71078932
  hypo

SEQ ID NO: 2402 - DNA, 37 bp, Homo sapiens; identical to SEQ ID NO: 2215
  chr10:71078974-71079011
  hypo

SEQ ID NO: 2403 - DNA, 40 bp, Homo sapiens; identical to SEQ ID NO: 2216
  chr10:71079034-71079074
  hypo

SEQ ID NO: 2404 - DNA, 23 bp, Homo sapiens
  chr10:71110631-71110654
  hypo
taaaaccaaagctggccgggcgc

SEQ ID NO: 2405 - DNA, 31 bp, Homo sapiens
  chr10:71128907-71128938
  hypo
gagcacttctgccaagcgctgttaaggtgtg

SEQ ID NO: 2406 - DNA, 31 bp, Homo sapiens; identical to SEQ ID NO: 2217
  chr11:13690195-13690226
  hypo

SEQ ID NO: 2407 - DNA, 43 bp, Homo sapiens
  chr12:129148683-129148726
  hypo
caggcacacacacatgcgcacaggcacacgcacccacacgcat

SEQ ID NO: 2408 - DNA, 39 bp, Homo sapiens
  chr13:30128332-30128371
  hypo
aaaagctctgaggccccggtcaggcgccatgaaggggaa

SEQ ID NO: 2409 - DNA, 34 bp, Homo sapiens; identical to SEQ ID NO: 2222
  chr13:45150766-45150800
  hypo

SEQ ID NO: 2410 - DNA, 61 bp, Homo sapiens; identical to SEQ ID NO: 2223
  chr13:45150809-45150870
  hypo

SEQ ID NO: 2411 - DNA, 31 bp, Homo sapiens
  chr13:46288450-46288481
  hypo
ctctacgccttcatgccggccaggagccagg

SEQ ID NO: 2412 - DNA, 31 bp, Homo sapiens
  chr14:66169220-66169251
  hypo
ggaggtataaatgcagcggctatgttagaag

SEQ ID NO: 2413 - DNA, 31 bp, Homo sapiens
  chr14:88686794-88686825
  hypo
aaaaattactatagagcgaaagtaatcaaga

SEQ ID NO: 2414 - DNA, 31 bp, Homo sapiens
  chr14:91775796-91775827
  hypo
gattagccaggtgtggcggtgcatgcctgtg

SEQ ID NO: 2415 - DNA, 41 bp, Homo sapiens
  chr14:91775851-91775892
  hypo
gctagggctggaggatcgcttgaacccgggaggtggacatg

SEQ ID NO: 2416 - DNA, 31 bp, Homo sapiens
  chr14:91781817-91781848
  hypo
ccccaccttttcccaccgccagttgggaaat

SEQ ID NO: 2417 - DNA, 31 bp, Homo sapiens
  chr14:91781870-91781901
  hypo
tggctaagctaggtaacggataatccatgca

SEQ ID NO: 2418 - DNA, 68 bp, Homo sapiens
  chr14:91781918-91781986
  hypo
ggaatggctgtaatcccggctctccgtcttgcaggcaggggttctaggagaggcgttagtggtggagg

SEQ ID NO: 2419 - DNA, 1 bp, Homo sapiens
  chr14:91825111-91825112
  hypo
t

SEQ ID NO: 2420 - DNA, 35 bp, Homo sapiens
  chr14:91825121-91825156
  hypo
taggagtgagccactgcgctcggcctcattgagtc

SEQ ID NO: 2421 - DNA, 31 bp, Homo sapiens
  chr14:91861311-91861342
  hypo
cctcccctcccacccacgtgtcccctgagta

SEQ ID NO: 2422 - DNA, 39 bp, Homo sapiens; identical to SEQ ID NO: 2238
  chr15:72523105-72523144
  hypo

SEQ ID NO: 2423 - DNA, 31 bp, Homo sapiens
  chr16:16080203-16080234
  hypo
ggccatgaaccagtagcgagcagtctgtggc

SEQ ID NO: 2424 - DNA, 187 bp, Homo sapiens
  chr16:16208593-16208780
  hypo
tgtggagttttaactccgagtgtctgcagggatcgccgtgtttggctactccatggccgtgtccatcggggggatcttggcttcccgctgtctgcacgtggacctgctgcacagcatcctgcggtcacccatgagcttctttgagcggacccccagtgggaacctggtgaaccgcttctccaaggag

SEQ ID NO: 2425 - DNA, 31 bp, Homo sapiens
  chr16:16208789-16208820
  hypo
gtggactccatgatcccggaggtcatcaaga

SEQ ID NO: 2426 - DNA, 31 bp, Homo sapiens; identical to SEQ ID NO: 2245
  chr16:29624653-29624684
  hypo

SEQ ID NO: 2427 - DNA, 43 bp, Homo sapiens; identical to SEQ ID NO: 2246
  chr16:29624690-29624733
  hypo

SEQ ID NO: 2428 - DNA, 157 bp, Homo sapiens; identical to SEQ ID NO: 2250
  chr16:67281209-67281366
  hypo

SEQ ID NO: 2429 - DNA, 46 bp, Homo sapiens; identical to SEQ ID NO: 2251
  chr16:67281377-67281423
  hypo

SEQ ID NO: 2430 - DNA, 74 bp, Homo sapiens; identical to SEQ ID NO: 2252
  chr16:67281468-67281542
  hypo

SEQ ID NO: 2431 - DNA, 31 bp, Homo sapiens
  chr16:75513118-75513149
  hypo
tcgcgcaccaggtgcacgatgcgtaggttga

SEQ ID NO: 2432 - DNA, 31 bp, Homo sapiens
  chr16:89206302-89206333
  hypo
gaccccctctttttaacgtacagggtgtcct

SEQ ID NO: 2433 - DNA, 94 bp, Homo sapiens; identical to SEQ ID NO: 2254
  chr17:20059179-20059273
  hypo

SEQ ID NO: 2434 - DNA, 31 bp, Homo sapiens; identical to SEQ ID NO: 2255
  chr17:20059278-20059309
  hypo

SEQ ID NO: 2435 - DNA, 31 bp, Homo sapiens; identical to SEQ ID NO: 2256
  chr17:20059315-20059346
  hypo

SEQ ID NO: 2436 - DNA, 36 bp, Homo sapiens
  chr17:45885681-45885717
  hypo
ttcccatagcctggctcggcccgcagcctccagtag

SEQ ID NO: 2437 - DNA, 65 bp, Homo sapiens
  chr17:45885729-45885794
  hypo
acccaccactctttcccgctgctatccgtctgccgcctggtgggagaaggcggtggcagtgaggg

SEQ ID NO: 2438 - DNA, 31 bp, Homo sapiens
  chr18:12431470-12431501
  hypo
cccgcccgcccgcccacgctgtcctccactt

SEQ ID NO: 2439 - DNA, 31 bp, Homo sapiens
  chr19:10709085-10709116
  hypo
tatggcaactgtgtgtcgacctcctttgctg

SEQ ID NO: 2440 - DNA, 31 bp, Homo sapiens; identical to SEQ ID NO: 2263
  chr19:41859851-41859882
  hypo

SEQ ID NO: 2441 - DNA, 21 bp, Homo sapiens
  chr19:49329359-49329380
  hypo
agccaccgtgcccagcccaac

SEQ ID NO: 2442 - DNA, 41 bp, Homo sapiens
  chr19:57134084-57134125
  hypo
gcaacacgaacctgacgcgccacctgcggattcacacctga

SEQ ID NO: 2443 - DNA, 31 bp, Homo sapiens
  chr19:58054994-58055025
  hypo
aacatgaacatgaaaacgttttacctctgcc

SEQ ID NO: 2444 - DNA, 31 bp, Homo sapiens
  chr20:35612049-35612080
  hypo
agaggtcctctatttacgaaccttcatggcc

SEQ ID NO: 2445 - DNA, 47 bp, Homo sapiens
  chr21:46368231-46368278
  hypo
gtcgtggagcatcgggcgtccggggagctggtcgtggagcatcgggc

SEQ ID NO: 2446 - DNA, 31 bp, Homo sapiens; identical to SEQ ID NO: 2267
  chr22:26825081-26825112
  hypo

SEQ ID NO: 2447 - DNA, 31 bp, Homo sapiens
  chr22:48458712-48458743
  hypo
cactgcgcccggcccacgcgtgcacattttc

SEQ ID NO: 2448 - DNA, 57 bp, Homo sapiens
  chr1:3501583-3501640
  hyper
aggtgtgagtgacacacgtcctgtgtgtgggagtgagtgacacgtgtcctatgtgtg

SEQ ID NO: 2449 - DNA, 38 bp, Homo sapiens
  chr1:6296162-6296200
  hyper
cccgcccgcccctccccgcccctcggggacatccgggc

SEQ ID NO: 2450 - DNA, 31 bp, Homo sapiens
  chr1:20002970-20003001
  hyper
tgaggggtggggattacgatgtgcttcgtct

SEQ ID NO: 2451 - DNA, 49 bp, Homo sapiens
  chr1:26560331-26560380
  hyper
agctgagtgggattctcgtgtccccagccccgcccgcgggccgccagct

SEQ ID NO: 2452 - DNA, 58 bp, Homo sapiens
  chr1:28833265-28833323
  hyper
tttctttttatttgatcgcaccactgcaacctccgcctgctgggctcaagcaattctc

SEQ ID NO: 2453 - DNA, 36 bp, Homo sapiens
  chr1:37940668-37940704
  hyper
gggaagccttgggccccgcaacgcacttccagcccc

SEQ ID NO: 2454 - DNA, 71 bp, Homo sapiens
  chr1:37940708-37940779
  hyper
ttccatctgagagccccgtccctgccttctgggtcccctgggttggcgtgggggttcgaggctttacagct

SEQ ID NO: 2455 - DNA, 38 bp, Homo sapiens
  chr1:37940796-37940834
  hyper
agttcagactaagttccgatcttcgagccaccagctaa

SEQ ID NO: 2456 - DNA, 31 bp, Homo sapiens
  chr1:37940838-37940869
  hyper
tggatgaccttgagcacgtttttaatgtctg

SEQ ID NO: 2457 - DNA, 31 bp, Homo sapiens
  chr1:68001180-68001211
  hyper
cacactgtaaattagtcgagtttctccagtt

SEQ ID NO: 2458 - DNA, 67 bp, Homo sapiens
  chr1:68001252-68001319
  hyper
ttttgccacatggggacgccaccaccgttggtagccggacatactggcactccgtcagggtggaata

SEQ ID NO: 2459 - DNA, 31 bp, Homo sapiens
  chr1:151043337-151043368
  hyper
taactagagaaggaaacgggactaaactggc

SEQ ID NO: 2460 - DNA, 31 bp, Homo sapiens
  chr1:159894793-159894824
  hyper
gcacgcagtgctcacacgtgctcctggaacc

SEQ ID NO: 2461 - DNA, 68 bp, Homo sapiens
  chr1:159894826-159894894
  hyper
gaagtgaagggtcgcgcgggaaagcccaggagcacgagctggcccagggccggcgccacgacccgggg

SEQ ID NO: 2462 - DNA, 81 bp, Homo sapiens
  chr1:159895196-159895277
  hyper
agcacgcacatgtccccgacccccgtacccccgacctgctcaccgttcaagcgggctggagagcggcgcactgactcaagg

SEQ ID NO: 2463 - DNA, 44 bp, Homo sapiens
  chr1:159895285-159895329
  hyper
gcagctgcaagtggtgcgccctgcccagccggggattttcagga

SEQ ID NO: 2464 - DNA, 31 bp, Homo sapiens
  chr1:173836777-173836808
  hyper
ttaacaatagcttactcgggtgactcggcat

SEQ ID NO: 2465 - DNA, 52 bp, Homo sapiens
  chr1:226070448-226070500
  hyper
gaagagctcttagacccgccccgggagagtggggttgcgggggtggtagcat

SEQ ID NO: 2466 - DNA, 54 bp, Homo sapiens
  chr1:226070538-226070592
  hyper
ggtagtcgggaaccgcgcggagcgccctgcaagaggccacggctcccccgccgc

SEQ ID NO: 2467 - DNA, 48 bp, Homo sapiens
  chr1:249167653-249167701
  hyper
aacaaaagcatccattcgtcacttagtggcaagcgtttttccaactac

SEQ ID NO: 2468 - DNA, 31 bp, Homo sapiens
  chr2:43451138-43451169
  hyper
ttttttttgttctattcgtatcacaactgcc

SEQ ID NO: 2469 - DNA, 31 bp, Homo sapiens
  chr2:50629761-50629792
  hyper
aaaaaaggcacaaaaacgaaaggaatgtgtg

SEQ ID NO: 2470 - DNA, 42 bp, Homo sapiens
  chr2:242575607-242575649
  hyper
aaccctataaataacacgtgccattcccgtctttaaaactta

SEQ ID NO: 2471 - DNA, 116 bp, Homo sapiens
  chr3:126701149-126701265
  hyper
ccatctgctctgttatcgatgctcctgttgccggcttccccttccttggcctggttgcgtccaccgggaggccctcccggatgcctcctgcctgggagtggcggttgtgagtacag

SEQ ID NO: 2472 - DNA, 31 bp, Homo sapiens
  chr3:126701321-126701352
  hyper
ctggacagctctggcccgtcaccctggattc

SEQ ID NO: 2473 - DNA, 41 bp, Homo sapiens
  chr3:126701356-126701397
  hyper
gccccacacctcacaccgtgtagatccgctgccccacgcta

SEQ ID NO: 2474 - DNA, 31 bp, Homo sapiens
  chr3:127175258-127175289
  hyper
aaaagccaggtagcctcggaagtgaaacagg

SEQ ID NO: 2475 - DNA, 31 bp, Homo sapiens
  chr3:196467926-196467957
  hyper
cattatctcacttctgcgttacaggcgatgt

SEQ ID NO: 2476 - DNA, 31 bp, Homo sapiens
  chr4:57775638-57775669
  hyper
gagcaattagaaaagtcgatgttgggccaaa

SEQ ID NO: 2477 - DNA, 44 bp, Homo sapiens
  chr4:57775740-57775784
  hyper
ccaacttttgttggtacgtagaactaaaccggtttgtgtttata

SEQ ID NO: 2478 - DNA, 31 bp, Homo sapiens
  chr4:185396653-185396684
  hyper
aggcctcagttttcaacgctgtaaatggaaa

SEQ ID NO: 2479 - DNA, 95 bp, Homo sapiens
  chr5:79551987-79552082
  hyper
cggagcaggctcgacccgggctcgcacttccgctggcgtcaggcgggtgggctgctgcgatcacttcccggttggggcgccgagctccggagtcg

SEQ ID NO: 2480 - DNA, 31 bp, Homo sapiens
  chr5:175305777-175305808
  hyper
ggtccagcgcccctccgcgtgtcctcagccg

SEQ ID NO: 2481 - DNA, 39 bp, Homo sapiens
  chr5:175969999-175970038
  hyper
cggggcgcagggcacgcgggggctcggagttccccgggg

SEQ ID NO: 2482 - DNA, 31 bp, Homo sapiens
  chr6:34100344-34100375
  hyper
tctgtctatccacctgcgtatctttttatct

SEQ ID NO: 2483 - DNA, 47 bp, Homo sapiens
  chr6:39271081-39271128
  hyper
tgaggctgagctggggcgcagccactccgccacggcacagaatgtcc

SEQ ID NO: 2484 - DNA, 14 bp, Homo sapiens
  chr6:41339069-41339083
  hyper
gggacagcctcctc

SEQ ID NO: 2485 - DNA, 113 bp, Homo sapiens
  chr6:53409105-53409218
  hyper
gaggatggccctggacgcggactaggcgaaagcagggacgatgctcccggggccgggaggcgctcgaggacccccgggcgcagtggagaacgcggaccgcgatagggccgggg

SEQ ID NO: 2486 - DNA, 78 bp, Homo sapiens
  chr6:53409633-53409711
  hyper
tgacagaccctgggtccgacgcaccgcgcggaggcgaaggcagaagaccgagagcaggcgggacggctctcggcccgg

SEQ ID NO: 2487 - DNA, 48 bp, Homo sapiens
  chr6:53409753-53409801
  hyper
gcggcggcggaccccacggccgcgctgccgcggcggctcccgcttctc

SEQ ID NO: 2488 - DNA, 41 bp, Homo sapiens
  chr6:53409917-53409958
  hyper
caggttttatagactacgggcgaaggcggggagaggaggcg

SEQ ID NO: 2489 - DNA, 41 bp, Homo sapiens
  chr6:88032034-88032075
  hyper
atacaaacatacacaccgaactggaacgtaatttgaagttg

SEQ ID NO: 2490 - DNA, 44 bp, Homo sapiens
  chr6:88663570-88663614
  hyper
tgcctgaatctgcagccgcaggtttcctgcgttttcagccaagg

SEQ ID NO: 2491 - DNA, 47 bp, Homo sapiens
  chr6:144537938-144537985
  hyper
ctcacttccccagctgcggggcgggaggcggccgggagggggagggc

SEQ ID NO: 2492 - DNA, 31 bp, Homo sapiens
  chr7:99028318-99028349
  hyper
cctggggttagcagagcgggcacagcctatc

SEQ ID NO: 2493 - DNA, 31 bp, Homo sapiens
  chr8:10950048-10950079
  hyper
gggacagggggtatcccgggtgataaaggtt

SEQ ID NO: 2494 - DNA, 35 bp, Homo sapiens
  chr8:10950086-10950121
  hyper
gaaactgctgatctcacgttcgtagggagctggcc

SEQ ID NO: 2495 - DNA, 31 bp, Homo sapiens
  chr8:10950130-10950161
  hyper
ccctgcaaacaagagccgggagactgcaaga

SEQ ID NO: 2496 - DNA, 31 bp, Homo sapiens
  chr8:10950209-10950240
  hyper
aagaacctcattctgccggcttctggaggaa

SEQ ID NO: 2497 - DNA, 31 bp, Homo sapiens
  chr8:29172530-29172561
  hyper
gaaaactcattcttggcgttccctgcaagct

SEQ ID NO: 2498 - DNA, 53 bp, Homo sapiens
  chr8:132917186-132917239
  hyper
tctggagcttgggccccggagtctgcatgtctaataagcgtccctggggttac

SEQ ID NO: 2499 - DNA, 57 bp, Homo sapiens
  chr8:132917251-132917308
  hyper
aagtttaaaagtcactcggtgttggaggatttttagacagacgcgatactacaagta

SEQ ID NO: 2500 - DNA, 31 bp, Homo sapiens
  chr9:117160507-117160538
  hyper
ggctccctcccattcccggagcggtgatgcg

SEQ ID NO: 2501 - DNA, 31 bp, Homo sapiens
  chr10:5707984-5708015
  hyper
gtcggggtcacgcggacgcctctgcaggatg

SEQ ID NO: 2502 - DNA, 31 bp, Homo sapiens
  chr10:50814998-50815029
  hyper
gagagaaaaatgcttccgttttctcctacag

SEQ ID NO: 2503 - DNA, 31 bp, Homo sapiens
  chr10:50815085-50815116
  hyper
aaaggaatttaccaagcgttcaagtgaagag

SEQ ID NO: 2504 - DNA, 59 bp, Homo sapiens
  chr11:8710628-8710687
  hyper
agccggccagtggtgcgcgagcgcagataactcccctggagaggcgggatgttcaactc

SEQ ID NO: 2505 - DNA, 41 bp, Homo sapiens
  chr11:8710728-8710769
  hyper
gaggaatggccaacctcgccgcacttcgagcccctttaggg

SEQ ID NO: 2506 - DNA, 37 bp, Homo sapiens
  chr11:62623642-62623679
  hyper
ggcgatcctggactgacggtcacgactgcctaccctc

SEQ ID NO: 2507 - DNA, 66 bp, Homo sapiens
  chr11:65342124-65342190
  hyper
gaggggtggcagaggccgaggggagtgaagtcgcggcacctcgggccttcccggaggccaagcatg

SEQ ID NO: 2508 - DNA, 40 bp, Homo sapiens
  chr11:65342215-65342255
  hyper
tggggttccagggacccgtattccccgctcagtctgtgaa

SEQ ID NO: 2509 - DNA, 31 bp, Homo sapiens
  chr11:122852599-122852630
  hyper
ccgggagagccaatgacgaggctgccagagg

SEQ ID NO: 2510 - DNA, 31 bp, Homo sapiens
  chr12:52300898-52300929
  hyper
cacccactactccggccgccagacgttgcct

SEQ ID NO: 2511 - DNA, 31 bp, Homo sapiens
  chr12:53135225-53135256
  hyper
atgcccaaatgcaaatcgtcagagctgaagc

SEQ ID NO: 2512 - DNA, 31 bp, Homo sapiens
  chr12:53135508-53135539
  hyper
tgacaagcatggactccggggctcaattgcc

SEQ ID NO: 2513 - DNA, 31 bp, Homo sapiens
  chr12:53765076-53765107
  hyper
tcgagggagggagggcgcgcaaagccggaag

SEQ ID NO: 2514 - DNA, 31 bp, Homo sapiens
  chr12:57861191-57861222
  hyper
catacatgtgtgagcacgagggctgcagtaa

SEQ ID NO: 2515 - DNA, 49 bp, Homo sapiens
  chr12:57861228-57861277
  hyper
cagcaatgccagtgaccgagccaagcaccagaatcggacccattccaat

SEQ ID NO: 2516 - DNA, 31 bp, Homo sapiens
  chr12:57861282-57861313
  hyper
gaatgccctaactaagcgaccctcccctctt

SEQ ID NO: 2517 - DNA, 38 bp, Homo sapiens
  chr12:58259122-58259160
  hyper
cgaagtttgcggccaccgccggccgtgcagtctcccgc

SEQ ID NO: 2518 - DNA, 37 bp, Homo sapiens
  chr12:58259163-58259200
  hyper
tcccccgccggagcgccggccccgcattcctccgggt

SEQ ID NO: 2519 - DNA, 34 bp, Homo sapiens
  chr12:68617123-68617157
  hyper
caacaaccaaccagagcggcgccacactgtccca

SEQ ID NO: 2520 - DNA, 31 bp, Homo sapiens
  chr12:113772605-113772636
  hyper
gtgggccgatgcccagcgctcggatggtcgc

SEQ ID NO: 2521 - DNA, 47 bp, Homo sapiens
  chr12:119772544-119772591
  hyper
aacccctcgttggggccgccttagttctcggccgctctcggaggatg

SEQ ID NO: 2522 - DNA, 131 bp, Homo sapiens
  chr12:122231553-122231684
  hyper
agcactggcggcggcgcgccgggcactagcggagccaagaggtcgggggcggggcggggccggaaccagccccgcccactcggagcagcgccgcctccgccaggcagcctcccggccgacctcccagcctc

SEQ ID NO: 2523 - DNA, 31 bp, Homo sapiens
  chr12:122232040-122232071
  hyper
tggcttggcacatgtccgcctctggcctcag

SEQ ID NO: 2524 - DNA, 31 bp, Homo sapiens
  chr12:122232124-122232155
  hyper
tcatgtctgcccacctcgcctgggccaggga

SEQ ID NO: 2525 - DNA, 31 bp, Homo sapiens
  chr12:122232187-122232218
  hyper
ctgggctccgcttacccgcaccccgaccctg

SEQ ID NO: 2526 - DNA, 31 bp, Homo sapiens
  chr12:122232233-122232264
  hyper
gtctgacgccctctgccgggcaatcgcctcg

SEQ ID NO: 2527 - DNA, 67 bp, Homo sapiens
  chr13:114285839-114285906
  hyper
aattcagcagtggctgcggatagcgaacagatggtgggcatggcaccctcgccgtgtgggaggggac

SEQ ID NO: 2528 - DNA, 31 bp, Homo sapiens
  chr13:114285912-114285943
  hyper
tctgaattgtctttttcgactgtaggtaatt

SEQ ID NO: 2529 - DNA, 31 bp, Homo sapiens
  chr14:21151765-21151796
  hyper
cgttaagtccaaaggccggcagatatatacg

SEQ ID NO: 2530 - DNA, 31 bp, Homo sapiens
  chr14:21152111-21152142
  hyper
ccttcagaacagcaggcggaaaagagaaatt

SEQ ID NO: 2531 - DNA, 31 bp, Homo sapiens
  chr14:70193412-70193443
  hyper
aggagtggatccaccccgtcttctttccctg

SEQ ID NO: 2532 - DNA, 31 bp, Homo sapiens
  chr14:70193479-70193510
  hyper
cggaaagccccagcttcggctcagcccacag

SEQ ID NO: 2533 - DNA, 63 bp, Homo sapiens
  chr14:70193518-70193581
  hyper
catatccttctgcctgcgcaggccagggtgctcgacgccctcgcggtccgcctgcgcgccccc

SEQ ID NO: 2534 - DNA, 35 bp, Homo sapiens
  chr14:70193772-70193807
  hyper
ttgtggtctcggcccgcgggcgactcaccccaccc

SEQ ID NO: 2535 - DNA, 47 bp, Homo sapiens
  chr14:74252874-74252921
  hyper
gctacagttgcagtctcgccactggcccgggccgccagcccctagtt

SEQ ID NO: 2536 - DNA, 92 bp, Homo sapiens
  chr14:74253328-74253420
  hyper
cgtcccaggaaggccaagcaaataaaagtccggggaaagttcctttaacttccttcctgcgccctcgacaagggctgcgaagaggaagaggt

SEQ ID NO: 2537 - DNA, 42 bp, Homo sapiens
  chr14:74253422-74253464
  hyper
tttcccagggaagcaccgggcaggggccgagagctgcgccca

SEQ ID NO: 2538 - DNA, 49 bp, Homo sapiens
  chr14:90420884-90420933
  hyper
aggccaagctgaagtccgaggctcagtcgccctccggaaacctacttcc

SEQ ID NO: 2539 - DNA, 84 bp, Homo sapiens
  chr14:90420934-90421018
  hyper
cccacttcctgtgttccgagggactggcttcccacgtccgcgacctggctctggcctcggagaagaacatcgcgactacaacaa

SEQ ID NO: 2540 - DNA, 15 bp, Homo sapiens
  chr14:90421129-90421144
  hyper
cgtctcctcccattg

SEQ ID NO: 2541 - DNA, 41 bp, Homo sapiens
  chr14:90421147-90421188
  hyper
aacctgccagccactcgcgttaatcccgcagggctattggc

SEQ ID NO: 2542 - DNA, 61 bp, Homo sapiens
  chr14:90421191-90421252
  hyper
agtctttgtttaattacgtttccttggagccgccctggcagtgaggcgcccaggcctgccc

SEQ ID NO: 2543 - DNA, 56 bp, Homo sapiens
  chr14:90421273-90421329
  hyper
tgactgtcccttaactcgttgagcgcggctggaaatccaagcgcttctaggtgctg

SEQ ID NO: 2544 - DNA, 334 bp, Homo sapiens
  chr14:90422191-90422525
  hyper
cggaaggggaaggggccgggcctcgaggcacaagccgctgccgccagggtttgaactgcgcgcatgcgcggcggccgccgaaggggcgggatccgaggcaagcgttggttctgtgcgcctcaggtacgtgttgggcggcagtgggcgcggactcggtgcggtctctcgcgggctgcggtcgggcccgggatcctgctcctggccgagtcgcggtgcgcgggctgctggggtccggcagggctggaggcggaccgcgaggaagcggcgcggccgggaagatggggcagggtcgcctcggccccggggcctcggtttcctccgatcacagcgcctc

SEQ ID NO: 2545 - DNA, 186 bp, Homo sapiens
  chr14:90422609-90422795
  hyper
cctaagcttacaggtgcgtggtcccagaaagtgagtaggaaagcgcccaccacgtgccaggcgcttaagctttctgtgctcggtttcccagtataggaggacggtcacggtacgtagtatagagttgtcctgagggtgaagcgagtttacacttggtgaggcgcttcgaatcgtgcctggccggcc

SEQ ID NO: 2546 - DNA, 31 bp, Homo sapiens
  chr15:33420377-33420408
  hyper
gcaaacaaattgctcccgggaaaaaaagcaa

SEQ ID NO: 2547 - DNA, 35 bp, Homo sapiens
  chr15:63448917-63448952
  hyper
cctagaaaagggctttcgcacgatcaggaaacata

SEQ ID NO: 2548 - DNA, 31 bp, Homo sapiens
  chr15:75119483-75119514
  hyper
tgcgtttctgacgaaacgataatcccttaat

SEQ ID NO: 2549 - DNA, 51 bp, Homo sapiens
  chr16:30077629-30077680
  hyper
aaacggggcgcccttcgcgaggagggaaacccctccgcggtgcttgatgcc

SEQ ID NO: 2550 - DNA, 31 bp, Homo sapiens
  chr16:30077765-30077796
  hyper
atttttcaggggaaggcgcttgctcctccac

SEQ ID NO: 2551 - DNA, 31 bp, Homo sapiens
  chr16:85589832-85589863
  hyper
agcgccgtggcttgaacggtgctttttgttc

SEQ ID NO: 2552 - DNA, 100 bp, Homo sapiens
  chr16:85589932-85590032
  hyper
atgtttggattgaagccgcctctgtattacttaccaggtaagcgagccgtgcgcctccctgggtcccgcgcggcgccggcgcgcccgggaccctccctca

SEQ ID NO: 2553 - DNA, 34 bp, Homo sapiens
  chr16:85590065-85590099
  hyper
gtcggggcattgggtccgccggtgccccccgcag

SEQ ID NO: 2554 - DNA, 177 bp, Homo sapiens
  chr16:85590111-85590288
  hyper
tcggatcctcccgctgcggtcaagcccgcggtgtgcgcggctacgtgcggcggggagcgcccacctggcccgccgcccccatcgcgccgccgccgggggttgcgcgtctcgctccttttgtctgccgggagccggctccgccgcggcggcggagcgagcggccgaggcacttaaacc

SEQ ID NO: 2555 - DNA, 61 bp, Homo sapiens
  chr16:85590289-85590350
  hyper
tccaaggtgaagtaagcgccgagtgtgaagttactttcctgcaggccgccccgatcgggta

SEQ ID NO: 2556 - DNA, 34 bp, Homo sapiens
  chr16:85590432-85590466
  hyper
ggctcgccggcccccccgccgccccccttcctgc

SEQ ID NO: 2557 - DNA, 78 bp, Homo sapiens
  chr16:85590476-85590554
  hyper
ctggaaggttttgttccgccgaggtcggaggagggggccggggaagctcaggagggtatttggcgtggcttcctgttt

SEQ ID NO: 2558 - DNA, 39 bp, Homo sapiens
  chr16:89627716-89627755
  hyper
acggttcggtaccacacgaaggtgcgcgccggccgcggc

SEQ ID NO: 2559 - DNA, 31 bp, Homo sapiens
  chr17:33125098-33125129
  hyper
tcacagggttcctgctcgttctgaatatctc

SEQ ID NO: 2560 - DNA, 34 bp, Homo sapiens
  chr17:38474110-38474144
  hyper
cacttccatattacgccgccgcctcacttctcag

SEQ ID NO: 2561 - DNA, 71 bp, Homo sapiens
  chr17:38474181-38474252
  hyper
agtgtaggataccacacgctgcggtcttctccaccgagcgctattttcattctttccgcagaacctcaccc

SEQ ID NO: 2562 - DNA, 31 bp, Homo sapiens
  chr17:74132738-74132769
  hyper
gctctcagcctcaagtcgggcttaaagatta

SEQ ID NO: 2563 - DNA, 31 bp, Homo sapiens
  chr17:77188903-77188934
  hyper
tttaccaaaacatcctcgcctgttgagttag

SEQ ID NO: 2564 - DNA, 47 bp, Homo sapiens
  chr19:2165095-2165142
  hyper
gtggcccctgaggaggcggggcgcgtgcgtccgcgcttgggaccctc

SEQ ID NO: 2565 - DNA, 288 bp, Homo sapiens
  chr19:2165178-2165466
  hyper
ggaaaagtgaagcaggcgctgtcagcgagcgtgtccggggcgcgagttttggggggcgcgtctgcagggcccggccgggcatccccgcgcgccctgggactcccgcgcgcgctgggcttgtgtcagtttttggaaacgtgctcgctgggggcggggtcaggacgcggagagcgctggggagcccgggctggctcactgccccgggtcggtgcgagtggatgggagagggagcgcagcttccagcctggccgcacgtcccgcgcgcggggctggcggggtagggccctg

SEQ ID NO: 2566 - DNA, 65 bp, Homo sapiens
  chr19:2165479-2165544
  hyper
tctggttgggcagctccgggtgtgcgcctgggcggcctgagccgggatcccgccaggagaggtcc

SEQ ID NO: 2567 - DNA, 62 bp, Homo sapiens
  chr19:2165554-2165616
  hyper
actgaaagcagaggccgcgcttcagcgccccgaccggtttcctccctcgaaagttcaaactc

SEQ ID NO: 2568 - DNA, 31 bp, Homo sapiens
  chr19:2165642-2165673
  hyper
tctgttgggctctcatcgttttaggtggtag

SEQ ID NO: 2569 - DNA, 73 bp, Homo sapiens
  chr19:13030121-13030194
  hyper
cgcccctggccagctgcgctcccgcggacgagtgtgttgtgacgcgtgctcccggccccgccctctttgagaa

SEQ ID NO: 2570 - DNA, 45 bp, Homo sapiens
  chr19:17716508-17716553
  hyper
atgaggtggtgcctcccggtaccagagccccgggatgtggcctcc

SEQ ID NO: 2571 - DNA, 40 bp, Homo sapiens
  chr19:17790866-17790906
  hyper
ggacaggaaagggggccgagagtggcgagggggttctcag

SEQ ID NO: 2572 - DNA, 31 bp, Homo sapiens
  chr19:17790959-17790990
  hyper
gaggggagggtggtatcgggggagaggcttg

SEQ ID NO: 2573 - DNA, 31 bp, Homo sapiens
  chr19:42501310-42501341
  hyper
cggggggcgctgtgtgcggggaggggtctcc

SEQ ID NO: 2574 - DNA, 31 bp, Homo sapiens
  chr19:42636785-42636816
  hyper
agcaggctggaagagccgactcctacggctg

SEQ ID NO: 2575 - DNA, 31 bp, Homo sapiens
  chr19:49929635-49929666
  hyper
ttaaccccttccttcccgctctcccccgcag

SEQ ID NO: 2576 - DNA, 31 bp, Homo sapiens
  chr19:49939532-49939563
  hyper
gaacctgatgttggggcggactctacatttt

SEQ ID NO: 2577 - DNA, 31 bp, Homo sapiens
  chr20:52209196-52209227
  hyper
gcccctcgggcgggaccgcccaggcagcccc

SEQ ID NO: 2578 - DNA, 31 bp, Homo sapiens
  chr20:52209287-52209318
  hyper
gcagtcggggccaaatcgagagacaagaggg

SEQ ID NO: 2579 - DNA, 44 bp, Homo sapiens
  chr20:52209319-52209363
  hyper
tgtgcctgaaactgagcggtttcaccactcggcacctcctggca

SEQ ID NO: 2580 - DNA, 31 bp, Homo sapiens
  chr21:43221770-43221801
  hyper
gattggtaaactgagtcgcggccgcagtggt

SEQ ID NO: 2581 - DNA, 31 bp, Homo sapiens
  chr22:24113336-24113367
  hyper
gaaacatttccccacccgcttccctttcttg

SEQ ID NO: 2582 - DNA, 66 bp, Homo sapiens
  chr22:26756624-26756690
  hyper
caagaaaaagcctccccgaccagggggcgggaaagtgaggcttctcctgtgcgctttccccagcac

SEQ ID NO: 2583 - DNA, 82 bp, Homo sapiens
  chr22:26756703-26756785
  hyper
ctgggctgtaatgacccggtaactgttctctgttccccattcgactgagttttgggagaacagaaaacgtgattctctaatt

SEQ ID NO: 2584 - DNA, 100 bp, Homo sapiens
  chr22:26763713-26763813
  hyper
gggtgatctcccagggcgttacctggcgttctgcaaaccctaatactcttaacgcccccagtttgtgcacacggggaatcgtgagcgccacctggtggca

SEQ ID NO: 2585 - DNA, 31 bp, Homo sapiens
  chr22:26763827-26763858
  hyper
ttattgctttaagcctcgcccccacctccca

SEQ ID NO: 2586 - DNA, 31 bp, Homo sapiens
  chr1:6281775-6281806
  hypo
ggctcaaggagcagctcgtgaaggggtggca

SEQ ID NO: 2587 - DNA, 38 bp, Homo sapiens; identical to SEQ ID NO: 2449
  chr1:6296162-6296200
  hypo

SEQ ID NO: 2588 - DNA, 44 bp, Homo sapiens
  chr1:6347168-6347212
  hypo
tgagagccaggagttccggcacaagtgcacggggaccaggtgca

SEQ ID NO: 2589 - DNA, 31 bp, Homo sapiens
  chr1:9658419-9658450
  hypo
tcaggatctgattccacgtctgacctgtaag

SEQ ID NO: 2590 - DNA, 31 bp, Homo sapiens
  chr1:10470524-10470555
  hypo
ggagtcctgatgtgagcgtcagttatacaac

SEQ ID NO: 2591 - DNA, 31 bp, Homo sapiens
  chr1:11264688-11264719
  hypo
cagctccaggctcagccgtctcagccattcc

SEQ ID NO: 2592 - DNA, 31 bp, Homo sapiens
  chr1:11264734-11264765
  hypo
gagaccctcctggcagcgccccaggcctgtg

SEQ ID NO: 2593 - DNA, 31 bp, Homo sapiens
  chr1:16598342-16598373
  hypo
tcctctgtaggctgggcgcagtggctcacac

SEQ ID NO: 2594 - DNA, 45 bp, Homo sapiens
  chr1:17734377-17734422
  hypo
ctctcttgggtccaggcgagaggagggttccgggaaaggcacctc

SEQ ID NO: 2595 - DNA, 31 bp, Homo sapiens
  chr1:22202046-22202077
  hypo
ctgtgctgtactgcaccgcttagatggagcc

SEQ ID NO: 2596 - DNA, 31 bp, Homo sapiens
  chr1:30338581-30338612
  hypo
aaaaatatgaacagcacgatgcgcaaaattt

SEQ ID NO: 2597 - DNA, 31 bp, Homo sapiens
  chr1:36056174-36056205
  hypo
aaagctgtgttccaggcgcagaggtacaccc

SEQ ID NO: 2598 - DNA, 36 bp, Homo sapiens; identical to SEQ ID NO: 2453
  chr1:37940668-37940704
  hypo

SEQ ID NO: 2599 - DNA, 71 bp, Homo sapiens; identical to SEQ ID NO: 2454
  chr1:37940708-37940779
  hypo

SEQ ID NO: 2600 - DNA, 31 bp, Homo sapiens
  chr1:45101745-45101776
  hypo
gcatgagaacaacaaccgctttgaggagtat

SEQ ID NO: 2601 - DNA, 67 bp, Homo sapiens
  chr1:45101778-45101845
  hypo
gtggtgtggacagaagcggatacgggccaccactctcctggaaggtggcttccgaggtacaagcagc

SEQ ID NO: 2602 - DNA, 31 bp, Homo sapiens
  chr1:45106052-45106083
  hypo
ctttagttctctctgtcgcctgttgggaggg

SEQ ID NO: 2603 - DNA, 49 bp, Homo sapiens
  chr1:46751245-46751294
  hypo
tcgccatcctccttctcgccagccacaataaaaacgaagtcatacaggt

SEQ ID NO: 2604 - DNA, 31 bp, Homo sapiens
  chr1:46751304-46751335
  hypo
tgcaccaggcccctgacgggtgcgagcaccc

SEQ ID NO: 2605 - DNA, 31 bp, Homo sapiens
  chr1:99667087-99667118
  hypo
ggtgttcttgtgcatacgtctttgcaatata

SEQ ID NO: 2606 - DNA, 31 bp, Homo sapiens
  chr1:99667171-99667202
  hypo
gactggataaagccaacgtgaacctcaagat

SEQ ID NO: 2607 - DNA, 31 bp, Homo sapiens
  chr1:99667225-99667256
  hypo
ctttaaccccaaccaacggagtacttgatcc

SEQ ID NO: 2608 - DNA, 31 bp, Homo sapiens
  chr1:110354911-110354942
  hypo
gtccctacatccggctcggcgccgtggctca

SEQ ID NO: 2609 - DNA, 39 bp, Homo sapiens
  chr1:220376259-220376298
  hypo
gggtaagagagggagactccgtctcgaaaacaacaaaag

SEQ ID NO: 2610 - DNA, 18 bp, Homo sapiens
  chr1:223954365-223954383
  hypo
gaatgcaggcccatggcg

SEQ ID NO: 2611 - DNA, 77 bp, Homo sapiens
  chr1:226102815-226102892
  hypo
ggctgaggctgactctcggtgtttctttggagagcgttgcttagtaacagttgcaggggacacgcacagacaggggg

SEQ ID NO: 2612 - DNA, 31 bp, Homo sapiens
  chr1:226102932-226102963
  hypo
tttctagcatgccccacgagtgggagcagtg

SEQ ID NO: 2613 - DNA, 31 bp, Homo sapiens
  chr1:226109457-226109488
  hypo
gtgcccaagaggtgggcgccacccccagtcc

SEQ ID NO: 2614 - DNA, 31 bp, Homo sapiens
  chr1:231127699-231127730
  hypo
ccctccattccctccacggctgccacactgt

SEQ ID NO: 2615 - DNA, 47 bp, Homo sapiens
  chr1:247027353-247027400
  hypo
tttgctgaataaactccgaacactgagaaggccgggggacaggctga

SEQ ID NO: 2616 - DNA, 31 bp, Homo sapiens
  chr1:247027416-247027447
  hypo
gtctgtaatcagaatgcgcatttattgagtt

SEQ ID NO: 2617 - DNA, 31 bp, Homo sapiens
  chr1:249212483-249212514
  hypo
ctcacagaccaacacccggtgtgagaagtgc

SEQ ID NO: 2618 - DNA, 31 bp, Homo sapiens
  chr2:3303472-3303503
  hypo
aggttttgccaaatcacggaagacagacaac

SEQ ID NO: 2619 - DNA, 31 bp, Homo sapiens
  chr2:10926512-10926543
  hypo
gccacagtctgccccccgccggcagaggctg

SEQ ID NO: 2620 - DNA, 31 bp, Homo sapiens
  chr2:11537161-11537192
  hypo
gggctcaataacacaccgagagctgcttttc

SEQ ID NO: 2621 - DNA, 20 bp, Homo sapiens
  chr2:33374270-33374290
  hypo
gactccgtctcactcacaaa

SEQ ID NO: 2622 - DNA, 37 bp, Homo sapiens
  chr2:54019054-54019091
  hypo
aaaaaaaaaaaaaagacggagcctcgctctttcgccc

SEQ ID NO: 2623 - DNA, 59 bp, Homo sapiens
  chr2:61448895-61448954
  hypo
aaagcagcaggatcagcgaggggtacaaagtcaaccgggaaccacgtatgatagatttt

SEQ ID NO: 2624 - DNA, 22 bp, Homo sapiens
  chr2:61449013-61449035
  hypo
acactgtaaatacttacgatgt

SEQ ID NO: 2625 - DNA, 55 bp, Homo sapiens
  chr2:74327711-74327766
  hypo
agcccagcctgacctccgtcaatggcttccactccaagtacgctctcccgtcttt

SEQ ID NO: 2626 - DNA, 31 bp, Homo sapiens
  chr2:74327780-74327811
  hypo
ttccatccagcaaccccgtcttcccctctca

SEQ ID NO: 2627 - DNA, 38 bp, Homo sapiens
  chr2:85885943-85885981
  hypo
ccatactgcagcactttaaaggacggtgtctttttctt

SEQ ID NO: 2628 - DNA, 31 bp, Homo sapiens
  chr2:97305493-97305524
  hypo
acggaaggcataggatcggggaagcagggtc

SEQ ID NO: 2629 - DNA, 31 bp, Homo sapiens
  chr2:97465079-97465110
  hypo
gcctgcccttgagccccgcctgccccacgtg

SEQ ID NO: 2630 - DNA, 24 bp, Homo sapiens
  chr2:122523884-122523908
  hypo
tataaataagtcaggccgggcgtg

SEQ ID NO: 2631 - DNA, 25 bp, Homo sapiens
  chr2:148912495-148912520
  hypo
tattcctattcggccatcttggctc

SEQ ID NO: 2632 - DNA, 31 bp, Homo sapiens
  chr2:149436589-149436620
  hypo
cctgggtgacagagtgcgaccctgtcactaa

SEQ ID NO: 2633 - DNA, 31 bp, Homo sapiens
  chr2:160086243-160086274
  hypo
tcaacgactccgagaacgaagaggacacccc

SEQ ID NO: 2634 - DNA, 31 bp, Homo sapiens
  chr2:234372837-234372868
  hypo
tggggagtgctcttgccgagatggaccgaca

SEQ ID NO: 2635 - DNA, 62 bp, Homo sapiens
  chr2:234372875-234372937
  hypo
aggctggcagacaccccgtggctctgccagtccgcagagcccggcgacgaagaggtatgtgg

SEQ ID NO: 2636 - DNA, 31 bp, Homo sapiens
  chr2:242572244-242572275
  hypo
agaaatgctcaggggacgctggccaccttgc

SEQ ID NO: 2637 - DNA, 106 bp, Homo sapiens
  chr2:242572276-242572382
  hypo
gagaaacccctcctaacgggaagggaacatgggtacgcgaggctccggtactgaccgcggctgggcgacagcaggctacttggataggggacgctcactctcctca

SEQ ID NO: 2638 - DNA, 255 bp, Homo sapiens
  chr2:242572392-242572647
  hypo
cttctcctgtagcttccgcacctggctgtcggagcggctgaccctctgccgcaggctcttcagctcgccgttcttcttctccacctgctcccgcaggcagcacacctggctcttgttctgccgggaggagaagcagtaggagtgcagtgagtcgatgagcttgcaggcccctgacgccgacaggatgacctcgttgatggacatggggctggcgtcgctgtgctcgctctgcacggcttccgtggctggctttgg

SEQ ID NO: 2639 - DNA, 37 bp, Homo sapiens
  chr3:42659547-42659584
  hypo
attagaacaaactggccgggtgcggtggctcaagcct

SEQ ID NO: 2640 - DNA, 31 bp, Homo sapiens
  chr3:51731021-51731052
  hypo
gaaggaagggctgtgtcgcagggccacagtt

SEQ ID NO: 2641 - DNA, 59 bp, Homo sapiens
  chr3:53276151-53276210
  hypo
caaagcggtcattgtgcggattccgggggtcctgggacttgtagcgcatggtgtggaaa

SEQ ID NO: 2642 - DNA, 47 bp, Homo sapiens
  chr3:53276216-53276263
  hypo
acagccatgatctctgcggcgctgcagcatgacgtggggtggctgtg

SEQ ID NO: 2643 - DNA, 15 bp, Homo sapiens
  chr3:176849317-176849332
  hypo
agacagagtctcact

SEQ ID NO: 2644 - DNA, 61 bp, Homo sapiens
  chr3:183525821-183525882
  hypo
ggatcaccctgcagcccgtggcactccacaggaacgtgtatgcgtccgtggtggaggacat

SEQ ID NO: 2645 - DNA, 31 bp, Homo sapiens
  chr3:196530354-196530385
  hypo
caatcaaaggaaaagacgctggttgatagac

SEQ ID NO: 2646 - DNA, 31 bp, Homo sapiens
  chr3:196530400-196530431
  hypo
acacatttattgttagcgggacaagaggagg

SEQ ID NO: 2647 - DNA, 31 bp, Homo sapiens
  chr3:196530457-196530488
  hypo
tcaaaaaattgaaactcgcaagtgtgcagat

SEQ ID NO: 2648 - DNA, 40 bp, Homo sapiens
  chr3:196530517-196530557
  hypo
acagataaatcatatacgaaagaagcgttagaactaaaag

SEQ ID NO: 2649 - DNA, 31 bp, Homo sapiens
  chr4:8770251-8770282
  hypo
gccgtagagccatggccgtgtgcttcgtgac

SEQ ID NO: 2650 - DNA, 31 bp, Homo sapiens
  chr4:44520583-44520614
  hypo
agtcagccatcgcacccggcccagggagttt

SEQ ID NO: 2651 - DNA, 31 bp, Homo sapiens
  chr4:88297006-88297037
  hypo
tgttctgttgttcaatcgctctccattaggt

SEQ ID NO: 2652 - DNA, 31 bp, Homo sapiens
  chr4:183814349-183814380
  hypo
gctggagcactttcagcgtctatgattaatg

SEQ ID NO: 2653 - DNA, 92 bp, Homo sapiens
  chr5:885338-885430
  hypo
ggggtgggaaatgcaacgcacgtggggagaccgccttaggggactgtcgtccgttgccaagcaacacactctggccacgcagcgcaccctgt

SEQ ID NO: 2654 - DNA, 38 bp, Homo sapiens
  chr5:886373-886411
  hypo
gcacagccttggctgccggcaggcgctgtgcaggggag

SEQ ID NO: 2655 - DNA, 65 bp, Homo sapiens
  chr5:902317-902382
  hypo
ttgttgtcaatatcaccgggtagaatggggacacgggaattgagtggactcgagagtatgaaact

SEQ ID NO: 2656 - DNA, 31 bp, Homo sapiens
  chr5:902427-902458
  hypo
aagtcagttaagattgcgtgacaaagtgacc

SEQ ID NO: 2657 - DNA, 31 bp, Homo sapiens
  chr5:902479-902510
  hypo
aagagcagacaggccccgcatactgccctca

SEQ ID NO: 2658 - DNA, 44 bp, Homo sapiens
  chr5:72388278-72388322
  hypo
gtcagaacaagtcattcgccctttctttacggttggagtatggc

SEQ ID NO: 2659 - DNA, 31 bp, Homo sapiens
  chr5:72388383-72388414
  hypo
ctgtcttttttttgtacgaagagtaaaagtt

SEQ ID NO: 2660 - DNA, 43 bp, Homo sapiens
  chr5:72388417-72388460
  hypo
ccagaagctcccagctcgtatctgtttacgttctgttggcctg

SEQ ID NO: 2661 - DNA, 31 bp, Homo sapiens
  chr5:126073558-126073589
  hypo
ccttttctttagaacccgatccaatagcgac

SEQ ID NO: 2662 - DNA, 31 bp, Homo sapiens
  chr5:138538952-138538983
  hypo
ctgagaggcagtgctacggcaggggtgtgaa

SEQ ID NO: 2663 - DNA, 52 bp, Homo sapiens
  chr5:139060688-139060740
  hypo
aggctgtggcaggtgccgaagccctcaatggccagtccgacttcccctacct

SEQ ID NO: 2664 - DNA, 31 bp, Homo sapiens
  chr5:149189353-149189384
  hypo
aatgataagtgctaatcgagggaattccagc

SEQ ID NO: 2665 - DNA, 32 bp, Homo sapiens
  chr5:158884899-158884931
  hypo
acaaagggggatcaaacgtgaggtttaggcca

SEQ ID NO: 2666 - DNA, 52 bp, Homo sapiens
  chr5:176077109-176077161
  hypo
cgaatccccggcatggcggcgatcagtgccggtgggtcgtggaggtgtttgc

SEQ ID NO: 2667 - DNA, 31 bp, Homo sapiens
  chr6:782981-783012
  hypo
aatcagtcacttaacacggcaggtcctcaaa

SEQ ID NO: 2668 - DNA, 52 bp, Homo sapiens
  chr6:4910916-4910968
  hypo
agggaaaaggtgtctccgtgggcctggaaggattagtcgggtttttataaag

SEQ ID NO: 2669 - DNA, 31 bp, Homo sapiens
  chr6:5684506-5684537
  hypo
cccactgacacgtccccggcccctcacctgg

SEQ ID NO: 2670 - DNA, 31 bp, Homo sapiens
  chr6:20687079-20687110
  hypo
aagttactctatatctcgttcactgagatct

SEQ ID NO: 2671 - DNA, 41 bp, Homo sapiens; identical to SEQ ID NO: 2488
  chr6:53409917-53409958
  hypo

SEQ ID NO: 2672 - DNA, 29 bp, Homo sapiens
  chr6:119023870-119023899
  hypo
tggagttggccaggcacggcggctcacgc

SEQ ID NO: 2673 - DNA, 47 bp, Homo sapiens; identical to SEQ ID NO: 2491
  chr6:144537938-144537985
  hypo

SEQ ID NO: 2674 - DNA, 31 bp, Homo sapiens
  chr6:159190328-159190359
  hypo
gtgcggaggtgtcccccgtgcagactcaccc

SEQ ID NO: 2675 - DNA, 31 bp, Homo sapiens
  chr6:160425815-160425846
  hypo
caaaccaaagtggacccgcctgcctgtgcac

SEQ ID NO: 2676 - DNA, 36 bp, Homo sapiens
  chr6:160475954-160475990
  hypo
gcagtggcccagtggacgctgcgtcactcacctgcc

SEQ ID NO: 2677 - DNA, 52 bp, Homo sapiens
  chr6:160476040-160476092
  hypo
ttagagttgaagatctcggtgatcagggaatgaatgacgggcaggctgagct

SEQ ID NO: 2678 - DNA, 50 bp, Homo sapiens
  chr7:803319-803369
  hypo
attatcctggcaggcccggcctgtgtggttcttacgcgtgagggggatag

SEQ ID NO: 2679 - DNA, 37 bp, Homo sapiens
  chr7:902909-902946
  hypo
tggagtgccgccctcccgagctcgcccttgctgcccg

SEQ ID NO: 2680 - DNA, 56 bp, Homo sapiens
  chr7:1579573-1579629
  hypo
caggtcaagaaggaggcgggcgagaacgccccggtgctcagcgatgatgagctggt

SEQ ID NO: 2681 - DNA, 70 bp, Homo sapiens
  chr7:1913954-1914024
  hypo
ggacagagggggtgaccgtggcttgggatggtcagggaagcgtctcaggaggagacgttgcagcagcacc

SEQ ID NO: 2682 - DNA, 31 bp, Homo sapiens
  chr7:2006561-2006592
  hypo
ctccaggagaggctgccggaaatccttcaga

SEQ ID NO: 2683 - DNA, 23 bp, Homo sapiens
  chr7:2162643-2162666
  hypo
aaagcagcaggggagccgggcgc

SEQ ID NO: 2684 - DNA, 31 bp, Homo sapiens
  chr7:2214040-2214071
  hypo
ggtctttgatcacagacgttcatccactgga

SEQ ID NO: 2685 - DNA, 63 bp, Homo sapiens
  chr7:5521795-5521858
  hypo
aggctcagggggcacccgctccatgccagccacgaggatcagaggccccggaggccaaccctg

SEQ ID NO: 2686 - DNA, 31 bp, Homo sapiens
  chr7:6484613-6484644
  hypo
agtcatataataagagcgttgggcaattaga

SEQ ID NO: 2687 - DNA, 31 bp, Homo sapiens
  chr7:17891210-17891241
  hypo
ataaatcagacatggccgtgaaataaagaga

SEQ ID NO: 2688 - DNA, 31 bp, Homo sapiens
  chr7:30490902-30490933
  hypo
taggtctagggccagccgcttggggaagtga

SEQ ID NO: 2689 - DNA, 31 bp, Homo sapiens
  chr7:44746821-44746852
  hypo
aggaacccacttccagcgggtgatcccagaa

SEQ ID NO: 2690 - DNA, 31 bp, Homo sapiens
  chr7:44747007-44747038
  hypo
cagggtgtccccccagcgggggtcagggctc

SEQ ID NO: 2691 - DNA, 31 bp, Homo sapiens
  chr7:45091682-45091713
  hypo
acttgctgtcccacatcggaaaccacatgct

SEQ ID NO: 2692 - DNA, 30 bp, Homo sapiens
  chr7:76246556-76246586
  hypo
atgggcacgagccaccgcaccaggcaattt

SEQ ID NO: 2693 - DNA, 31 bp, Homo sapiens
  chr7:106507803-106507834
  hypo
ccaggactcaccggcccgactccaaagccca

SEQ ID NO: 2694 - DNA, 31 bp, Homo sapiens
  chr7:106836991-106837022
  hypo
cgtgagccactgtgcccggccaggttgactt

SEQ ID NO: 2695 - DNA, 31 bp, Homo sapiens
  chr7:139298886-139298917
  hypo
agttcagtgataccagcgctctcactggaag

SEQ ID NO: 2696 - DNA, 7 bp, Homo sapiens
  chr7:140063542-140063549
  hypo
aaaaaaa

SEQ ID NO: 2697 - DNA, 42 bp, Homo sapiens
  chr7:140063557-140063599
  hypo
aaaaaaaagaaaggagcgggatgttagcggcctggaaagcag

SEQ ID NO: 2698 - DNA, 31 bp, Homo sapiens
  chr7:140063604-140063635
  hypo
cttggctggagcaaagcgatgaagcagagtg

SEQ ID NO: 2699 - DNA, 16 bp, Homo sapiens
  chr7:155520440-155520456
  hypo
ttgccaaaaaggtaac

SEQ ID NO: 2700 - DNA, 36 bp, Homo sapiens
  chr8:38146028-38146064
  hypo
gaggccccagcctctccgctccgttttgatgatctc

SEQ ID NO: 2701 - DNA, 31 bp, Homo sapiens
  chr8:38146091-38146122
  hypo
gcactggttctgacaacgatctccagctggg

SEQ ID NO: 2702 - DNA, 31 bp, Homo sapiens
  chr8:144521915-144521946
  hypo
cacctggagattctgacgtggtggtctgagg

SEQ ID NO: 2703 - DNA, 37 bp, Homo sapiens
  chr8:144521954-144521991
  hypo
aaagctcccctgtgcccgagcccggccatgctgccta

SEQ ID NO: 2704 - DNA, 31 bp, Homo sapiens
  chr8:144559266-144559297
  hypo
agccctgcaacccctccgggccttggtccct

SEQ ID NO: 2705 - DNA, 31 bp, Homo sapiens
  chr8:145746134-145746165
  hypo
ccgcttcacctgtctgcgtgagctcagcatg

SEQ ID NO: 2706 - DNA, 29 bp, Homo sapiens
  chr9:6463261-6463290
  hypo
caagagtgaaacttcgtctcaataaaaaa

SEQ ID NO: 2707 - DNA, 31 bp, Homo sapiens
  chr9:92140640-92140671
  hypo
gtggtggacaaacaggcgccttcccatttgt

SEQ ID NO: 2708 - DNA, 31 bp, Homo sapiens
  chr9:92140691-92140722
  hypo
aaagcttaggtgtgaacgtccctgtggaaag

SEQ ID NO: 2709 - DNA, 31 bp, Homo sapiens
  chr9:115619370-115619401
  hypo
tttcccgaggcaggcacggagagtgcgtgtg

SEQ ID NO: 2710 - DNA, 31 bp, Homo sapiens
  chr9:125511988-125512019
  hypo
agaaaaaaaaaacaaccgtaacaaagggcta

SEQ ID NO: 2711 - DNA, 31 bp, Homo sapiens
  chr9:125648124-125648155
  hypo
ggtttctttcatttaacgtgttttttgtttt

SEQ ID NO: 2712 - DNA, 21 bp, Homo sapiens
  chr9:130262619-130262640
  hypo
acagagcgagactgtctcaaa

SEQ ID NO: 2713 - DNA, 31 bp, Homo sapiens
  chr9:130932122-130932153
  hypo
tggggaacctgaagcccgaagaagaaacaag

SEQ ID NO: 2714 - DNA, 31 bp, Homo sapiens
  chr9:131394892-131394923
  hypo
gttcaaatcttgcctgcgctccctgggctat

SEQ ID NO: 2715 - DNA, 54 bp, Homo sapiens
  chr9:132638504-132638558
  hypo
caccttcatcaaggtgcgtgcggcgaggcggcgcgggggcggctctgccagcct

SEQ ID NO: 2716 - DNA, 85 bp, Homo sapiens
  chr9:139128187-139128272
  hypo
gtgattctccttcagccggactagacggatattcacaggtatctgaaacaggacgccctctgaaacaggccgcagctgccagctt

SEQ ID NO: 2717 - DNA, 30 bp, Homo sapiens
  chr10:98645908-98645938
  hypo
acaggtatgagccaccgtacctggctaaag

SEQ ID NO: 2718 - DNA, 130 bp, Homo sapiens
  chr10:100178723-100178853
  hypo
ctgggagcctgcaggccgggggagcagagcttgggctccggcttcctcacttacagcctcggtggccctggccatggcgtctgatctccggatcattgtgtctccatccgtacaacggggtcaggaatcc

SEQ ID NO: 2719 - DNA, 31 bp, Homo sapiens
  chr10:100178905-100178936
  hypo
ggagagccccagtaaccgccctgccctatgg

SEQ ID NO: 2720 - DNA, 11 bp, Homo sapiens
  chr10:103548965-103548976
  hypo
gaaaatgaggc

SEQ ID NO: 2721 - DNA, 22 bp, Homo sapiens
  chr10:103549449-103549471
  hypo
gccaggcacagtggctcgtgct

SEQ ID NO: 2722 - DNA, 19 bp, Homo sapiens
  chr10:104581680-104581699
  hypo
ggagttttgctcttgtcgc

SEQ ID NO: 2723 - DNA, 31 bp, Homo sapiens
  chr11:984630-984661
  hypo
gtgctgtcttacagatcgtgacgtctgcatc

SEQ ID NO: 2724 - DNA, 31 bp, Homo sapiens
  chr11:1013851-1013882
  hypo
tgagcaccttggtggacgtggggcaggcctc

SEQ ID NO: 2725 - DNA, 57 bp, Homo sapiens
  chr11:1307210-1307267
  hypo
ccagggagggagcacacgcacctgtgatgggcacatagccaacgccctgctggtaca

SEQ ID NO: 2726 - DNA, 31 bp, Homo sapiens
  chr11:6412882-6412913
  hypo
aggtgcccctgtcagccgcatcctcttcctc

SEQ ID NO: 2727 - DNA, 31 bp, Homo sapiens
  chr11:36297993-36298024
  hypo
taattcacagtggcagcgtatccaggcttct

SEQ ID NO: 2728 - DNA, 59 bp, Homo sapiens
  chr11:64032944-64033003
  hypo
gggcaggtgccggctgcggccaggtgccctgtgagtgtctgggccgcctgtgtgctatg

SEQ ID NO: 2729 - DNA, 31 bp, Homo sapiens
  chr11:64975823-64975854
  hypo
cttggtctgcatgagtcggggaatcctccag

SEQ ID NO: 2730 - DNA, 31 bp, Homo sapiens
  chr11:66047172-66047203
  hypo
tccatggttccccctgcgctccctttgccat

SEQ ID NO: 2731 - DNA, 31 bp, Homo sapiens
  chr11:66047212-66047243
  hypo
ccttgctctttgacatcgggaatccatagac

SEQ ID NO: 2732 - DNA, 31 bp, Homo sapiens
  chr11:71185776-71185807
  hypo
gctctcccctgtaagccgggtgcttagtgag

SEQ ID NO: 2733 - DNA, 31 bp, Homo sapiens
  chr11:71185820-71185851
  hypo
aagcccccaggggtcccgcctgctctgatgg

SEQ ID NO: 2734 - DNA, 20 bp, Homo sapiens
  chr11:72844826-72844846
  hypo
aactccgtctcaaaaaaaaa

SEQ ID NO: 2735 - DNA, 29 bp, Homo sapiens
  chr12:1463860-1463889
  hypo
ggctggagtgccgaagcgcagtgtcggct

SEQ ID NO: 2736 - DNA, 31 bp, Homo sapiens
  chr12:1608813-1608844
  hypo
ggtgacctgggacatccgtgccttcggctgg

SEQ ID NO: 2737 - DNA, 31 bp, Homo sapiens
  chr12:1609724-1609755
  hypo
caggacgcttgtcctgcggaatggcaaggaa

SEQ ID NO: 2738 - DNA, 31 bp, Homo sapiens
  chr12:31255937-31255968
  hypo
acttggatcaaaccctcgtgagtgaccccag

SEQ ID NO: 2739 - DNA, 31 bp, Homo sapiens; identical to SEQ ID NO: 2513
  chr12:53765076-53765107
  hypo

SEQ ID NO: 2740 - DNA, 31 bp, Homo sapiens
  chr12:56649705-56649736
  hypo
ctgccacagcttgtcccgggcattcacatct

SEQ ID NO: 2741 - DNA, 31 bp, Homo sapiens
  chr12:56993680-56993711
  hypo
gccagtgaccccaccccgcccctgctggctg

SEQ ID NO: 2742 - DNA, 38 bp, Homo sapiens; identical to SEQ ID NO: 2517
  chr12:58259122-58259160
  hypo

SEQ ID NO: 2743 - DNA, 37 bp, Homo sapiens; identical to SEQ ID NO: 2518
  chr12:58259163-58259200
  hypo

SEQ ID NO: 2744 - DNA, 31 bp, Homo sapiens
  chr12:112082502-112082533
  hypo
aatggttttctgccatcgcaatcagctatgc

SEQ ID NO: 2745 - DNA, 7 bp, Homo sapiens
  chr12:112610021-112610028
  hypo
tctcttt

SEQ ID NO: 2746 - DNA, 38 bp, Homo sapiens
  chr12:112610628-112610666
  hypo
ggccttctgtgcatgtcggacatcgatgcatgcgcacc

SEQ ID NO: 2747 - DNA, 57 bp, Homo sapiens
  chr12:112612695-112612752
  hypo
caaggctgagtaggggcgtgtgtgtgtgtatgtgcacacgtgcgtgagccagaggga

SEQ ID NO: 2748 - DNA, 64 bp, Homo sapiens
  chr12:120156113-120156177
  hypo
ctggtgctctggcgaccgcacgatggcggacatggcgatctgctgcctcgcggtggctggcgtg

SEQ ID NO: 2749 - DNA, 41 bp, Homo sapiens
  chr12:120156178-120156219
  hypo
atgggtgtgggtggtccgttgctttgcggtgggcagctgca

SEQ ID NO: 2750 - DNA, 25 bp, Homo sapiens
  chr12:120991483-120991508
  hypo
gcgtgagccacggcacccaaccagg

SEQ ID NO: 2751 - DNA, 36 bp, Homo sapiens
  chr12:121531379-121531415
  hypo
ggggcagggggcagcacttgtcggggagactcaggc

SEQ ID NO: 2752 - DNA, 131 bp, Homo sapiens; identical to SEQ ID NO: 2522
  chr12:122231553-122231684
  hypo

SEQ ID NO: 2753 - DNA, 31 bp, Homo sapiens; identical to SEQ ID NO: 2524
  chr12:122232124-122232155
  hypo

SEQ ID NO: 2754 - DNA, 31 bp, Homo sapiens; identical to SEQ ID NO: 2525
  chr12:122232187-122232218
  hypo

SEQ ID NO: 2755 - DNA, 31 bp, Homo sapiens; identical to SEQ ID NO: 2526
  chr12:122232233-122232264
  hypo

SEQ ID NO: 2756 - DNA, 50 bp, Homo sapiens
  chr12:123340659-123340709
  hypo
ctgcccagctggagggcgagcggagccagggcctgcgtgaggaggctgag

SEQ ID NO: 2757 - DNA, 31 bp, Homo sapiens
  chr12:133306572-133306603
  hypo
atgggcttcctccccacggggggcctttggt

SEQ ID NO: 2758 - DNA, 15 bp, Homo sapiens
  chr13:22091943-22091958
  hypo
gcgcgcgcgcacacg

SEQ ID NO: 2759 - DNA, 31 bp, Homo sapiens
  chr13:32930125-32930156
  hypo
gagagcatgtaaacttcgaggaaattgatat

SEQ ID NO: 2760 - DNA, 60 bp, Homo sapiens
  chr13:111940219-111940279
  hypo
ggggaacagacaggcacggatggccacgtcgacactgagagttgtcggccttttgttttc

SEQ ID NO: 2761 - DNA, 31 bp, Homo sapiens
  chr13:114205218-114205249
  hypo
tttaagccagggttttcgtatacctgtcagc

SEQ ID NO: 2762 - DNA, 68 bp, Homo sapiens
  chr13:114284290-114284358
  hypo
agccagcactgcctggcgtggagctggcgggttctcagtctgacatcaactcccggagaatggcatct

SEQ ID NO: 2763 - DNA, 31 bp, Homo sapiens
  chr13:114284433-114284464
  hypo
ctgtttggatctcccacgtggcccagtgccc

SEQ ID NO: 2764 - DNA, 31 bp, Homo sapiens
  chr13:114284481-114284512
  hypo
acacacacacacacacgcgtattgaacaaaa

SEQ ID NO: 2765 - DNA, 31 bp, Homo sapiens
  chr13:114284520-114284551
  hypo
acaggacatttatccacgcccaggagattta

SEQ ID NO: 2766 - DNA, 90 bp, Homo sapiens
  chr13:114285736-114285826
  hypo
gagccacattcagaaccggtggggtgatgccgtcaccgtgacaaaagcgtccaccgctggacgtttttcctgctccgtcatggctgctca

SEQ ID NO: 2767 - DNA, 67 bp, Homo sapiens; identical to SEQ ID NO: 2527
  chr13:114285839-114285906
  hypo

SEQ ID NO: 2768 - DNA, 31 bp, Homo sapiens; identical to SEQ ID NO: 2528
  chr13:114285912-114285943
  hypo

SEQ ID NO: 2769 - DNA, 31 bp, Homo sapiens
  chr14:23815818-23815849
  hypo
gtgtgggccagcctcccgccagggtactcag

SEQ ID NO: 2770 - DNA, 31 bp, Homo sapiens
  chr14:64892253-64892284
  hypo
gctgacaggggccaggcgagcagccccaaag

SEQ ID NO: 2771 - DNA, 92 bp, Homo sapiens; identical to SEQ ID NO: 2536
  chr14:74253328-74253420
  hypo

SEQ ID NO: 2772 - DNA, 42 bp, Homo sapiens; identical to SEQ ID NO: 2537
  chr14:74253422-74253464
  hypo

SEQ ID NO: 2773 - DNA, 15 bp, Homo sapiens
  chr14:74647250-74647265
  hypo
gcgcccagcctaggg

SEQ ID NO: 2774 - DNA, 20 bp, Homo sapiens
  chr14:79525884-79525904
  hypo
ccaccgcgcctggcctcagg

SEQ ID NO: 2775 - DNA, 49 bp, Homo sapiens; identical to SEQ ID NO: 2538
  chr14:90420884-90420933
  hypo

SEQ ID NO: 2776 - DNA, 84 bp, Homo sapiens; identical to SEQ ID NO: 2539
  chr14:90420934-90421018
  hypo

SEQ ID NO: 2777 - DNA, 15 bp, Homo sapiens
  chr14:90421129-90421144
  hypo
cgtctcctcccattg

SEQ ID NO: 2778 - DNA, 41 bp, Homo sapiens; identical to SEQ ID NO: 2541
  chr14:90421147-90421188
  hypo

SEQ ID NO: 2779 - DNA, 61 bp, Homo sapiens; identical to SEQ ID NO: 2542
  chr14:90421191-90421252
  hypo

SEQ ID NO: 2780 - DNA, 56 bp, Homo sapiens; identical to SEQ ID NO: 2543
  chr14:90421273-90421329
  hypo

SEQ ID NO: 2781 - DNA, 334 bp, Homo sapiens; identical to SEQ ID NO: 2544
  chr14:90422191-90422525
  hypo

SEQ ID NO: 2782 - DNA, 186 bp, Homo sapiens; identical to SEQ ID NO: 2545
  chr14:90422609-90422795
  hypo

SEQ ID NO: 2783 - DNA, 31 bp, Homo sapiens
  chr14:93423288-93423319
  hypo
gagtctgggagccacacgcccagctaggaag

SEQ ID NO: 2784 - DNA, 59 bp, Homo sapiens
  chr14:105245407-105245466
  hypo
catgctgggaggcccacgtgtccccagcctcccacctagcagggcgcctgggtctccat

SEQ ID NO: 2785 - DNA, 31 bp, Homo sapiens
  chr15:22547260-22547291
  hypo
atccgcgggagcggtgcgggagacgtccgcg

SEQ ID NO: 2786 - DNA, 39 bp, Homo sapiens
  chr15:22929894-22929933
  hypo
ggtgagcacccacctcgcgcactgcgggccctcccgaga

SEQ ID NO: 2787 - DNA, 31 bp, Homo sapiens
  chr15:28356880-28356911
  hypo
tctcatctcacgaggacgtttccccatctta

SEQ ID NO: 2788 - DNA, 31 bp, Homo sapiens
  chr15:28362499-28362530
  hypo
accccattgggcatgtcgccagtgatgtgcc

SEQ ID NO: 2789 - DNA, 31 bp, Homo sapiens
  chr15:28390067-28390098
  hypo
ccaagctctcccaagccgaagtgcacagtga

SEQ ID NO: 2790 - DNA, 31 bp, Homo sapiens
  chr15:72773266-72773297
  hypo
cattaagtgttttattcgtttaacatcattt

SEQ ID NO: 2791 - DNA, 25 bp, Homo sapiens
  chr15:86096036-86096061
  hypo
gttttttcaccgtgttagccaggat

SEQ ID NO: 2792 - DNA, 31 bp, Homo sapiens
  chr16:111054-111085
  hypo
tctgaggtctgaagagcgaacaccgggcaga

SEQ ID NO: 2793 - DNA, 46 bp, Homo sapiens
  chr16:111127-111173
  hypo
tcctccgaggtctgcacgcagcccgacctgtcgttgcgcacgcagc

SEQ ID NO: 2794 - DNA, 31 bp, Homo sapiens
  chr16:339929-339960
  hypo
atctcaggaagacctacggcccccaaacctt

SEQ ID NO: 2795 - DNA, 55 bp, Homo sapiens
  chr16:2579463-2579518
  hypo
gctctgtcccagacttcgtggtgctcgacgactcccttcacgtccaggccaccta

SEQ ID NO: 2796 - DNA, 43 bp, Homo sapiens
  chr16:4933626-4933669
  hypo
cacggtgggcttcctccggggacagctcgcggcctgtgtcagg

SEQ ID NO: 2797 - DNA, 31 bp, Homo sapiens
  chr16:15704351-15704382
  hypo
tactgtactttctacccgtaactggacctgt

SEQ ID NO: 2798 - DNA, 31 bp, Homo sapiens
  chr16:16047431-16047462
  hypo
gctgcttggcacacagcgctcagtaaagatc

SEQ ID NO: 2799 - DNA, 31 bp, Homo sapiens
  chr16:22285048-22285079
  hypo
ggccagaacctcagcccggacaggtactgca

SEQ ID NO: 2800 - DNA, 31 bp, Homo sapiens
  chr16:22285108-22285139
  hypo
ctgggctgcaggtgggcgcttgtcctcggta

SEQ ID NO: 2801 - DNA, 31 bp, Homo sapiens
  chr16:28116152-28116183
  hypo
tgcctgtcactacctgcgcaaaagacatcca

SEQ ID NO: 2802 - DNA, 42 bp, Homo sapiens
  chr16:28116221-28116263
  hypo
tagcccctggagttggcggttcacaccgcgagttcttcagga

SEQ ID NO: 2803 - DNA, 31 bp, Homo sapiens
  chr16:28116278-28116309
  hypo
tttgagagagaatgcacgggtcagtgccaag

SEQ ID NO: 2804 - DNA, 31 bp, Homo sapiens
  chr16:29857108-29857139
  hypo
tggccgctgcccttggcgctcctgttcctgc

SEQ ID NO: 2805 - DNA, 31 bp, Homo sapiens
  chr16:29922300-29922331
  hypo
tggtctgcttcttctccgtagcatagacaat

SEQ ID NO: 2806 - DNA, 31 bp, Homo sapiens
  chr16:30001179-30001210
  hypo
gctttagagaaatggacggtgcagggcatgc

SEQ ID NO: 2807 - DNA, 144 bp, Homo sapiens
  chr16:58031169-58031313
  hypo
catgctgccgcaggtccgagggccgcttgaaggccttctggcactcgccgcagcggaagggccgctccccacttggcgtgcacgggtgctgcagcagctccgacgactccttgaaatgcaactcgcacacgttgcagcggaaca

SEQ ID NO: 2808 - DNA, 156 bp, Homo sapiens
  chr16:58031363-58031519
  hypo
tgcttgaaggtcttctcgcagactgcgcacttgtagggccgctcggagctgtgcgtgcgcttgtggtgcaccaggtgcgacgactggctgaagcttttgtcacacagcgtgcacttgtagggcttctcaccggtgtggatccgctcatgccgagag

SEQ ID NO: 2809 - DNA, 56 bp, Homo sapiens
  chr16:69352433-69352489
  hypo
taagccaggaaggcttcgttccttaaccagtgtgcaggcagcggagcctggacttg

SEQ ID NO: 2810 - DNA, 31 bp, Homo sapiens
  chr16:69352521-69352552
  hypo
ccagcttgtgactttccgtctcccttcccag

SEQ ID NO: 2811 - DNA, 31 bp, Homo sapiens
  chr16:69352565-69352596
  hypo
agtgaaggggataatccggagaaaaagaaac

SEQ ID NO: 2812 - DNA, 177 bp, Homo sapiens
  chr16:69352609-69352786
  hypo
gatgggtaagtggctcgcggccctgtggcagcggcaggggatgagagtgggtccgctgctgggttggctcatgccccttggccgggcccgggcccgggccggcctccctctcgcaggtgccgtcgtgatggagaagcccaacatacggtggaacgacgtggccgggctggagggggc

SEQ ID NO: 2813 - DNA, 31 bp, Homo sapiens
  chr16:69495174-69495205
  hypo
attcttcagtctcttgcggttactcttcaag

SEQ ID NO: 2814 - DNA, 100 bp, Homo sapiens; identical to SEQ ID NO: 2552
  chr16:85589932-85590032
  hypo

SEQ ID NO: 2815 - DNA, 34 bp, Homo sapiens; identical to SEQ ID NO: 2553
  chr16:85590065-85590099
  hypo

SEQ ID NO: 2816 - DNA, 177 bp, Homo sapiens; identical to SEQ ID NO: 2554
  chr16:85590111-85590288
  hypo

SEQ ID NO: 2817 - DNA, 31 bp, Homo sapiens
  chr16:85694658-85694689
  hypo
tgtgtcatcttaggagcggcaggcagccagg

SEQ ID NO: 2818 - DNA, 31 bp, Homo sapiens
  chr16:85704415-85704446
  hypo
acgtttatgtatttatcggtacaattcaaag

SEQ ID NO: 2819 - DNA, 31 bp, Homo sapiens
  chr16:85704464-85704495
  hypo
ccacaggagaggccttcgctggctgcactgg

SEQ ID NO: 2820 - DNA, 45 bp, Homo sapiens
  chr16:88642724-88642769
  hypo
tagatgcgagccaccgtacctggccagcctcgtcttttacatacg

SEQ ID NO: 2821 - DNA, 54 bp, Homo sapiens
  chr16:88725665-88725719
  hypo
tctgctcggttttgtgcgaggggaggtctctgaggatggcggacagttccaggg

SEQ ID NO: 2822 - DNA, 35 bp, Homo sapiens
  chr16:88725814-88725849
  hypo
cgctgccctgacaggccgggcgaacctctgctttc

SEQ ID NO: 2823 - DNA, 26 bp, Homo sapiens
  chr16:89290251-89290277
  hypo
agcctgggtgacagagcgagactcca

SEQ ID NO: 2824 - DNA, 31 bp, Homo sapiens
  chr16:89357667-89357698
  hypo
gttacggagccccctgcgtccacctgacagc

SEQ ID NO: 2825 - DNA, 39 bp, Homo sapiens; identical to SEQ ID NO: 2558
  chr16:89627716-89627755
  hypo

SEQ ID NO: 2826 - DNA, 48 bp, Homo sapiens
  chr16:89764356-89764404
  hypo
agcagcaggggagcctcgggggggcaggggtggcggctcctcatcctg

SEQ ID NO: 2827 - DNA, 38 bp, Homo sapiens
  chr16:89764524-89764562
  hypo
gatctcacactccagccggagggcgaagcagcccaggg

SEQ ID NO: 2828 - DNA, 72 bp, Homo sapiens
  chr16:89764567-89764639
  hypo
tgcaccagctggcaggcggggggcagggcggtcaccatgagccgatggctgtctctgcgtacgtagcccatc

SEQ ID NO: 2829 - DNA, 71 bp, Homo sapiens
  chr17:1792140-1792211
  hypo
tgtcagtaagtagcctcggtagatgagaaccacggttgtgttcacggaggccctcccgtgtgccaggcact

SEQ ID NO: 2830 - DNA, 31 bp, Homo sapiens
  chr17:1792237-1792268
  hypo
ttcctggtaggaagcccgcagatgagtaggt

SEQ ID NO: 2831 - DNA, 31 bp, Homo sapiens
  chr17:1792271-1792302
  hypo
gaagagcttatccatccgctttttcatgcca

SEQ ID NO: 2832 - DNA, 79 bp, Homo sapiens
  chr17:2291974-2292053
  hypo
cccccaagcctaggaacgtgccccctgtacttgggctaaaccgatccatgagaaatggctgttgcgtcccatgacccag

SEQ ID NO: 2833 - DNA, 35 bp, Homo sapiens
  chr17:2595623-2595658
  hypo
ggccttggcgtttggacgggcggcccctcacctga

SEQ ID NO: 2834 - DNA, 31 bp, Homo sapiens
  chr17:8365272-8365303
  hypo
actgtctgttcagggtcgctactcctgcccg

SEQ ID NO: 2835 - DNA, 31 bp, Homo sapiens
  chr17:8390694-8390725
  hypo
aaagccacataggtcacgtggtgccatccag

SEQ ID NO: 2836 - DNA, 43 bp, Homo sapiens
  chr17:12905897-12905940
  hypo
tgtgaagaaacagacccggcatttgcagcgtctgttaggaggc

SEQ ID NO: 2837 - DNA, 31 bp, Homo sapiens
  chr17:27011596-27011627
  hypo
ccctcaggcctgtagtcgaaagctctacaat

SEQ ID NO: 2838 - DNA, 36 bp, Homo sapiens
  chr17:35414065-35414101
  hypo
ccctggaaagatgctgcgttccgaacctgtgcctaa

SEQ ID NO: 2839 - DNA, 54 bp, Homo sapiens
  chr17:35872840-35872894
  hypo
ggcaactgatagactacgagcgccagctctttgggaagtcgacagttaaaatgg

SEQ ID NO: 2840 - DNA, 18 bp, Homo sapiens
  chr17:37407230-37407248
  hypo
aattcttgcataagcccg

SEQ ID NO: 2841 - DNA, 21 bp, Homo sapiens
  chr17:38395607-38395628
  hypo
ccactgcgcccagccttggct

SEQ ID NO: 2842 - DNA, 31 bp, Homo sapiens
  chr17:38527562-38527593
  hypo
tggagtcctcaggggcgcgggcacctcgctg

SEQ ID NO: 2843 - DNA, 31 bp, Homo sapiens
  chr17:41528541-41528572
  hypo
atgacaagaggagacacgttgttcattcatg

SEQ ID NO: 2844 - DNA, 30 bp, Homo sapiens
  chr17:60582248-60582278
  hypo
ctgtctcacttagtggcgtgatcttggctt

SEQ ID NO: 2845 - DNA, 31 bp, Homo sapiens
  chr17:62781267-62781298
  hypo
ggacacagctgtgacacggtgagtatcctgg

SEQ ID NO: 2846 - DNA, 31 bp, Homo sapiens
  chr17:73910407-73910438
  hypo
ctcctcccaggaattgcgctgcactctgtgc

SEQ ID NO: 2847 - DNA, 31 bp, Homo sapiens; identical to SEQ ID NO: 2562
  chr17:74132738-74132769
  hypo

SEQ ID NO: 2848 - DNA, 31 bp, Homo sapiens
  chr17:74703800-74703831
  hypo
ccaatgtttgggaatccgaccatccagcctt

SEQ ID NO: 2849 - DNA, 31 bp, Homo sapiens
  chr17:74716633-74716664
  hypo
aagactcactcagagtcgaggcctgtgtctc

SEQ ID NO: 2850 - DNA, 38 bp, Homo sapiens
  chr17:75411918-75411956
  hypo
tggctcctggtggctgcgaggagcgtgggcaggacagc

SEQ ID NO: 2851 - DNA, 31 bp, Homo sapiens
  chr17:78587645-78587676
  hypo
gactcgggctgggccgcgtgttctggataag

SEQ ID NO: 2852 - DNA, 31 bp, Homo sapiens
  chr17:78667553-78667584
  hypo
gtgctgtgggaaacagcgttttgccaggggc

SEQ ID NO: 2853 - DNA, 31 bp, Homo sapiens
  chr17:78667622-78667653
  hypo
gtggatcaggtgggcacgggcctggaacagg

SEQ ID NO: 2854 - DNA, 46 bp, Homo sapiens
  chr17:78667682-78667728
  hypo
gaatgtctggagagcccggcatggtccggagcgtccacgcagccag

SEQ ID NO: 2855 - DNA, 64 bp, Homo sapiens
  chr17:78811168-78811232
  hypo
acagggaggggcctgacggcaccatcacagcgcagagctcagccctgaccgccaggactccttt

SEQ ID NO: 2856 - DNA, 31 bp, Homo sapiens
  chr17:79256352-79256383
  hypo
cagcccagccccacagcgagaccagccagag

SEQ ID NO: 2857 - DNA, 15 bp, Homo sapiens
  chr17:80446257-80446272
  hypo
ttttttttttttgag

SEQ ID NO: 2858 - DNA, 37 bp, Homo sapiens
  chr17:80895932-80895969
  hypo
agatggtgcagttccccggcgacgtgaggaggcaggc

SEQ ID NO: 2859 - DNA, 75 bp, Homo sapiens
  chr17:80895984-80896059
  hypo
tctgctcctctgccaccgtttcccgctggtgagtgcctgcccctgctcacgtgtgtttgccgtgtggacacaagc

SEQ ID NO: 2860 - DNA, 31 bp, Homo sapiens
  chr17:80898078-80898109
  hypo
atgctcacttgcacgcgcgcacacacacaca

SEQ ID NO: 2861 - DNA, 31 bp, Homo sapiens
  chr18:9547785-9547816
  hypo
tctagtaggttgaggacgctgtgctcatggc

SEQ ID NO: 2862 - DNA, 31 bp, Homo sapiens
  chr18:14392672-14392703
  hypo
ggcatacttccacaagcggatgtagcactcg

SEQ ID NO: 2863 - DNA, 31 bp, Homo sapiens
  chr18:72632026-72632057
  hypo
acttagaagcaccttgcgtgacagaacttaa

SEQ ID NO: 2864 - DNA, 31 bp, Homo sapiens
  chr18:77076162-77076193
  hypo
aatcaagtgatgacatcggaaacaggattat

SEQ ID NO: 2865 - DNA, 60 bp, Homo sapiens
  chr18:77456031-77456091
  hypo
atggtgcacagcgtgccggagttgatggtgagctccgaggtgagccgggcatcagtggcg

SEQ ID NO: 2866 - DNA, 31 bp, Homo sapiens
  chr19:1578814-1578845
  hypo
tggccctgagcctccccggggctcagctgtg

SEQ ID NO: 2867 - DNA, 47 bp, Homo sapiens; identical to SEQ ID NO: 2564
  chr19:2165095-2165142
  hypo

SEQ ID NO: 2868 - DNA, 288 bp, Homo sapiens; identical to SEQ ID NO: 2565
  chr19:2165178-2165466
  hypo

SEQ ID NO: 2869 - DNA, 65 bp, Homo sapiens; identical to SEQ ID NO: 2566
  chr19:2165479-2165544
  hypo

SEQ ID NO: 2870 - DNA, 37 bp, Homo sapiens
  chr19:2754664-2754701
  hypo
tggggttggagggtatcggtggcgccaaggtcaacac

SEQ ID NO: 2871 - DNA, 31 bp, Homo sapiens
  chr19:3196410-3196441
  hypo
aaacctcctgtggctccgctggcagctgcag

SEQ ID NO: 2872 - DNA, 39 bp, Homo sapiens
  chr19:3196447-3196486
  hypo
aaactcctcacatggccggggagtcgctctgtggagtgc

SEQ ID NO: 2873 - DNA, 31 bp, Homo sapiens
  chr19:3196562-3196593
  hypo
cccagggcctttgcaccggctgcccctccca

SEQ ID NO: 2874 - DNA, 64 bp, Homo sapiens
  chr19:3694882-3694946
  hypo
ctgggcaaacatcttccgtaaaggaccgggcagcaagtgttttcggcttcgtgggacacgtagc

SEQ ID NO: 2875 - DNA, 31 bp, Homo sapiens
  chr19:4693048-4693079
  hypo
cccctgtgttgggggacgccttggctgctgt

SEQ ID NO: 2876 - DNA, 31 bp, Homo sapiens
  chr19:5058358-5058389
  hypo
agagcagtgccaggcccgggagcccttggga

SEQ ID NO: 2877 - DNA, 31 bp, Homo sapiens
  chr19:5058423-5058454
  hypo
agggaggaggggagcccggtgaggggaggat

SEQ ID NO: 2878 - DNA, 37 bp, Homo sapiens
  chr19:5102566-5102603
  hypo
aggggaggaatggggccggggccggggtggcatctgg

SEQ ID NO: 2879 - DNA, 31 bp, Homo sapiens
  chr19:5587304-5587335
  hypo
agggactctgctgccccggtcctggctggcc

SEQ ID NO: 2880 - DNA, 31 bp, Homo sapiens
  chr19:5789243-5789274
  hypo
tgaccacgtcctcatccgtcaggggcccgca

SEQ ID NO: 2881 - DNA, 31 bp, Homo sapiens
  chr19:5960805-5960836
  hypo
gtgccaaggtgctgcccggagccttctggac

SEQ ID NO: 2882 - DNA, 73 bp, Homo sapiens; identical to SEQ ID NO: 2569
  chr19:13030121-13030194
  hypo

SEQ ID NO: 2883 - DNA, 31 bp, Homo sapiens
  chr19:15352348-15352379
  hypo
gctggggcttgggtcacggccagggacctga

SEQ ID NO: 2884 - DNA, 51 bp, Homo sapiens
  chr19:15352397-15352448
  hypo
agacctgcctcagccccgataggtgcctggtgcacccgagtgctggctctt

SEQ ID NO: 2885 - DNA, 51 bp, Homo sapiens
  chr19:15352486-15352537
  hypo
gagtccagccctgcttcgcatgagaacaggcacagccgcacagctgccagg

SEQ ID NO: 2886 - DNA, 53 bp, Homo sapiens
  chr19:16343121-16343174
  hypo
agcctacagctctcatcgagagcagaattaaacccactcggctcaacgtgacg

SEQ ID NO: 2887 - DNA, 31 bp, Homo sapiens
  chr19:16735747-16735778
  hypo
tcatacctccacagaacgagtgtcccaggca

SEQ ID NO: 2888 - DNA, 31 bp, Homo sapiens
  chr19:19114949-19114980
  hypo
caactgtgccgacaggcgggcactcaccttt

SEQ ID NO: 2889 - DNA, 31 bp, Homo sapiens
  chr19:19115040-19115071
  hypo
gctgctgatcctcttccgagggaagcaggta

SEQ ID NO: 2890 - DNA, 31 bp, Homo sapiens
  chr19:19115153-19115184
  hypo
tgccctcagacttgcccgcccctccaggagc

SEQ ID NO: 2891 - DNA, 37 bp, Homo sapiens
  chr19:19115194-19115231
  hypo
tctcccccatcctcatcgtcctcgtcctcctcctcag

SEQ ID NO: 2892 - DNA, 38 bp, Homo sapiens
  chr19:47995718-47995756
  hypo
gtgggaacatgagaggcggcgcccgcccctctctccca

SEQ ID NO: 2893 - DNA, 56 bp, Homo sapiens
  chr19:47995765-47995821
  hypo
ctgcctgcctttttctcggccatcacccagggctccgtgcacgctggggggacccc

SEQ ID NO: 2894 - DNA, 69 bp, Homo sapiens
  chr19:48908062-48908131
  hypo
gaggagtatgactggacgtcctttgtagccgtgaccactcgtgcccctggccaccgggccttcctgtcc

SEQ ID NO: 2895 - DNA, 94 bp, Homo sapiens
  chr19:48908135-48908229
  hypo
ttgaggtgctgactgacggtagtctggtgggctgggagcaccgcggagcgctgacgctggaccctggggcgggcgaggccgtgctcagtgccca

SEQ ID NO: 2896 - DNA, 31 bp, Homo sapiens
  chr19:48908256-48908287
  hypo
cctgctcttctgcgcccgagaggaggccgag

SEQ ID NO: 2897 - DNA, 35 bp, Homo sapiens
  chr19:48953830-48953865
  hypo
gtctgcaacaaggggccgggcgcttagactccaag

SEQ ID NO: 2898 - DNA, 46 bp, Homo sapiens
  chr19:56176630-56176676
  hypo
atgcacggcagttctacgacacagggattggcgctgtcctaagtgc

SEQ ID NO: 2899 - DNA, 42 bp, Homo sapiens
  chr19:56176925-56176967
  hypo
aagtgccctccatgcacggcagttctacgacacagggattgg

SEQ ID NO: 2900 - DNA, 31 bp, Homo sapiens
  chr19:56176973-56177004
  hypo
acaactgagagtccaacgctggcccactgcc

SEQ ID NO: 2901 - DNA, 31 bp, Homo sapiens
  chr20:2751260-2751291
  hypo
ctccctctgcaatgcccggcagcaacactaa

SEQ ID NO: 2902 - DNA, 31 bp, Homo sapiens
  chr20:23490570-23490601
  hypo
agggagggcttgagttcgggggcccctaggt

SEQ ID NO: 2903 - DNA, 31 bp, Homo sapiens
  chr20:24947028-24947059
  hypo
agacatgaaagaaccacgtccaggtggagac

SEQ ID NO: 2904 - DNA, 36 bp, Homo sapiens
  chr20:35874330-35874366
  hypo
gggtcttggggcaggccgggcgcgcctcccattcac

SEQ ID NO: 2905 - DNA, 43 bp, Homo sapiens
  chr20:39672621-39672664
  hypo
aatgcaagtgcccagccgggcgtggtggctcacgcctgtaatc

SEQ ID NO: 2906 - DNA, 31 bp, Homo sapiens
  chr20:45000400-45000431
  hypo
tggcagccacctcccccgccagcctcccctg

SEQ ID NO: 2907 - DNA, 31 bp, Homo sapiens; identical to SEQ ID NO: 2577
  chr20:52209196-52209227
  hypo

SEQ ID NO: 2908 - DNA, 31 bp, Homo sapiens; identical to SEQ ID NO: 2578
  chr20:52209287-52209318
  hypo

SEQ ID NO: 2909 - DNA, 44 bp, Homo sapiens; identical to SEQ ID NO: 2579
  chr20:52209319-52209363
  hypo

SEQ ID NO: 2910 - DNA, 63 bp, Homo sapiens
  chr20:60549274-60549337
  hypo
acgtaaacctgcatatcgctgtgggtccgtcacagtaggtggagtgaacgtcacaatgggaga

SEQ ID NO: 2911 - DNA, 31 bp, Homo sapiens
  chr20:60549344-60549375
  hypo
caattgcatcagagaccgttcccaaaggctc

SEQ ID NO: 2912 - DNA, 31 bp, Homo sapiens
  chr20:61300098-61300129
  hypo
ctcgcagccccaatgccgaatgcccaaagaa

SEQ ID NO: 2913 - DNA, 78 bp, Homo sapiens
  chr20:62190623-62190701
  hypo
cagacgcgcacctggccggcaggcacgagggtctgctgagcctcgcagaagtccaggaggctacgccagagggggcag

SEQ ID NO: 2914 - DNA, 31 bp, Homo sapiens
  chr21:30722603-30722634
  hypo
tgtctgtatacaatgccgccctgccaaatgt

SEQ ID NO: 2915 - DNA, 31 bp, Homo sapiens
  chr21:43245324-43245355
  hypo
tggatgagcgtcactccggggctcacgtgag

SEQ ID NO: 2916 - DNA, 62 bp, Homo sapiens
  chr21:43271536-43271598
  hypo
ccctgggtgcattgggcgggcagggctctagaagcgccactgtgcctcgagagggacccctg

SEQ ID NO: 2917 - DNA, 31 bp, Homo sapiens
  chr21:45367128-45367159
  hypo
ccctggtctttagttccgattcccggtgaga

SEQ ID NO: 2918 - DNA, 31 bp, Homo sapiens
  chr22:17619493-17619524
  hypo
cgcctgatcaggtcctcggcatactggtaag

SEQ ID NO: 2919 - DNA, 31 bp, Homo sapiens
  chr22:18358158-18358189
  hypo
acgtgagtggaggctgcggagggcagagttt

SEQ ID NO: 2920 - DNA, 41 bp, Homo sapiens
  chr22:18358200-18358241
  hypo
aggccatgctacctgtcggagggagtcggaggagggagagg

SEQ ID NO: 2921 - DNA, 31 bp, Homo sapiens
  chr22:21802141-21802172
  hypo
gctttccctccttcctcgctgaacaaggtgg

SEQ ID NO: 2922 - DNA, 29 bp, Homo sapiens
  chr22:30165505-30165534
  hypo
gcataggattgcttcgagtttgcccacca

SEQ ID NO: 2923 - DNA, 31 bp, Homo sapiens
  chr22:36688294-36688325
  hypo
ggagtaagcagatgcccgagatggcacctgc

SEQ ID NO: 2924 - DNA, 39 bp, Homo sapiens
  chr22:36692852-36692891
  hypo
gccacctggcctcaggcgggcaggcggggtcctcacctg

SEQ ID NO: 2925 - DNA, 64 bp, Homo sapiens
  chr22:36695462-36695526
  hypo
cctgccaggtgggccacggcccctccccctcttcagccccgcggtgccccgggctgctctcctt

SEQ ID NO: 2926 - DNA, 42 bp, Homo sapiens
  chr22:36695550-36695592
  hypo
caacacccctgcccagcggccacagctcggcacaagcacctg

SEQ ID NO: 2927 - DNA, 27 bp, Homo sapiens
  chr22:42034499-42034526
  hypo
tgatataggccagacacggtggctcac

SEQ ID NO: 2928 - DNA, 31 bp, Homo sapiens
  chr22:42999212-42999243
  hypo
cagcagtctatgaaagcggaactgtggtaac

SEQ ID NO: 2929 - DNA, 31 bp, Homo sapiens
  chr22:43137118-43137149
  hypo
gctcttcctgcattgccgatctctcagggtt

SEQ ID NO: 2930 - DNA, 31 bp, Homo sapiens
  chr22:45734833-45734864
  hypo
tgaattatagcacaagcgagggctggtggca

SEQ ID NO: 2931 - DNA, 36 bp, Homo sapiens
  chr22:47192835-47192871
  hypo
ggcaggtgagagccctcgcagcgccctggttcctgc

SEQ ID NO: 2932 - DNA, 31 bp, Homo sapiens
  chr22:47192924-47192955
  hypo
ccctcatggtaactcacgggcttgccctccg

SEQ ID NO: 2933 - DNA, 31 bp, Homo sapiens
  chr22:47197969-47198000
  hypo
ctcaacctacctgtttcgtcagctgtagagg

SEQ ID NO: 2934 - DNA, 31 bp, Homo sapiens
  chr22:47198012-47198043
  hypo
tgccctgcagggtcctcgtgaaggtcagtgg

SEQ ID NO: 2935 - DNA, 35 bp, Homo sapiens
  chr22:50296994-50297029
  hypo
ccagggtgggggggtgcggccggggccaccatggt

SEQ ID NO: 2936 - DNA, 31 bp, Homo sapiens
  chr22:50656978-50657009
  hypo
aggaaggagaagacgccgctgtacttgctca

SEQ ID NO: 2937 - DNA, 31 bp, Homo sapiens
  chr22:50861881-50861912
  hypo
tgtttgcagaagaaagcgatcctgaccacca

SEQ ID NO: 2938 - DNA, 31 bp, Homo sapiens
  chrX:87063732-87063763
  hypo
ccatggagtagggggccgtgcttgtggggga

SEQ ID NO: 2939 - DNA, 31 bp, Homo sapiens
  chr1:12677601-12677632
  hyper
aggtggagggggaagccggaggtggaaagtt

SEQ ID NO: 2940 - DNA, 50 bp, Homo sapiens
  chr1:111746974-111747024
  hyper
tggcccctggagtgcccggctcccgctcccagctccgcgctggccccgcc

SEQ ID NO: 2941 - DNA, 31 bp, Homo sapiens
  chr2:88315962-88315993
  hyper
actgcgtttaatatagcgttcatcaaacaga

SEQ ID NO: 2942 - DNA, 31 bp, Homo sapiens
  chr2:88316072-88316103
  hyper
tacccggggcctcccacgtcctcccttcttt

SEQ ID NO: 2943 - DNA, 66 bp, Homo sapiens
  chr2:88316274-88316340
  hyper
atttgcatgtcccacccgctctgcgcccgggaggcgtggccaccaaggggccgggccctgcacagc

SEQ ID NO: 2944 - DNA, 31 bp, Homo sapiens
  chr2:88316368-88316399
  hyper
ggagcgaccccaatgccgggtaaaggacaag

SEQ ID NO: 2945 - DNA, 31 bp, Homo sapiens
  chr3:40547838-40547869
  hyper
cagccatgttccagaccgcttggcgccaggt

SEQ ID NO: 2946 - DNA, 31 bp, Homo sapiens
  chr3:197025751-197025782
  hyper
cctaactgattaattccgagtatggtatact

SEQ ID NO: 2947 - DNA, 31 bp, Homo sapiens
  chr4:106068587-106068618
  hyper
ctgatagggtgtttttcgacccttttatcag

SEQ ID NO: 2948 - DNA, 31 bp, Homo sapiens
  chr4:106068670-106068701
  hyper
cctttagggggctgtacgaagtgaatgtcac

SEQ ID NO: 2949 - DNA, 47 bp, Homo sapiens
  chr4:106068736-106068783
  hyper
tttttccttaagtccgcgcgttttgttagcggcgctgagtgaaagag

SEQ ID NO: 2950 - DNA, 31 bp, Homo sapiens
  chr4:106068834-106068865
  hyper
aaggtacataagtcagcgctgggctgagcct

SEQ ID NO: 2951 - DNA, 45 bp, Homo sapiens
  chr5:17987027-17987072
  hyper
gaggtgtgggatcttgcggggggttgggggcggtgggaaatgaat

SEQ ID NO: 2952 - DNA, 13 bp, Homo sapiens
  chr5:17987091-17987104
  hyper
agattctcataag

SEQ ID NO: 2953 - DNA, 17 bp, Homo sapiens
  chr5:17987223-17987240
  hyper
ctcgcctgccactcacc

SEQ ID NO: 2954 - DNA, 56 bp, Homo sapiens
  chr5:118604952-118605008
  hyper
cacgtcctcctgtaaccgcacatactggcgaaagcactgcccgggttatcagggtg

SEQ ID NO: 2955 - DNA, 31 bp, Homo sapiens
  chr6:137112873-137112904
  hyper
gtggtttctccaaagtcgagtttcccaaaat

SEQ ID NO: 2956 - DNA, 54 bp, Homo sapiens
  chr6:137112906-137112960
  hyper
agggtttccagggtggcgcccactgtctcgcacgcctcccgcaagctctgcagg

SEQ ID NO: 2957 - DNA, 31 bp, Homo sapiens
  chr6:137112979-137113010
  hyper
ccagttgcccttggctcgcttcgttgatcac

SEQ ID NO: 2958 - DNA, 31 bp, Homo sapiens
  chr7:22893704-22893735
  hyper
gggggggggcccaaggcggggaaggcccggg

SEQ ID NO: 2959 - DNA, 157 bp, Homo sapiens
  chr7:23570741-23570898
  hyper
ttcccctcacagctctcgtcttaagaacgcttaagggtcggtgcggtcgttgactaaccacttcattaggctcgtcccaccttcaacctcaaggctttcgcctttttagacgcaacgccgccggttccaacagagacgcggccgctcactgaaatag

SEQ ID NO: 2960 - DNA, 31 bp, Homo sapiens
  chr7:23570916-23570947
  hyper
gccccagctagtcccacgccagcttctcccc

SEQ ID NO: 2961 - DNA, 75 bp, Homo sapiens
  chr10:89622122-89622197
  hyper
cctcgccccgcccactcgctgggctgcagcttcctaccgttccgtactttccactcaacccggtaaccccaaacg

SEQ ID NO: 2962 - DNA, 133 bp, Homo sapiens
  chr10:89622284-89622417
  hyper
ggtggtctctgagaaccgagcttgactccgacgccgcgaaccgacctggagcccgaggggaaagatgctcgactctcttgggggcaccggagcgggcgcaggagaggcctgcggggtgcgtcccactcacagg

SEQ ID NO: 2963 - DNA, 133 bp, Homo sapiens
  chr10:89622476-89622609
  hyper
gtgttcacgttcagcacgctcggctgagagctttcatttttagggcaaacgagccgagttaccggggaagcgagaggtggggcgctgcaagggagccggatgaggtgatacacgctggcgacacaatagcagg

SEQ ID NO: 2964 - DNA, 35 bp, Homo sapiens
  chr10:89622735-89622770
  hyper
gagcgaatgcagtccacgccgcggaaatctagggg

SEQ ID NO: 2965 - DNA, 61 bp, Homo sapiens
  chr10:89622791-89622852
  hyper
ttccccttgcagggaccgtccctgcatttccctctacactgagcagcgtggtcacctggtc

SEQ ID NO: 2966 - DNA, 31 bp, Homo sapiens
  chr11:19799165-19799196
  hyper
cccctgaaatgcattccgcacttggtatttc

SEQ ID NO: 2967 - DNA, 160 bp, Homo sapiens
  chr13:50265730-50265890
  hyper
gccagagcgaggattccgtgcccgcctcgcaccctggccagcctgctgagtccggtggttttgccaggtgccgcccatggaggttccgtagaaggaacgtgctcaccaacttgcgcaaccgcctcgaccaaacctgttcccaaaccgagcccaaaggatt

SEQ ID NO: 2968 - DNA, 31 bp, Homo sapiens
  chr1:22032530-22032561
  hypo
caacaaacagaatccacgatatcttaaaaaa

SEQ ID NO: 2969 - DNA, 75 bp, Homo sapiens
  chr1:22032614-22032689
  hypo
ctacctaacaaatttccgccactcttctacaaagaactgagacacgatgtagaggacatccgtatcctagaacac

SEQ ID NO: 2970 - DNA, 31 bp, Homo sapiens
  chr1:22032693-22032724
  hypo
atcacaaaacagtatccgtcaattcaccgcc

SEQ ID NO: 2971 - DNA, 31 bp, Homo sapiens
  chr1:55620212-55620243
  hypo
ctaaaaacattaacaacgtaagaaaagtaca

SEQ ID NO: 2972 - DNA, 31 bp, Homo sapiens
  chr1:151378318-151378349
  hypo
ccccccttccaaagaacgtcctattttggtg

SEQ ID NO: 2973 - DNA, 31 bp, Homo sapiens
  chr1:151378377-151378408
  hypo
caggtagctgttgttcgcgctgggttagcac

SEQ ID NO: 2974 - DNA, 31 bp, Homo sapiens
  chr2:47247695-47247726
  hypo
gctggcagcttgagctcgcccacaaggtggc

SEQ ID NO: 2975 - DNA, 61 bp, Homo sapiens
  chr2:47247736-47247797
  hypo
ctctggtcagctgagtcgggcatggtgggcagacagcctctcccgccgtctccctccaggc

SEQ ID NO: 2976 - DNA, 34 bp, Homo sapiens
  chr2:97511923-97511957
  hypo
cgtggcactggaggagcggcgttttgcaccccca

SEQ ID NO: 2977 - DNA, 61 bp, Homo sapiens
  chr2:113286634-113286695
  hypo
ctccttcccctctccccgggaacggcagggcactgggacctctggtcggtgcctcccaccc

SEQ ID NO: 2978 - DNA, 31 bp, Homo sapiens
  chr2:113286709-113286740
  hypo
gccttagctccatgcccggctgcagccccac

SEQ ID NO: 2979 - DNA, 31 bp, Homo sapiens
  chr2:113286745-113286776
  hypo
tggactatggattggacgtcagagcatattg

SEQ ID NO: 2980 - DNA, 31 bp, Homo sapiens
  chr2:113286792-113286823
  hypo
tccccacccatcccttcggtaacactctgcc

SEQ ID NO: 2981 - DNA, 17 bp, Homo sapiens
  chr2:171860859-171860876
  hypo
atcggaaaaaaaaaagc

SEQ ID NO: 2982 - DNA, 31 bp, Homo sapiens
  chr2:240077540-240077571
  hypo
gggatgaggcactgcccgccctcagcacctg

SEQ ID NO: 2983 - DNA, 20 bp, Homo sapiens
  chr3:9905520-9905540
  hypo
aaatacatatatgggtcggg

SEQ ID NO: 2984 - DNA, 31 bp, Homo sapiens; identical to SEQ ID NO: 2947
  chr4:106068587-106068618
  hypo

SEQ ID NO: 2985 - DNA, 31 bp, Homo sapiens; identical to SEQ ID NO: 2948
  chr4:106068670-106068701
  hypo

SEQ ID NO: 2986 - DNA, 45 bp, Homo sapiens; identical to SEQ ID NO: 2951
  chr5:17987027-17987072
  hypo

SEQ ID NO: 2987 - DNA, 13 bp, Homo sapiens
  chr5:17987091-17987104
  hypo
agattctcataag

SEQ ID NO: 2988 - DNA, 17 bp, Homo sapiens
  chr5:17987223-17987240
  hypo
ctcgcctgccactcacc

SEQ ID NO: 2989 - DNA, 31 bp, Homo sapiens
  chr6:43608107-43608138
  hypo
tggagaagattggtttcgacccaagctcaac

SEQ ID NO: 2990 - DNA, 31 bp, Homo sapiens; identical to SEQ ID NO: 2958
  chr7:22893704-22893735
  hypo

SEQ ID NO: 2991 - DNA, 41 bp, Homo sapiens
  chr7:23550216-23550257
  hypo
gattacaaggtgcgagccactgtgcccggcctgccatttta

SEQ ID NO: 2992 - DNA, 37 bp, Homo sapiens
  chr7:23556806-23556843
  hypo
aaaaatcacttggggccgggcacggtggctcatgcct

SEQ ID NO: 2993 - DNA, 25 bp, Homo sapiens
  chr9:6863517-6863542
  hypo
tgggcaccatggctcacggctgtaa

SEQ ID NO: 2994 - DNA, 41 bp, Homo sapiens
  chr9:138774588-138774629
  hypo
caccaggtgcgccacacgagagcccacggctccagaggatg

SEQ ID NO: 2995 - DNA, 41 bp, Homo sapiens
  chr10:52369821-52369862
  hypo
acattgtagcatcatacgcacctccccgcctttgcttccac

SEQ ID NO: 2996 - DNA, 73 bp, Homo sapiens
  chr10:52369875-52369948
  hypo
cttccagtgatgccagcggtatcattttgtttcccatcccacccgtaagacacagaaacgtcaagccgcacag

SEQ ID NO: 2997 - DNA, 22 bp, Homo sapiens
  chr12:30851645-30851667
  hypo
tttctctctctcgcgcgcgcgc

SEQ ID NO: 2998 - DNA, 88 bp, Homo sapiens
  chr12:132241829-132241917
  hypo
ccctaggcaggagccccgtggtgcgagctgcccggccccgtgttgagatgcggtaggtggtcagcagtgacttcgggggtggctggtg

SEQ ID NO: 2999 - DNA, 17 bp, Homo sapiens
  chr13:46622414-46622431
  hypo
caaactttgaagatttc

SEQ ID NO: 3000 - DNA, 31 bp, Homo sapiens
  chr14:93486021-93486052
  hypo
cactgcaaacaggctgcggtctccctccact

SEQ ID NO: 3001 - DNA, 31 bp, Homo sapiens
  chr14:93486064-93486095
  hypo
gatgggcccttgggtgcggcccccacaggag

SEQ ID NO: 3002 - DNA, 62 bp, Homo sapiens
  chr14:93486111-93486173
  hypo
gagactggggaggccacggagaaaaggacactgtgcagggggatgcccggggggaaggacac

SEQ ID NO: 3003 - DNA, 31 bp, Homo sapiens
  chr14:93486180-93486211
  hypo
gcaggtctcccagatgcgatggggacaggaa

SEQ ID NO: 3004 - DNA, 47 bp, Homo sapiens
  chr14:93525815-93525862
  hypo
aggggtggagggggtgcgggtctcaaggtgggcgcaggtgctggtca

SEQ ID NO: 3005 - DNA, 31 bp, Homo sapiens
  chr15:42717196-42717227
  hypo
ttcaaagatctcaagtcgtttgttgttctgg

SEQ ID NO: 3006 - DNA, 31 bp, Homo sapiens
  chr15:79202795-79202826
  hypo
tacattcacataaccacgggaagttggtcac

SEQ ID NO: 3007 - DNA, 41 bp, Homo sapiens
  chr16:88091518-88091559
  hypo
gttccgacaagccaggcgccgaggctcggtgtgggcccgtg

SEQ ID NO: 3008 - DNA, 31 bp, Homo sapiens
  chr16:89973267-89973298
  hypo
gtggcactgtgcaacccgagggcagctcagg

SEQ ID NO: 3009 - DNA, 39 bp, Homo sapiens
  chr19:8539869-8539908
  hypo
attacaggcgtgagccaccgtgctcggcacctgccccca

SEQ ID NO: 3010 - DNA, 41 bp, Homo sapiens
  chr19:47502321-47502362
  hypo
cccaggcacacagtgccgcccttcagcgggggcctgggaca

SEQ ID NO: 3011 - DNA, 31 bp, Homo sapiens
  chr21:38566695-38566726
  hypo
ttgctgctccctgcccgcgagccacttagaa

SEQ ID NO: 3012 - DNA, 31 bp, Homo sapiens
  chr21:38566738-38566769
  hypo
accagatgaacttctcgcgttaccccagtgc

SEQ ID NO: 3013 - DNA, 40 bp, Homo sapiens
  chr22:41641906-41641946
  hypo
gaaggcccactaggtccggggccagcgcagtcccagcagc

SEQ ID NO: 3014 - DNA, 31 bp, Homo sapiens
  chr22:41641967-41641998
  hypo
tgtctgcctgtccacacggtgtggggcccag

SEQ ID NO: 3015 - DNA, 36 bp, Homo sapiens
  chr22:41642006-41642042
  hypo
tctgccaacaaccccacgatccgacccccacagtcc

SEQ ID NO: 3016 - DNA, 31 bp, Homo sapiens
  chr22:43529520-43529551
  hypo
caatgtcccagaaatccgcctttacagatct

SEQ ID NO: 3017 - DNA, 31 bp, Homo sapiens
  chr1:6137275-6137306
  hyper
cagcatgggaaaggcccgtgacagccaatgg

SEQ ID NO: 3018 - DNA, 41 bp, Homo sapiens
  chr1:43516647-43516688
  hyper
caacccctaaccttaacgcaggttgacgaaccatggtctat

SEQ ID NO: 3019 - DNA, 31 bp, Homo sapiens
  chr1:221064929-221064960
  hyper
gaacacggaagagcaccgcagagcgggtaag

SEQ ID NO: 3020 - DNA, 31 bp, Homo sapiens
  chr1:226127349-226127380
  hyper
ggactgggacgggccccgaggaccctgcacc

SEQ ID NO: 3021 - DNA, 51 bp, Homo sapiens
  chr1:230223229-230223280
  hyper
ccgcactgttaaccagcggttttcaatctggctgtacgttaggaacacctg

SEQ ID NO: 3022 - DNA, 31 bp, Homo sapiens
  chr1:230223381-230223412
  hyper
gtgtgaatgactctcacgcagtcaggtctgg

SEQ ID NO: 3023 - DNA, 34 bp, Homo sapiens
  chr1:230223415-230223449
  hyper
cagctggttaggaaggcgtcgctgagagtctcca

SEQ ID NO: 3024 - DNA, 31 bp, Homo sapiens
  chr2:25468883-25468914
  hyper
cttaccctcaatgttccggcacttctgccgc

SEQ ID NO: 3025 - DNA, 66 bp, Homo sapiens
  chr2:74405877-74405943
  hyper
gaccgtccttagctcacgggcagcggaagccgggccgccgccgctcggagccgggtttctggccgc

SEQ ID NO: 3026 - DNA, 34 bp, Homo sapiens
  chr2:74405946-74405980
  hyper
gagcctttgcaaacctcggcgcccgccttgcccg

SEQ ID NO: 3027 - DNA, 98 bp, Homo sapiens
  chr2:74406079-74406177
  hyper
gcctcgtcctagaactcggccaatcatcgctctccaagccaggacctccctcccccggaggcgtggcgaggatggcggtcctgcggaaggggcagtgg

SEQ ID NO: 3028 - DNA, 31 bp, Homo sapiens
  chr2:138436702-138436733
  hyper
actcacagacaccaaccgatttaccctgtga

SEQ ID NO: 3029 - DNA, 31 bp, Homo sapiens
  chr2:153573617-153573648
  hyper
acatatcccaccatctcgagttcttccttcg

SEQ ID NO: 3030 - DNA, 31 bp, Homo sapiens
  chr2:162101443-162101474
  hyper
gcgttgaggggccgctcgaggcaggcccttc

SEQ ID NO: 3031 - DNA, 31 bp, Homo sapiens
  chr3:13138221-13138252
  hyper
cagaatagcactgtcacgcttgaaggaggca

SEQ ID NO: 3032 - DNA, 50 bp, Homo sapiens
  chr3:133276457-133276507
  hyper
aagaatgtgcatttggcgttccgagctaagaaatccgggagtggccaacc

SEQ ID NO: 3033 - DNA, 31 bp, Homo sapiens
  chr4:3445266-3445297
  hyper
gctctgggattaaccccggtgggtgccactt

SEQ ID NO: 3034 - DNA, 34 bp, Homo sapiens
  chr4:3445350-3445384
  hyper
atcgctggggccaaggcgccgcctggtggtgagg

SEQ ID NO: 3035 - DNA, 31 bp, Homo sapiens
  chr4:3445390-3445421
  hyper
cctgcagccacacaggcgtgccccaggcagg

SEQ ID NO: 3036 - DNA, 37 bp, Homo sapiens
  chr4:120221340-120221377
  hyper
ttctcccccacccacccgactgcgccactcaccagct

SEQ ID NO: 3037 - DNA, 51 bp, Homo sapiens
  chr4:120221610-120221661
  hyper
ttctgcctccctccctcgctaaagcctcgccgctcccggagaccatctcga

SEQ ID NO: 3038 - DNA, 31 bp, Homo sapiens
  chr5:923798-923829
  hyper
gcagcagcctcagctccgagtcctagtgtct

SEQ ID NO: 3039 - DNA, 31 bp, Homo sapiens
  chr5:172070427-172070458
  hyper
ttcaaaatccagttgtcgttacctcctccag

SEQ ID NO: 3040 - DNA, 31 bp, Homo sapiens
  chr6:11382658-11382689
  hyper
gtcatactttctgattcgctgaggacacttt

SEQ ID NO: 3041 - DNA, 52 bp, Homo sapiens
  chr6:75916809-75916861
  hyper
gccagattgtacaaggcgcacgggaggaagcttcgagcgctcacaccaagaa

SEQ ID NO: 3042 - DNA, 58 bp, Homo sapiens
  chr6:75916881-75916939
  hyper
gagattctgattataacgtctgacctcagtataggccctgcaccgttttggcctcttg

SEQ ID NO: 3043 - DNA, 70 bp, Homo sapiens
  chr6:75916946-75917016
  hyper
aaggttactcctgtaacgctgggggagcgttgaacaacaaaggaccggggtggggcgcaagggaacagag

SEQ ID NO: 3044 - DNA, 41 bp, Homo sapiens
  chr7:8483683-8483724
  hyper
ataagacggatagtaccgagcgttggcgctaggggttgtct

SEQ ID NO: 3045 - DNA, 31 bp, Homo sapiens
  chr8:27168527-27168558
  hyper
gagggtgtggttggtgcgcaggtcggcgggt

SEQ ID NO: 3046 - DNA, 31 bp, Homo sapiens
  chr8:27168574-27168605
  hyper
acactgggcaggtgggcgacacctgcacctc

SEQ ID NO: 3047 - DNA, 31 bp, Homo sapiens
  chr8:131081757-131081788
  hyper
caggcatgagccactgcgcttaccaaaacaa

SEQ ID NO: 3048 - DNA, 37 bp, Homo sapiens
  chr8:143340515-143340552
  hyper
gcacgttgtctgaggacggggccgaggggcagaaggg

SEQ ID NO: 3049 - DNA, 120 bp, Homo sapiens
  chr9:140703959-140704079
  hyper
gagcctcctcagccgccgcagcaaagcggtcagtcaggcggggcttggtttatggcatctgggaagatcgctgaccattcccgaggggaaggaggctgcagccggcgctcccagacacca

SEQ ID NO: 3050 - DNA, 214 bp, Homo sapiens
  chr9:140704245-140704459
  hyper
cagtaaaggaaaggtccggaagctgagtgactgtgggggaagggtccggaggcggttccgatgccgccctgtgtggaccgtcggtgatgggtccggaggcggttccgatgccgccctgtgtggaccgtcggtgatgggtccggaggtggttccgatgccgccctgtgtggaccgtcggtgatgggtccggaggcggttccgatgctgcccctcg

SEQ ID NO: 3051 - DNA, 31 bp, Homo sapiens
  chr10:85899255-85899286
  hyper
gcgtcatgcagtgcgccggaggaactgtgct

SEQ ID NO: 3052 - DNA, 71 bp, Homo sapiens
  chr10:85899675-85899746
  hyper
cagggaagtttgctgccgggttctcatctgaatctagcgggctgggtgaactttctcggggaccaggcacc

SEQ ID NO: 3053 - DNA, 58 bp, Homo sapiens
  chr10:85899748-85899806
  hyper
aactcatcaatgctcacggaggcataagcccttggattagggtcggtagtattttccc

SEQ ID NO: 3054 - DNA, 31 bp, Homo sapiens
  chr10:119256045-119256076
  hyper
cagaaaatcaggtatacgggtctctgttttg

SEQ ID NO: 3055 - DNA, 59 bp, Homo sapiens
  chr10:119256156-119256215
  hyper
gaacctcttcccccagcgagcgagcctgtcggccgaggagaccacgccataccaggatt

SEQ ID NO: 3056 - DNA, 55 bp, Homo sapiens
  chr10:119256216-119256271
  hyper
tccagcaggtggcagccgacgcacgccagagacagctgggcgcctacactttgaa

SEQ ID NO: 3057 - DNA, 50 bp, Homo sapiens
  chr10:119256304-119256354
  hyper
agcttggagactcatcgcgtttggcttactcctgacgcagacttgcactg

SEQ ID NO: 3058 - DNA, 64 bp, Homo sapiens
  chr11:2421389-2421453
  hyper
gggctgcccccttcaccgtggcccagcggtcacgaccccacgtcctcatcgcgggctgggactg

SEQ ID NO: 3059 - DNA, 31 bp, Homo sapiens
  chr11:65267144-65267175
  hyper
cagaagtacgggaaggcgaagaaaagaatag

SEQ ID NO: 3060 - DNA, 47 bp, Homo sapiens
  chr11:65267948-65267995
  hyper
aggactgaggagcaagcgagcaagcagcagttcgtggtgaagatagg

SEQ ID NO: 3061 - DNA, 31 bp, Homo sapiens
  chr11:65268000-65268031
  hyper
agtccaggagccagtgcgatttggtgaagga

SEQ ID NO: 3062 - DNA, 31 bp, Homo sapiens
  chr11:65419939-65419970
  hyper
ctctgggcctcgggtcgcggacctccggtcg

SEQ ID NO: 3063 - DNA, 65 bp, Homo sapiens
  chr11:119039731-119039796
  hyper
ccggaactgggcagccgcgggtaaaggcctagcgggcttgataacccctgcgccctggctgggag

SEQ ID NO: 3064 - DNA, 31 bp, Homo sapiens
  chr12:6532774-6532805
  hyper
acagtgctgcgataaacgtatcttcaaaata

SEQ ID NO: 3065 - DNA, 31 bp, Homo sapiens
  chr12:6560919-6560950
  hyper
aatccagtttcctggccgcctcctggctcag

SEQ ID NO: 3066 - DNA, 60 bp, Homo sapiens
  chr12:14928272-14928332
  hyper
gaagataccgtcggatcgagctgagctcggggcaggaagtgtctgcggccatatttttca

SEQ ID NO: 3067 - DNA, 44 bp, Homo sapiens
  chr13:76450745-76450789
  hyper
gcttctgtagctcacacgagggtaaataacgaaaagttttaata

SEQ ID NO: 3068 - DNA, 31 bp, Homo sapiens
  chr13:99064433-99064464
  hyper
agttaaatcctacatgcgttcagatctcatt

SEQ ID NO: 3069 - DNA, 31 bp, Homo sapiens
  chr13:111158610-111158641
  hyper
ctctctctctctctctcgggctgcaggtgca

SEQ ID NO: 3070 - DNA, 31 bp, Homo sapiens
  chr15:45492781-45492812
  hyper
agcctatctccaccctcgcagccatctgagg

SEQ ID NO: 3071 - DNA, 31 bp, Homo sapiens
  chr16:9022848-9022879
  hyper
agaagctaagaagctccgccctatatctatg

SEQ ID NO: 3072 - DNA, 31 bp, Homo sapiens
  chr17:73760184-73760215
  hyper
cagtacgtgaggcttccgccagctggagtaa

SEQ ID NO: 3073 - DNA, 47 bp, Homo sapiens
  chr18:10647663-10647710
  hyper
cacagggaggcccccacggcaaagcaccagcccgcatactccctccc

SEQ ID NO: 3074 - DNA, 61 bp, Homo sapiens
  chr18:10647732-10647793
  hyper
ccacagcaactccccacgtcgcttggctggagcatgtctgtggggacgggttttgctttcc

SEQ ID NO: 3075 - DNA, 31 bp, Homo sapiens
  chr19:14306908-14306939
  hyper
ctcactgtctacacctcgtctccctatctat

SEQ ID NO: 3076 - DNA, 31 bp, Homo sapiens
  chr19:16638140-16638171
  hyper
ttgtgaggttcaatttcgtgtcctgaagctg

SEQ ID NO: 3077 - DNA, 31 bp, Homo sapiens
  chr19:50003947-50003978
  hyper
agagacgcataaaagccgcagcagagatggg

SEQ ID NO: 3078 - DNA, 93 bp, Homo sapiens
  chr19:59066307-59066400
  hyper
cgcccgcacgcccgcccgggatccacggtccagcaggggccactcaccggagctgggacggacacccgtttccgcttccgggtcacgcttctc

SEQ ID NO: 3079 - DNA, 97 bp, Homo sapiens
  chr19:59066459-59066556
  hyper
ccgtttccggattaaacgacgtgacgtaacatgccccgcccgcacccggaaggttgggaaactccaggagcgcgcgtgcgcccgtgccccggaacgg

SEQ ID NO: 3080 - DNA, 23 bp, Homo sapiens
  chr20:56577649-56577672
  hyper
acagaaagccaaacaccgcatgt

SEQ ID NO: 3081 - DNA, 31 bp, Homo sapiens
  chr22:23546141-23546172
  hyper
agaagctgggctgggacgggaggacaaacac

SEQ ID NO: 3082 - DNA, 31 bp, Homo sapiens
  chr22:42062755-42062786
  hyper
ctcagatttgggtatccgcatggagtgccct

SEQ ID NO: 3083 - DNA, 31 bp, Homo sapiens
  chrX:9240652-9240683
  hyper
ttttttgttgctgttgcgtttttcgcaaatc

SEQ ID NO: 3084 - DNA, 31 bp, Homo sapiens
  chr1:3552660-3552691
  hypo
tgactgatgttcttaacgcacttaatttcct

SEQ ID NO: 3085 - DNA, 99 bp, Homo sapiens
  chr1:3552755-3552854
  hypo
gctgctggggctgcaccgccacagatgccagcgtcagtgcctggccagcccccaagggcggcttggtctccccgcgcctgcactcgtgtgcacactctc

SEQ ID NO: 3086 - DNA, 31 bp, Homo sapiens
  chr1:3552868-3552899
  hypo
ttgcctggccagcccccgagggcggcttggt

SEQ ID NO: 3087 - DNA, 31 bp, Homo sapiens
  chr1:3553074-3553105
  hypo
agcactgcctggatcccgggttctgcactct

SEQ ID NO: 3088 - DNA, 31 bp, Homo sapiens; identical to SEQ ID NO: 3017
  chr1:6137275-6137306
  hypo

SEQ ID NO: 3089 - DNA, 35 bp, Homo sapiens
  chr1:6382125-6382160
  hypo
gggccaagccacaggtcgtgcgaactggctgcaat

SEQ ID NO: 3090 - DNA, 31 bp, Homo sapiens
  chr1:6382233-6382264
  hypo
agatcgcgaccctgcacgccagctcccagag

SEQ ID NO: 3091 - DNA, 5 bp, Homo sapiens
  chr1:8746805-8746810
  hypo
tctca

SEQ ID NO: 3092 - DNA, 31 bp, Homo sapiens
  chr1:8746873-8746904
  hypo
aaggacaaagtagagccgagactgagggtca

SEQ ID NO: 3093 - DNA, 42 bp, Homo sapiens
  chr1:8746910-8746952
  hypo
gcctctcactgagactcgaaagcgggacggtgagctacagat

SEQ ID NO: 3094 - DNA, 43 bp, Homo sapiens
  chr1:9074711-9074754
  hypo
ctccctgcctggccaccgtcccacataccgcattgatgcccga

SEQ ID NO: 3095 - DNA, 1 bp, Homo sapiens
  chr1:9579462-9579463
  hypo
c

SEQ ID NO: 3096 - DNA, 133 bp, Homo sapiens
  chr1:9670773-9670906
  hypo
agcactcgcctcacaacggcagcctcttcaccatggagccgccccatgttccccggaagccgcccctgcaggacgtgaagcacgccctgggtacggccttctgaccaccccaaggggccgtgggagggcctct

SEQ ID NO: 3097 - DNA, 53 bp, Homo sapiens
  chr1:9795909-9795962
  hypo
atgagtggtgtgcagtcgagcgctcggtgttacctgcacgcctctgccactgt

SEQ ID NO: 3098 - DNA, 31 bp, Homo sapiens
  chr1:10150500-10150531
  hypo
ctctgtttctaacaggcgaggaggtcctaag

SEQ ID NO: 3099 - DNA, 31 bp, Homo sapiens
  chr1:14057683-14057714
  hypo
catgtcaggtagggagcgcaccataaaagca

SEQ ID NO: 3100 - DNA, 31 bp, Homo sapiens
  chr1:15304580-15304611
  hypo
ttctggtccaggcgaacgctccctccccgtg

SEQ ID NO: 3101 - DNA, 31 bp, Homo sapiens
  chr1:16598718-16598749
  hypo
cagatgtccacagagacgcaaactataaggc

SEQ ID NO: 3102 - DNA, 31 bp, Homo sapiens
  chr1:17292159-17292190
  hypo
agatgtgtgggaggcccgtggcttctgcatc

SEQ ID NO: 3103 - DNA, 31 bp, Homo sapiens
  chr1:22465798-22465829
  hypo
gccacacgcatgggctcgctctttcttccca

SEQ ID NO: 3104 - DNA, 38 bp, Homo sapiens
  chr1:22465867-22465905
  hypo
ttacagatgagaaacccgaggctcggagaggttaataa

SEQ ID NO: 3105 - DNA, 31 bp, Homo sapiens
  chr1:22465925-22465956
  hypo
tgggcagggcagagctcggttggatctcaaa

SEQ ID NO: 3106 - DNA, 22 bp, Homo sapiens
  chr1:27016539-27016561
  hypo
ggcctcccgtattgtttttaaa

SEQ ID NO: 3107 - DNA, 31 bp, Homo sapiens
  chr1:31194411-31194442
  hypo
gagaactcctgcttcacggtgctggcatagt

SEQ ID NO: 3108 - DNA, 31 bp, Homo sapiens
  chr1:31439890-31439921
  hypo
cattacagggtagaaccgatatactgagaat

SEQ ID NO: 3109 - DNA, 65 bp, Homo sapiens
  chr1:33237402-33237467
  hypo
ggtgcgcccctggtcacgccctcgctcctgcagatggtgcggctgcgctccgtgggtgctccagg

SEQ ID NO: 3110 - DNA, 31 bp, Homo sapiens
  chr1:33431247-33431278
  hypo
agaaaaaaatagcttacgattgaaatttatt

SEQ ID NO: 3111 - DNA, 31 bp, Homo sapiens
  chr1:33431279-33431310
  hypo
attttttttcctgagacggttttgctctgtc

SEQ ID NO: 3112 - DNA, 11 bp, Homo sapiens
  chr1:33431315-33431326
  hypo
ggttggagtgc

SEQ ID NO: 3113 - DNA, 38 bp, Homo sapiens
  chr1:33432069-33432107
  hypo
aaaaaggactgcctcgaaagtcccgcacatttttgcca

SEQ ID NO: 3114 - DNA, 31 bp, Homo sapiens
  chr1:33790728-33790759
  hypo
ttagtcctcataaccacgccttgaggaaggc

SEQ ID NO: 3115 - DNA, 21 bp, Homo sapiens
  chr1:34520320-34520341
  hypo
acagagcgagactctgtctct

SEQ ID NO: 3116 - DNA, 31 bp, Homo sapiens
  chr1:36581068-36581099
  hypo
ccgccaaggagccaggcgaaatagttcacaa

SEQ ID NO: 3117 - DNA, 33 bp, Homo sapiens
  chr1:43702285-43702318
  hypo
aaaggcaatttccagccgggcgcagtggctcac

SEQ ID NO: 3118 - DNA, 31 bp, Homo sapiens
  chr1:46963657-46963688
  hypo
gagcccaggcagggcccggcctggggccaag

SEQ ID NO: 3119 - DNA, 31 bp, Homo sapiens
  chr1:76192235-76192266
  hypo
ggtggttaatagcatgcgctcttgatagtaa

SEQ ID NO: 3120 - DNA, 31 bp, Homo sapiens
  chr1:78254758-78254789
  hypo
taatttctttcagcaacgtgtatatatatat

SEQ ID NO: 3121 - DNA, 31 bp, Homo sapiens
  chr1:78254863-78254894
  hypo
atggaattgtggggggcggttgctttttttt

SEQ ID NO: 3122 - DNA, 23 bp, Homo sapiens
  chr1:78254898-78254921
  hypo
ttttttttctttgagacgaggtc

SEQ ID NO: 3123 - DNA, 31 bp, Homo sapiens
  chr1:112317424-112317455
  hypo
tggagaaaactactcccggggcctcttggaa

SEQ ID NO: 3124 - DNA, 50 bp, Homo sapiens
  chr1:113244293-113244343
  hypo
ccggttcgccatgtcccggccttcctcagaccgaacgggctcctgagaag

SEQ ID NO: 3125 - DNA, 61 bp, Homo sapiens
  chr1:113244438-113244499
  hypo
gccctgacccagaaagcgcccaggccccagctaccctgggcagcttcgtggccagggatcc

SEQ ID NO: 3126 - DNA, 72 bp, Homo sapiens
  chr1:117076614-117076686
  hypo
tctgcatcacctgatccgtgagcttttccgtcttacttgcatttttagcagcttccacgaaatctgaaggaa

SEQ ID NO: 3127 - DNA, 31 bp, Homo sapiens
  chr1:156179132-156179163
  hypo
gttagggaagcagagacggtcacatgagaga

SEQ ID NO: 3128 - DNA, 64 bp, Homo sapiens
  chr1:156179171-156179235
  hypo
gaggaagaagggagtgcggaggagggtgctgaaggaggtagggcggaagcgggggatgttctta

SEQ ID NO: 3129 - DNA, 31 bp, Homo sapiens
  chr1:156179298-156179329
  hypo
tctgtcctgtattggccgaggggctgaggag

SEQ ID NO: 3130 - DNA, 31 bp, Homo sapiens
  chr1:156239868-156239899
  hypo
tcatgacattttgtgtcgtttcttaaaaaca

SEQ ID NO: 3131 - DNA, 49 bp, Homo sapiens
  chr1:179782917-179782966
  hypo
actgctgcaagaagagcggaaccgaggttgcagacgaggaggaggagcg

SEQ ID NO: 3132 - DNA, 31 bp, Homo sapiens
  chr1:182183508-182183539
  hypo
acaatgcctactggtccgaccaaaatcaagg

SEQ ID NO: 3133 - DNA, 40 bp, Homo sapiens
  chr1:185024835-185024875
  hypo
agccgccgtgcctggcctgtagtttcgttttatatgagag

SEQ ID NO: 3134 - DNA, 39 bp, Homo sapiens
  chr1:197324918-197324957
  hypo
cgcaggctgagggagccgactccattctcggccagccca

SEQ ID NO: 3135 - DNA, 61 bp, Homo sapiens
  chr1:205273576-205273637
  hypo
atcctccagggtggcccggcgggtggggttcaccatcaacagccaccggatcaggccacag

SEQ ID NO: 3136 - DNA, 31 bp, Homo sapiens
  chr1:212964371-212964402
  hypo
aattcctcattgtctgcggctgcattgtcca

SEQ ID NO: 3137 - DNA, 51 bp, Homo sapiens; identical to SEQ ID NO: 3021
  chr1:230223229-230223280
  hypo

SEQ ID NO: 3138 - DNA, 31 bp, Homo sapiens; identical to SEQ ID NO: 3022
  chr1:230223381-230223412
  hypo

SEQ ID NO: 3139 - DNA, 34 bp, Homo sapiens; identical to SEQ ID NO: 3023
  chr1:230223415-230223449
  hypo

SEQ ID NO: 3140 - DNA, 31 bp, Homo sapiens
  chr1:234643572-234643603
  hypo
tcagctggggaggtgcgcgcagcctattttc

SEQ ID NO: 3141 - DNA, 86 bp, Homo sapiens
  chr1:246783953-246784039
  hypo
cagtcgtgcatacacacgatgggctctgggaacactacagggaggacggcttcagtcgtggtgcatacacacgatgggctctggga

SEQ ID NO: 3142 - DNA, 31 bp, Homo sapiens
  chr1:247275934-247275965
  hypo
gtcaggggtgttttgacgattaaactggaca

SEQ ID NO: 3143 - DNA, 31 bp, Homo sapiens
  chr1:247501077-247501108
  hypo
gtcgctgggtcacagtcgggggaaggcaaga

SEQ ID NO: 3144 - DNA, 31 bp, Homo sapiens
  chr2:3382209-3382240
  hypo
atggggttatgaaagccggcaccgcaccact

SEQ ID NO: 3145 - DNA, 73 bp, Homo sapiens
  chr2:8736123-8736196
  hypo
tctgctgacatctgagcgaggcaggttcacaagcagccagcggcctcccacatccacccgtcgcaaaggcatc

SEQ ID NO: 3146 - DNA, 31 bp, Homo sapiens
  chr2:8875261-8875292
  hypo
tgttggtcactaacaacgttctaaatgaagt

SEQ ID NO: 3147 - DNA, 31 bp, Homo sapiens
  chr2:9609461-9609492
  hypo
gctatcctgggacccccggttaaacagccct

SEQ ID NO: 3148 - DNA, 73 bp, Homo sapiens
  chr2:9609568-9609641
  hypo
acaagaatagaaaacccgtgtggccctggactggccccgctctcccacgtgctgcagtcggggtgcagaatgg

SEQ ID NO: 3149 - DNA, 59 bp, Homo sapiens
  chr2:9609658-9609717
  hypo
gctggtcctcaggagccgtggggagggcagtctgcgggaggctgcggcccttccactgg

SEQ ID NO: 3150 - DNA, 31 bp, Homo sapiens
  chr2:9609747-9609778
  hypo
ctgacaccactcctcccgcctcccctccctc

SEQ ID NO: 3151 - DNA, 31 bp, Homo sapiens
  chr2:9609832-9609863
  hypo
tgagacagcttccattcggccaggaatggga

SEQ ID NO: 3152 - DNA, 31 bp, Homo sapiens
  chr2:10328930-10328961
  hypo
taggaagagggcgctgcggagagagtggtgt

SEQ ID NO: 3153 - DNA, 68 bp, Homo sapiens
  chr2:10329013-10329081
  hypo
agttcccagtcctggccgcatttggaggctggatcattggagggaggcgccggcgccccatgtagctg

SEQ ID NO: 3154 - DNA, 31 bp, Homo sapiens
  chr2:15307176-15307207
  hypo
cccagtgctgtgctgcgcggagggctgtact

SEQ ID NO: 3155 - DNA, 31 bp, Homo sapiens
  chr2:15307223-15307254
  hypo
tggtgagtccccctcacggccagaaggagag

SEQ ID NO: 3156 - DNA, 31 bp, Homo sapiens
  chr2:23725076-23725107
  hypo
cattctgtgctttttccgggatcgcttgcat

SEQ ID NO: 3157 - DNA, 31 bp, Homo sapiens
  chr2:24016852-24016883
  hypo
ataaaacaaaatttagcgagaaaagtggcac

SEQ ID NO: 3158 - DNA, 31 bp, Homo sapiens
  chr2:24412760-24412791
  hypo
agggagccaggctgctcgggggacggactgg

SEQ ID NO: 3159 - DNA, 31 bp, Homo sapiens; identical to SEQ ID NO: 3024
  chr2:25468883-25468914
  hypo

SEQ ID NO: 3160 - DNA, 31 bp, Homo sapiens
  chr2:27902576-27902607
  hypo
aaagcaaggtgcagaacggtgtgtataacag

SEQ ID NO: 3161 - DNA, 31 bp, Homo sapiens
  chr2:38551439-38551470
  hypo
gtgctacaataataagcgagatcctccctag

SEQ ID NO: 3162 - DNA, 31 bp, Homo sapiens
  chr2:43373135-43373166
  hypo
tttgtggggggatgttcgggtaggaaagggg

SEQ ID NO: 3163 - DNA, 31 bp, Homo sapiens
  chr2:43373167-43373198
  hypo
gtaattaattcactgtcgcctgaattaacca

SEQ ID NO: 3164 - DNA, 31 bp, Homo sapiens
  chr2:43373201-43373232
  hypo
actgattccatcagttcgatcaaccactgtt

SEQ ID NO: 3165 - DNA, 31 bp, Homo sapiens
  chr2:43373245-43373276
  hypo
tgtatgccaggtaccacgctaggggttgggg

SEQ ID NO: 3166 - DNA, 31 bp, Homo sapiens
  chr2:43373294-43373325
  hypo
tactcaagggaggagccgcaggtgggagcag

SEQ ID NO: 3167 - DNA, 31 bp, Homo sapiens
  chr2:47125492-47125523
  hypo
tggttttagatgggatcgtgtctgaaaacca

SEQ ID NO: 3168 - DNA, 31 bp, Homo sapiens
  chr2:55499045-55499076
  hypo
tacaaaggtgtgtaatcggtgttactgaatg

SEQ ID NO: 3169 - DNA, 31 bp, Homo sapiens
  chr2:58097324-58097355
  hypo
cagtgaaaaaggcacacggaagatgaaacca

SEQ ID NO: 3170 - DNA, 66 bp, Homo sapiens; identical to SEQ ID NO: 3025
  chr2:74405877-74405943
  hypo

SEQ ID NO: 3171 - DNA, 34 bp, Homo sapiens; identical to SEQ ID NO: 3026
  chr2:74405946-74405980
  hypo

SEQ ID NO: 3172 - DNA, 50 bp, Homo sapiens
  chr2:86425627-86425677
  hypo
agtgagctgtgatcgcaccactgcactcaagccttcgcaacagaccaaga

SEQ ID NO: 3173 - DNA, 43 bp, Homo sapiens
  chr2:86425687-86425730
  hypo
aaaaaaaaaaaaagtgcgcaatgactcccgttgccaattcaaa

SEQ ID NO: 3174 - DNA, 31 bp, Homo sapiens
  chr2:87569213-87569244
  hypo
cacactccctctccctcgagcctggaaggtg

SEQ ID NO: 3175 - DNA, 31 bp, Homo sapiens
  chr2:87569259-87569290
  hypo
ggtggaaacctctaccgcggcagaggcacag

SEQ ID NO: 3176 - DNA, 31 bp, Homo sapiens
  chr2:98276216-98276247
  hypo
tccccattctcactgccggcacatcccccac

SEQ ID NO: 3177 - DNA, 31 bp, Homo sapiens
  chr2:105719461-105719492
  hypo
aagtaggtgtgagaaacgttgccactctcac

SEQ ID NO: 3178 - DNA, 87 bp, Homo sapiens
  chr2:129250706-129250793
  hypo
ctgctcctgcccagagcgggtcctctgccgaaggaatttgcgctggcagctcccggagggtctggcccgcacgcggcagggcaataa

SEQ ID NO: 3179 - DNA, 31 bp, Homo sapiens
  chr2:132270119-132270150
  hypo
aggaatctgtgagagccgggggagacgggct

SEQ ID NO: 3180 - DNA, 31 bp, Homo sapiens; identical to SEQ ID NO: 3028
  chr2:138436702-138436733
  hypo

SEQ ID NO: 3181 - DNA, 31 bp, Homo sapiens
  chr2:149227322-149227353
  hypo
attctggagctgttgccggcagtggcaacac

SEQ ID NO: 3182 - DNA, 31 bp, Homo sapiens
  chr2:149227416-149227447
  hypo
tgaagggcaaagtggtcgagcagcactaaga

SEQ ID NO: 3183 - DNA, 60 bp, Homo sapiens
  chr2:149227457-149227517
  hypo
tgtctcagcaaaaagacgcattgcggaaaagaaaacaaccacctacgacagtgttgagtt

SEQ ID NO: 3184 - DNA, 31 bp, Homo sapiens; identical to SEQ ID NO: 3029
  chr2:153573617-153573648
  hypo

SEQ ID NO: 3185 - DNA, 31 bp, Homo sapiens
  chr2:158901219-158901250
  hypo
gagatttgtacacaagcgtgggaacacagga

SEQ ID NO: 3186 - DNA, 18 bp, Homo sapiens
  chr2:176026497-176026515
  hypo
tttttttttgagacaccg

SEQ ID NO: 3187 - DNA, 31 bp, Homo sapiens
  chr2:201691288-201691319
  hypo
gcccaccaaccaagcccggctaaggtatttt

SEQ ID NO: 3188 - DNA, 28 bp, Homo sapiens
  chr2:206889972-206890000
  hypo
cacgcatggtagctcacgcctgtaatcc

SEQ ID NO: 3189 - DNA, 85 bp, Homo sapiens
  chr2:206890497-206890582
  hypo
tgaggctgtagtgacccgtgattacgccactgaattccagcctgggcgacagactgagaccttgtctgaacgacaacaaaaagaa

SEQ ID NO: 3190 - DNA, 3 bp, Homo sapiens
  chr2:206890643-206890646
  hypo
ggc

SEQ ID NO: 3191 - DNA, 48 bp, Homo sapiens
  chr2:224640635-224640683
  hypo
cagcagctccacgtaacgatgcacaatctctagcgtcaagagctcatt

SEQ ID NO: 3192 - DNA, 58 bp, Homo sapiens
  chr2:224640778-224640836
  hypo
gagacagtttttcccacgaatatgcagtcacctcctcccccgccgagcctctcctcat

SEQ ID NO: 3193 - DNA, 31 bp, Homo sapiens
  chr2:233197429-233197460
  hypo
cagagacgagaagggccgaggctggcaggcc

SEQ ID NO: 3194 - DNA, 31 bp, Homo sapiens
  chr2:236229403-236229434
  hypo
aacctcacggtgactacggagggactgctct

SEQ ID NO: 3195 - DNA, 31 bp, Homo sapiens
  chr2:236763010-236763041
  hypo
tccctctttttctccccgatagatgggacct

SEQ ID NO: 3196 - DNA, 40 bp, Homo sapiens
  chr2:239005247-239005287
  hypo
caagggagaaaggaagcgttttcttcggctcctgctgtga

SEQ ID NO: 3197 - DNA, 31 bp, Homo sapiens
  chr2:240016020-240016051
  hypo
acccttcctgtgtggacggatgggcagatgc

SEQ ID NO: 3198 - DNA, 31 bp, Homo sapiens
  chr2:240097929-240097960
  hypo
cccagccttccgtgcccgcacccctccctct

SEQ ID NO: 3199 - DNA, 48 bp, Homo sapiens
  chr2:241555875-241555923
  hypo
cctgccaatctcctgtcgactgcgagtcagctccgatacttcaccaga

SEQ ID NO: 3200 - DNA, 31 bp, Homo sapiens
  chr2:241580623-241580654
  hypo
aacagtttagtttcttcgtgaaggttcttct

SEQ ID NO: 3201 - DNA, 31 bp, Homo sapiens
  chr2:241580866-241580897
  hypo
ccccgaagctcctacacgctcggtcggggcc

SEQ ID NO: 3202 - DNA, 23 bp, Homo sapiens
  chr2:242259919-242259942
  hypo
cttttgcggccaagcacggtggc

SEQ ID NO: 3203 - DNA, 31 bp, Homo sapiens
  chr2:242353961-242353992
  hypo
ggggagctggtttgaacggcacagactgagg

SEQ ID NO: 3204 - DNA, 50 bp, Homo sapiens
  chr2:242354005-242354055
  hypo
agatcttaccttaccccgtaagattgtgtggatttcgtgcacctcaccac

SEQ ID NO: 3205 - DNA, 31 bp, Homo sapiens
  chr2:242354090-242354121
  hypo
gtgccttttgtgtgcccgacagcatggcagt

SEQ ID NO: 3206 - DNA, 31 bp, Homo sapiens
  chr2:242354122-242354153
  hypo
atgagatatacagatgcgtttctacagatga

SEQ ID NO: 3207 - DNA, 69 bp, Homo sapiens
  chr2:242354154-242354223
  hypo
aatgtgtgcagtgtagcgggagcatagctcatacgctgtgagctgaaagaaggccgagggcaggctcaa

SEQ ID NO: 3208 - DNA, 31 bp, Homo sapiens
  chr3:4993605-4993636
  hypo
tagctcttaggcactccgctccttttttttt

SEQ ID NO: 3209 - DNA, 76 bp, Homo sapiens
  chr3:12956288-12956364
  hypo
gagcagggccaggtagcggacagggcagggcctcagaggacacaccggggtctgtttcaggcgcagggtctggggg

SEQ ID NO: 3210 - DNA, 31 bp, Homo sapiens; identical to SEQ ID NO: 3031
  chr3:13138221-13138252
  hypo

SEQ ID NO: 3211 - DNA, 35 bp, Homo sapiens
  chr3:24344849-24344884
  hypo
acttgctcttgcttctcggccgctacctgggctag

SEQ ID NO: 3212 - DNA, 53 bp, Homo sapiens
  chr3:24344966-24345019
  hypo
ccccagacaccagacacgtgagcatgcccgattatcatcgcagagctgctgag

SEQ ID NO: 3213 - DNA, 26 bp, Homo sapiens
  chr3:37360899-37360925
  hypo
ttatgagagagagtctcgctctgttg

SEQ ID NO: 3214 - DNA, 29 bp, Homo sapiens
  chr3:46549770-46549799
  hypo
aacagttcaagtttaacgtaggaaatgat

SEQ ID NO: 3215 - DNA, 31 bp, Homo sapiens
  chr3:47052059-47052090
  hypo
gcaagggctaccaggtcgcacccacttggcc

SEQ ID NO: 3216 - DNA, 111 bp, Homo sapiens
  chr3:48698353-48698464
  hypo
ggtcagtggccgtgacgcgcagcacgactgtgtgggggcgcacatcctcgcgcacctgcgccacgtagcgcttctcgctgaactgaggagcattgtcgttctcgtctagca

SEQ ID NO: 3217 - DNA, 17 bp, Homo sapiens
  chr3:49075508-49075525
  hypo
ttttaaaacagagtctc

SEQ ID NO: 3218 - DNA, 55 bp, Homo sapiens
  chr3:49095130-49095185
  hypo
gagctgcttgcagctgcgagggactgggactctgcagagacggggtctgaatgga

SEQ ID NO: 3219 - DNA, 68 bp, Homo sapiens
  chr3:49095243-49095311
  hypo
tcagtaggctggtgaacggtgagttgtggggagagctgagccgagacctgttgcggagactgctgtac

SEQ ID NO: 3220 - DNA, 31 bp, Homo sapiens
  chr3:52164141-52164172
  hypo
accaccacctctcacgcgttgcaaaatattt

SEQ ID NO: 3221 - DNA, 65 bp, Homo sapiens
  chr3:52899902-52899967
  hypo
tgtgtgtgtgtaggggcggtggggggacacaaaccgtcacatgctttacacgttgtctaaccttc

SEQ ID NO: 3222 - DNA, 31 bp, Homo sapiens
  chr3:53545544-53545575
  hypo
ttcgccgtgcttttgtcggggtcagaaatgc

SEQ ID NO: 3223 - DNA, 31 bp, Homo sapiens
  chr3:66452458-66452489
  hypo
gcagggatggaggctgcgctcacatcagctc

SEQ ID NO: 3224 - DNA, 24 bp, Homo sapiens
  chr3:69095216-69095240
  hypo
accactgcacgctagcctggacaa

SEQ ID NO: 3225 - DNA, 31 bp, Homo sapiens
  chr3:82363227-82363258
  hypo
cttgccacatgctggacgttagaaaaagaag

SEQ ID NO: 3226 - DNA, 31 bp, Homo sapiens
  chr3:93707708-93707739
  hypo
gtttagctgacaagtgcgcagatctcctctt

SEQ ID NO: 3227 - DNA, 35 bp, Homo sapiens
  chr3:127292369-127292404
  hypo
attgatggccttccagcgctcgctgtctgtgctgt

SEQ ID NO: 3228 - DNA, 31 bp, Homo sapiens
  chr3:127292418-127292449
  hypo
tggcagggcatggaagcgatgtcatccaggt

SEQ ID NO: 3229 - DNA, 31 bp, Homo sapiens
  chr3:127401716-127401747
  hypo
gtgggaggtgggagcacgggagtgacagggg

SEQ ID NO: 3230 - DNA, 24 bp, Homo sapiens
  chr3:129011640-129011664
  hypo
atttcaagtcgactaacaagaaga

SEQ ID NO: 3231 - DNA, 43 bp, Homo sapiens
  chr3:132034533-132034576
  hypo
cagcctatttgcgcatgtttcctactgccggaagaaggaacag

SEQ ID NO: 3232 - DNA, 55 bp, Homo sapiens
  chr3:132034630-132034685
  hypo
tcctgccacaggtaagcgcaatgtaccaggaaacaggttgcgggtaaaccattgt

SEQ ID NO: 3233 - DNA, 50 bp, Homo sapiens; identical to SEQ ID NO: 3032
  chr3:133276457-133276507
  hypo

SEQ ID NO: 3234 - DNA, 29 bp, Homo sapiens
  chr3:135866169-135866198
  hypo
cactccagcctaggcgacagagcaagacc

SEQ ID NO: 3235 - DNA, 18 bp, Homo sapiens
  chr3:169807405-169807423
  hypo
aaagttgctacactgtcg

SEQ ID NO: 3236 - DNA, 31 bp, Homo sapiens
  chr3:169983366-169983397
  hypo
tttgctttgaattaatcgaaatagctctaaa

SEQ ID NO: 3237 - DNA, 31 bp, Homo sapiens
  chr3:171362913-171362944
  hypo
atggcttcctacaacacgttctgtcacattt

SEQ ID NO: 3238 - DNA, 31 bp, Homo sapiens
  chr3:171926519-171926550
  hypo
gatcaggcagcaccaccggccaggatcctcc

SEQ ID NO: 3239 - DNA, 31 bp, Homo sapiens
  chr3:185656957-185656988
  hypo
agtaatgtgctagaaccgttaaacacaatta

SEQ ID NO: 3240 - DNA, 44 bp, Homo sapiens
  chr3:186142829-186142873
  hypo
cagtgctcggtcagtggtggccatggctgcgcaggaggaggcag

SEQ ID NO: 3241 - DNA, 31 bp, Homo sapiens
  chr3:194012830-194012861
  hypo
tgcacaagccgggaatcgcctggctaggggc

SEQ ID NO: 3242 - DNA, 46 bp, Homo sapiens
  chr4:882672-882718
  hypo
gaggttggtgaagagccgctctgtcccaccccgcagaatgtccagg

SEQ ID NO: 3243 - DNA, 31 bp, Homo sapiens
  chr4:968830-968861
  hypo
tcatggcagtgaaccacggtgcaaactgcag

SEQ ID NO: 3244 - DNA, 41 bp, Homo sapiens
  chr4:1216187-1216228
  hypo
acagacagaggggcccgcgccgagagcgagggaagcagctg

SEQ ID NO: 3245 - DNA, 27 bp, Homo sapiens
  chr4:2524116-2524143
  hypo
agagcgagactccgtctcaaaaaaaaa

SEQ ID NO: 3246 - DNA, 31 bp, Homo sapiens
  chr4:2524167-2524198
  hypo
atagccaaaaaatgagcgttctgtgtgtctc

SEQ ID NO: 3247 - DNA, 32 bp, Homo sapiens
  chr4:2559964-2559996
  hypo
catcgtgtttgacagagcgagactgcatctca

SEQ ID NO: 3248 - DNA, 31 bp, Homo sapiens
  chr4:3103815-3103846
  hypo
tttaggaagagtgacccggtgaggacgtggg

SEQ ID NO: 3249 - DNA, 20 bp, Homo sapiens
  chr4:4288387-4288407
  hypo
tttgagaaaggagtctcgct

SEQ ID NO: 3250 - DNA, 31 bp, Homo sapiens
  chr4:6022304-6022335
  hypo
ctgggtagggggcagacgcaacactgtccag

SEQ ID NO: 3251 - DNA, 31 bp, Homo sapiens
  chr4:6950155-6950186
  hypo
attgttgtctagttttcggctgtatgggtat

SEQ ID NO: 3252 - DNA, 81 bp, Homo sapiens
  chr4:6950253-6950334
  hypo
caccatggtgttctcacggatgtcactggcgtgtgcgtgcctggggggtgggacaggtgggtctcccgtgggtcccactcg

SEQ ID NO: 3253 - DNA, 47 bp, Homo sapiens
  chr4:8386731-8386778
  hypo
actgtggccccccacacgcagcagccccccaccgagggcaccatggc

SEQ ID NO: 3254 - DNA, 52 bp, Homo sapiens
  chr4:8386791-8386843
  hypo
ggtggcatggggtgaccgcattccctccccactgtctcgcagaaggaaaaca

SEQ ID NO: 3255 - DNA, 31 bp, Homo sapiens
  chr4:8477856-8477887
  hypo
cctcacagtgatgaaccgtatttcataaaca

SEQ ID NO: 3256 - DNA, 44 bp, Homo sapiens
  chr4:57921950-57921994
  hypo
cttatctaaaatccctcgaacttgggagccgccctttgctcatt

SEQ ID NO: 3257 - DNA, 31 bp, Homo sapiens
  chr4:75137754-75137785
  hypo
acaaaaattctggcatcgctttgatatcttc

SEQ ID NO: 3258 - DNA, 40 bp, Homo sapiens
  chr4:75137810-75137850
  hypo
ggtattggtaagtctacgtcgctatcgaaactagctatga

SEQ ID NO: 3259 - DNA, 31 bp, Homo sapiens
  chr4:75137933-75137964
  hypo
aacaggtgtgggatcacggaggaggaaagac

SEQ ID NO: 3260 - DNA, 18 bp, Homo sapiens
  chr4:86801947-86801965
  hypo
ctgcgattacaggaatgc

SEQ ID NO: 3261 - DNA, 31 bp, Homo sapiens
  chr4:86802077-86802108
  hypo
agatgttagcaacctccgcacaccttttatt

SEQ ID NO: 3262 - DNA, 31 bp, Homo sapiens
  chr4:124106850-124106881
  hypo
gttcttatgattctcacgctctgattttcta

SEQ ID NO: 3263 - DNA, 13 bp, Homo sapiens
  chr4:124106977-124106990
  hypo
gcattgtacagtg

SEQ ID NO: 3264 - DNA, 31 bp, Homo sapiens
  chr4:152594486-152594517
  hypo
tctgtctcatggccgccgaattaattgaggt

SEQ ID NO: 3265 - DNA, 19 bp, Homo sapiens
  chr4:184582527-184582546
  hypo
ttttttttttttgagacgg

SEQ ID NO: 3266 - DNA, 31 bp, Homo sapiens
  chr4:185354512-185354543
  hypo
tctcccatgctcctgccgtgtggtcattttg

SEQ ID NO: 3267 - DNA, 86 bp, Homo sapiens
  chr5:462317-462403
  hypo
gaagagggtgtgtctccgagccagcccagcatggacgggattttagacgccatcgcgaaggagggctgcagcggtttgctggagga

SEQ ID NO: 3268 - DNA, 31 bp, Homo sapiens
  chr5:638628-638659
  hypo
ggaagggaggcatggccggagctagaggcag

SEQ ID NO: 3269 - DNA, 31 bp, Homo sapiens
  chr5:638894-638925
  hypo
gcctggatgtgtcttccgcttccctgtctgg

SEQ ID NO: 3270 - DNA, 65 bp, Homo sapiens
  chr5:1641261-1641326
  hypo
cggctgtggggctgcccgccgccctcctcctcccacgctaggctgcccgccgccctcctcctccc

SEQ ID NO: 3271 - DNA, 69 bp, Homo sapiens
  chr5:1641337-1641406
  hypo
cctgacccatggagaccggcctgagacagacgcatccccgaacaccaggtgccccgtcttctaggccat

SEQ ID NO: 3272 - DNA, 31 bp, Homo sapiens
  chr5:6675044-6675075
  hypo
acctctgatgacgtcccgtagacatggtgtc

SEQ ID NO: 3273 - DNA, 31 bp, Homo sapiens
  chr5:6759010-6759041
  hypo
tctaccctgtgagatacgcagaggaccctgt

SEQ ID NO: 3274 - DNA, 18 bp, Homo sapiens
  chr5:52182856-52182874
  hypo
cctcggcctccctgaaat

SEQ ID NO: 3275 - DNA, 24 bp, Homo sapiens
  chr5:55335522-55335546
  hypo
tgcaacctccgcctccagggttca

SEQ ID NO: 3276 - DNA, 31 bp, Homo sapiens
  chr5:94795583-94795614
  hypo
ctagtctttccataagcggtggctcacgctt

SEQ ID NO: 3277 - DNA, 31 bp, Homo sapiens
  chr5:96173524-96173555
  hypo
tgaaagtggctctcagcgtgaaggggagctg

SEQ ID NO: 3278 - DNA, 31 bp, Homo sapiens
  chr5:130636576-130636607
  hypo
ataataaaatagtttccgttttttagctatg

SEQ ID NO: 3279 - DNA, 31 bp, Homo sapiens
  chr5:132607917-132607948
  hypo
ctgaaaattaatgacacggccatttcttgaa

SEQ ID NO: 3280 - DNA, 31 bp, Homo sapiens
  chr5:133907491-133907522
  hypo
cttcagattcctgccacgaggctctgctctg

SEQ ID NO: 3281 - DNA, 31 bp, Homo sapiens
  chr5:133907537-133907568
  hypo
cctggcttggattcctcgttcccaggctctg

SEQ ID NO: 3282 - DNA, 34 bp, Homo sapiens
  chr5:133907698-133907732
  hypo
aagaaaggggccccagcggcgttgctcacttgag

SEQ ID NO: 3283 - DNA, 25 bp, Homo sapiens
  chr5:134085042-134085067
  hypo
ccgctgcacccggccaactataggt

SEQ ID NO: 3284 - DNA, 16 bp, Homo sapiens
  chr5:137727474-137727490
  hypo
tgccatggggaatggc

SEQ ID NO: 3285 - DNA, 56 bp, Homo sapiens
  chr5:138928997-138929053
  hypo
ggggtcttggcggccccgcactccgagcggccggctggcgccgtgggcccaggaag

SEQ ID NO: 3286 - DNA, 23 bp, Homo sapiens
  chr5:153651012-153651035
  hypo
cgaaactccgtctcaaaaaataa

SEQ ID NO: 3287 - DNA, 35 bp, Homo sapiens
  chr5:154218387-154218422
  hypo
gccttgtgatccgccagcctcggcctcccaaagtg

SEQ ID NO: 3288 - DNA, 31 bp, Homo sapiens
  chr5:159497742-159497773
  hypo
acatacatctgagcttcggcaaaatgacaag

SEQ ID NO: 3289 - DNA, 31 bp, Homo sapiens
  chr5:165055690-165055721
  hypo
tgttcatttttgcctacgtatttttctcaca

SEQ ID NO: 3290 - DNA, 31 bp, Homo sapiens
  chr5:165210728-165210759
  hypo
ccaattaagaaaataccggccaggcgcggtg

SEQ ID NO: 3291 - DNA, 43 bp, Homo sapiens
  chr5:171523261-171523304
  hypo
cccacatgccatcttacgttacctgcagcgtgggagtctgcaa

SEQ ID NO: 3292 - DNA, 40 bp, Homo sapiens
  chr5:171533430-171533470
  hypo
aagggaaaaagaggcacgaagggcccgggggggctcagaa

SEQ ID NO: 3293 - DNA, 31 bp, Homo sapiens
  chr5:176810601-176810632
  hypo
caaagatccagagacccgactcccatctatt

SEQ ID NO: 3294 - DNA, 27 bp, Homo sapiens
  chr5:180681263-180681290
  hypo
tgggcaacagagcgagactctgtcaaa

SEQ ID NO: 3295 - DNA, 31 bp, Homo sapiens
  chr6:3195389-3195420
  hypo
ggacaaggcccagggccggcatgactctggg

SEQ ID NO: 3296 - DNA, 47 bp, Homo sapiens
  chr6:15227669-15227716
  hypo
ggatttatcatatttgcgacaggaaaaacattcggtttggcaggaaa

SEQ ID NO: 3297 - DNA, 31 bp, Homo sapiens
  chr6:15227765-15227796
  hypo
gaaataaatttgaattcgcattgggtaggct

SEQ ID NO: 3298 - DNA, 49 bp, Homo sapiens
  chr6:15227830-15227879
  hypo
gctttggggggacaagcggggtgggagtggggggcgaggggaggggaga

SEQ ID NO: 3299 - DNA, 43 bp, Homo sapiens
  chr6:15513370-15513413
  hypo
gtgtctgcagggaggccggtgtggggtgcgtgtgtcccctctg

SEQ ID NO: 3300 - DNA, 165 bp, Homo sapiens
  chr6:15513415-15513580
  hypo
ggtgagcatggcaggccgtcactaaaggtgcgggccgtctcccgtgtctggcagggatacagagctgcggcagcgcaggcagctgttcgaggctggcctccactcctccgcacgctatggcagccacgatggcagcagcacggtggcggacgggaagaaaaagcc

SEQ ID NO: 3301 - DNA, 106 bp, Homo sapiens
  chr6:15513644-15513750
  hypo
ctgtccatggtgagcccgcctggccctgccggcgccctcgcatgtagtgcttggcctgagagctccggggttgcccccagaagagggagggcgctctctgcccagg

SEQ ID NO: 3302 - DNA, 64 bp, Homo sapiens
  chr6:15513762-15513826
  hypo
ctcccatctctggagccggctgtgggacctcggcggagcttctggccgccggaggtggctgcct

SEQ ID NO: 3303 - DNA, 58 bp, Homo sapiens
  chr6:15513859-15513917
  hypo
cctctgttctgcccacgcgtggccctccctcggtcctgcagtgcgtccttcctccctg

SEQ ID NO: 3304 - DNA, 58 bp, Homo sapiens
  chr6:15513923-15513981
  hypo
aggtggcctccctctccgccctactttgtcactccagcccccacgcactctgctctta

SEQ ID NO: 3305 - DNA, 52 bp, Homo sapiens
  chr6:15513991-15514043
  hypo
ctgaggcagtgaggggcgggtttccagtactgggcagcgtctgccattccct

SEQ ID NO: 3306 - DNA, 42 bp, Homo sapiens
  chr6:15518529-15518571
  hypo
agcctgtttctgtagtcggatgtgtgacgtgaccagatcctg

SEQ ID NO: 3307 - DNA, 31 bp, Homo sapiens
  chr6:33748501-33748532
  hypo
ctgaatggtaatcatacgggggagaagggac

SEQ ID NO: 3308 - DNA, 42 bp, Homo sapiens
  chr6:33748536-33748578
  hypo
tgtttctcctgaaagccgaaggcaagacgagcaaagtgaacc

SEQ ID NO: 3309 - DNA, 31 bp, Homo sapiens
  chr6:33748614-33748645
  hypo
gcagtcaggagtgagccgccccactgcacat

SEQ ID NO: 3310 - DNA, 31 bp, Homo sapiens
  chr6:34165021-34165052
  hypo
gagatctggactaaagcgggttctgccacta

SEQ ID NO: 3311 - DNA, 42 bp, Homo sapiens
  chr6:37450649-37450691
  hypo
ctcttcctgcccccaccgtccaccctccgctagtcagaccat

SEQ ID NO: 3312 - DNA, 31 bp, Homo sapiens
  chr6:37450692-37450723
  hypo
acatttactcagcagacgggaacagctttgt

SEQ ID NO: 3313 - DNA, 31 bp, Homo sapiens
  chr6:37450768-37450799
  hypo
tgtccttctggagacccggaaccccccagca

SEQ ID NO: 3314 - DNA, 31 bp, Homo sapiens
  chr6:37450806-37450837
  hypo
gaggcaaggcctgggccgccaggaagccatg

SEQ ID NO: 3315 - DNA, 103 bp, Homo sapiens
  chr6:37721652-37721755
  hypo
gggagcgggcaggggcgcgtggggggcctggccaaggagcgggcagaggcacgtggggggcctggccagggagcgggcaggggggcacgcgggcctggccagg

SEQ ID NO: 3316 - DNA, 64 bp, Homo sapiens
  chr6:38134383-38134447
  hypo
gagccctccacctccccgccgccctcacagcagagccctccacctcccccgcactcccatagca

SEQ ID NO: 3317 - DNA, 31 bp, Homo sapiens
  chr6:42074110-42074141
  hypo
ctccttctcaggcaggcgggggcccttcttg

SEQ ID NO: 3318 - DNA, 31 bp, Homo sapiens
  chr6:42074176-42074207
  hypo
cctgtgactgaggaatcggtcctctctcctg

SEQ ID NO: 3319 - DNA, 36 bp, Homo sapiens
  chr6:42074216-42074252
  hypo
agataggctgccagctcgttccgcagcttttccatc

SEQ ID NO: 3320 - DNA, 31 bp, Homo sapiens
  chr6:42074271-42074302
  hypo
ccacaggtgctgaagacgctgtgttctctgg

SEQ ID NO: 3321 - DNA, 31 bp, Homo sapiens
  chr6:108984286-108984317
  hypo
gaggagttggccagcacggtggctcatgcct

SEQ ID NO: 3322 - DNA, 4 bp, Homo sapiens
  chr6:108984327-108984331
  hypo
cact

SEQ ID NO: 3323 - DNA, 44 bp, Homo sapiens
  chr6:126426569-126426613
  hypo
tggcagtcagaagggacgtgggttgatcacgcaggaggtagctc

SEQ ID NO: 3324 - DNA, 76 bp, Homo sapiens
  chr6:126426644-126426720
  hypo
tggaagccagatgatgcggggtagaggcacagctcccccagttgttcggagacggaggcctcggtttcctcagagc

SEQ ID NO: 3325 - DNA, 31 bp, Homo sapiens
  chr6:137491867-137491898
  hypo
agggcttacataccaccgggaaagggcctgc

SEQ ID NO: 3326 - DNA, 67 bp, Homo sapiens
  chr6:157548326-157548393
  hypo
gccattcatgcacacacgtgcatgcacacccacacgtgcatgcacacacacacgtggagactggggt

SEQ ID NO: 3327 - DNA, 31 bp, Homo sapiens
  chr6:161522587-161522618
  hypo
caggtgctctcaggctcgggtgttggctatg

SEQ ID NO: 3328 - DNA, 46 bp, Homo sapiens
  chr6:161522660-161522706
  hypo
aacagactccagaggacggtctccacagcagcgctgttcacttagg

SEQ ID NO: 3329 - DNA, 38 bp, Homo sapiens
  chr6:161522718-161522756
  hypo
gtgggtctgtcctgtgcgttttccgctgcccactagat

SEQ ID NO: 3330 - DNA, 8 bp, Homo sapiens
  chr6:168379288-168379296
  hypo
tttgaaga

SEQ ID NO: 3331 - DNA, 34 bp, Homo sapiens
  chr7:943929-943963
  hypo
agcacctcacaggggccgtcgtccaagctcaagg

SEQ ID NO: 3332 - DNA, 34 bp, Homo sapiens
  chr7:943978-944012
  hypo
accctgtgggtgctggcggcgcacctgctgtgct

SEQ ID NO: 3333 - DNA, 45 bp, Homo sapiens
  chr7:1113682-1113727
  hypo
ccgtgacccccgaccccgacaccctgctgccgtgatgttccccca

SEQ ID NO: 3334 - DNA, 31 bp, Homo sapiens
  chr7:1519167-1519198
  hypo
gagggcctgcaggacacgcaccgtgatgccc

SEQ ID NO: 3335 - DNA, 99 bp, Homo sapiens
  chr7:1519310-1519409
  hypo
gcgggaaaatctggaacggggaaggccagtgtcaggaggaagcggaggagaaggaggaggagcgcagcggagaggctaagcgcccggtgcagctccgtg

SEQ ID NO: 3336 - DNA, 70 bp, Homo sapiens
  chr7:1533907-1533977
  hypo
acctccaaagcctgaccggaaggccgcagtgaaggtgaacagagcgcccagggcacgaggtgggggcagg

SEQ ID NO: 3337 - DNA, 31 bp, Homo sapiens
  chr7:1533983-1534014
  hypo
tggcaggagccccaggcggggctggagggga

SEQ ID NO: 3338 - DNA, 59 bp, Homo sapiens
  chr7:1534147-1534206
  hypo
tgaagggtggcgtgcccgtggacgccctggaagcaactggaaggcgggggtccggggga

SEQ ID NO: 3339 - DNA, 62 bp, Homo sapiens
  chr7:1534226-1534288
  hypo
gtcacgtggacgcagacggcagctgaatccctacagtggcgctgggacgccagcatgggagt

SEQ ID NO: 3340 - DNA, 94 bp, Homo sapiens
  chr7:1534337-1534431
  hypo
tgaccatgggaacagccgcccaactcccactggcccttcctgccgcagccggcccggcaccccgcagccccgcccagcccggcacacaggagcc

SEQ ID NO: 3341 - DNA, 31 bp, Homo sapiens
  chr7:1538765-1538796
  hypo
actcctccacgctctccgcgagctcttcgta

SEQ ID NO: 3342 - DNA, 31 bp, Homo sapiens
  chr7:1866111-1866142
  hypo
agcccagctcagctccgcggagctcctggtc

SEQ ID NO: 3343 - DNA, 31 bp, Homo sapiens
  chr7:1866167-1866198
  hypo
caccctgctgtgtgcacgaccctcagctccc

SEQ ID NO: 3344 - DNA, 123 bp, Homo sapiens
  chr7:1885180-1885303
  hypo
gtccggctctggttcacggggaagagcgctgtttaggagacggacgtgctccacgcagacatgcgtccggctctggttcacggggaagagcgctgtttaggagacggacgtgctccacgcaga

SEQ ID NO: 3345 - DNA, 31 bp, Homo sapiens
  chr7:1950739-1950770
  hypo
cccgctcctgggcggccgcctctccctccat

SEQ ID NO: 3346 - DNA, 31 bp, Homo sapiens
  chr7:2024688-2024719
  hypo
actttatagtctgtgacggttcattccatgt

SEQ ID NO: 3347 - DNA, 52 bp, Homo sapiens
  chr7:2024790-2024842
  hypo
agatcagcatttgaatcggggactcagcagacggccccgggcagcatgggta

SEQ ID NO: 3348 - DNA, 165 bp, Homo sapiens
  chr7:2024849-2025014
  hypo
tccaaccccttgaggccggaatgaaatgaaaactggaggaggcgaccgttcctcccttgcctgcctggtggcctgagcggggcagctcccgttttccgcccaggactggggctttcaccacaggctccgctggttctcaggcctgcagagcggactgggcacagc

SEQ ID NO: 3349 - DNA, 20 bp, Homo sapiens
  chr7:2279837-2279857
  hypo
cagagcgagactctgtctca

SEQ ID NO: 3350 - DNA, 111 bp, Homo sapiens
  chr7:5353277-5353388
  hypo
agctctgcaaatggctcgggtgctgggcagctggtgaaggcgggtggtgcgggactgggctgcggcggtgccgggcgcgccttgggggccttggctcgcttgtccacaggc

SEQ ID NO: 3351 - DNA, 31 bp, Homo sapiens
  chr7:5437033-5437064
  hypo
cccggatgccagccaacggctcctgcccacc

SEQ ID NO: 3352 - DNA, 31 bp, Homo sapiens
  chr7:6682330-6682361
  hypo
gttggggacccaggagcgacttagccgtggt

SEQ ID NO: 3353 - DNA, 31 bp, Homo sapiens
  chr7:6686318-6686349
  hypo
ctcccctgatgctccccgcctcccccagtgc

SEQ ID NO: 3354 - DNA, 31 bp, Homo sapiens
  chr7:6687041-6687072
  hypo
tgcctatggacttgggcgtgtcacccttgtc

SEQ ID NO: 3355 - DNA, 41 bp, Homo sapiens; identical to SEQ ID NO: 3044
  chr7:8483683-8483724
  hypo

SEQ ID NO: 3356 - DNA, 31 bp, Homo sapiens
  chr7:20664637-20664668
  hypo
ttccatgaaggtcaatcggagttagaaatta

SEQ ID NO: 3357 - DNA, 24 bp, Homo sapiens
  chr7:56436533-56436557
  hypo
ctctctctgcgtgggatgtgccgg

SEQ ID NO: 3358 - DNA, 18 bp, Homo sapiens
  chr7:86959423-86959441
  hypo
ggacgagaagaatgtgca

SEQ ID NO: 3359 - DNA, 31 bp, Homo sapiens
  chr7:99939850-99939881
  hypo
gagccgtgacttcctgcgatcaggtcactca

SEQ ID NO: 3360 - DNA, 31 bp, Homo sapiens
  chr7:100160494-100160525
  hypo
accctttcacagctcccgccgcccagtcccc

SEQ ID NO: 3361 - DNA, 34 bp, Homo sapiens
  chr7:100170148-100170182
  hypo
cagacatgatggggggcggcggcagcagtttcag

SEQ ID NO: 3362 - DNA, 31 bp, Homo sapiens
  chr7:100283961-100283992
  hypo
ttcaccacaccctcctcgatcccctcgcaaa

SEQ ID NO: 3363 - DNA, 31 bp, Homo sapiens
  chr7:134880977-134881008
  hypo
caccctcagggcctgccgaggatgcccgagt

SEQ ID NO: 3364 - DNA, 31 bp, Homo sapiens
  chr7:148162309-148162340
  hypo
agcagggaggcctttgcgtgactctcctctg

SEQ ID NO: 3365 - DNA, 82 bp, Homo sapiens
  chr7:151411458-151411540
  hypo
cccatccgcgccccgccgtgcctaggtggagaggcggcagggcttcccggagagccgtcctcccatccgcgacccgccgtcc

SEQ ID NO: 3366 - DNA, 38 bp, Homo sapiens
  chr7:156733989-156734027
  hypo
gaggcgcaaatgggtgacgaggcgcgattgggtgacga

SEQ ID NO: 3367 - DNA, 33 bp, Homo sapiens
  chr7:156734691-156734724
  hypo
cgcgaatgggtgacgaggcgcgattgggtgacg

SEQ ID NO: 3368 - DNA, 31 bp, Homo sapiens
  chr7:156937633-156937664
  hypo
gtatctacccttacagcgttatacagaagag

SEQ ID NO: 3369 - DNA, 31 bp, Homo sapiens
  chr7:157205930-157205961
  hypo
aggagtatcaagaacacgtaactgttaaaaa

SEQ ID NO: 3370 - DNA, 31 bp, Homo sapiens
  chr7:157845212-157845243
  hypo
ggatggtagaggggtgcggccgctgctttgc

SEQ ID NO: 3371 - DNA, 31 bp, Homo sapiens; identical to SEQ ID NO: 3045
  chr8:27168527-27168558
  hypo

SEQ ID NO: 3372 - DNA, 31 bp, Homo sapiens; identical to SEQ ID NO: 3046
  chr8:27168574-27168605
  hypo

SEQ ID NO: 3373 - DNA, 31 bp, Homo sapiens
  chr8:38644147-38644178
  hypo
acttgggaagcctccccgagtgcggtttggg

SEQ ID NO: 3374 - DNA, 31 bp, Homo sapiens
  chr8:42287377-42287408
  hypo
cgctgtggctgggggccgggcacagtaaggg

SEQ ID NO: 3375 - DNA, 60 bp, Homo sapiens
  chr8:48711777-48711837
  hypo
attctcttcctccttgcgcagctgttggtcacagaaatctgccagcgtcatgtaagcatc

SEQ ID NO: 3376 - DNA, 31 bp, Homo sapiens
  chr8:48711878-48711909
  hypo
gggcctcctcctcagccgcctgcacagcctc

SEQ ID NO: 3377 - DNA, 31 bp, Homo sapiens
  chr8:48711927-48711958
  hypo
tctctggtacagacccgcgatcacctggaat

SEQ ID NO: 3378 - DNA, 28 bp, Homo sapiens
  chr8:51010216-51010244
  hypo
aaaaaacaaaaaacgaaactaaggagag

SEQ ID NO: 3379 - DNA, 24 bp, Homo sapiens
  chr8:87402877-87402901
  hypo
gtccagcctcggctcagcatcaga

SEQ ID NO: 3380 - DNA, 8 bp, Homo sapiens
  chr8:124255228-124255236
  hypo
accacaca

SEQ ID NO: 3381 - DNA, 31 bp, Homo sapiens
  chr8:124255277-124255308
  hypo
tgttgaccaggttcagcgttctttcttcaac

SEQ ID NO: 3382 - DNA, 82 bp, Homo sapiens
  chr8:128893419-128893501
  hypo
ggaactggactgggttcggtttgcatctcccgagtctgactcgtgggagtaaccaccataatagcagcgctgtgctgttgag

SEQ ID NO: 3383 - DNA, 61 bp, Homo sapiens
  chr8:128893528-128893589
  hypo
tgagcccactgtgtgccggagcactctctatacattcagtcttgtccgcagatgaactcca

SEQ ID NO: 3384 - DNA, 42 bp, Homo sapiens
  chr8:128896286-128896328
  hypo
catgtcatatgtgtatcgatagcttgacgaatgttctcaaac

SEQ ID NO: 3385 - DNA, 31 bp, Homo sapiens
  chr8:129076175-129076206
  hypo
gtgtccttcaaaacatcgtgttgtaaatagt

SEQ ID NO: 3386 - DNA, 31 bp, Homo sapiens; identical to SEQ ID NO: 3047
  chr8:131081757-131081788
  hypo

SEQ ID NO: 3387 - DNA, 31 bp, Homo sapiens
  chr8:134232708-134232739
  hypo
tgctgggagccatccccgggattggggcatg

SEQ ID NO: 3388 - DNA, 31 bp, Homo sapiens
  chr8:140937489-140937520
  hypo
caacagcactggaggccgaaactctaacaga

SEQ ID NO: 3389 - DNA, 11 bp, Homo sapiens
  chr8:140937672-140937683
  hypo
gcaaaacagac

SEQ ID NO: 3390 - DNA, 31 bp, Homo sapiens
  chr8:141071377-141071408
  hypo
cattcccaaggctgcccggcagcctgttgtg

SEQ ID NO: 3391 - DNA, 31 bp, Homo sapiens
  chr8:141568165-141568196
  hypo
ctctcaccccccactccggcctgcgtaccaa

SEQ ID NO: 3392 - DNA, 54 bp, Homo sapiens
  chr8:141568209-141568263
  hypo
cgtaatgatgggacacgcggactggcccagggaagggggcgtgggtcagggcca

SEQ ID NO: 3393 - DNA, 38 bp, Homo sapiens
  chr8:142312705-142312743
  hypo
caggcatgagccaccgcggcaggcgtaaagttatttta

SEQ ID NO: 3394 - DNA, 81 bp, Homo sapiens
  chr8:142312830-142312911
  hypo
gaaaaagctgcctctacgatactcaggcagtccccctcgcctcgtgtctaacatgctcttaatatgcgatttcatctccag

SEQ ID NO: 3395 - DNA, 31 bp, Homo sapiens
  chr8:143846050-143846081
  hypo
cagcaagcgatggatacgtaggggcccaggc

SEQ ID NO: 3396 - DNA, 58 bp, Homo sapiens
  chr8:144380521-144380579
  hypo
gatttggtggccccaccgttaattaagctcctgacccctgggccggtggtgaggtggg

SEQ ID NO: 3397 - DNA, 31 bp, Homo sapiens
  chr8:145679657-145679688
  hypo
gacacatggcaagctgcggtcccagcccgtg

SEQ ID NO: 3398 - DNA, 49 bp, Homo sapiens
  chr9:6868490-6868539
  hypo
aacctgtggctgctcacgtccctgatataaagtgcgtggtagttaccca

SEQ ID NO: 3399 - DNA, 31 bp, Homo sapiens
  chr9:6868610-6868641
  hypo
taaatagttgttatcccgaattgtttaggga

SEQ ID NO: 3400 - DNA, 45 bp, Homo sapiens
  chr9:19431390-19431435
  hypo
ccctctctgacctgtgcgtaattcttaaaccgctgggtacagaga

SEQ ID NO: 3401 - DNA, 31 bp, Homo sapiens
  chr9:32956634-32956665
  hypo
gcatacccccagccctcgtctcagcttggta

SEQ ID NO: 3402 - DNA, 31 bp, Homo sapiens
  chr9:77648110-77648141
  hypo
ctttggctcaggagaccgccccacaaaatat

SEQ ID NO: 3403 - DNA, 40 bp, Homo sapiens
  chr9:94186235-94186275
  hypo
caggggcgggccggggcgggcactccgcggccccgccccg

SEQ ID NO: 3404 - DNA, 40 bp, Homo sapiens
  chr9:94834641-94834681
  hypo
tgtttccaaaatccaacgttggtcacggactcttcttggg

SEQ ID NO: 3405 - DNA, 31 bp, Homo sapiens
  chr9:108200731-108200762
  hypo
tggatttggtacagtgcggctgtctaataaa

SEQ ID NO: 3406 - DNA, 31 bp, Homo sapiens
  chr9:111835845-111835876
  hypo
atttagaaacatgcagcgcaaagttactata

SEQ ID NO: 3407 - DNA, 38 bp, Homo sapiens
  chr9:111835877-111835915
  hypo
attatatctaatgatacgcactacgggaaataaaaagt

SEQ ID NO: 3408 - DNA, 31 bp, Homo sapiens
  chr9:111835971-111836002
  hypo
gttcaaatacttgacacgtatatgtacatac

SEQ ID NO: 3409 - DNA, 31 bp, Homo sapiens
  chr9:111836007-111836038
  hypo
atttgcatgaatatatcgtataaatgtgttt

SEQ ID NO: 3410 - DNA, 21 bp, Homo sapiens
  chr9:113025658-113025679
  hypo
cctgggcgtgtctaaaaacaa

SEQ ID NO: 3411 - DNA, 38 bp, Homo sapiens
  chr9:114701510-114701548
  hypo
ctgggattacaggcgtgaaccaccgcacctggtcaaca

SEQ ID NO: 3412 - DNA, 19 bp, Homo sapiens
  chr9:123321471-123321490
  hypo
tttaaaacattgaggccgg

SEQ ID NO: 3413 - DNA, 31 bp, Homo sapiens
  chr9:134688852-134688883
  hypo
ctgccgttgtttgagacggagtctcactctg

SEQ ID NO: 3414 - DNA, 41 bp, Homo sapiens
  chr9:135196056-135196097
  hypo
aaatgcttaaataagacggttgaaatcgtatggttaaaaag

SEQ ID NO: 3415 - DNA, 31 bp, Homo sapiens
  chr9:135196473-135196504
  hypo
tccaacacctctcctccgtcccccactccta

SEQ ID NO: 3416 - DNA, 31 bp, Homo sapiens
  chr9:135196521-135196552
  hypo
actcagctccctgccacgcctacatttccca

SEQ ID NO: 3417 - DNA, 31 bp, Homo sapiens
  chr9:135927292-135927323
  hypo
ggaggtcctagggccacgccctgtgtgtcca

SEQ ID NO: 3418 - DNA, 90 bp, Homo sapiens
  chr9:136905411-136905501
  hypo
gagcaggtgctgggcacggcccacaccactggggctgcgtggcgccctgggattggagggggcttggggcgatgtcggagctgcctcagc

SEQ ID NO: 3419 - DNA, 66 bp, Homo sapiens
  chr9:136905537-136905603
  hypo
ctctgcccctcactcccgtgacccccagtgagtcatgagccctctccgcctcggcttcttcgcctg

SEQ ID NO: 3420 - DNA, 35 bp, Homo sapiens
  chr9:137330714-137330749
  hypo
aagcactgaagccccccggccgccaacccctgaaa

SEQ ID NO: 3421 - DNA, 35 bp, Homo sapiens
  chr9:139272164-139272199
  hypo
aggctgccaggaaccgcgcccgcaacaggaggtag

SEQ ID NO: 3422 - DNA, 50 bp, Homo sapiens
  chr9:139345775-139345825
  hypo
gagacagaggtggctgcgtgggacccgagtcggcacgatcccaccctggg

SEQ ID NO: 3423 - DNA, 31 bp, Homo sapiens
  chr9:140111067-140111098
  hypo
tgcccagccagccctgcgctcccccaccctg

SEQ ID NO: 3424 - DNA, 21 bp, Homo sapiens
  chr9:140588505-140588526
  hypo
acacagtggctcaggacgctg

SEQ ID NO: 3425 - DNA, 51 bp, Homo sapiens
  chr9:140588794-140588845
  hypo
gccgatacccaccaggcgatggtgctggactctggccgataccccccacac

SEQ ID NO: 3426 - DNA, 120 bp, Homo sapiens; identical to SEQ ID NO: 3049
  chr9:140703959-140704079
  hypo

SEQ ID NO: 3427 - DNA, 214 bp, Homo sapiens; identical to SEQ ID NO: 3050
  chr9:140704245-140704459
  hypo

SEQ ID NO: 3428 - DNA, 102 bp, Homo sapiens
  chr9:140704675-140704777
  hypo
gttccgatgccgccccgcgtggaccgtcggtgatgggtccggaggcggttccgatgccgccctgcgtgaaaggcgctcctcgcacggcgccaactggaggag

SEQ ID NO: 3429 - DNA, 31 bp, Homo sapiens
  chr10:1199245-1199276
  hypo
gcagtacccagagggccgacatctgttgcct

SEQ ID NO: 3430 - DNA, 31 bp, Homo sapiens
  chr10:2610007-2610038
  hypo
tatattcttggaatcacgggaaaggtcaaca

SEQ ID NO: 3431 - DNA, 31 bp, Homo sapiens
  chr10:2610045-2610076
  hypo
gaggatttctccagtgcgtttcaaggcctcc

SEQ ID NO: 3432 - DNA, 55 bp, Homo sapiens
  chr10:2610138-2610193
  hypo
aatgtgcaagtgggagcgagggtgagaaattggggtcgttcgcatcatctatcac

SEQ ID NO: 3433 - DNA, 38 bp, Homo sapiens
  chr10:3196874-3196912
  hypo
tcattactgaattgttcgtttttcgtatattctgaata

SEQ ID NO: 3434 - DNA, 31 bp, Homo sapiens
  chr10:3196983-3197014
  hypo
gggtccccttctctcccgtggcctcctccct

SEQ ID NO: 3435 - DNA, 31 bp, Homo sapiens
  chr10:3197228-3197259
  hypo
taatacatgaagcacccgtgtgctccccatc

SEQ ID NO: 3436 - DNA, 79 bp, Homo sapiens
  chr10:3197295-3197374
  hypo
ctgtctcccccacacacgctgtcctccctccatgcccaccgctccaccatccctgtgtgcctcacgcctgtcccacaga

SEQ ID NO: 3437 - DNA, 31 bp, Homo sapiens
  chr10:3197390-3197421
  hypo
gtggctggcacacacccggtatgcctgagac

SEQ ID NO: 3438 - DNA, 31 bp, Homo sapiens
  chr10:5998387-5998418
  hypo
acagcaggacagtggacgtggagatagccac

SEQ ID NO: 3439 - DNA, 48 bp, Homo sapiens
  chr10:13771431-13771479
  hypo
tcggcagaacgtacaccgcaccgcataatttagcggggcaatgccgcc

SEQ ID NO: 3440 - DNA, 50 bp, Homo sapiens
  chr10:16769342-16769392
  hypo
ttttctgagataaatacgtgtttctggcaaattcacgaccacagtgaagg

SEQ ID NO: 3441 - DNA, 31 bp, Homo sapiens
  chr10:26840145-26840176
  hypo
tcacgtgtttcagccccgttggtacttggta

SEQ ID NO: 3442 - DNA, 31 bp, Homo sapiens
  chr10:27233660-27233691
  hypo
gaaaaaagacaaggttcggcagctgttttca

SEQ ID NO: 3443 - DNA, 31 bp, Homo sapiens
  chr10:27478290-27478321
  hypo
tgggcatagtggctcacgcctttatttccag

SEQ ID NO: 3444 - DNA, 88 bp, Homo sapiens
  chr10:35503792-35503880
  hypo
gctttgcaggggggaacgttgcacatctcgcacacccttgcgcgtgggatccacagcgctcccacacccgtgcgcgtgggatccggag

SEQ ID NO: 3445 - DNA, 31 bp, Homo sapiens
  chr10:63669395-63669426
  hypo
tttctgagtgactgaacgacataattaaaat

SEQ ID NO: 3446 - DNA, 23 bp, Homo sapiens
  chr10:63931000-63931023
  hypo
ttttttttttttgatacggagtc

SEQ ID NO: 3447 - DNA, 31 bp, Homo sapiens
  chr10:64983779-64983810
  hypo
tacaggcatgagcctccgagcccagccttat

SEQ ID NO: 3448 - DNA, 54 bp, Homo sapiens
  chr10:73288225-73288279
  hypo
gcccgtcccttctgcacggctggccttgcagccggcctgcggcagacacagctt

SEQ ID NO: 3449 - DNA, 36 bp, Homo sapiens
  chr10:73288289-73288325
  hypo
ggttaaaaagcctcatcggagcgttatgatattgga

SEQ ID NO: 3450 - DNA, 70 bp, Homo sapiens
  chr10:73288348-73288418
  hypo
agctattctcttcctgcgaccagcgcgataggagtgattgaggtgcccgggcctccgcagcagcctggga

SEQ ID NO: 3451 - DNA, 31 bp, Homo sapiens
  chr10:73483375-73483406
  hypo
tcaggccaaggaaatgcgggcaagaagtagc

SEQ ID NO: 3452 - DNA, 31 bp, Homo sapiens
  chr10:76538436-76538467
  hypo
caggcactcttgggcacgacttgacatggct

SEQ ID NO: 3453 - DNA, 31 bp, Homo sapiens
  chr10:81073339-81073370
  hypo
cccttggttggggggcgcgggcatataacct

SEQ ID NO: 3454 - DNA, 31 bp, Homo sapiens
  chr10:81073372-81073403
  hypo
cagaagcaaacaggagcggcaacttctaact

SEQ ID NO: 3455 - DNA, 31 bp, Homo sapiens
  chr10:81073455-81073486
  hypo
acctggagaaaaggaacgttgctcttggaca

SEQ ID NO: 3456 - DNA, 31 bp, Homo sapiens
  chr10:81073490-81073521
  hypo
gcaaaccatttctctccgtctgttctgtttt

SEQ ID NO: 3457 - DNA, 31 bp, Homo sapiens
  chr10:100170636-100170667
  hypo
gctgctgagagccacacgcccagggccagtg

SEQ ID NO: 3458 - DNA, 31 bp, Homo sapiens
  chr10:103002233-103002264
  hypo
tgcagccaatcaatcccgtcactctgggggg

SEQ ID NO: 3459 - DNA, 31 bp, Homo sapiens
  chr10:103425892-103425923
  hypo
tccattttccactctccgctcccacacactt

SEQ ID NO: 3460 - DNA, 31 bp, Homo sapiens
  chr10:115370274-115370305
  hypo
gacacatgcaacacctcgcataaagttcagg

SEQ ID NO: 3461 - DNA, 59 bp, Homo sapiens; identical to SEQ ID NO: 3055
  chr10:119256156-119256215
  hypo

SEQ ID NO: 3462 - DNA, 55 bp, Homo sapiens; identical to SEQ ID NO: 3056
  chr10:119256216-119256271
  hypo

SEQ ID NO: 3463 - DNA, 50 bp, Homo sapiens; identical to SEQ ID NO: 3057
  chr10:119256304-119256354
  hypo

SEQ ID NO: 3464 - DNA, 31 bp, Homo sapiens
  chr10:120476537-120476568
  hypo
aagggactggtaatgacgcagattcctttgc

SEQ ID NO: 3465 - DNA, 31 bp, Homo sapiens
  chr10:122846742-122846773
  hypo
tgagaaccacgctgcccgtactcttctttgg

SEQ ID NO: 3466 - DNA, 31 bp, Homo sapiens
  chr10:126296748-126296779
  hypo
gatccagtgcctgtgccgggcttcctcccca

SEQ ID NO: 3467 - DNA, 31 bp, Homo sapiens
  chr10:126370281-126370312
  hypo
cggctgcgggaaaggccgctggagcgtctcg

SEQ ID NO: 3468 - DNA, 57 bp, Homo sapiens
  chr10:126370521-126370578
  hypo
tggagtcctgcctggtcgcagggtgaggagagcacgttggcccgggaagggaggctg

SEQ ID NO: 3469 - DNA, 31 bp, Homo sapiens
  chr10:126667503-126667534
  hypo
aggccaataattccagcgccttgggaagctg

SEQ ID NO: 3470 - DNA, 31 bp, Homo sapiens
  chr10:133962081-133962112
  hypo
ctccgccgtcggcagacgtttgtttcttgcc

SEQ ID NO: 3471 - DNA, 31 bp, Homo sapiens
  chr10:134491314-134491345
  hypo
cactacatccaagagccgtgacagggttcag

SEQ ID NO: 3472 - DNA, 31 bp, Homo sapiens
  chr10:134517986-134518017
  hypo
gcggcggctgctggtgcgcagagccacccct

SEQ ID NO: 3473 - DNA, 31 bp, Homo sapiens
  chr10:134580978-134581009
  hypo
ggtggcccaggcctctcgtcctcctcacgag

SEQ ID NO: 3474 - DNA, 78 bp, Homo sapiens
  chr10:135102836-135102914
  hypo
caggcattatgagaaccggatggctaatcgcttcccaaccctttcgtgacggccccgatgtgccgagtccaagtcccc

SEQ ID NO: 3475 - DNA, 37 bp, Homo sapiens
  chr11:488069-488106
  hypo
cgtgggcagggccgggcgtggccggcgtcccatactc

SEQ ID NO: 3476 - DNA, 34 bp, Homo sapiens
  chr11:488634-488668
  hypo
ttccgacctacaagtacgtcgtgggggctgcgag

SEQ ID NO: 3477 - DNA, 5 bp, Homo sapiens
  chr11:590963-590968
  hypo
aagtg

SEQ ID NO: 3478 - DNA, 31 bp, Homo sapiens
  chr11:590981-591012
  hypo
tatgagcccctgctcccggcctatgaaaaga

SEQ ID NO: 3479 - DNA, 66 bp, Homo sapiens
  chr11:591065-591131
  hypo
aagacttgaacaggctcgccgcagaggggcctgtgcacaatgccgcccccacgcctgtccttcctc

SEQ ID NO: 3480 - DNA, 58 bp, Homo sapiens
  chr11:591149-591207
  hypo
gtcactgagatgctacgcgttcatggagctgctctttcctccccgctagggctggcag

SEQ ID NO: 3481 - DNA, 82 bp, Homo sapiens
  chr11:591211-591293
  hypo
gcagggaggcaaggctcgctgtgctccctccactgccgtgttgccagcagcttagtggagggcctggcgcatggaggcattt

SEQ ID NO: 3482 - DNA, 39 bp, Homo sapiens
  chr11:593722-593761
  hypo
caggggccttgcagtgcgctccgccggcccttccaggtc

SEQ ID NO: 3483 - DNA, 31 bp, Homo sapiens
  chr11:1007687-1007718
  hypo
caccagtttctgctaacggtgacaaaaattg

SEQ ID NO: 3484 - DNA, 31 bp, Homo sapiens
  chr11:1377226-1377257
  hypo
ataccaactttctacccggccccagcactgg

SEQ ID NO: 3485 - DNA, 31 bp, Homo sapiens
  chr11:2427869-2427900
  hypo
gatcaggacaggcccccgcacctgtgggcgg

SEQ ID NO: 3486 - DNA, 31 bp, Homo sapiens
  chr11:3846725-3846756
  hypo
ccagaaacaagaaacacgataccattctggc

SEQ ID NO: 3487 - DNA, 31 bp, Homo sapiens
  chr11:6651319-6651350
  hypo
ctaccacgtgcagggccgcgggcccaggcgg

SEQ ID NO: 3488 - DNA, 95 bp, Homo sapiens
  chr11:8254113-8254208
  hypo
gcagccagcagaggtacgcactcaaacaccgactgggaaaatcttgggccaggcccccgctacagcccctacaaggctcacgttccttttgctca

SEQ ID NO: 3489 - DNA, 31 bp, Homo sapiens
  chr11:47440865-47440896
  hypo
agtcccttactcaatgcgccttgttttcttc

SEQ ID NO: 3490 - DNA, 94 bp, Homo sapiens
  chr11:60689537-60689631
  hypo
actcgaggccaaggtgcgagggctggaacgccaggtggaggagctgcgctggcgccagaggcgagcggccaagggggcccgcagtgtggaggag

SEQ ID NO: 3491 - DNA, 31 bp, Homo sapiens
  chr11:63675217-63675248
  hypo
tcctgacaggcccttgcgtagccacggcccc

SEQ ID NO: 3492 - DNA, 128 bp, Homo sapiens
  chr11:63885696-63885824
  hypo
ttggctacggcaccacgcggggctaccgggacggcggcatccccgacatagactactcctacacatgatgcccgcccacccgggctgccccgcctcagccccagctgccctggcgtggccatgtggct

SEQ ID NO: 3493 - DNA, 31 bp, Homo sapiens
  chr11:63885869-63885900
  hypo
atgggtgactttcctccgcagaaagcaaagt

SEQ ID NO: 3494 - DNA, 31 bp, Homo sapiens
  chr11:63996887-63996918
  hypo
ggctccacaggtaccccgcaggggctggtca

SEQ ID NO: 3495 - DNA, 31 bp, Homo sapiens
  chr11:65353271-65353302
  hypo
gctcctcattaggggacgcatttgagccaag

SEQ ID NO: 3496 - DNA, 75 bp, Homo sapiens
  chr11:65387137-65387212
  hypo
accttgccagctgtgccgaggggcaccgggggccggggagggcccgcaagctctagctggcgctgacctggggct

SEQ ID NO: 3497 - DNA, 35 bp, Homo sapiens
  chr11:65387465-65387500
  hypo
tcctagcagtggtgctcgctcggccctgtggcagg

SEQ ID NO: 3498 - DNA, 38 bp, Homo sapiens
  chr11:65388103-65388141
  hypo
gcccagggcacagcctcgacactcgtgccagggtctgg

SEQ ID NO: 3499 - DNA, 31 bp, Homo sapiens
  chr11:65388296-65388327
  hypo
cacagggaccgacactcgcattcctccagct

SEQ ID NO: 3500 - DNA, 31 bp, Homo sapiens
  chr11:65397339-65397370
  hypo
ctcctccctgggcctgcgtttcccagtctga

SEQ ID NO: 3501 - DNA, 39 bp, Homo sapiens
  chr11:65397647-65397686
  hypo
ggaggagaaaggcaggcgctctttcgtgaatcttggcat

SEQ ID NO: 3502 - DNA, 31 bp, Homo sapiens
  chr11:65397692-65397723
  hypo
aggttgactcccctggcgtccaagggggtga

SEQ ID NO: 3503 - DNA, 68 bp, Homo sapiens
  chr11:65397823-65397891
  hypo
acttactgccagcagcgcgaggtggaggctatcaccgagggtgtggaggaggacgagggctgttgctg

SEQ ID NO: 3504 - DNA, 31 bp, Homo sapiens
  chr11:65397897-65397928
  hypo
acctggccacctgccacgggtcctgtccttc

SEQ ID NO: 3505 - DNA, 31 bp, Homo sapiens
  chr11:65397930-65397961
  hypo
tgctgcctttgggcagcgctggctggcttgg

SEQ ID NO: 3506 - DNA, 31 bp, Homo sapiens
  chr11:65397965-65397996
  hypo
taacagccagcaagtacgtgctggagggcta

SEQ ID NO: 3507 - DNA, 38 bp, Homo sapiens
  chr11:65398022-65398060
  hypo
ccatgctgcaggttttcgacctccgcaagatcctcatc

SEQ ID NO: 3508 - DNA, 31 bp, Homo sapiens; identical to SEQ ID NO: 3062
  chr11:65419939-65419970
  hypo

SEQ ID NO: 3509 - DNA, 37 bp, Homo sapiens
  chr11:65761271-65761308
  hypo
atttataagaaagtcccgcatacgccaggatggtggc

SEQ ID NO: 3510 - DNA, 46 bp, Homo sapiens
  chr11:65817721-65817767
  hypo
ctgcccatcaatcttccgctgtgtacaatatcgtgggggaggagga

SEQ ID NO: 3511 - DNA, 34 bp, Homo sapiens
  chr11:71184881-71184915
  hypo
ctgccctccagggcttcgccggcacagcccatct

SEQ ID NO: 3512 - DNA, 31 bp, Homo sapiens
  chr11:71888415-71888446
  hypo
gtctgagggtggtggacgccctgccccctcc

SEQ ID NO: 3513 - DNA, 31 bp, Homo sapiens
  chr11:73685908-73685939
  hypo
gtggtaggtaaaggagcggaaggaagaggtg

SEQ ID NO: 3514 - DNA, 31 bp, Homo sapiens
  chr11:110144180-110144211
  hypo
gcactggccattcatgcgtgcaatcatggca

SEQ ID NO: 3515 - DNA, 31 bp, Homo sapiens
  chr11:110144218-110144249
  hypo
accttgatctcctggacgcaaacctatactc

SEQ ID NO: 3516 - DNA, 38 bp, Homo sapiens
  chr11:110144267-110144305
  hypo
tagctaggagcacaggcgtgtgccgccaggcctagctc

SEQ ID NO: 3517 - DNA, 31 bp, Homo sapiens
  chr11:110144350-110144381
  hypo
tctcaaaaacttaacacgccttaccaaaata

SEQ ID NO: 3518 - DNA, 35 bp, Homo sapiens
  chr11:113747596-113747631
  hypo
ctccctagtctgcatgcgggcgcagtttttgacaa

SEQ ID NO: 3519 - DNA, 20 bp, Homo sapiens
  chr11:116862121-116862141
  hypo
cactgcgctccagtatgggc

SEQ ID NO: 3520 - DNA, 46 bp, Homo sapiens
  chr11:117267875-117267921
  hypo
ccttgtgcagcagacacgctccatgcggaggcggcagacagctctg

SEQ ID NO: 3521 - DNA, 50 bp, Homo sapiens
  chr11:117267926-117267976
  hypo
tgcccagcagcattggcgccatgagctggccagtgcgcaggaggtggcca

SEQ ID NO: 3522 - DNA, 31 bp, Homo sapiens
  chr11:117267995-117268026
  hypo
ggccctggaagatatgcgcaagaacctggag

SEQ ID NO: 3523 - DNA, 31 bp, Homo sapiens
  chr11:130781750-130781781
  hypo
ccacatagcaagagtacgaaactaagaacaa

SEQ ID NO: 3524 - DNA, 71 bp, Homo sapiens
  chr11:133703492-133703563
  hypo
ccccactccgcggccgcgcggcgccctgatcgcgcgtctcaggccccgctggaacccggggcctccctgcc

SEQ ID NO: 3525 - DNA, 26 bp, Homo sapiens
  chr12:747868-747894
  hypo
ccgcgcccggccgacacttagtttta

SEQ ID NO: 3526 - DNA, 109 bp, Homo sapiens
  chr12:2017877-2017986
  hypo
ctcccacgccggactgcgtcacggacatccccacgccaactcccacgccggactgcctcacggacatccccacgccaactcccacgccggacagcgttatggacatccc

SEQ ID NO: 3527 - DNA, 31 bp, Homo sapiens
  chr12:3747307-3747338
  hypo
tccaacaggctgccctcggggggatgtgggg

SEQ ID NO: 3528 - DNA, 5 bp, Homo sapiens
  chr12:6831876-6831881
  hypo
taaaa

SEQ ID NO: 3529 - DNA, 31 bp, Homo sapiens
  chr12:6831890-6831921
  hypo
aaagataagcttggggcggggaggggtggat

SEQ ID NO: 3530 - DNA, 6 bp, Homo sapiens
  chr12:32142772-32142778
  hypo
aaaact

SEQ ID NO: 3531 - DNA, 31 bp, Homo sapiens
  chr12:32155350-32155381
  hypo
ttcatgagagaagacacgaatggatataaac

SEQ ID NO: 3532 - DNA, 31 bp, Homo sapiens
  chr12:42633450-42633481
  hypo
tttctgtaattctcaacgttttcatattctg

SEQ ID NO: 3533 - DNA, 48 bp, Homo sapiens
  chr12:49422760-49422808
  hypo
ttgtgtaacacttggccgcctctcccccagcttcggacaacccaggtg

SEQ ID NO: 3534 - DNA, 31 bp, Homo sapiens
  chr12:49422841-49422872
  hypo
acctgggatgctggcccgaggaatgaggggg

SEQ ID NO: 3535 - DNA, 73 bp, Homo sapiens
  chr12:49422874-49422947
  hypo
gacaggggagagggcccggtcctcttgctcccaccggcctgagcccagatgagggaaacgaggggcctcctcc

SEQ ID NO: 3536 - DNA, 31 bp, Homo sapiens
  chr12:49422980-49423011
  hypo
atgctgtcaggagaatcgctatcctcatcac

SEQ ID NO: 3537 - DNA, 49 bp, Homo sapiens
  chr12:49436024-49436073
  hypo
ttgtgggggtggagggcgtggtgccacctgagcccgtccaggggctgtc

SEQ ID NO: 3538 - DNA, 47 bp, Homo sapiens
  chr12:50484388-50484435
  hypo
ggaggcagtgctgtgccggagctgccttgtgccgatttgcacaagcc

SEQ ID NO: 3539 - DNA, 30 bp, Homo sapiens
  chr12:53746265-53746295
  hypo
cgtgagccaccgcgccgggacagctttttg

SEQ ID NO: 3540 - DNA, 31 bp, Homo sapiens
  chr12:53761921-53761952
  hypo
ggagttgaagaccagccgcagggcaacagag

SEQ ID NO: 3541 - DNA, 31 bp, Homo sapiens
  chr12:56183313-56183344
  hypo
caaagagaaactatcacggaagcaccttttt

SEQ ID NO: 3542 - DNA, 31 bp, Homo sapiens
  chr12:56183705-56183736
  hypo
caaaagaatgaaactccgtctcaaaaaaaaa

SEQ ID NO: 3543 - DNA, 31 bp, Homo sapiens
  chr12:56558006-56558037
  hypo
ctcttccccacctgcccgctcaccctccctc

SEQ ID NO: 3544 - DNA, 110 bp, Homo sapiens
  chr12:56558139-56558249
  hypo
gcagggctttgggctgcggcggatccgagccccggcccgagaggcaaggaagatggcatggtggtggtcgccggcaggttaggatgtagagggttcgccatggacacagg

SEQ ID NO: 3545 - DNA, 40 bp, Homo sapiens
  chr12:56558257-56558297
  hypo
gtggggggagagtgcccggggcgaacgggagatggtggtg

SEQ ID NO: 3546 - DNA, 31 bp, Homo sapiens
  chr12:56558304-56558335
  hypo
tgcaggttaggaggagcggggaggttaatac

SEQ ID NO: 3547 - DNA, 24 bp, Homo sapiens
  chr12:56558811-56558835
  hypo
cacccatttcggcctcccaaagaa

SEQ ID NO: 3548 - DNA, 27 bp, Homo sapiens
  chr12:56882540-56882567
  hypo
ccgaaggccaaaccagcgcccagtaac

SEQ ID NO: 3549 - DNA, 3 bp, Homo sapiens
  chr12:56882583-56882586
  hypo
cgc

SEQ ID NO: 3550 - DNA, 18 bp, Homo sapiens
  chr12:60384603-60384621
  hypo
taaaaagacgtgtccacg

SEQ ID NO: 3551 - DNA, 20 bp, Homo sapiens
  chr12:74952274-74952294
  hypo
ttttttttttttgagacgga

SEQ ID NO: 3552 - DNA, 20 bp, Homo sapiens
  chr12:80194519-80194539
  hypo
ttttttttttttgaaacgga

SEQ ID NO: 3553 - DNA, 31 bp, Homo sapiens
  chr12:104598457-104598488
  hypo
tatccccctctcagggcgtgggacagggatg

SEQ ID NO: 3554 - DNA, 31 bp, Homo sapiens
  chr12:109906335-109906366
  hypo
cctcatgtgacctgcacgcaaacccagccag

SEQ ID NO: 3555 - DNA, 31 bp, Homo sapiens
  chr12:112591127-112591158
  hypo
ctggaggtgagtggaccgggggctgtgtttt

SEQ ID NO: 3556 - DNA, 42 bp, Homo sapiens
  chr12:112591859-112591901
  hypo
gatggaacactagacacgggaaccatgcggccagttctttgc

SEQ ID NO: 3557 - DNA, 61 bp, Homo sapiens
  chr12:112591929-112591990
  hypo
tgagagaaaaaagcttcgtctgcatgcactcgcgcacacacacaaacgatacatagtaggg

SEQ ID NO: 3558 - DNA, 71 bp, Homo sapiens
  chr12:112616769-112616840
  hypo
cggcttggtgataggccgcttggtgctcaccaccttcacggggtgctgctccttcccggccttgctgtact

SEQ ID NO: 3559 - DNA, 57 bp, Homo sapiens
  chr12:113629776-113629833
  hypo
cctgacaatctctagtcgattcttgcctttttctcccgattgcggatttgggggcca

SEQ ID NO: 3560 - DNA, 42 bp, Homo sapiens
  chr12:113629921-113629963
  hypo
gtcttgctgccaagtgcgaataaacggcgtgattgccaacct

SEQ ID NO: 3561 - DNA, 31 bp, Homo sapiens
  chr12:117599138-117599169
  hypo
ggaccaaggaactccacgggaggtggggagc

SEQ ID NO: 3562 - DNA, 53 bp, Homo sapiens
  chr12:117599174-117599227
  hypo
gcaagcagggccagaccgccgagaacctaaaagccacacggaggagagcaagt

SEQ ID NO: 3563 - DNA, 31 bp, Homo sapiens
  chr12:117600036-117600067
  hypo
tggatcatgatgaggacgaaggtctggcagc

SEQ ID NO: 3564 - DNA, 65 bp, Homo sapiens
  chr12:117600090-117600155
  hypo
ctggcttcttcagaagcgctctggccttggcccactgtaccacgggatgccgcatggggtgggct

SEQ ID NO: 3565 - DNA, 36 bp, Homo sapiens
  chr12:117600174-117600210
  hypo
actgaactcctagtgccgtcacggcatgtgcaggag

SEQ ID NO: 3566 - DNA, 31 bp, Homo sapiens
  chr12:120421162-120421193
  hypo
gacttgtatgtttccacgattatttcataga

SEQ ID NO: 3567 - DNA, 31 bp, Homo sapiens
  chr12:123733912-123733943
  hypo
gggggcggcgcccgtccgggaggctctggcc

SEQ ID NO: 3568 - DNA, 31 bp, Homo sapiens
  chr12:125636478-125636509
  hypo
agggatctaggttgtgcgctccttatgagaa

SEQ ID NO: 3569 - DNA, 31 bp, Homo sapiens
  chr12:132105679-132105710
  hypo
ctgtccctgggggaggcggacacaagggccc

SEQ ID NO: 3570 - DNA, 31 bp, Homo sapiens
  chr12:132224662-132224693
  hypo
ccactgcagggtggcccggggtagctggatg

SEQ ID NO: 3571 - DNA, 101 bp, Homo sapiens
  chr12:132630792-132630893
  hypo
cataagggggatcatacggtatgtggcttcttccactcatcggcgtgttcgaagttcgttctctttgtggctgagtagcagcgcgtcgtatagcacagcac

SEQ ID NO: 3572 - DNA, 31 bp, Homo sapiens
  chr12:133200832-133200863
  hypo
cagggccttgggaacccgtctcgtctcagag

SEQ ID NO: 3573 - DNA, 31 bp, Homo sapiens
  chr12:133280427-133280458
  hypo
atgggccactggttctcgggaatttagagaa

SEQ ID NO: 3574 - DNA, 39 bp, Homo sapiens
  chr12:133280474-133280513
  hypo
gagaagacagactggccgggaacacggaggatctgggat

SEQ ID NO: 3575 - DNA, 87 bp, Homo sapiens
  chr12:133280521-133280608
  hypo
ggagagctgggaagccgcgcctctgagtagcgtgggggcagagtcgccatcctaggtgggtgcaggtgtatgcggaagcagcattca

SEQ ID NO: 3576 - DNA, 31 bp, Homo sapiens
  chr13:25932390-25932421
  hypo
tggcattcaaaatgggcgaggggggaaaatg

SEQ ID NO: 3577 - DNA, 21 bp, Homo sapiens
  chr13:31069567-31069588
  hypo
gctctgtcctccagagcgaca

SEQ ID NO: 3578 - DNA, 66 bp, Homo sapiens
  chr13:31306160-31306226
  hypo
cagaatcttaatgtgcgcgctgtaatttaatggccgtctcggctattaacacgctcttctcgggtg

SEQ ID NO: 3579 - DNA, 31 bp, Homo sapiens
  chr13:46444487-46444518
  hypo
cacagtttactggccccgagccccttttcct

SEQ ID NO: 3580 - DNA, 31 bp, Homo sapiens
  chr13:77850148-77850179
  hypo
tctactttcctccatacgatttatccacatt

SEQ ID NO: 3581 - DNA, 31 bp, Homo sapiens
  chr13:96210199-96210230
  hypo
acctttggtaaattcccgacaacttgcactt

SEQ ID NO: 3582 - DNA, 31 bp, Homo sapiens; identical to SEQ ID NO: 3068
  chr13:99064433-99064464
  hypo

SEQ ID NO: 3583 - DNA, 33 bp, Homo sapiens
  chr13:103262163-103262196
  hypo
gggttatatttcgacatgcgatttgggtagaga

SEQ ID NO: 3584 - DNA, 31 bp, Homo sapiens
  chr13:114256383-114256414
  hypo
gcagtcgagggagaagcggatggagttaccc

SEQ ID NO: 3585 - DNA, 38 bp, Homo sapiens
  chr14:23793465-23793503
  hypo
ttttaacagcaggccccggggtcgcgtctacaggtcag

SEQ ID NO: 3586 - DNA, 31 bp, Homo sapiens
  chr14:23793529-23793560
  hypo
cgcctcccgtgagccccgtatgcttcctcct

SEQ ID NO: 3587 - DNA, 31 bp, Homo sapiens
  chr14:31456880-31456911
  hypo
gattattctgactactcgctgtgattctgcc

SEQ ID NO: 3588 - DNA, 24 bp, Homo sapiens
  chr14:31456957-31456981
  hypo
ttttgagacagactctcgttctgt

SEQ ID NO: 3589 - DNA, 31 bp, Homo sapiens
  chr14:48130915-48130946
  hypo
tgtcaactgcaaaaaacgaagtaatcagagt

SEQ ID NO: 3590 - DNA, 40 bp, Homo sapiens
  chr14:64884525-64884565
  hypo
tattctaatttctccacgtggcatgcgaaggagggcagct

SEQ ID NO: 3591 - DNA, 85 bp, Homo sapiens
  chr14:64884595-64884680
  hypo
tttctttcaggggtgccgattgccggaaggcatgctgtggtggttgggcgcagtaaaatagttggggccccgatgcatgacttgc

SEQ ID NO: 3592 - DNA, 31 bp, Homo sapiens
  chr14:64888235-64888266
  hypo
gtaattatctaacaggcgataaagaaattgc

SEQ ID NO: 3593 - DNA, 31 bp, Homo sapiens
  chr14:64888280-64888311
  hypo
tcactttgaatacttgcgatatgacattcaa

SEQ ID NO: 3594 - DNA, 35 bp, Homo sapiens
  chr14:65492491-65492526
  hypo
ccgctgtcctgcagcctggccgacagagtaagacc

SEQ ID NO: 3595 - DNA, 36 bp, Homo sapiens
  chr14:74369045-74369081
  hypo
gattacaggcgtgagccactgcgcctggccctgata

SEQ ID NO: 3596 - DNA, 31 bp, Homo sapiens
  chr14:77575062-77575093
  hypo
tttaccattctttgtacgtcattagctgaca

SEQ ID NO: 3597 - DNA, 31 bp, Homo sapiens
  chr14:89845804-89845835
  hypo
cagtagaccgctcccccgacaatctcacaac

SEQ ID NO: 3598 - DNA, 35 bp, Homo sapiens
  chr14:91806083-91806118
  hypo
gtaaccagggaaagcacgcacgtcccacccccacc

SEQ ID NO: 3599 - DNA, 31 bp, Homo sapiens
  chr14:102372315-102372346
  hypo
actagaatgtaagctccgtggagtcaaggat

SEQ ID NO: 3600 - DNA, 31 bp, Homo sapiens
  chr14:102635325-102635356
  hypo
taatgtgtttctatagcgcttagaataagat

SEQ ID NO: 3601 - DNA, 31 bp, Homo sapiens
  chr14:102635375-102635406
  hypo
gtgcttttcccctccccgattccccagtgtg

SEQ ID NO: 3602 - DNA, 58 bp, Homo sapiens
  chr14:102635458-102635516
  hypo
cagctgcacccctccccgtcccacccgtggagccaatggtacacgctctgcttagaat

SEQ ID NO: 3603 - DNA, 20 bp, Homo sapiens
  chr14:104116033-104116053
  hypo
tgttttttttttttttcgag

SEQ ID NO: 3604 - DNA, 31 bp, Homo sapiens
  chr14:105175828-105175859
  hypo
tacctctgccctgaaccgtgagccacaggga

SEQ ID NO: 3605 - DNA, 45 bp, Homo sapiens
  chr14:105688334-105688379
  hypo
caggtaacccatagaacggctgtcagtgcacggtgcctggcggtc

SEQ ID NO: 3606 - DNA, 31 bp, Homo sapiens
  chr14:105688873-105688904
  hypo
gaaaagaaaaccaggccgcacttcccagaca

SEQ ID NO: 3607 - DNA, 31 bp, Homo sapiens
  chr14:105691546-105691577
  hypo
tgttctcaggccctcccgtggctcctactaa

SEQ ID NO: 3608 - DNA, 31 bp, Homo sapiens
  chr15:34395705-34395736
  hypo
ggtattgtgtcttcctcgataactttaatat

SEQ ID NO: 3609 - DNA, 70 bp, Homo sapiens
  chr15:41044230-41044300
  hypo
cagctcctccacctcccgccgcagcgccacaaggctggtcagcacaaagtccaggcggtccagcaccttc

SEQ ID NO: 3610 - DNA, 38 bp, Homo sapiens
  chr15:42117756-42117794
  hypo
aagcagccttcccagccgctcctcgtggggggcctgta

SEQ ID NO: 3611 - DNA, 31 bp, Homo sapiens
  chr15:43020577-43020608
  hypo
gcaccgtttgccctcccgccccaccccaggt

SEQ ID NO: 3612 - DNA, 72 bp, Homo sapiens
  chr15:45444361-45444433
  hypo
ctgagtgaagactgtgcgggggaggcctgttgtgagtggcagccggccagggcctaccgcccctaaccagct

SEQ ID NO: 3613 - DNA, 31 bp, Homo sapiens
  chr15:52426276-52426307
  hypo
aagtcacctccctgggcgtctgcctcaacac

SEQ ID NO: 3614 - DNA, 31 bp, Homo sapiens
  chr15:78090760-78090791
  hypo
tgccattccgggcccccggctgccatgctcc

SEQ ID NO: 3615 - DNA, 25 bp, Homo sapiens
  chr15:80416209-80416234
  hypo
cccccacacccggtctcaagaatta

SEQ ID NO: 3616 - DNA, 25 bp, Homo sapiens
  chr15:90724716-90724741
  hypo
agcaagactccgtctcaaaaaaaaa

SEQ ID NO: 3617 - DNA, 31 bp, Homo sapiens
  chr15:91448167-91448198
  hypo
ctttgccattaagccccgctgaaatcctcag

SEQ ID NO: 3618 - DNA, 116 bp, Homo sapiens
  chr16:588069-588185
  hypo
ctttccacctgtcttacgtggataccaggagatccgccacgactcccgtggccccgtccacactgcgcggcgctctccggcgtggccgccaggtgccccttcgagggcaggtgtga

SEQ ID NO: 3619 - DNA, 41 bp, Homo sapiens
  chr16:588194-588235
  hypo
ggtccctgtggagaagcgcctgcaggcgagtgagccaggct

SEQ ID NO: 3620 - DNA, 68 bp, Homo sapiens
  chr16:588486-588554
  hypo
tgcttcaaccctcccacgaccccagcaccttcagagaaaacggaccctcgtgccgagtgaagtggttc

SEQ ID NO: 3621 - DNA, 31 bp, Homo sapiens
  chr16:1038887-1038918
  hypo
aggttatcggtgtgggcgtgagttcacagct

SEQ ID NO: 3622 - DNA, 39 bp, Homo sapiens
  chr16:1199882-1199921
  hypo
atcaccgctctcaggacgatttcccgtctcgtctcactg

SEQ ID NO: 3623 - DNA, 31 bp, Homo sapiens
  chr16:1323384-1323415
  hypo
taacagtttaacgagacgatactgcaaactg

SEQ ID NO: 3624 - DNA, 47 bp, Homo sapiens
  chr16:1818646-1818693
  hypo
agggctgaggttgggcgcggggggagcctggccgtcactctgctgct

SEQ ID NO: 3625 - DNA, 41 bp, Homo sapiens
  chr16:2049433-2049474
  hypo
ggctccagcctgaccccggcccctcccgacacccagggagc

SEQ ID NO: 3626 - DNA, 42 bp, Homo sapiens
  chr16:2049602-2049644
  hypo
ttccttgggggcactccgagcaggggccgggccctccatgtg

SEQ ID NO: 3627 - DNA, 31 bp, Homo sapiens
  chr16:2049679-2049710
  hypo
tgctggcaggagcttccggggcctgcaaagc

SEQ ID NO: 3628 - DNA, 31 bp, Homo sapiens
  chr16:2049711-2049742
  hypo
cctgggggacaggtagcgggcgggggctgtg

SEQ ID NO: 3629 - DNA, 54 bp, Homo sapiens
  chr16:2107443-2107497
  hypo
ttagcctgttacaaggcgaggctcggggtcttggcttgacgttgcccttgccct

SEQ ID NO: 3630 - DNA, 48 bp, Homo sapiens
  chr16:2135229-2135277
  hypo
gtcacagtcctttgagcggtcggtgcagctcctcgaccagatcccatc

SEQ ID NO: 3631 - DNA, 31 bp, Homo sapiens
  chr16:2135573-2135604
  hypo
gcagggctggggagggcgctgttggtcagtg

SEQ ID NO: 3632 - DNA, 31 bp, Homo sapiens
  chr16:2135613-2135644
  hypo
ctgagtggtgagggagcgggcagggggagcc

SEQ ID NO: 3633 - DNA, 42 bp, Homo sapiens
  chr16:2642907-2642949
  hypo
cccttgcctgcctccccgtggtgctggcgtgttctgtcactg

SEQ ID NO: 3634 - DNA, 31 bp, Homo sapiens
  chr16:3315586-3315617
  hypo
ccaactaatgccagaccggccactacttttt

SEQ ID NO: 3635 - DNA, 31 bp, Homo sapiens
  chr16:3997064-3997095
  hypo
gttccatctgcctgtgcggctcccacctcta

SEQ ID NO: 3636 - DNA, 52 bp, Homo sapiens
  chr16:4432015-4432067
  hypo
cttagccccacagagccggccactgaggcccccagcccgccctccactgccc

SEQ ID NO: 3637 - DNA, 143 bp, Homo sapiens
  chr16:4432550-4432693
  hypo
ccgtccactccaaccacgccccagtcacccaggcccgcgagggcaacctgccgctcctcattgcgcccgccctggccgcggtgctcctggccgcgctggctgcggtgggggcagcctactgtgtgcggcgggggcgggccatg

SEQ ID NO: 3638 - DNA, 31 bp, Homo sapiens
  chr16:4451020-4451051
  hypo
aaaccaagtgaattcccgctccatgtgcagc

SEQ ID NO: 3639 - DNA, 31 bp, Homo sapiens
  chr16:4656032-4656063
  hypo
gcatgactagatggcacgtaaaaatatatgt

SEQ ID NO: 3640 - DNA, 31 bp, Homo sapiens
  chr16:5628621-5628652
  hypo
tgttctattaatttagcgccaacagctgtta

SEQ ID NO: 3641 - DNA, 31 bp, Homo sapiens
  chr16:5628658-5628689
  hypo
aggccttcaaggttctcggcaaaaatgaaac

SEQ ID NO: 3642 - DNA, 72 bp, Homo sapiens
  chr16:5628756-5628828
  hypo
ataaaaatatctccaccgggccagggtgtttttgcgcttcaatcccaaaagtactagcgcatgaaacctcca

SEQ ID NO: 3643 - DNA, 31 bp, Homo sapiens; identical to SEQ ID NO: 3071
  chr16:9022848-9022879
  hypo

SEQ ID NO: 3644 - DNA, 31 bp, Homo sapiens
  chr16:12506196-12506227
  hypo
cacccaaccaccaaggcgtgtgcttcacaaa

SEQ ID NO: 3645 - DNA, 60 bp, Homo sapiens
  chr16:19719065-19719125
  hypo
cccccacctccctacacggcgcacatggcgcacctcctcccaccacgctacacagcacac

SEQ ID NO: 3646 - DNA, 48 bp, Homo sapiens
  chr16:19719132-19719180
  hypo
ctaccatcctacaaagcgcacctcccctaaccacgctacacagtgcac

SEQ ID NO: 3647 - DNA, 31 bp, Homo sapiens
  chr16:19719185-19719216
  hypo
ccaccaccctacacatcgcactccccccacc

SEQ ID NO: 3648 - DNA, 31 bp, Homo sapiens
  chr16:19719259-19719290
  hypo
cccactccctatacagcgcacctccccccac

SEQ ID NO: 3649 - DNA, 30 bp, Homo sapiens
  chr16:28224647-28224677
  hypo
aggcgtgagccctcccgcctggcttcaagt

SEQ ID NO: 3650 - DNA, 49 bp, Homo sapiens
  chr16:30995183-30995232
  hypo
ccaaggtcatcaccatcgagtcccagaagaagatcgtgatctactccaa

SEQ ID NO: 3651 - DNA, 24 bp, Homo sapiens
  chr16:31932457-31932481
  hypo
ggttttttttttgagacggagtct

SEQ ID NO: 3652 - DNA, 31 bp, Homo sapiens
  chr16:55739210-55739241
  hypo
tctcaaaaggagttaccgctcagctgggagc

SEQ ID NO: 3653 - DNA, 31 bp, Homo sapiens
  chr16:55739257-55739288
  hypo
atctgttttctagcctcgctaatgtgagact

SEQ ID NO: 3654 - DNA, 41 bp, Homo sapiens
  chr16:55739345-55739386
  hypo
atttgtttatttccttcgaaagccaccgaagagagaaaaac

SEQ ID NO: 3655 - DNA, 31 bp, Homo sapiens
  chr16:55739390-55739421
  hypo
aaggtgtgtagtgtggcggaaaaagcacagc

SEQ ID NO: 3656 - DNA, 31 bp, Homo sapiens
  chr16:56925877-56925908
  hypo
aggccaggtggggcatcgggactttcttcct

SEQ ID NO: 3657 - DNA, 31 bp, Homo sapiens
  chr16:58192530-58192561
  hypo
actctaccccatccctcgggtccagggtgct

SEQ ID NO: 3658 - DNA, 31 bp, Homo sapiens
  chr16:61615520-61615551
  hypo
ggttgcagggggccatcgtgtcagcactgcc

SEQ ID NO: 3659 - DNA, 31 bp, Homo sapiens
  chr16:69355287-69355318
  hypo
aggcctcctggagagccgagggccagtgcca

SEQ ID NO: 3660 - DNA, 31 bp, Homo sapiens
  chr16:72056268-72056299
  hypo
ggagagggatggcttgcggagagtgcacagg

SEQ ID NO: 3661 - DNA, 5 bp, Homo sapiens
  chr16:75622684-75622689
  hypo
atagg

SEQ ID NO: 3662 - DNA, 35 bp, Homo sapiens
  chr16:75622738-75622773
  hypo
gaaggaggcacagagccgggcggcaccacctacct

SEQ ID NO: 3663 - DNA, 31 bp, Homo sapiens
  chr16:84163868-84163899
  hypo
gaccgctgctgaagtccgcaactataatatc

SEQ ID NO: 3664 - DNA, 31 bp, Homo sapiens
  chr16:84800117-84800148
  hypo
tgtgaggacaccccctcgggatgggagagaa

SEQ ID NO: 3665 - DNA, 31 bp, Homo sapiens
  chr16:87404802-87404833
  hypo
gtgaccactgagccagcgtagctcctgctca

SEQ ID NO: 3666 - DNA, 31 bp, Homo sapiens
  chr16:88260675-88260706
  hypo
cacccgtgcctcctccgcgccggggcctgcg

SEQ ID NO: 3667 - DNA, 34 bp, Homo sapiens
  chr16:88260713-88260747
  hypo
acccgtccctcctccacgccggggcctccacact

SEQ ID NO: 3668 - DNA, 46 bp, Homo sapiens
  chr16:88537674-88537720
  hypo
tgtgacctccaccctcgcgaaggccagcggccgcagggtctggctt

SEQ ID NO: 3669 - DNA, 39 bp, Homo sapiens
  chr16:88690943-88690982
  hypo
aggggatgtaggccagcggggccccgtccaccagccctg

SEQ ID NO: 3670 - DNA, 31 bp, Homo sapiens
  chr16:89960698-89960729
  hypo
agtccccgtacagccccggtgcaaccctgga

SEQ ID NO: 3671 - DNA, 42 bp, Homo sapiens
  chr16:89960753-89960795
  hypo
gctccccttgcagccccggacggcccccgcgcagccccagac

SEQ ID NO: 3672 - DNA, 47 bp, Homo sapiens
  chr17:1376038-1376085
  hypo
agggggcaccaggtgacgtcttctggaaatgacgctctgctgagctt

SEQ ID NO: 3673 - DNA, 31 bp, Homo sapiens
  chr17:1376089-1376120
  hypo
ggataaggaggaggggcgggtgaagtggcta

SEQ ID NO: 3674 - DNA, 31 bp, Homo sapiens
  chr17:1938561-1938592
  hypo
ctggcagcagttcccacggcagtgttctggc

SEQ ID NO: 3675 - DNA, 31 bp, Homo sapiens
  chr17:1938604-1938635
  hypo
ttcctgatgcaggaggcgtgtaggtggtgcc

SEQ ID NO: 3676 - DNA, 57 bp, Homo sapiens
  chr17:1938679-1938736
  hypo
ccaagggccctgcctgcggtggggaggtagtgggggtccggacgagagggccctgcc

SEQ ID NO: 3677 - DNA, 31 bp, Homo sapiens
  chr17:3904902-3904933
  hypo
ggtcagaaatactttccgctgaggtgagagg

SEQ ID NO: 3678 - DNA, 86 bp, Homo sapiens
  chr17:4076473-4076559
  hypo
attaaaacaaaaataccggtaccaaaagtaccaaaataaagtacccgaagctggtgaggtgccccagcggccggttttgcagctcc

SEQ ID NO: 3679 - DNA, 65 bp, Homo sapiens
  chr17:7077089-7077154
  hypo
cagtcctcgcctcctccgagcccgtggccgtaccagtcgtccggctgctccggcctccagttcct

SEQ ID NO: 3680 - DNA, 10 bp, Homo sapiens
  chr17:7368874-7368884
  hypo
ctcccacctc

SEQ ID NO: 3681 - DNA, 133 bp, Homo sapiens
  chr17:7369185-7369318
  hypo
gcgcacacatacagcacgtggccgcccaccaccttcaccacgtgctcggggccccctcggaagcccactggtggaggcagggctgaggcgtccacccctgcaggaccaccagggccagcgcccccagctccca

SEQ ID NO: 3682 - DNA, 31 bp, Homo sapiens
  chr17:7571394-7571425
  hypo
tcagacatttaaatcccgtaatccttggtga

SEQ ID NO: 3683 - DNA, 31 bp, Homo sapiens
  chr17:7892699-7892730
  hypo
gaagaatgttaaaatccggtcaagtataact

SEQ ID NO: 3684 - DNA, 31 bp, Homo sapiens
  chr17:7892770-7892801
  hypo
ctcttttctccccacacgtcatggaaatgat

SEQ ID NO: 3685 - DNA, 22 bp, Homo sapiens
  chr17:7892828-7892850
  hypo
aaaaaatgaactgttccgacct

SEQ ID NO: 3686 - DNA, 31 bp, Homo sapiens
  chr17:14109918-14109949
  hypo
agggatcttagctcatcggctgccccaccag

SEQ ID NO: 3687 - DNA, 52 bp, Homo sapiens
  chr17:19233947-19233999
  hypo
tccttgactcctgctccgtgcctcagtgagaaggcagcgtggccattgttac

SEQ ID NO: 3688 - DNA, 31 bp, Homo sapiens
  chr17:19234013-19234044
  hypo
aacatttatcccctgccggtgcagtggctca

SEQ ID NO: 3689 - DNA, 48 bp, Homo sapiens
  chr17:21221774-21221822
  hypo
ccgtgccgggggttagcgtcccggctgcgctcccgctcccatgccctc

SEQ ID NO: 3690 - DNA, 31 bp, Homo sapiens
  chr17:27406520-27406551
  hypo
gctatgacatcaccagcgagttcagctgaca

SEQ ID NO: 3691 - DNA, 144 bp, Homo sapiens
  chr17:27406909-27407053
  hypo
tcgagccgctggatgacgacgaggaggactcagactccgtctccgttctctttcttctcgacttggacttcttgctcttccgagagcgccccttcttccgcctcttgtgctctgaggaagcttcggagccggagctggagctgg

SEQ ID NO: 3692 - DNA, 31 bp, Homo sapiens
  chr17:27407300-27407331
  hypo
gtccaggtaggagtgacggctgacggagcgg

SEQ ID NO: 3693 - DNA, 45 bp, Homo sapiens
  chr17:27407738-27407783
  hypo
cggcccccggccagcgcgccccccggtccccgagcggacggagcc

SEQ ID NO: 3694 - DNA, 61 bp, Homo sapiens
  chr17:27411025-27411086
  hypo
gtatctctaagtaaatcgaaacattatttctctgcctgccttactgcgctgggctcaataa

SEQ ID NO: 3695 - DNA, 31 bp, Homo sapiens
  chr17:28250200-28250231
  hypo
tacaggtgtgagccaccgtggctggccttaa

SEQ ID NO: 3696 - DNA, 31 bp, Homo sapiens
  chr17:37736505-37736536
  hypo
tttgctctcttactagcgccagaaggcactt

SEQ ID NO: 3697 - DNA, 17 bp, Homo sapiens
  chr17:42216973-42216990
  hypo
ttttttttttttgagac

SEQ ID NO: 3698 - DNA, 118 bp, Homo sapiens
  chr17:42289049-42289167
  hypo
cgctctgtgctgggcacgtccttcatgttggccatgagctctgcgcagtacagcgagtagctgttcctatcagagccgcggggagagaggtgcagcccgtaagcgagcagggcagcag

SEQ ID NO: 3699 - DNA, 79 bp, Homo sapiens
  chr17:52832077-52832156
  hypo
actcttacagagggcacggcggtcggccagctgggagcaagcctcgtggcccaggctgcccccccgctcactgcctggc

SEQ ID NO: 3700 - DNA, 31 bp, Homo sapiens
  chr17:54976881-54976912
  hypo
gatcaaggtcatgtagcggaggctgggtcaa

SEQ ID NO: 3701 - DNA, 94 bp, Homo sapiens
  chr17:54976967-54977061
  hypo
tatagctttgcccccacgcagcacttccacaatggggctgcaccgccaccgatttcagaagcccttctgcaaggacactcggcaggccaagctg

SEQ ID NO: 3702 - DNA, 31 bp, Homo sapiens
  chr17:54977122-54977153
  hypo
ggcactagggaaatagcgttgaagaaaaatc

SEQ ID NO: 3703 - DNA, 31 bp, Homo sapiens
  chr17:55828322-55828353
  hypo
ctgcaactccgcaactcggattggagccatc

SEQ ID NO: 3704 - DNA, 31 bp, Homo sapiens
  chr17:55828362-55828393
  hypo
ccctgccagcccagggcggcactttaattaa

SEQ ID NO: 3705 - DNA, 24 bp, Homo sapiens
  chr17:57495991-57496015
  hypo
gtgagactccgtctcaaaaaaatt

SEQ ID NO: 3706 - DNA, 73 bp, Homo sapiens
  chr17:60525978-60526051
  hypo
tcagaacctggtggatcgccgactgcaggtgaaccgaggaaagcaactgacaatgtaccgggtttggattcag

SEQ ID NO: 3707 - DNA, 53 bp, Homo sapiens
  chr17:60526093-60526146
  hypo
gcacctgctgccaacacgatgcaagcccattgtgtttccgggcttttttaaaa

SEQ ID NO: 3708 - DNA, 30 bp, Homo sapiens
  chr17:61637141-61637171
  hypo
aacagagtgggactccgtctcaaagaaaaa

SEQ ID NO: 3709 - DNA, 31 bp, Homo sapiens
  chr17:61637214-61637245
  hypo
atataactgtaaaacacgggagaatcttggt

SEQ ID NO: 3710 - DNA, 31 bp, Homo sapiens
  chr17:66416570-66416601
  hypo
ctaccaaattgcctgccgctgtcaagccgca

SEQ ID NO: 3711 - DNA, 63 bp, Homo sapiens
  chr17:73215385-73215448
  hypo
tttagagacagggtttcgctttgcggcctgggcgggagtgcagtgatgcgatcatggcacaat

SEQ ID NO: 3712 - DNA, 31 bp, Homo sapiens
  chr17:73274197-73274228
  hypo
tgggagggctccctctcgtgtgagggctgcc

SEQ ID NO: 3713 - DNA, 31 bp, Homo sapiens
  chr17:73474683-73474714
  hypo
ccccacgccctgccagcgtccctctttgatg

SEQ ID NO: 3714 - DNA, 31 bp, Homo sapiens
  chr17:76862114-76862145
  hypo
taagttccctgcaccacgggggattctgtct

SEQ ID NO: 3715 - DNA, 31 bp, Homo sapiens
  chr17:78163402-78163433
  hypo
tggcttctctcctgcccggtgtagagtggca

SEQ ID NO: 3716 - DNA, 97 bp, Homo sapiens
  chr17:79294050-79294147
  hypo
ccgcagtctgggtgcccggcgtgtggcagcccccgcagtctgggtgccccgcgtgtggcagcccccgcagtctgggagccccgcgtgtggcagcccc

SEQ ID NO: 3717 - DNA, 31 bp, Homo sapiens
  chr17:79951968-79951999
  hypo
ctggggctggatgtgacggcatgtgcccgtc

SEQ ID NO: 3718 - DNA, 31 bp, Homo sapiens
  chr17:80604486-80604517
  hypo
atttattggaatcaagcgtggccaggtatat

SEQ ID NO: 3719 - DNA, 31 bp, Homo sapiens
  chr17:80680723-80680754
  hypo
ggatttgacgtggtgacgtgctgtggatacc

SEQ ID NO: 3720 - DNA, 31 bp, Homo sapiens
  chr18:24035812-24035843
  hypo
cccccacaggagcccacgatttcaaatcctc

SEQ ID NO: 3721 - DNA, 31 bp, Homo sapiens
  chr18:44010835-44010866
  hypo
cattaactctgttcctcgagttcattgttta

SEQ ID NO: 3722 - DNA, 89 bp, Homo sapiens
  chr18:47812103-47812192
  hypo
tctgtccatgctcacccgggcccgcagctggcactggcgcagccggcacttctgccggatcttgttggggcccccgaacttcttcatgt

SEQ ID NO: 3723 - DNA, 31 bp, Homo sapiens
  chr18:54306859-54306890
  hypo
ggaatttggattttgtcgggaagagaatgga

SEQ ID NO: 3724 - DNA, 55 bp, Homo sapiens
  chr18:66360548-66360603
  hypo
tacctgctaccaagttcgtggggtgggagccccacgctcccgggtatagctgaag

SEQ ID NO: 3725 - DNA, 31 bp, Homo sapiens
  chr18:66360629-66360660
  hypo
gcatccctgagctctccggggcctggaaagc

SEQ ID NO: 3726 - DNA, 31 bp, Homo sapiens
  chr18:72347397-72347428
  hypo
agtgtggaggagcttccggagggaggggcca

SEQ ID NO: 3727 - DNA, 31 bp, Homo sapiens
  chr18:72487985-72488016
  hypo
gagcttcgggcaggaacgcagaatcaaacca

SEQ ID NO: 3728 - DNA, 31 bp, Homo sapiens
  chr19:569949-569980
  hypo
ttggtcaatttgatccgcgaatccaaaaggg

SEQ ID NO: 3729 - DNA, 31 bp, Homo sapiens
  chr19:1048973-1049004
  hypo
gccccttgccccaccccgctggacccaaagg

SEQ ID NO: 3730 - DNA, 31 bp, Homo sapiens
  chr19:1359088-1359119
  hypo
tttgcctgagtccagccggggactggtcatg

SEQ ID NO: 3731 - DNA, 31 bp, Homo sapiens
  chr19:1912551-1912582
  hypo
acaagcaggtgaccagcgccctggctgggcg

SEQ ID NO: 3732 - DNA, 31 bp, Homo sapiens
  chr19:2111290-2111321
  hypo
acataggaattttcagcgaggagggagtagc

SEQ ID NO: 3733 - DNA, 31 bp, Homo sapiens
  chr19:2198383-2198414
  hypo
ccgcggccttggagagcggaggatgtgcagc

SEQ ID NO: 3734 - DNA, 31 bp, Homo sapiens
  chr19:3114233-3114264
  hypo
ggtctgagcaggcacccggcctcttacaacc

SEQ ID NO: 3735 - DNA, 31 bp, Homo sapiens
  chr19:3532514-3532545
  hypo
tgctggcctcggggggcggcacagctgaccg

SEQ ID NO: 3736 - DNA, 87 bp, Homo sapiens
  chr19:3767180-3767267
  hypo
ctctgcccgaggtgcccgggacaccagggagcccaggggtcaccgtgtagctctgattcctgcccgcacccccgtcaggctgttcga

SEQ ID NO: 3737 - DNA, 86 bp, Homo sapiens
  chr19:3767293-3767379
  hypo
tggaggagctggaccccgagagccgggagtactggcggcggctgcggaaacagaacatctggcgccacaaccggctgagcaagaac

SEQ ID NO: 3738 - DNA, 37 bp, Homo sapiens
  chr19:3767386-3767423
  hypo
tgtagcatggagggcccggcatcgctgacccccacgc

SEQ ID NO: 3739 - DNA, 62 bp, Homo sapiens
  chr19:3767426-3767488
  hypo
gggcttgccgttttcccggaggacgtggacttttgtgagacaagaggcggctccccagcctg

SEQ ID NO: 3740 - DNA, 31 bp, Homo sapiens
  chr19:4409230-4409261
  hypo
ggcaataaatggccagcgagaagacactggg

SEQ ID NO: 3741 - DNA, 31 bp, Homo sapiens
  chr19:4446560-4446591
  hypo
actgcgaggccaggggcgagggctggaagac

SEQ ID NO: 3742 - DNA, 31 bp, Homo sapiens
  chr19:4446706-4446737
  hypo
tcggggtcctctacagcgtggcaggacatgg

SEQ ID NO: 3743 - DNA, 31 bp, Homo sapiens
  chr19:4817457-4817488
  hypo
gggcctgcagacccctcggtgcactccactg

SEQ ID NO: 3744 - DNA, 31 bp, Homo sapiens
  chr19:4817866-4817897
  hypo
tcccagagggcaaagccgaggatggtgggag

SEQ ID NO: 3745 - DNA, 35 bp, Homo sapiens
  chr19:4817902-4817937
  hypo
ccagattggactggagcgtccggatgctccctgga

SEQ ID NO: 3746 - DNA, 71 bp, Homo sapiens
  chr19:4817945-4818016
  hypo
aatgtcccacccacaccggtttcgggcctcatcctgaagttcccccagccggtggtcgtccctggagctga

SEQ ID NO: 3747 - DNA, 31 bp, Homo sapiens
  chr19:5895544-5895575
  hypo
gcgtacgccctgccctcgcaccctccctctc

SEQ ID NO: 3748 - DNA, 31 bp, Homo sapiens
  chr19:5895851-5895882
  hypo
ctcctccaggtgacctcgggccacttaattc

SEQ ID NO: 3749 - DNA, 31 bp, Homo sapiens
  chr19:5896208-5896239
  hypo
gagcagtgaggaggcccgtgtggctggagca

SEQ ID NO: 3750 - DNA, 31 bp, Homo sapiens
  chr19:6214703-6214734
  hypo
tgcgtgcctggggtcccgctctgccagggat

SEQ ID NO: 3751 - DNA, 31 bp, Homo sapiens
  chr19:7682206-7682237
  hypo
tgcagggctccctccccgtcaggtctcatgt

SEQ ID NO: 3752 - DNA, 41 bp, Homo sapiens
  chr19:7682287-7682328
  hypo
aatgcctcctccccagcgtcagtgcccgagtacacaggtaa

SEQ ID NO: 3753 - DNA, 31 bp, Homo sapiens
  chr19:7682970-7683001
  hypo
ccctgtgtgctgcggccgccatcccctggag

SEQ ID NO: 3754 - DNA, 31 bp, Homo sapiens
  chr19:8501527-8501558
  hypo
catttaaggttattttcgtggcttaagggct

SEQ ID NO: 3755 - DNA, 37 bp, Homo sapiens
  chr19:10794361-10794398
  hypo
cccaccccccaaccttcgagggcggggaagaggcggg

SEQ ID NO: 3756 - DNA, 75 bp, Homo sapiens
  chr19:10941837-10941912
  hypo
ctggcctcttccttaacgctggccccggtccagggccggcccctgtgcctggctggacaccgcactgcgcaaagg

SEQ ID NO: 3757 - DNA, 31 bp, Homo sapiens
  chr19:11083222-11083253
  hypo
tgcattcagcgctgttcgtatttgggggtag

SEQ ID NO: 3758 - DNA, 31 bp, Homo sapiens
  chr19:11151829-11151860
  hypo
agtgtgtgttatgccccgagccagtcaagct

SEQ ID NO: 3759 - DNA, 31 bp, Homo sapiens
  chr19:11161622-11161653
  hypo
ggctggatgagggcaccgagcagatgagccc

SEQ ID NO: 3760 - DNA, 31 bp, Homo sapiens
  chr19:11161939-11161970
  hypo
ctgaaaactagaatggcgtgtttaaggaaag

SEQ ID NO: 3761 - DNA, 77 bp, Homo sapiens
  chr19:11559277-11559354
  hypo
accctcctgtgtctgtcgtcctgggtcaggcactggcgtccccagctgccccttaaccgctccgcctccccttccag

SEQ ID NO: 3762 - DNA, 31 bp, Homo sapiens
  chr19:11559377-11559408
  hypo
ttgactttggccccaacggggagtttgctta

SEQ ID NO: 3763 - DNA, 52 bp, Homo sapiens
  chr19:11559410-11559462
  hypo
tgtacagccagtgctacgagctcaccaccaacgagtgcgtcccaggaatgca

SEQ ID NO: 3764 - DNA, 31 bp, Homo sapiens
  chr19:11559904-11559935
  hypo
ggattggccccgaccacgacaagttcagtgc

SEQ ID NO: 3765 - DNA, 49 bp, Homo sapiens
  chr19:11560029-11560078
  hypo
ccaggcctggcccagccgaaccctctcgagcacccgtctgcccatcccc

SEQ ID NO: 3766 - DNA, 52 bp, Homo sapiens
  chr19:12811289-12811341
  hypo
agtggttctcaccctgcgagctaggctaggataaggacggagacaccaccag

SEQ ID NO: 3767 - DNA, 54 bp, Homo sapiens
  chr19:13218630-13218684
  hypo
gtgggagagtgagacccggaagtcagcgtggaggagggccgacctggggaacag

SEQ ID NO: 3768 - DNA, 31 bp, Homo sapiens
  chr19:13218689-13218720
  hypo
attatgagggagatgccggactccttgaccc

SEQ ID NO: 3769 - DNA, 57 bp, Homo sapiens
  chr19:13873559-13873616
  hypo
tcggggacctgggcatcgtgcggcggaggtctcgggacgtcccggagagcccccagc

SEQ ID NO: 3770 - DNA, 31 bp, Homo sapiens; identical to SEQ ID NO: 3075
  chr19:14306908-14306939
  hypo

SEQ ID NO: 3771 - DNA, 31 bp, Homo sapiens
  chr19:14532655-14532686
  hypo
cctaaagaaaaacagtcgtactgaacagtta

SEQ ID NO: 3772 - DNA, 56 bp, Homo sapiens
  chr19:15538868-15538924
  hypo
gaggggctccagggcccgcagtgaggagggggcagctgaagcgagaacctacagag

SEQ ID NO: 3773 - DNA, 158 bp, Homo sapiens
  chr19:15539002-15539160
  hypo
ggggctggccatacccgcggccttcagcttggccttcttggccggcggtggggggggaagcaaggagagggccgcggaggtgggaggcggccgccccgggtgggccagggcgccgcgcctgggtgggaggcggatctggacgccgtccctcctgatga

SEQ ID NO: 3774 - DNA, 44 bp, Homo sapiens
  chr19:16631182-16631226
  hypo
ggagcgggagtaggaacgggagcaggagcgcgaccttgaccttg

SEQ ID NO: 3775 - DNA, 31 bp, Homo sapiens; identical to SEQ ID NO: 3076
  chr19:16638140-16638171
  hypo

SEQ ID NO: 3776 - DNA, 31 bp, Homo sapiens
  chr19:17161932-17161963
  hypo
ttcatgaacattctgccgttcatggatgaat

SEQ ID NO: 3777 - DNA, 38 bp, Homo sapiens
  chr19:17838566-17838604
  hypo
cccaccctgtctgactcggatcccgtgcccctggcccc

SEQ ID NO: 3778 - DNA, 31 bp, Homo sapiens
  chr19:17838606-17838637
  hypo
gtgcggcagactcagacgaagacacagaggg

SEQ ID NO: 3779 - DNA, 66 bp, Homo sapiens
  chr19:17838763-17838829
  hypo
gaacgtcagccgcacccggaagcccctggcccgccccaactcacgcgctgccgcccccaaagccac

SEQ ID NO: 3780 - DNA, 82 bp, Homo sapiens
  chr19:17838856-17838938
  hypo
gcttgctggtggggaccgtgccagccgaccactcagtgcccggagtgagcccagtgagaagggaggccgggcacccctgtcc

SEQ ID NO: 3781 - DNA, 41 bp, Homo sapiens
  chr19:17838952-17838993
  hypo
ccccaagactgccactcgaggcccgtcgggtgagtactgga

SEQ ID NO: 3782 - DNA, 31 bp, Homo sapiens
  chr19:17839027-17839058
  hypo
gctggagagcatagctcgtccccctgttttt

SEQ ID NO: 3783 - DNA, 86 bp, Homo sapiens
  chr19:18856492-18856578
  hypo
atcccaggctgtggagcgatggccgagggtgctccagagtggggggccctgcgatcagactctggggccagcgctggggccacagc

SEQ ID NO: 3784 - DNA, 57 bp, Homo sapiens
  chr19:18856632-18856689
  hypo
acccccttccaatcctcgggcctggacaccagccggaccacccggcaccatgggctg

SEQ ID NO: 3785 - DNA, 31 bp, Homo sapiens
  chr19:19017312-19017343
  hypo
tgccctggacatggcccggagtcacatccta

SEQ ID NO: 3786 - DNA, 42 bp, Homo sapiens
  chr19:19494731-19494773
  hypo
tgtcctagggctgaggcgtcagaaagtcgaagtttcaggaaa

SEQ ID NO: 3787 - DNA, 29 bp, Homo sapiens
  chr19:19494819-19494848
  hypo
tggagcacaactccctcgcatttttcttt

SEQ ID NO: 3788 - DNA, 31 bp, Homo sapiens
  chr19:32672522-32672553
  hypo
atgaattattgcagcccgggaagtggccact

SEQ ID NO: 3789 - DNA, 31 bp, Homo sapiens
  chr19:32672566-32672597
  hypo
ttggccaggtgcacatcggagtcgtgggctg

SEQ ID NO: 3790 - DNA, 82 bp, Homo sapiens
  chr19:33882201-33882283
  hypo
tctgggtagcctcccacgtcgtgcacgtcaatgcccaggaagtggccaagcccgtgaggcataaacacggcccccaggtgag

SEQ ID NO: 3791 - DNA, 31 bp, Homo sapiens
  chr19:36632701-36632732
  hypo
tgatcccttgaaggggcggggaccaatggct

SEQ ID NO: 3792 - DNA, 46 bp, Homo sapiens
  chr19:36632736-36632782
  hypo
taggatgttgggaagacgggcatttaggaagcgggccatggagtag

SEQ ID NO: 3793 - DNA, 49 bp, Homo sapiens
  chr19:38689955-38690004
  hypo
acccagatgccatcagcggttgtagtgttgtttgcggaagacagagctg

SEQ ID NO: 3794 - DNA, 60 bp, Homo sapiens
  chr19:39653249-39653309
  hypo
tcctttctgattgctgcgttattttctatgtcagcatttctcacccgacttagtagatgt

SEQ ID NO: 3795 - DNA, 31 bp, Homo sapiens
  chr19:40316372-40316403
  hypo
gctctggggtacaccacggaggcccaggtga

SEQ ID NO: 3796 - DNA, 31 bp, Homo sapiens
  chr19:40316416-40316447
  hypo
cagggtcatcaggaggcgggaggggtggacg

SEQ ID NO: 3797 - DNA, 31 bp, Homo sapiens
  chr19:40316517-40316548
  hypo
gagcagtcagcagggccgcccaccaggctca

SEQ ID NO: 3798 - DNA, 31 bp, Homo sapiens
  chr19:40322484-40322515
  hypo
ccatggcccggtgggacggccatggtgggct

SEQ ID NO: 3799 - DNA, 52 bp, Homo sapiens
  chr19:40900950-40901002
  hypo
gtgaccagctccacctcggggatcttaagctgcacagcggtggactcagcct

SEQ ID NO: 3800 - DNA, 15 bp, Homo sapiens
  chr19:42791225-42791240
  hypo
cggccccctggagcc

SEQ ID NO: 3801 - DNA, 31 bp, Homo sapiens
  chr19:42791247-42791278
  hypo
ctgagagcccaggacccggacccccacaccc

SEQ ID NO: 3802 - DNA, 78 bp, Homo sapiens
  chr19:42791291-42791369
  hypo
gaatctggtaagggtccgcctcccaccacggaggaggaggcctccggccccccaggagagccccggctggacagtgag

SEQ ID NO: 3803 - DNA, 31 bp, Homo sapiens
  chr19:42791375-42791406
  hypo
agtgaccatgatgatgcgtgagttccctgag

SEQ ID NO: 3804 - DNA, 34 bp, Homo sapiens
  chr19:42791447-42791481
  hypo
actgtccctgctgccccgccgcagcttcctctcc

SEQ ID NO: 3805 - DNA, 45 bp, Homo sapiens
  chr19:42791496-42791541
  hypo
atccagttgcctctaccgcccggaaaacgtcggacccagtccctc

SEQ ID NO: 3806 - DNA, 58 bp, Homo sapiens
  chr19:42791543-42791601
  hypo
tgccctacccaaggaacgggactcatcttctgagaaggatggacgcagccccaacaag

SEQ ID NO: 3807 - DNA, 31 bp, Homo sapiens
  chr19:45678817-45678848
  hypo
gaggaagggattgttacgctaagatctgaag

SEQ ID NO: 3808 - DNA, 31 bp, Homo sapiens
  chr19:46885653-46885684
  hypo
gttttcatctttagggcgagacagtcttttg

SEQ ID NO: 3809 - DNA, 31 bp, Homo sapiens
  chr19:50274627-50274658
  hypo
tgaatgtactaaagaacgctgaattgttcac

SEQ ID NO: 3810 - DNA, 5 bp, Homo sapiens
  chr19:50274710-50274715
  hypo
cagtc

SEQ ID NO: 3811 - DNA, 58 bp, Homo sapiens
  chr19:50331698-50331756
  hypo
cctgcaggttcatgggcgggggtggtgagagctgcagcctcatcgcggaaggactcag

SEQ ID NO: 3812 - DNA, 31 bp, Homo sapiens
  chr19:52718583-52718614
  hypo
tataggcatgagccatcgcacttggcctatt

SEQ ID NO: 3813 - DNA, 37 bp, Homo sapiens
  chr19:55858738-55858775
  hypo
cttctccccacccaagcgcctacggctggtggtcagc

SEQ ID NO: 3814 - DNA, 50 bp, Homo sapiens
  chr19:55993944-55993994
  hypo
ccttcaagggctcctccgggctgcgctaccacctgcgggaccacacgggc

SEQ ID NO: 3815 - DNA, 58 bp, Homo sapiens
  chr19:55994020-55994078
  hypo
cggcaaggccttcaagcgctcctccctgctggccatccaccagcgggtgcacacgggc

SEQ ID NO: 3816 - DNA, 35 bp, Homo sapiens
  chr19:56615754-56615789
  hypo
accgggagggtccctacgcacgccgccgacccgtg

SEQ ID NO: 3817 - DNA, 46 bp, Homo sapiens
  chr19:56658670-56658716
  hypo
aaaaccagtgtgactcgcggtggggaggctgcggtacaggctgcgg

SEQ ID NO: 3818 - DNA, 31 bp, Homo sapiens
  chr20:2939674-2939705
  hypo
attgtatatggggggtcgggaagtcacagga

SEQ ID NO: 3819 - DNA, 68 bp, Homo sapiens
  chr20:2939709-2939777
  hypo
gcctcaaagtctttctcggagacggatgaggttttcactgtgattttcctggtcgtggtctatggata

SEQ ID NO: 3820 - DNA, 31 bp, Homo sapiens
  chr20:2939822-2939853
  hypo
tttcctccctagtgtacgcataccaattctc

SEQ ID NO: 3821 - DNA, 42 bp, Homo sapiens
  chr20:3208778-3208820
  hypo
ggcacccaccccaacccgcccattctccgcccctaggtggga

SEQ ID NO: 3822 - DNA, 47 bp, Homo sapiens
  chr20:5178250-5178297
  hypo
accttgaagcagttctcggtgtgtagagtccacgtgacagtccccac

SEQ ID NO: 3823 - DNA, 31 bp, Homo sapiens
  chr20:6021693-6021724
  hypo
ggtaatcatcaaaggccgggtttttgtaggc

SEQ ID NO: 3824 - DNA, 31 bp, Homo sapiens
  chr20:6022361-6022392
  hypo
ggggcttggggtgtggcgtgtgtcctctggc

SEQ ID NO: 3825 - DNA, 31 bp, Homo sapiens
  chr20:18724826-18724857
  hypo
tccccgaaaagaagaccgcagtgccagcagc

SEQ ID NO: 3826 - DNA, 57 bp, Homo sapiens
  chr20:21555353-21555410
  hypo
acccacgatcctctcgcgtccaatgtgcgtgacctctccgtccgatagcacaagcaa

SEQ ID NO: 3827 - DNA, 37 bp, Homo sapiens
  chr20:21555419-21555456
  hypo
agccacttgagctggacgcccccggacatgccctgca

SEQ ID NO: 3828 - DNA, 44 bp, Homo sapiens
  chr20:21555502-21555546
  hypo
atgccctccttgagtccggcatgggtgcacggctgcccgctcca

SEQ ID NO: 3829 - DNA, 31 bp, Homo sapiens
  chr20:30169440-30169471
  hypo
ccatttgcaccctggtcgcaagagtcagtca

SEQ ID NO: 3830 - DNA, 41 bp, Homo sapiens
  chr20:30713762-30713803
  hypo
gcaccgggctagattatttcatttatcgttattagatgtca

SEQ ID NO: 3831 - DNA, 31 bp, Homo sapiens
  chr20:30807275-30807306
  hypo
ataaatcactacaaaacgtagtagcataaca

SEQ ID NO: 3832 - DNA, 24 bp, Homo sapiens
  chr20:35088589-35088613
  hypo
aatcaaccttggctcacgcctgta

SEQ ID NO: 3833 - DNA, 31 bp, Homo sapiens
  chr20:35088679-35088710
  hypo
gcaacagagaccttgtcgctacaaaaaataa

SEQ ID NO: 3834 - DNA, 31 bp, Homo sapiens
  chr20:35088724-35088755
  hypo
aagtgaatagtacaggcgtagcataagtgac

SEQ ID NO: 3835 - DNA, 31 bp, Homo sapiens
  chr20:35788341-35788372
  hypo
agcctgggggacagagcgagactccattgaa

SEQ ID NO: 3836 - DNA, 68 bp, Homo sapiens
  chr20:37673287-37673355
  hypo
cacagtggaaaggtggcggatggagatgcggcggcctctgtgcgcagctggtacggcagtcctggaga

SEQ ID NO: 3837 - DNA, 31 bp, Homo sapiens
  chr20:37673424-37673455
  hypo
caacaaaattctcacccgggtccttaggaga

SEQ ID NO: 3838 - DNA, 31 bp, Homo sapiens
  chr20:47214550-47214581
  hypo
aggtggggagaggacccggaggacaaagggc

SEQ ID NO: 3839 - DNA, 31 bp, Homo sapiens
  chr20:52360542-52360573
  hypo
tgatgaacgcaagccacgaggtgaagatcta

SEQ ID NO: 3840 - DNA, 23 bp, Homo sapiens
  chr20:56577649-56577672
  hypo
acagaaagccaaacaccgcatgt

SEQ ID NO: 3841 - DNA, 36 bp, Homo sapiens
  chr20:56941011-56941047
  hypo
ctatttttaaaccattcgttacgctgtgtagacaga

SEQ ID NO: 3842 - DNA, 111 bp, Homo sapiens
  chr20:58397112-58397223
  hypo
gcgatccgccccgcaacgatcccaccccttctccagcgatcccaccccctccgcagcgatcccaccccctccgcagcgatcccaccccctccgcagcgatcccaccccttc

SEQ ID NO: 3843 - DNA, 31 bp, Homo sapiens
  chr20:60079876-60079907
  hypo
ttggtcagaaagcacacgctccgcttccata

SEQ ID NO: 3844 - DNA, 31 bp, Homo sapiens
  chr20:60170957-60170988
  hypo
accctgcctcacataacgtttgtccataaag

SEQ ID NO: 3845 - DNA, 71 bp, Homo sapiens
  chr20:60581686-60581757
  hypo
gagctactcagcaccacggccgtgagcgcagtggtggcctgcgaggtgggcggtggcggctgctgctggct

SEQ ID NO: 3846 - DNA, 31 bp, Homo sapiens
  chr20:60731379-60731410
  hypo
ccatctggaatgctggcgcctggcaggtgga

SEQ ID NO: 3847 - DNA, 31 bp, Homo sapiens
  chr20:60766097-60766128
  hypo
aaagtgcatggaggcccggtttcttataggc

SEQ ID NO: 3848 - DNA, 35 bp, Homo sapiens
  chr20:60845090-60845125
  hypo
agcccccctcccagcacggacgctgagttttggga

SEQ ID NO: 3849 - DNA, 31 bp, Homo sapiens
  chr20:60848398-60848429
  hypo
cccagtgggagaggaccggcaaaccatttaa

SEQ ID NO: 3850 - DNA, 31 bp, Homo sapiens
  chr20:61466382-61466413
  hypo
cagagccccttgcaggcggaaaacctaaggc

SEQ ID NO: 3851 - DNA, 44 bp, Homo sapiens
  chr20:62218509-62218553
  hypo
accttcaaaaccctcacgagttaccgaatcggctgattcaaaac

SEQ ID NO: 3852 - DNA, 31 bp, Homo sapiens
  chr20:62563316-62563347
  hypo
cctgtgcttgaggggccggaggcaggtgctg

SEQ ID NO: 3853 - DNA, 42 bp, Homo sapiens
  chr20:62563350-62563392
  hypo
ggcagagctgtgttaccgtcttggcctcggggtctggtccac

SEQ ID NO: 3854 - DNA, 31 bp, Homo sapiens
  chr21:15448707-15448738
  hypo
gacttggaaaataattcggcaggtgcctcag

SEQ ID NO: 3855 - DNA, 31 bp, Homo sapiens
  chr21:15450034-15450065
  hypo
aaacaatgggcggatgcggtggctcttggct

SEQ ID NO: 3856 - DNA, 31 bp, Homo sapiens
  chr21:33641300-33641331
  hypo
ataaggggaggaagggcgggggcagaatgga

SEQ ID NO: 3857 - DNA, 68 bp, Homo sapiens
  chr21:37405206-37405274
  hypo
cgctgatgtgaggagtcgctgtcctgttgtggggcgctgatgtgtgtgggggtcgctgatctattgtg

SEQ ID NO: 3858 - DNA, 31 bp, Homo sapiens
  chr21:43441079-43441110
  hypo
aatggaaagcgtggtgcgtacagccagtgaa

SEQ ID NO: 3859 - DNA, 31 bp, Homo sapiens
  chr21:44284396-44284427
  hypo
cggccctctccataaacgctgagtgtgctgg

SEQ ID NO: 3860 - DNA, 31 bp, Homo sapiens
  chr21:45206422-45206453
  hypo
atgcccattgcatgcacgataccacccactg

SEQ ID NO: 3861 - DNA, 31 bp, Homo sapiens
  chr21:45482526-45482557
  hypo
gcaggggctgggccagcgggtccactccaca

SEQ ID NO: 3862 - DNA, 31 bp, Homo sapiens
  chr21:45536572-45536603
  hypo
tgctgcagttgcttagcgcctgctgtgtgca

SEQ ID NO: 3863 - DNA, 38 bp, Homo sapiens
  chr21:45791195-45791233
  hypo
ctccagtgtctgcctccgtgtcccgtggccgcctccct

SEQ ID NO: 3864 - DNA, 31 bp, Homo sapiens
  chr21:46674111-46674142
  hypo
ctgctgctgggccccacggtgcccacctggc

SEQ ID NO: 3865 - DNA, 99 bp, Homo sapiens
  chr21:47773780-47773879
  hypo
tccttgactggaagcacgaggaggcgcctctgctgtgagcagtcggtcctggggagggaatggcgcacacatggaaaaggggtacgtgtgtaaagcttt

SEQ ID NO: 3866 - DNA, 66 bp, Homo sapiens
  chr21:47811197-47811263
  hypo
gcggcccaggagcaggcggcgctgagggaggagtgcacccgtctgtggagtcggggggaggccaca

SEQ ID NO: 3867 - DNA, 47 bp, Homo sapiens
  chr21:47811317-47811364
  hypo
gtgcgagctgtggggcgcggatacagctgccacggtttccccagctc

SEQ ID NO: 3868 - DNA, 31 bp, Homo sapiens
  chr21:47811392-47811423
  hypo
caagtgtaaaccagcacgcagcttctcctgg

SEQ ID NO: 3869 - DNA, 31 bp, Homo sapiens
  chr21:47811431-47811462
  hypo
gcatgggaagcttgtgcggatcaggtgaggc

SEQ ID NO: 3870 - DNA, 31 bp, Homo sapiens
  chr22:18291184-18291215
  hypo
ggtcccagggaactaacgacatgagggggtc

SEQ ID NO: 3871 - DNA, 31 bp, Homo sapiens
  chr22:18291250-18291281
  hypo
ctgtgatggttccttgcggttcaatctccct

SEQ ID NO: 3872 - DNA, 31 bp, Homo sapiens
  chr22:19130730-19130761
  hypo
aaagaaaaaagaaagtcggagctgcagtctg

SEQ ID NO: 3873 - DNA, 40 bp, Homo sapiens
  chr22:19798778-19798818
  hypo
gccaagcccaactgtgcgtgggggccgtcctgcccagtac

SEQ ID NO: 3874 - DNA, 31 bp, Homo sapiens
  chr22:22314882-22314913
  hypo
gctgtatcacctgtcacggggcccctggtgc

SEQ ID NO: 3875 - DNA, 31 bp, Homo sapiens; identical to SEQ ID NO: 3081
  chr22:23546141-23546172
  hypo

SEQ ID NO: 3876 - DNA, 34 bp, Homo sapiens
  chr22:27008100-27008134
  hypo
ccccgagaattctgctcgacggccctggaagttt

SEQ ID NO: 3877 - DNA, 31 bp, Homo sapiens
  chr22:29353884-29353915
  hypo
taactcttgctgggcgcggtggttcaagcct

SEQ ID NO: 3878 - DNA, 77 bp, Homo sapiens
  chr22:30422073-30422150
  hypo
ggcccactgtaactgccgagctgcctgctgtcacgtgacactgagggatggcttgtttcttccgggtgggaggatgg

SEQ ID NO: 3879 - DNA, 31 bp, Homo sapiens
  chr22:30422166-30422197
  hypo
tatggagatctgagaccgtgagcagggaaga

SEQ ID NO: 3880 - DNA, 37 bp, Homo sapiens
  chr22:30422211-30422248
  hypo
atgcaaccattcctcacgccaccgccacatcagagct

SEQ ID NO: 3881 - DNA, 51 bp, Homo sapiens
  chr22:42972461-42972512
  hypo
ccttcccacagccacacgggcgacgcggggctcggccgaccccgcggggcc

SEQ ID NO: 3882 - DNA, 31 bp, Homo sapiens
  chr22:45116348-45116379
  hypo
ggttggagttggtgtgcgacccctcctctgc

SEQ ID NO: 3883 - DNA, 31 bp, Homo sapiens
  chr22:45976303-45976334
  hypo
tggaggaggtgaggcccgagctgagtgtcct

SEQ ID NO: 3884 - DNA, 49 bp, Homo sapiens
  chr22:45976380-45976429
  hypo
gccagggtttcatcatcgccaggaccctgtgacacggtgggattatctc

SEQ ID NO: 3885 - DNA, 31 bp, Homo sapiens
  chr22:50250349-50250380
  hypo
cgttctaggtgaaggccgcgctggaatcccg

SEQ ID NO: 3886 - DNA, 31 bp, Homo sapiens
  chr22:50324434-50324465
  hypo
gatcgtaagtagcagccgggacaccggagtt

SEQ ID NO: 3887 - DNA, 80 bp, Homo sapiens
  chr22:50864148-50864228
  hypo
ccgtgtggctgatgctcgtcatctgatgtgcgtgtggaacagtgtctccgtgtgacaagtgatgtcgagcatcttctcgt

SEQ ID NO: 3888 - DNA, 45 bp, Homo sapiens
  chr22:50873265-50873310
  hypo
acactgggcaggggccgggcacttgctctccgaagtgaacctgga

SEQ ID NO: 3889 - DNA, 67 bp, Homo sapiens
  chr22:50873320-50873387
  hypo
acttggctctctgggtcgtgggtctggcaaggtcggggccaggaggccgccccgatggtgcctgttg

SEQ ID NO: 3890 - DNA, 36 bp, Homo sapiens
  chr22:51023315-51023351
  hypo
tttacctagcagagggcggagcgtatacattgatcc

SEQ ID NO: 3891 - DNA, 31 bp, Homo sapiens
  chr22:51023363-51023394
  hypo
accatatgtaaggaagcgcaaagtagaaacc

SEQ ID NO: 3892 - DNA, 31 bp, Homo sapiens; identical to SEQ ID NO: 3083
  chrX:9240652-9240683
  hypo

SEQ ID NO: 3893 - DNA, 31 bp, Homo sapiens
  chrX:18969304-18969335
  hypo
accgtgccacaggtggcggtgttgtacttgg

SEQ ID NO: 3894 - DNA, 31 bp, Homo sapiens
  chrX:58293596-58293627
  hypo
gaaaggctctggcctgcgggggagtacacca

SEQ ID NO: 3895 - DNA, 52 bp, Homo sapiens
  chrX:70798090-70798142
  hypo
ccgtgggagtggaaagcgacagacctgatcccggaagcgttacagctaggcg

SEQ ID NO: 3896 - DNA, 31 bp, Homo sapiens
  AC242209.3_1-39555:31580-31611
  hypo
gctggaatttaagctccggcagacagagaag

SEQ ID NO: 3897 - DNA, 30 bp, Homo sapiens
  NW_001838715.2_220243-222386:1284-1314
  hypo
acaggcatgagccaccgtgcttgatcaaat

SEQ ID NO: 3898 - DNA, 37 bp, Homo sapiens
  chr3:197222651-197222688
  hyper
actttcctaggctggccgggctcggctggggcatgga

SEQ ID NO: 3899 - DNA, 31 bp, Homo sapiens
  chr3:197222713-197222744
  hyper
cacttacagggccccccgtccctttcctttt

SEQ ID NO: 3900 - DNA, 31 bp, Homo sapiens
  chr4:8966280-8966311
  hyper
cccactgggggcggggcgaggtgtccgtagg

SEQ ID NO: 3901 - DNA, 56 bp, Homo sapiens
  chr5:130970374-130970430
  hyper
cccaactcagaaaatacgacttagtaatggtgctttcttaacgacactcagaagcc

SEQ ID NO: 3902 - DNA, 75 bp, Homo sapiens
  chr7:112430090-112430165
  hyper
ggcaggtatcctaccccggccctgggaggccgactgggcggagcttggggtccggaccacgcggagccctggcag

SEQ ID NO: 3903 - DNA, 31 bp, Homo sapiens
  chr11:102962428-102962459
  hyper
cccggcaggccgggcccgactccttttcctc

SEQ ID NO: 3904 - DNA, 45 bp, Homo sapiens
  chr11:102962689-102962734
  hyper
cagagacagcagcaagcggaggagcagagtcgccagcccgcaccg

SEQ ID NO: 3905 - DNA, 52 bp, Homo sapiens
  chr17:37310277-37310329
  hyper
ggaaggagaagtctctcgaaatatttcacttcgggggcgtcccactctcctg

SEQ ID NO: 3906 - DNA, 78 bp, Homo sapiens
  chr17:37310335-37310413
  hyper
agaagaccccttgccacgtctcggagcttctttctccctcccacatgctcacgcggcttctcccgacctgtcttcccc

SEQ ID NO: 3907 - DNA, 31 bp, Homo sapiens
  chr22:22005793-22005824
  hyper
ttaatgaatgcttctccgcaaagtggatcac

SEQ ID NO: 3908 - DNA, 31 bp, Homo sapiens
  chr22:22006063-22006094
  hyper
gcataacaaagcagcccgcggccgcgttcac

SEQ ID NO: 3909 - DNA, 74 bp, Homo sapiens
  chr22:22006178-22006252
  hyper
ttccaagcgctcttgtcggtgtcgctagaaaactcgcagagattggagctgagaaaaggcgggcaaagttcctt

SEQ ID NO: 3910 - DNA, 45 bp, Homo sapiens
  chr22:22006289-22006334
  hyper
ctcattgttaaaaccacggagcccgagactcggccggcgccgggc

SEQ ID NO: 3911 - DNA, 39 bp, Homo sapiens
  chr22:22006508-22006547
  hyper
ccacgaggtgcagggtcgtctggacggggacccgggggc

SEQ ID NO: 3912 - DNA, 31 bp, Homo sapiens
  AEKP01218621.1_1-6359:538-569
  hyper
tccattcctttccactcgagtcctttccttt

SEQ ID NO: 3913 - DNA, 44 bp, Homo sapiens
  chr1:2218616-2218660
  hypo
tggaccctgggccgtgcggggctccagggcgcctggagactgcc

SEQ ID NO: 3914 - DNA, 37 bp, Homo sapiens; identical to SEQ ID NO: 3898
  chr3:197222651-197222688
  hypo

SEQ ID NO: 3915 - DNA, 31 bp, Homo sapiens; identical to SEQ ID NO: 3899
  chr3:197222713-197222744
  hypo

SEQ ID NO: 3916 - DNA, 56 bp, Homo sapiens; identical to SEQ ID NO: 3901
  chr5:130970374-130970430
  hypo

SEQ ID NO: 3917 - DNA, 31 bp, Homo sapiens
  chr6:5109989-5110020
  hypo
gtgctgagctgggtgacgcctgcctgctggt

SEQ ID NO: 3918 - DNA, 17 bp, Homo sapiens
  chr14:71398551-71398568
  hypo
gatctagggccaggcac

SEQ ID NO: 3919 - DNA, 55 bp, Homo sapiens
  chr16:22358430-22358485
  hypo
gaggccagttcccagccgctggcaacaggctcagactgggcgttcactccagtca

SEQ ID NO: 3920 - DNA, 52 bp, Homo sapiens
  chr16:22358571-22358623
  hypo
tacttcaccttcagggcgctgtactgcgtgtccacttcgtgcagaagggaga

SEQ ID NO: 3921 - DNA, 31 bp, Homo sapiens; identical to SEQ ID NO: 3907
  chr22:22005793-22005824
  hypo

SEQ ID NO: 3922 - DNA, 31 bp, Homo sapiens; identical to SEQ ID NO: 3908
  chr22:22006063-22006094
  hypo

SEQ ID NO: 3923 - DNA, 74 bp, Homo sapiens; identical to SEQ ID NO: 3909
  chr22:22006178-22006252
  hypo

SEQ ID NO: 3924 - DNA, 45 bp, Homo sapiens; identical to SEQ ID NO: 3910
  chr22:22006289-22006334
  hypo

SEQ ID NO: 3925 - DNA, 39 bp, Homo sapiens; identical to SEQ ID NO: 3911
  chr22:22006508-22006547
  hypo

SEQ ID NO: 3926 - DNA, 31 bp, Homo sapiens
  chr22:45948181-45948212
  hypo
agtatggacacatgtgcggtgaaatggggag

SEQ ID NO: 3927 - DNA, 31 bp, Homo sapiens
  chr1:1003647-1003678
  hyper
tgttccctccagcccccgcccagtgtgtgtg

SEQ ID NO: 3928 - DNA, 31 bp, Homo sapiens
  chr1:6474547-6474578
  hyper
gccccccaatggacctcgggtaacaagacac

SEQ ID NO: 3929 - DNA, 36 bp, Homo sapiens
  chr1:11624041-11624077
  hyper
ggactggctagggaaacggcccggcactccctctgt

SEQ ID NO: 3930 - DNA, 31 bp, Homo sapiens
  chr1:17591035-17591066
  hyper
ggttttatctcttgaacgcaatacccaaata

SEQ ID NO: 3931 - DNA, 38 bp, Homo sapiens
  chr1:17591112-17591150
  hyper
catgtatgttcttttgcgttgggcgtcttttgccctat

SEQ ID NO: 3932 - DNA, 31 bp, Homo sapiens
  chr1:17591213-17591244
  hyper
aatcatttcaggccacgcgtggtggctcatg

SEQ ID NO: 3933 - DNA, 31 bp, Homo sapiens
  chr1:17908286-17908317
  hyper
tcagcaggacagacagcgtgtgccatgccct

SEQ ID NO: 3934 - DNA, 74 bp, Homo sapiens
  chr1:20512490-20512564
  hyper
cccacccgaccccacccgaccccacccgacccaggccggttccggtcacgccggaagcacgtggccccccaccc

SEQ ID NO: 3935 - DNA, 47 bp, Homo sapiens
  chr1:27113956-27114003
  hyper
ttcttcacacccaggacgcagggtgccgctgccggccacagaaaccc

SEQ ID NO: 3936 - DNA, 31 bp, Homo sapiens
  chr1:27114075-27114106
  hyper
tgacagcaggaagagcgcggctctggtttct

SEQ ID NO: 3937 - DNA, 36 bp, Homo sapiens
  chr1:32757651-32757687
  hyper
gaggggacgggcggggcgggccggaggcccgccccc

SEQ ID NO: 3938 - DNA, 31 bp, Homo sapiens
  chr1:33937918-33937949
  hyper
tctgaggctctcacttcgacccctcagtaga

SEQ ID NO: 3939 - DNA, 148 bp, Homo sapiens
  chr1:33937951-33938099
  hyper
tgggcccccttctgctcgagtgccctcccattgggcggtgctgttatccggaagcctatggaaaaggccaggatcgcaacaggtcccgcccccatgtgtcgcgcccgttccgatttgttccagtgccagggtccgttagaagatgaca

SEQ ID NO: 3940 - DNA, 241 bp, Homo sapiens
  chr1:33938100-33938341
  hyper
atctattggctgaagacgtctgaaaggcagcaaacggagggggccgcccccggcgctcgcgcggttccttctgggaattgtggtctcagacgttccattcccagggtggcgccgctcggactccgcgtcccagcattccccgcacgagcccgggagcacttccgccctgttgtgaagtgggtgtctcggtgggtgagtccgggtggcggggcgggggcagctgagacgcaggctctgggct

SEQ ID NO: 3941 - DNA, 36 bp, Homo sapiens
  chr1:41446123-41446159
  hyper
gagctcaccacgtttgcgtggcgcccttccgtccac

SEQ ID NO: 3942 - DNA, 165 bp, Homo sapiens
  chr1:159894399-159894564
  hyper
cgaccacaccctgggccgttacaacagatgagtcacccaccgccctcccgccgctggggtgacgcagtggtctgggcagcccgcccgtccgcccgcggccaccaccggctttcccagcagcagggggcacccggtgggggcagcggcgctcgggcagggtaaaag

SEQ ID NO: 3943 - DNA, 36 bp, Homo sapiens
  chr1:159894586-159894622
  hyper
ctcacacagggcaccccggggcgcagtcagggctgc

SEQ ID NO: 3944 - DNA, 31 bp, Homo sapiens
  chr1:160526914-160526945
  hyper
ttaataccatcaattacgatctacattctat

SEQ ID NO: 3945 - DNA, 55 bp, Homo sapiens
  chr1:160527013-160527068
  hyper
ctaatcccaacattagcgttctttccgctatgctgtccatcggtatagaaactga

SEQ ID NO: 3946 - DNA, 31 bp, Homo sapiens
  chr1:160527072-160527103
  hyper
atcatcttatattaatcgaacattcacaatt

SEQ ID NO: 3947 - DNA, 31 bp, Homo sapiens
  chr1:178995254-178995285
  hyper
gagggcgcgcgacccccgcccccggcgcggc

SEQ ID NO: 3948 - DNA, 69 bp, Homo sapiens
  chr1:181059348-181059417
  hyper
agggactttcctctgccggctgcgtggagaaggaagcggctaaaaggtttgggccggggagttccccat

SEQ ID NO: 3949 - DNA, 31 bp, Homo sapiens
  chr1:184724679-184724710
  hyper
atcccccttttgcagacgagaaaacagaggc

SEQ ID NO: 3950 - DNA, 31 bp, Homo sapiens
  chr1:184724719-184724750
  hyper
ttggttaacaagagctcgtcacactgctgta

SEQ ID NO: 3951 - DNA, 68 bp, Homo sapiens
  chr1:184724782-184724850
  hyper
cttgcatttaaccaccgcgcagtactacaaggatgaaggagcacgtgggtcctcgtacatgattaata

SEQ ID NO: 3952 - DNA, 31 bp, Homo sapiens
  chr1:185287293-185287324
  hyper
accccaccaccttgcccgggagggagatctg

SEQ ID NO: 3953 - DNA, 47 bp, Homo sapiens
  chr1:203595792-203595839
  hyper
ccattcccccttaagacgaaccaggaagtaaccgcaagaatcgggcc

SEQ ID NO: 3954 - DNA, 31 bp, Homo sapiens
  chr1:227652538-227652569
  hyper
aagatagcgcaggtagcgacagagaggagta

SEQ ID NO: 3955 - DNA, 31 bp, Homo sapiens
  chr1:227652661-227652692
  hyper
gtgggtctgagatctacgagcaggcagcagc

SEQ ID NO: 3956 - DNA, 44 bp, Homo sapiens
  chr1:227652700-227652744
  hyper
actcaggcagtagtgacgatgagcagaagcgcaccacgggtaac

SEQ ID NO: 3957 - DNA, 31 bp, Homo sapiens
  chr2:27473447-27473478
  hyper
tgtgcccatgctcctccgcccagtcactgca

SEQ ID NO: 3958 - DNA, 31 bp, Homo sapiens
  chr2:43445792-43445823
  hyper
ccctgcagacagccagcggcaccaaggcctg

SEQ ID NO: 3959 - DNA, 31 bp, Homo sapiens
  chr2:43446049-43446080
  hyper
acacccacatgcacaccgcagcagacacatc

SEQ ID NO: 3960 - DNA, 31 bp, Homo sapiens
  chr2:121427431-121427462
  hyper
gggagtggggtgagggcgggttcacccttct

SEQ ID NO: 3961 - DNA, 52 bp, Homo sapiens
  chr2:150061810-150061862
  hyper
tcctctgtcacgctctcgctatagctgttgtccagatcgttatcttctcaga

SEQ ID NO: 3962 - DNA, 35 bp, Homo sapiens
  chr2:150061897-150061932
  hyper
atgtgaggcctcctctcgaccgtaagtagtggtgg

SEQ ID NO: 3963 - DNA, 31 bp, Homo sapiens
  chr2:150061987-150062018
  hyper
ccatttattgtaacttcgtctttcccagaac

SEQ ID NO: 3964 - DNA, 31 bp, Homo sapiens
  chr2:178257947-178257978
  hyper
tctgtcaggaagggggcgggatgggatggtg

SEQ ID NO: 3965 - DNA, 31 bp, Homo sapiens
  chr2:178258004-178258035
  hyper
aggcttgaagaactctcgttggagaagggtt

SEQ ID NO: 3966 - DNA, 31 bp, Homo sapiens
  chr2:179316144-179316175
  hyper
gtccttagcaggaggccgtttcttgccggga

SEQ ID NO: 3967 - DNA, 14 bp, Homo sapiens
  chr2:181844776-181844790
  hyper
ccttcctccagctt

SEQ ID NO: 3968 - DNA, 23 bp, Homo sapiens
  chr2:181844867-181844890
  hyper
cggggcggcgggggactcccaac

SEQ ID NO: 3969 - DNA, 48 bp, Homo sapiens
  chr2:191208292-191208340
  hyper
tccctctgaatcatcgcgctccacttgtgacgtcgcggacgcccggct

SEQ ID NO: 3970 - DNA, 31 bp, Homo sapiens
  chr2:191514823-191514854
  hyper
gaatgttgcaggatctcggggaaagggatag

SEQ ID NO: 3971 - DNA, 122 bp, Homo sapiens
  chr2:191514860-191514982
  hyper
tggaatatacatttgtcgattctgcagaccaagctttgcagcgagtgatcgggaggaatcgtagacttgcatgtacttacacctcgctccctgagattcgggaggcacggaaaattttggga

SEQ ID NO: 3972 - DNA, 31 bp, Homo sapiens
  chr2:191514999-191515030
  hyper
tttcatctgaaagagtcgatttggagtaact

SEQ ID NO: 3973 - DNA, 35 bp, Homo sapiens
  chr2:217008384-217008419
  hyper
tactaacaatgaaccacgtgcgaaagatactataa

SEQ ID NO: 3974 - DNA, 54 bp, Homo sapiens
  chr2:219723642-219723696
  hyper
tcccaccccttctacccgggccaggttgggggaggaactcgaggcagggactct

SEQ ID NO: 3975 - DNA, 31 bp, Homo sapiens
  chr2:230786011-230786042
  hyper
tcccttctctgaccctcgcttcccacaactg

SEQ ID NO: 3976 - DNA, 31 bp, Homo sapiens
  chr2:235996528-235996559
  hyper
ctgcccctcctccccacgggtcctcccgcca

SEQ ID NO: 3977 - DNA, 58 bp, Homo sapiens
  chr2:242157857-242157915
  hyper
gggtggggtgggggtgcggcggtggggagccgggaggggcgggcgccgccgggcaagg

SEQ ID NO: 3978 - DNA, 36 bp, Homo sapiens
  chr3:33137819-33137855
  hyper
ccgcacctcacctattcgcctcgccagccctgcccc

SEQ ID NO: 3979 - DNA, 73 bp, Homo sapiens
  chr3:75471466-75471539
  hyper
tttggagtctctgaaacgcttcctgtcttttgttcttcatgccccgtgcccctgttagcgtattactgttctc

SEQ ID NO: 3980 - DNA, 104 bp, Homo sapiens
  chr3:124774250-124774354
  hyper
agcgtccctccctacccgccgaccctcagggtcccgcacacgccgggcgaggagcccccaccctgggtcgcgccgcgcggaggggcctacggctggggatgcag

SEQ ID NO: 3981 - DNA, 35 bp, Homo sapiens
  chr3:194278584-194278619
  hyper
ccacacctaaacatcccgggcgcttccagcaaatc

SEQ ID NO: 3982 - DNA, 31 bp, Homo sapiens
  chr3:194278635-194278666
  hyper
tgcaggagggaaatcacgcagctgagaccta

SEQ ID NO: 3983 - DNA, 31 bp, Homo sapiens
  chr3:194278669-194278700
  hyper
tactccaggaggttttcggtgacattagccc

SEQ ID NO: 3984 - DNA, 31 bp, Homo sapiens
  chr4:6897665-6897696
  hyper
tggaaactggaattcccgagttttcaaggcg

SEQ ID NO: 3985 - DNA, 31 bp, Homo sapiens
  chr4:9684932-9684963
  hyper
tatccctcaagtggcccggaacactgtgatt

SEQ ID NO: 3986 - DNA, 53 bp, Homo sapiens
  chr4:9684964-9685017
  hyper
ctgcacaccaatcccacgcccataaacctggtttatgacgttttgtaacaggg

SEQ ID NO: 3987 - DNA, 31 bp, Homo sapiens
  chr4:9685030-9685061
  hyper
gcatgaggacatttaacgagacaagaacatt

SEQ ID NO: 3988 - DNA, 31 bp, Homo sapiens
  chr4:9685111-9685142
  hyper
taatattctgctgaaccgaccattagccaga

SEQ ID NO: 3989 - DNA, 70 bp, Homo sapiens
  chr4:37978792-37978862
  hyper
gcatgtcccaacttcccgccagcagcggagcgcgggggtgggcggggtcggctgcgcgccctcccctcct

SEQ ID NO: 3990 - DNA, 35 bp, Homo sapiens
  chr4:39183861-39183896
  hyper
cagagcccgtctctcccggacgaatctcatccaat

SEQ ID NO: 3991 - DNA, 53 bp, Homo sapiens
  chr4:74702696-74702749
  hyper
tgtgctgacagagctgcgttgcacttgtttacgcgttacgctgagagtaaacc

SEQ ID NO: 3992 - DNA, 31 bp, Homo sapiens
  chr4:92905821-92905852
  hyper
agatgaacaggtcagacggggaaggagggaa

SEQ ID NO: 3993 - DNA, 31 bp, Homo sapiens
  chr4:92905908-92905939
  hyper
ggaacaaggcaactggcggtcactctggcag

SEQ ID NO: 3994 - DNA, 27 bp, Homo sapiens
  chr4:92905958-92905985
  hyper
tatatatatatatatacgtgtatatat

SEQ ID NO: 3995 - DNA, 31 bp, Homo sapiens
  chr4:103681574-103681605
  hyper
acgcttcagtagagaacgactgcagtaagta

SEQ ID NO: 3996 - DNA, 79 bp, Homo sapiens
  chr4:103681665-103681744
  hyper
cccaacatgggtcggtcgctcagtctccgtcaagcccgtaccccatagcttgggcatttccccccgcagatcacaagat

SEQ ID NO: 3997 - DNA, 62 bp, Homo sapiens
  chr4:110482011-110482073
  hyper
gcccggaaacgatgaacggggcagtgaccgtcccgggtgtggacggtcgcaggagagtgaaa

SEQ ID NO: 3998 - DNA, 31 bp, Homo sapiens
  chr4:110482075-110482106
  hyper
tccatcctgaaatctgcgagcacctcccttt

SEQ ID NO: 3999 - DNA, 56 bp, Homo sapiens
  chr4:110482110-110482166
  hyper
gaaggaagaaaaactcgcgttttgttcagacacccgagagacgggtgaatcatgag

SEQ ID NO: 4000 - DNA, 56 bp, Homo sapiens
  chr4:110482180-110482236
  hyper
acagttggcctgacaccgttgtattgtggtctgtggagaaccgtggcttggaggag

SEQ ID NO: 4001 - DNA, 73 bp, Homo sapiens
  chr4:110482264-110482337
  hyper
tagaagaaggggaaagcgctgagtttaaggaggattgcgatggagcctgacaggagcccgggagtgcaaactc

SEQ ID NO: 4002 - DNA, 48 bp, Homo sapiens
  chr4:186706013-186706061
  hyper
gccatgaaaaatgagccgacatgcctaacgccccgggagctgcatcat

SEQ ID NO: 4003 - DNA, 51 bp, Homo sapiens
  chr4:186706172-186706223
  hyper
aaacacaaaacaggaacgcattgtttattctgttctcggtggacactgcca

SEQ ID NO: 4004 - DNA, 58 bp, Homo sapiens
  chr5:131831521-131831579
  hyper
ccgctgatggccgctgcggagcttcatttcttataaacaccgccgttgggaggaaaga

SEQ ID NO: 4005 - DNA, 80 bp, Homo sapiens
  chr5:131831595-131831675
  hyper
cagtcccatggggccccgaggccgggggaggctcctgggccaggcccagcggccgcgacctggagcggggcttgatggga

SEQ ID NO: 4006 - DNA, 54 bp, Homo sapiens
  chr5:131831705-131831759
  hyper
gctgcagaacggcccacgcccactgccgttcgcccggggcgcccctggcaggct

SEQ ID NO: 4007 - DNA, 31 bp, Homo sapiens
  chr5:132386957-132386988
  hyper
ctttcaggccaggcagcgtgtcacttgcctg

SEQ ID NO: 4008 - DNA, 31 bp, Homo sapiens
  chr5:132387333-132387364
  hyper
caagacaccccactaccggaagtttctttga

SEQ ID NO: 4009 - DNA, 31 bp, Homo sapiens
  chr5:132387547-132387578
  hyper
tcctttcccaggttctcgagccaggacgtga

SEQ ID NO: 4010 - DNA, 57 bp, Homo sapiens
  chr5:133862722-133862779
  hyper
ggtaccaggaagatgccggcttgtggcggaccccgtttgggacgcacacacctgact

SEQ ID NO: 4011 - DNA, 106 bp, Homo sapiens
  chr5:133862788-133862894
  hyper
gtgacattgcagcccccgcccccacctagcgctgctgcagtccctttgccggatccccggccccgccccgcccccggcagtggcatcttcccggcctcacctcctt

SEQ ID NO: 4012 - DNA, 70 bp, Homo sapiens
  chr5:133862909-133862979
  hyper
cttcttcccacccactcgcctgcgcctgcggagcggcgcccgcccgcctcctccccgcctgggtgcagac

SEQ ID NO: 4013 - DNA, 31 bp, Homo sapiens
  chr5:133862987-133863018
  hyper
ccccatggtttcttcccgcccatccctgggt

SEQ ID NO: 4014 - DNA, 65 bp, Homo sapiens
  chr5:133863022-133863087
  hyper
agacatcctctcctctcggccaagggacgagaggggtcaacttggcgattcgcagctgttctgcc

SEQ ID NO: 4015 - DNA, 31 bp, Homo sapiens
  chr5:133863089-133863120
  hyper
aggatggggttgcctgcgagacagccaggaa

SEQ ID NO: 4016 - DNA, 272 bp, Homo sapiens
  chr5:133863167-133863439
  hyper
cagctaccaccccacccgcccctggggctcggctgcccttcccggtgtctcttaaacccctcccccgacctgggtgttaagcccacccacctcccggcgccgcccccggtcgaacagcctcttgcccttccttcgcctgggccggagccccccgcagcctcctccggctcctcctcccggctccggcggtcggaatcacgccggcgcgcctccagcctgcggtcccgcggactgcctccaggggcgggctggaggcgcgcgcaactcccctc

SEQ ID NO: 4017 - DNA, 31 bp, Homo sapiens
  chr5:133863443-133863474
  hyper
tcccctcagccactgccgctggcctgggcac

SEQ ID NO: 4018 - DNA, 96 bp, Homo sapiens
  chr5:133863529-133863625
  hyper
cactgggtgtctttgccgtatgccgaaggcacactgcggccggcgattctggtctctgcagatttccaaacctcgccgctgcgtctagcacccctg

SEQ ID NO: 4019 - DNA, 40 bp, Homo sapiens
  chr5:179245984-179246024
  hyper
ctgctcaggggactcacggtgaccccggagccactcccca

SEQ ID NO: 4020 - DNA, 138 bp, Homo sapiens
  chr5:179246055-179246193
  hyper
gggtggcagcaggggccggggatccccctattacgacagcggtcatgggacgctgactcactgccggccagaccacctgacctccgcggcgggaggagagggccctgccagggggttcccgccgcgccttgtttacct

SEQ ID NO: 4021 - DNA, 85 bp, Homo sapiens
  chr5:179246196-179246281
  hyper
ggaggcctcggcctcgcgtgggggcagggcggccgctggggccgcaaggcgtgcggggaagggccagagccgggtgtccacccca

SEQ ID NO: 4022 - DNA, 31 bp, Homo sapiens
  chr5:179246308-179246339
  hyper
ttccttctcccctccccgccccccccccagt

SEQ ID NO: 4023 - DNA, 47 bp, Homo sapiens
  chr6:2841593-2841640
  hyper
ctccttgttgtgaaatcgtctctagaatcgcacggggttcctcctct

SEQ ID NO: 4024 - DNA, 31 bp, Homo sapiens
  chr6:2841679-2841710
  hyper
tgggctgcctggaaaccgtcacaaacagctc

SEQ ID NO: 4025 - DNA, 99 bp, Homo sapiens
  chr6:2841757-2841856
  hyper
tttcagtcttgccttccgcctgcatctgtcgtcctccctccctccctccctcgcgggctggcccggcctgtacccaggcgggggcgggggatcagaggt

SEQ ID NO: 4026 - DNA, 86 bp, Homo sapiens
  chr6:2841858-2841944
  hyper
tctgtctccgtcggggcgcccggaagggatgggggcgcgaagctggcggggagggcgagcgcagggagctgcgggtctgaggggcc

SEQ ID NO: 4027 - DNA, 31 bp, Homo sapiens
  chr6:2841967-2841998
  hyper
cgggctggaagctgagcgagggagcctggcc

SEQ ID NO: 4028 - DNA, 34 bp, Homo sapiens
  chr6:2842152-2842186
  hyper
gcagccgcgggcggggcggcggcccttcccggtg

SEQ ID NO: 4029 - DNA, 59 bp, Homo sapiens
  chr6:34359604-34359663
  hyper
tctctgccacaaaggccggcccgcgcctcgtgcacgccggcctccgcacacatgtgcct

SEQ ID NO: 4030 - DNA, 51 bp, Homo sapiens
  chr6:34359685-34359736
  hyper
cttccaggatcaaagccgttggcctggaccgaaagccgcactcttcccagc

SEQ ID NO: 4031 - DNA, 31 bp, Homo sapiens
  chr6:52227988-52228019
  hyper
ccttgccgacccggtgcggggacctggaggt

SEQ ID NO: 4032 - DNA, 31 bp, Homo sapiens
  chr6:138724515-138724546
  hyper
gcattgccaatggtcccggctgcctcttctg

SEQ ID NO: 4033 - DNA, 60 bp, Homo sapiens
  chr6:138724583-138724643
  hyper
tcaccattgcttttcacgtggccaccctcctgtccgttggctttcgcgtggggagtgcct

SEQ ID NO: 4034 - DNA, 49 bp, Homo sapiens
  chr6:138724646-138724695
  hyper
gcctctgcggcggtcacgtcgccccggagagcctcggagctctggctgc

SEQ ID NO: 4035 - DNA, 40 bp, Homo sapiens
  chr6:138724703-138724743
  hyper
ggagtcctctggggggcgccggagccgtgccgggtccccg

SEQ ID NO: 4036 - DNA, 38 bp, Homo sapiens
  chr6:138724744-138724782
  hyper
cgcaggggacagtaacgcggagtcggcctggccggcgg

SEQ ID NO: 4037 - DNA, 31 bp, Homo sapiens
  chr6:146136027-146136058
  hyper
tctgaccccgcagcgtcgtggctagagtagg

SEQ ID NO: 4038 - DNA, 100 bp, Homo sapiens
  chr6:146136066-146136166
  hyper
agagctcccactgtggcgagtcctgtcgttggattcccgcggcgccccgtaaggctccgccccggcggtgctaccaaaccctgttcgattttagaatcgt

SEQ ID NO: 4039 - DNA, 59 bp, Homo sapiens
  chr6:146136222-146136281
  hyper
gtagcatgacttgttcgcgccgctagtcgaaggagcagcagccccgatcccttgactct

SEQ ID NO: 4040 - DNA, 213 bp, Homo sapiens
  chr6:146136309-146136522
  hyper
ttggaggaaatgggtgcgcccttgctcgacctttggtgattgccgccacaggccttcccgccggctaactcagcgtgcccaagtcccgtgacttagtgccaggacggtgctgtgacccgttatcccctgtcgggttttacctccccccgggagagctcagccctggatcccggcgggcggcggagcctctctggagcccggacgggacagccc

SEQ ID NO: 4041 - DNA, 31 bp, Homo sapiens
  chr6:146136531-146136562
  hyper
tgcttctgtgaggggccgaggcgtcattccg

SEQ ID NO: 4042 - DNA, 75 bp, Homo sapiens
  chr7:30517955-30518030
  hyper
ttctaagctgctggcacgattgagaacccctgcgttcgaccacagtgggataaacgattccgctgactgtgaagt

SEQ ID NO: 4043 - DNA, 42 bp, Homo sapiens
  chr7:30518050-30518092
  hyper
tacatgcttcaaactcgcgggtttctccgcttggttccaccc

SEQ ID NO: 4044 - DNA, 31 bp, Homo sapiens
  chr7:30518093-30518124
  hyper
gagctcctccagagccgcgctgcgttccgcc

SEQ ID NO: 4045 - DNA, 59 bp, Homo sapiens
  chr7:75932432-75932491
  hyper
gcagggcgggcagggccgggggcgtgcggttgaaacgggggtcccgggggcctggggag

SEQ ID NO: 4046 - DNA, 56 bp, Homo sapiens
  chr7:128579007-128579063
  hyper
ggagaggtccagaggccgactctggaggtgggggtggctccgcgggctggcccagg

SEQ ID NO: 4047 - DNA, 61 bp, Homo sapiens
  chr7:142985517-142985578
  hyper
tgcgcagcggagagcccgggaaaagcgggaaatggcggcgccgagcgcggggtcttggtcc

SEQ ID NO: 4048 - DNA, 61 bp, Homo sapiens
  chr7:142985588-142985649
  hyper
acaaggagctgatggccgctgacaggggacgcaggtaagtagggaacggtcttagggctcc

SEQ ID NO: 4049 - DNA, 78 bp, Homo sapiens
  chr7:142985657-142985735
  hyper
gcccagggaaggggagcgtggcccccaggcgtgcggccctgcagccccctcccctcggagccccggaaagcagccgtg

SEQ ID NO: 4050 - DNA, 88 bp, Homo sapiens
  chr7:142985757-142985845
  hyper
ggacgcccgcccgagccgctccgagcctgactccgcgcaagggcccgcgggcggacctcttggccttgtctctcgtgggaaaagactg

SEQ ID NO: 4051 - DNA, 31 bp, Homo sapiens
  chr7:142985854-142985885
  hyper
ccctttgttcaacccacgagggttctaaagg

SEQ ID NO: 4052 - DNA, 31 bp, Homo sapiens
  chr7:142985890-142985921
  hyper
tctttgcagtcctgcccgctcttgggttctc

SEQ ID NO: 4053 - DNA, 53 bp, Homo sapiens
  chr7:142985983-142986036
  hyper
ctgtctccttaaaaatcgacgagaccttctgcagacctcggtgctctgcctga

SEQ ID NO: 4054 - DNA, 31 bp, Homo sapiens
  chr7:142986038-142986069
  hyper
tgcatttgatttgtatcgattgtatcatgat

SEQ ID NO: 4055 - DNA, 52 bp, Homo sapiens
  chr7:142986151-142986203
  hyper
ggggttcctgtggctccgagtgtccatgcctctgccccggtcattccatttc

SEQ ID NO: 4056 - DNA, 31 bp, Homo sapiens
  chr8:21867535-21867566
  hyper
tgtacagtaaggggagcggtggaattaattt

SEQ ID NO: 4057 - DNA, 31 bp, Homo sapiens
  chr8:27099006-27099037
  hyper
gcaatgtgatttcctacgacactggctgctt

SEQ ID NO: 4058 - DNA, 49 bp, Homo sapiens
  chr8:37887676-37887725
  hyper
ccttcctgcagtgggccgggtcagctcggatctccgcgcggtcctgagt

SEQ ID NO: 4059 - DNA, 57 bp, Homo sapiens
  chr8:86132758-86132815
  hyper
aggtgcagtgaaaaagcgaagccccacccatagagcgaggttcggaagtccagtctc

SEQ ID NO: 4060 - DNA, 35 bp, Homo sapiens
  chr8:101170569-101170604
  hyper
gagttcccgggtccaccggcgcggtcagccctggt

SEQ ID NO: 4061 - DNA, 31 bp, Homo sapiens
  chr8:102217068-102217099
  hyper
cattctccataaccatcggaaaggaagaggc

SEQ ID NO: 4062 - DNA, 31 bp, Homo sapiens
  chr8:115172751-115172782
  hyper
actttcaggattatgacgtctgacatggaag

SEQ ID NO: 4063 - DNA, 47 bp, Homo sapiens
  chr8:144641058-144641105
  hyper
agaaggccctggaggacgcagctggggtggggcgacactctggctgg

SEQ ID NO: 4064 - DNA, 31 bp, Homo sapiens
  chr8:144641148-144641179
  hyper
gtgggtccctgcaccacgctcaggaggtgac

SEQ ID NO: 4065 - DNA, 40 bp, Homo sapiens
  chr9:4297416-4297456
  hyper
tttaatagtctctcctcgagattcccggccccatactaaa

SEQ ID NO: 4066 - DNA, 31 bp, Homo sapiens
  chr9:4297515-4297546
  hyper
ctggggccccaactctcgggagatgctgaag

SEQ ID NO: 4067 - DNA, 652 bp, Homo sapiens
  chr9:27529269-27529921
  hyper
ggacaaatcaagatcccggggtggaaagtgggcgacccttgttcctgccgggaagtgcacacgaggagccggccagaaacccaggcgccggcaggggtctgaagaggactccagccccggaagcccgtggccggcgggcagaagaccggtccgccgcctcccgcaccttcttgcacccgcgcccaggtgcgccccaaacctcgccgcccgcccgggcgagatcgggagcgagcagccaccgggctgcgccgcctcccctagcttggagcgggttcttactcaccgtggggttttacctccagcccagggcccggtcggctcccttcgccgggtcagctgcagccagcgcgaaagaaaatggtgagctcggggcaggtggggcgtcgcttgccaatccacgcaagggactctgccgccggtgcgcgaggtcccggcgagccaaccggcggacgggcgagcgcctggctccagctgcagccgccgtcgctccggagcagccccctcatgcacccagcgcgccgcgcagccggccggggctcgactgtctcgcggggacgccgagcggggacccctggcggccgcctgcggtatggcagcaccgtggagagaaaagtcgtctttgggatcatcttccctccggaaagagatggga

SEQ ID NO: 4068 - DNA, 31 bp, Homo sapiens
  chr9:132809114-132809145
  hyper
tccactctccttcccccgtactccatatatc

SEQ ID NO: 4069 - DNA, 42 bp, Homo sapiens
  chr9:138024135-138024177
  hyper
cctgcctgggacgggacggctgaagcccgtggctgtctccac

SEQ ID NO: 4070 - DNA, 41 bp, Homo sapiens
  chr9:139001728-139001769
  hyper
ctgaatcagctgcacccggacggccccgcctgggcaaggat

SEQ ID NO: 4071 - DNA, 31 bp, Homo sapiens
  chr9:139581074-139581105
  hyper
gtcccccacctccctgcgaagaggaaaggga

SEQ ID NO: 4072 - DNA, 35 bp, Homo sapiens
  chr9:139581126-139581161
  hyper
caggtgcgcccatcaccgggcggacagtcaggagg

SEQ ID NO: 4073 - DNA, 54 bp, Homo sapiens
  chr9:139581216-139581270
  hyper
ccctggggcaagtccccgccgccccggcctcggtttccccgctcaggaagcagg

SEQ ID NO: 4074 - DNA, 31 bp, Homo sapiens
  chr10:3862627-3862658
  hyper
aaatctctgcaaagccgcgttcttcctggat

SEQ ID NO: 4075 - DNA, 31 bp, Homo sapiens
  chr10:11282875-11282906
  hyper
aggcttgtgctcccaccggacagacctggat

SEQ ID NO: 4076 - DNA, 31 bp, Homo sapiens
  chr10:13142553-13142584
  hyper
gggccggcctcttggccgcaggtaacccctc

SEQ ID NO: 4077 - DNA, 31 bp, Homo sapiens
  chr10:15481460-15481491
  hyper
ccccttcccttcaccacgggaaatgcaggca

SEQ ID NO: 4078 - DNA, 59 bp, Homo sapiens
  chr10:74020678-74020737
  hyper
ggagcctccttcctcccgagggtgggcggggccagggccagccccgccctcctccccgt

SEQ ID NO: 4079 - DNA, 31 bp, Homo sapiens
  chr10:74079342-74079373
  hyper
cggcggggtaatgggccgctagggactcagt

SEQ ID NO: 4080 - DNA, 43 bp, Homo sapiens
  chr10:74079590-74079633
  hyper
cctccagcattggccccgcccccagttccgcagtcgtggctgg

SEQ ID NO: 4081 - DNA, 58 bp, Homo sapiens
  chr10:74079634-74079692
  hyper
tttcggggagggcgcccggtgcggggggcgcccagggcctgcgcacacgggtaggccc

SEQ ID NO: 4082 - DNA, 34 bp, Homo sapiens
  chr10:74079752-74079786
  hyper
cgttcggttccgctcctgtcgcaccaccccctca

SEQ ID NO: 4083 - DNA, 92 bp, Homo sapiens
  chr10:74079804-74079896
  hyper
ggagctggtgccaacccgcagacacacctgggcagccccacgtgggtatcgcacgcgcaggggcacatctgccctgccgggtttggagagca

SEQ ID NO: 4084 - DNA, 36 bp, Homo sapiens
  chr10:74079909-74079945
  hyper
ccctggaatgtggtcccgtgccggctggagcaagaa

SEQ ID NO: 4085 - DNA, 31 bp, Homo sapiens
  chr10:88148418-88148449
  hyper
caggacctctttcctgcggtccctatcccct

SEQ ID NO: 4086 - DNA, 44 bp, Homo sapiens
  chr10:100206320-100206364
  hyper
gccgccgcggggctcccgtttgcctagcacgccagtttctgtcc

SEQ ID NO: 4087 - DNA, 79 bp, Homo sapiens
  chr10:111767197-111767276
  hyper
cgaggctgactcaaagcggcggctcagcctcgggagtaggagtagggggctcgctcatttagggcgggagacatttccg

SEQ ID NO: 4088 - DNA, 135 bp, Homo sapiens
  chr10:111767339-111767474
  hyper
ggggacgccgcggattcgagctgcacagtcagaagaggacgttgaaaaggcgccaggcagccgccccgaaccaggccctcccggctgccgggcctgcaggcccccaccgctgcggcttcacggacttagagcttg

SEQ ID NO: 4089 - DNA, 31 bp, Homo sapiens
  chr10:111767561-111767592
  hyper
cgaggtcttgaggaggcggggccgggaggct

SEQ ID NO: 4090 - DNA, 50 bp, Homo sapiens
  chr10:111767603-111767653
  hyper
gaggcggggccagaggcgtagggggctgcgaggggcggaccttgggggcg

SEQ ID NO: 4091 - DNA, 40 bp, Homo sapiens
  chr10:129923866-129923906
  hyper
aggggaaagtggggaccgtcgaccccgctccttttgatag

SEQ ID NO: 4092 - DNA, 43 bp, Homo sapiens
  chr10:135170629-135170672
  hyper
tcagagccaggagcaccgctcacccgcccgccctgccctgggg

SEQ ID NO: 4093 - DNA, 31 bp, Homo sapiens
  chr11:10814227-10814258
  hyper
ccagctcagcctcctgcgctccccctgggtc

SEQ ID NO: 4094 - DNA, 31 bp, Homo sapiens
  chr11:32915114-32915145
  hyper
gggagtcgtggggctccgtcacctcttgggt

SEQ ID NO: 4095 - DNA, 367 bp, Homo sapiens
  chr11:32915159-32915526
  hyper
tggtgaagtttgggctcgtggctgaactcgggatctgtgagacccaggattggcgccgggggtccgaagggggcgccggagagtttggggcagtggcgatccattgtattggaacctgggtggccgacaatgcggtcttggggactccggcgtgtgagggttgcggaggcgggagaggaagagtcgcggaaccgcgtcccggagacactggggggcccgggagggctgggctacgggagaatccccggggcgcagggcagaagagggggcccggcagggcgcgaacgcggctccagggccgggtgacatatgtttgcgctggtggccaagatttaggcgatttttcttccacgcgttcaaagttgct

SEQ ID NO: 4096 - DNA, 90 bp, Homo sapiens
  chr11:32915574-32915664
  hyper
tttgccttctatgcctcggggtgactgagagttgggaagaaatggggcgggggttggggtgggggtagtgaaggccgtaaaggttgaaga

SEQ ID NO: 4097 - DNA, 61 bp, Homo sapiens
  chr11:32915670-32915731
  hyper
gcatgcttctccatctcggcctttaaggtccgggtgcattatgtagcgtggggttcaagag

SEQ ID NO: 4098 - DNA, 31 bp, Homo sapiens
  chr11:32915773-32915804
  hyper
cttgatatttaagctcgcgggaaatgtgtag

SEQ ID NO: 4099 - DNA, 111 bp, Homo sapiens
  chr11:32915806-32915917
  hyper
gtgccacactgtgaaacggtcccatttgaatgataactggaaggcgtggtctggtttggagaattggtgagcggggtgttttaaagccacctctcccgaacaatacagaat

SEQ ID NO: 4100 - DNA, 52 bp, Homo sapiens
  chr11:47237125-47237177
  hyper
ctggatttcatagtcacgcttgttagctgcacgtcctcggtggtcagttgtg

SEQ ID NO: 4101 - DNA, 52 bp, Homo sapiens
  chr11:58940403-58940455
  hyper
aggtggtggtgggaggcgattcactccgctgaatcctcgcaggatcctccct

SEQ ID NO: 4102 - DNA, 31 bp, Homo sapiens
  chr11:58940504-58940535
  hyper
ccagcttcaacctagtcggtaacaatccact

SEQ ID NO: 4103 - DNA, 31 bp, Homo sapiens
  chr11:65344969-65345000
  hyper
agcaggctgagggtgccggcagtgtcaacgc

SEQ ID NO: 4104 - DNA, 50 bp, Homo sapiens
  chr11:65419933-65419983
  hyper
gtttccctctgggcctcgggtcgcggacctccggtcggggtccctgcgca

SEQ ID NO: 4105 - DNA, 59 bp, Homo sapiens
  chr11:65420273-65420332
  hyper
ctgttcctaggagactcgctgaattttgggacgcgtcccgctgacgataactccttttc

SEQ ID NO: 4106 - DNA, 36 bp, Homo sapiens
  chr11:65420338-65420374
  hyper
tattgtcctcccgcgacggtgcgaagcccaaacgaa

SEQ ID NO: 4107 - DNA, 31 bp, Homo sapiens
  chr11:67271841-67271872
  hyper
cgccggggccgggagccgcagcgaggctgag

SEQ ID NO: 4108 - DNA, 31 bp, Homo sapiens
  chr11:67271882-67271913
  hyper
ttttccgcgcagcccccgccccccgcccgcc

SEQ ID NO: 4109 - DNA, 109 bp, Homo sapiens
  chr11:67271914-67272023
  hyper
gtcgccatggcaaccgcgcgctgacgcgggccccccggagcgccaggctccggccggcgggcgggagggccacctcacctctcccgctgcgaccgcgtcctaaccccgg

SEQ ID NO: 4110 - DNA, 34 bp, Homo sapiens
  chr11:67272118-67272152
  hyper
atccccttcccggagtcggcggggtcccaagtcc

SEQ ID NO: 4111 - DNA, 31 bp, Homo sapiens
  chr11:67351439-67351470
  hyper
cctaggggacccaggacgtccccagtgccgt

SEQ ID NO: 4112 - DNA, 31 bp, Homo sapiens
  chr11:71274923-71274954
  hyper
ttgtgtggtatatgaacgatatgtcaataaa

SEQ ID NO: 4113 - DNA, 39 bp, Homo sapiens
  chr11:73088103-73088142
  hyper
tgtgggagacaggcagcgtgtgtgcgtgtgttgtgtgag

SEQ ID NO: 4114 - DNA, 38 bp, Homo sapiens
  chr11:125133577-125133615
  hyper
cagtccggtcttcgcacggagggcgtggagccgaggat

SEQ ID NO: 4115 - DNA, 159 bp, Homo sapiens
  chr12:49659029-49659188
  hyper
actactgcctgcacctcgggccgcgcccaggacagctccagactaccccgggcccctccggttaacctggcttgtggcggccgggctggaaggtcgagttcacttggcagacaccagttcgggccggaaaacctggcccgggtgcggccatcagtggaa

SEQ ID NO: 4116 - DNA, 40 bp, Homo sapiens
  chr12:49659208-49659248
  hyper
tagtgagggctttccccgcagggcccgctactgccctagg

SEQ ID NO: 4117 - DNA, 31 bp, Homo sapiens
  chr12:49961129-49961160
  hyper
ccatgagataccatctcgtggaaaccaaaaa

SEQ ID NO: 4118 - DNA, 31 bp, Homo sapiens
  chr12:49961429-49961460
  hyper
cggaccctccgcccctcgttctcccaagagt

SEQ ID NO: 4119 - DNA, 41 bp, Homo sapiens
  chr12:53268251-53268292
  hyper
agcctggcctgccttccgcccccttcgcgtcctcccccggg

SEQ ID NO: 4120 - DNA, 31 bp, Homo sapiens
  chr12:122461112-122461143
  hyper
gttgttgaaaactccccgctgcctgatttca

SEQ ID NO: 4121 - DNA, 31 bp, Homo sapiens
  chr13:74708317-74708348
  hyper
ctgtgagggggggggccgaaaacaagaaacc

SEQ ID NO: 4122 - DNA, 31 bp, Homo sapiens
  chr13:74708349-74708380
  hyper
ccaaacaaaagagctccgggtcctcctcccc

SEQ ID NO: 4123 - DNA, 65 bp, Homo sapiens
  chr14:21539065-21539130
  hyper
acagctgtggctgggccgggtcccggggcatggccaaagagggaaattcccgcagagaaaaagag

SEQ ID NO: 4124 - DNA, 41 bp, Homo sapiens
  chr14:53161603-53161644
  hyper
caagcagccattcttccgcctaacatcgaaatctgagatca

SEQ ID NO: 4125 - DNA, 15 bp, Homo sapiens
  chr14:57265912-57265927
  hyper
cgtcatttcagtacc

SEQ ID NO: 4126 - DNA, 54 bp, Homo sapiens
  chr14:57265950-57266004
  hyper
ttaacttcattaaaaccggtcttgactaggagtggagatcggaactctctggat

SEQ ID NO: 4127 - DNA, 56 bp, Homo sapiens
  chr14:57266005-57266061
  hyper
tctttaagccagtgttcgctccccgcctccttccctccctccgttgccttcggtca

SEQ ID NO: 4128 - DNA, 76 bp, Homo sapiens
  chr14:77428165-77428241
  hyper
aaaaaactagaaagctcgacttctgcctgcggggccggaagccccgctgcggccccagcccgcggttagcccctgt

SEQ ID NO: 4129 - DNA, 31 bp, Homo sapiens
  chr14:77428257-77428288
  hyper
ctggtcaacccacctccggtgaaaactccca

SEQ ID NO: 4130 - DNA, 88 bp, Homo sapiens
  chr14:77428318-77428406
  hyper
aaaacacattttctctcgttttcgtcaagctcgctgtcccgcccacacatcccccgcctatcccggcacccgtcggcttcctcaggag

SEQ ID NO: 4131 - DNA, 31 bp, Homo sapiens
  chr14:77428449-77428480
  hyper
cccagagacttcacaccgtggggttctttcc

SEQ ID NO: 4132 - DNA, 31 bp, Homo sapiens
  chr14:103430221-103430252
  hyper
gtcccttccaggtcctcgcctgcctcatggc

SEQ ID NO: 4133 - DNA, 15 bp, Homo sapiens
  chr15:31620728-31620743
  hyper
aaaggaatgccctgg

SEQ ID NO: 4134 - DNA, 173 bp, Homo sapiens
  chr15:31620800-31620973
  hyper
cggtgcggggcgggcggcacctgcaccagggcgggcgctgagcctccagcctggggatcaccgcccgcccccgccagcccagcggcaacagttcccacgcgcggcccgatactttgtagttgattcatctgtggcggttccctcccccctttttgtttcgtttttaacataaa

SEQ ID NO: 4135 - DNA, 39 bp, Homo sapiens
  chr15:60690304-60690343
  hyper
gtgactcaccccggcccgccggcccgcagggaccgcgcc

SEQ ID NO: 4136 - DNA, 31 bp, Homo sapiens
  chr15:66586476-66586507
  hyper
gctgcgaagctgacatcgcctgctttgcagc

SEQ ID NO: 4137 - DNA, 31 bp, Homo sapiens
  chr15:66586511-66586542
  hyper
ggtttcctgacctgcccgcactgttgcccca

SEQ ID NO: 4138 - DNA, 31 bp, Homo sapiens
  chr15:91414432-91414463
  hyper
cagtcccccaagagtccggctgaggcagggc

SEQ ID NO: 4139 - DNA, 31 bp, Homo sapiens
  chr16:3018712-3018743
  hyper
gggtgctccttgtgggcgataactgggagca

SEQ ID NO: 4140 - DNA, 45 bp, Homo sapiens
  chr16:57519802-57519847
  hyper
atttggaggaggtgagcgaacaggaggccccggggaggagcagga

SEQ ID NO: 4141 - DNA, 76 bp, Homo sapiens
  chr16:57519893-57519969
  hyper
tccgggggggcaggcccgggagcgcagggcctgggttgctcggatgaggtttgtgtgggtgcgggtgaggtcagct

SEQ ID NO: 4142 - DNA, 46 bp, Homo sapiens
  chr16:57519970-57520016
  hyper
gcgacctgggctcccccggagaggaaagctgcgggtggagagagcg

SEQ ID NO: 4143 - DNA, 76 bp, Homo sapiens
  chr16:57520038-57520114
  hyper
actggcttttggggggcgggtctctaagctccccacccgagagtaggaaggtcccatgggacggagcgtcctcagg

SEQ ID NO: 4144 - DNA, 41 bp, Homo sapiens
  chr16:89266728-89266769
  hyper
ggagagctgtgctcagcggcatttcccggtgaggcccttga

SEQ ID NO: 4145 - DNA, 31 bp, Homo sapiens
  chr17:914942-914973
  hyper
gagaaagcacttgccacggggactctgaagc

SEQ ID NO: 4146 - DNA, 87 bp, Homo sapiens
  chr17:4853392-4853479
  hyper
ggcgggggtgagtcaccgggcgcgcgctgccccggcgccgacgggaagggcctccgagtcgggccgaggcgccgtgtgtcccccgcc

SEQ ID NO: 4147 - DNA, 31 bp, Homo sapiens
  chr17:4853600-4853631
  hyper
ccggaagagccccaggcgtgcagaagctcac

SEQ ID NO: 4148 - DNA, 31 bp, Homo sapiens
  chr17:62067669-62067700
  hyper
atggtcactagatgtgcgccaagcgtatgcc

SEQ ID NO: 4149 - DNA, 31 bp, Homo sapiens
  chr17:73029808-73029839
  hyper
gctgggggctggtgctcgctaagtaaggatg

SEQ ID NO: 4150 - DNA, 38 bp, Homo sapiens
  chr17:73127280-73127318
  hyper
taggtcgttcatctcccgcacagcgtccaaggctcccg

SEQ ID NO: 4151 - DNA, 141 bp, Homo sapiens
  chr17:76355725-76355866
  hyper
ctcgtcacctccctgccgggaatgacccgggaaggggaggggaaaccgggaaaagctcccgggactgagcgagacccctccccacgccgcgctcctccttcctacctggtcccgaatcgaagtctccgtccttggggctga

SEQ ID NO: 4152 - DNA, 31 bp, Homo sapiens
  chr17:79926113-79926144
  hyper
gagggaaggtggcagccgagccctctccaga

SEQ ID NO: 4153 - DNA, 31 bp, Homo sapiens
  chr17:80503277-80503308
  hyper
agtccatatttttgcacgtagctattggcca

SEQ ID NO: 4154 - DNA, 31 bp, Homo sapiens
  chr17:80503315-80503346
  hyper
tactggaaagtagtaacgtggatatacaacg

SEQ ID NO: 4155 - DNA, 31 bp, Homo sapiens
  chr17:80840580-80840611
  hyper
ctggggcaacagacagcgtgagacacaggag

SEQ ID NO: 4156 - DNA, 54 bp, Homo sapiens
  chr17:81039184-81039238
  hyper
tccccgaaccgaggcccggggcgttccgctccagcagaccgaagccagaaacgc

SEQ ID NO: 4157 - DNA, 40 bp, Homo sapiens
  chr17:81039347-81039387
  hyper
gggcgcggtaggcagccgagggtggcggggaggccacccc

SEQ ID NO: 4158 - DNA, 31 bp, Homo sapiens
  chr18:12376269-12376300
  hyper
agtgagagcgactattcgacacgtgaacctt

SEQ ID NO: 4159 - DNA, 31 bp, Homo sapiens
  chr18:12991134-12991165
  hyper
ctccggactcgcagggcgcgcggcttcctcg

SEQ ID NO: 4160 - DNA, 31 bp, Homo sapiens
  chr18:72921090-72921121
  hyper
ctctgctcggctagggcgggcgggtccgccc

SEQ ID NO: 4161 - DNA, 31 bp, Homo sapiens
  chr19:384495-384526
  hyper
gaggaggggctcggagcggtgccctccaggt

SEQ ID NO: 4162 - DNA, 31 bp, Homo sapiens
  chr19:4078644-4078675
  hyper
aggctggagctctgtccgctagcagatccag

SEQ ID NO: 4163 - DNA, 28 bp, Homo sapiens
  chr19:4666908-4666936
  hyper
tcaaggtgttgaccgggctaggctctta

SEQ ID NO: 4164 - DNA, 93 bp, Homo sapiens
  chr19:10197445-10197538
  hyper
tttttccaggaaatgccgtaaagggatgaaaggcggggggggggcggcggaggccaaaaccaagggtcaagttcgggccgggagaacggtgcc

SEQ ID NO: 4165 - DNA, 51 bp, Homo sapiens
  chr19:10340886-10340937
  hyper
tctggtttaggaatgcgcggtatccacgctcgctcgcgcgggagccacgcc

SEQ ID NO: 4166 - DNA, 31 bp, Homo sapiens
  chr19:12900298-12900329
  hyper
gacctgcagactaaaacgagagtggggcccc

SEQ ID NO: 4167 - DNA, 77 bp, Homo sapiens
  chr19:12900388-12900465
  hyper
ggaagggcaccccacccgagggaggaggcagccgccgttccagcccgcccaggcgccgggggcgcctcgaggcatcg

SEQ ID NO: 4168 - DNA, 45 bp, Homo sapiens
  chr19:12900468-12900513
  hyper
cgccctctccgcgccccgtcgggccgggggcgaagtccgacccag

SEQ ID NO: 4169 - DNA, 93 bp, Homo sapiens
  chr19:12900555-12900648
  hyper
gccgggcctggcaggacgcagccccaaagcggcggggtggggcggggccgggccaggcggccgtgggggccccgggggcggcggtcggggctg

SEQ ID NO: 4170 - DNA, 91 bp, Homo sapiens
  chr19:12900661-12900752
  hyper
gtctgggggcccaggcgcgccctgggacctggcagatagtcgggttccccgcttctggctcggggccccaggacagcgctggtcccacctc

SEQ ID NO: 4171 - DNA, 37 bp, Homo sapiens
  chr19:12992040-12992077
  hyper
atcccggttgagtgaccgcagccggaccccggggcga

SEQ ID NO: 4172 - DNA, 31 bp, Homo sapiens
  chr19:34311545-34311576
  hyper
gggtctattgtgggcccgcggagcccccatg

SEQ ID NO: 4173 - DNA, 44 bp, Homo sapiens
  chr19:47731297-47731341
  hyper
gtggcccggctgggcccgccacctccccccgtcctctcccactt

SEQ ID NO: 4174 - DNA, 31 bp, Homo sapiens
  chr19:47731361-47731392
  hyper
cagccctctctcttcccggctcctatcaccc

SEQ ID NO: 4175 - DNA, 85 bp, Homo sapiens
  chr19:47731506-47731591
  hyper
gcgcagaggtaggcagcgggcagcagggtgggggcggcgggggcggcagccaggccgggctcgcagaggccgcaggacactgccg

SEQ ID NO: 4176 - DNA, 51 bp, Homo sapiens
  chr19:49199688-49199739
  hyper
atggtgcagatggctcgcgcacagctggtggtgacccgactttcctgcctc

SEQ ID NO: 4177 - DNA, 109 bp, Homo sapiens
  chr19:49956759-49956868
  hyper
actgcggtagctcagccgctccgcctctcttagtccccgtgattcccgccgcccaataggatcgcgccctgtaggacgctcccttgagccttggcggtggcagcctttt

SEQ ID NO: 4178 - DNA, 31 bp, Homo sapiens
  chr19:50401022-50401053
  hyper
agggagccaggggctccgtgaggaggaaaac

SEQ ID NO: 4179 - DNA, 31 bp, Homo sapiens
  chr19:51052519-51052550
  hyper
agacagacagacaaggcgagggggcagaaac

SEQ ID NO: 4180 - DNA, 31 bp, Homo sapiens
  chr19:51324263-51324294
  hyper
agctggggctgtggtgcgggctccccagggg

SEQ ID NO: 4181 - DNA, 31 bp, Homo sapiens
  chr19:51324305-51324336
  hyper
gcctgaagtccaaggtcgaggcccccttccc

SEQ ID NO: 4182 - DNA, 45 bp, Homo sapiens
  chr19:51324337-51324382
  hyper
tcccagcaccctcccgcgcgtttctcgccccgcctcctccttcct

SEQ ID NO: 4183 - DNA, 81 bp, Homo sapiens
  chr19:51416056-51416137
  hyper
gagggtgccgtagaccgcggagggtgcacggaggggcaggccgaggtcaggactgccgagaaacagcggggactcatcagg

SEQ ID NO: 4184 - DNA, 37 bp, Homo sapiens
  chr19:51416143-51416180
  hyper
gtggtgtttacagccacgaggccgggtgagatcatcc

SEQ ID NO: 4185 - DNA, 31 bp, Homo sapiens
  chr19:51416324-51416355
  hyper
cccccacagcccaccccgtgtgtctgtctct

SEQ ID NO: 4186 - DNA, 31 bp, Homo sapiens
  chr19:51522904-51522935
  hyper
agggaggggacccagacgtgcctctgccctg

SEQ ID NO: 4187 - DNA, 31 bp, Homo sapiens
  chr19:51523025-51523056
  hyper
cccctacccccacccccgggctccctccctt

SEQ ID NO: 4188 - DNA, 31 bp, Homo sapiens
  chr19:51523059-51523090
  hyper
ctctgtctaattgtaccgtgggtgaggctgg

SEQ ID NO: 4189 - DNA, 31 bp, Homo sapiens
  chr20:24638561-24638592
  hyper
ttccagataaatagttcgggaggcagccagt

SEQ ID NO: 4190 - DNA, 46 bp, Homo sapiens
  chr20:30458609-30458655
  hyper
tccggctctgcctggacgtccctgcgggccccgggggaaagcaccc

SEQ ID NO: 4191 - DNA, 31 bp, Homo sapiens
  chr20:58323973-58324004
  hyper
tgtcagcacacaaacccgattgtgggcccag

SEQ ID NO: 4192 - DNA, 42 bp, Homo sapiens
  chr21:18984015-18984057
  hyper
cgtcatcctgggacctcgtcaccgcggcggctgctcctcaag

SEQ ID NO: 4193 - DNA, 37 bp, Homo sapiens
  chr21:18984073-18984110
  hyper
aaggctcctctgctcacggctgcgtggataaaaccca

SEQ ID NO: 4194 - DNA, 37 bp, Homo sapiens
  chr21:18984115-18984152
  hyper
aatccagaatcaagctcggcctcgcaggagtttataa

SEQ ID NO: 4195 - DNA, 49 bp, Homo sapiens
  chr21:18984162-18984211
  hyper
tttccctcccttgtaacgaaaagctaatcgcaaacgtttctaggaacac

SEQ ID NO: 4196 - DNA, 80 bp, Homo sapiens
  chr21:18984231-18984311
  hyper
tcccaaggtggagggcgcgagaagactggcccgtggggtgaggagccccggcccgacctcagcggcgccacaaagccatg

SEQ ID NO: 4197 - DNA, 35 bp, Homo sapiens
  chr22:38072874-38072909
  hyper
cttggtcagaggatgccgggcgggaacaaccccac

SEQ ID NO: 4198 - DNA, 20 bp, Homo sapiens
  chr22:46302162-46302182
  hyper
ttgctggctgttaacacgag

SEQ ID NO: 4199 - DNA, 13 bp, Homo sapiens
  chr22:46302264-46302277
  hyper
cagggtggcccaa

SEQ ID NO: 4200 - DNA, 31 bp, Homo sapiens
  chr22:46302284-46302315
  hyper
tttactgaggaagaaacggaggcccctgggg

SEQ ID NO: 4201 - DNA, 34 bp, Homo sapiens
  chr22:50965027-50965061
  hyper
aagtctggcgggcctgcgccgtccatgcagagca

SEQ ID NO: 4202 - DNA, 31 bp, Homo sapiens
  chrY:7180425-7180456
  hyper
ttcagtttagaatcatcgtcatcctggggag

SEQ ID NO: 4203 - DNA, 47 bp, Homo sapiens
  chr1:2341159-2341206
  hypo
ttctcagggcctttcccggctgcttgctctgccggtctggaaaatgc

SEQ ID NO: 4204 - DNA, 55 bp, Homo sapiens
  chr1:11313591-11313646
  hypo
ctggaacacagtcccccggcctgctgcaaggtagctccttcgtgtcatgtggacc

SEQ ID NO: 4205 - DNA, 31 bp, Homo sapiens
  chr1:11315987-11316018
  hypo
gccaggtgattctctacgcagatgtgctttg

SEQ ID NO: 4206 - DNA, 48 bp, Homo sapiens
  chr1:11316202-11316250
  hypo
aagaagaaggtagggacgctgatggccagctcacggagaaccaggacc

SEQ ID NO: 4207 - DNA, 31 bp, Homo sapiens; identical to SEQ ID NO: 3930
  chr1:17591035-17591066
  hypo

SEQ ID NO: 4208 - DNA, 38 bp, Homo sapiens; identical to SEQ ID NO: 3931
  chr1:17591112-17591150
  hypo

SEQ ID NO: 4209 - DNA, 31 bp, Homo sapiens; identical to SEQ ID NO: 3932
  chr1:17591213-17591244
  hypo

SEQ ID NO: 4210 - DNA, 31 bp, Homo sapiens; identical to SEQ ID NO: 3933
  chr1:17908286-17908317
  hypo

SEQ ID NO: 4211 - DNA, 31 bp, Homo sapiens
  chr1:23411589-23411620
  hypo
ttgccctggtttccagcgacaggttctggcc

SEQ ID NO: 4212 - DNA, 1 bp, Homo sapiens
  chr1:24110736-24110737
  hypo
t

SEQ ID NO: 4213 - DNA, 31 bp, Homo sapiens
  chr1:24111051-24111082
  hypo
ttgccccagctaatatcgaggcctcttctgt

SEQ ID NO: 4214 - DNA, 52 bp, Homo sapiens
  chr1:27057987-27058039
  hypo
cagcagccagcaccctcgacgctctcccagcaggctgcgtatcctcagcccc

SEQ ID NO: 4215 - DNA, 44 bp, Homo sapiens
  chr1:27058061-27058105
  hypo
tgcctattcccagcagcgcttccctccaccgcaggtaagatatc

SEQ ID NO: 4216 - DNA, 31 bp, Homo sapiens
  chr1:29851221-29851252
  hypo
tgaggggcctgggctccgctctcctgcagga

SEQ ID NO: 4217 - DNA, 31 bp, Homo sapiens
  chr1:31539597-31539628
  hypo
aatataaacatctgtacgagaagagatgcca

SEQ ID NO: 4218 - DNA, 36 bp, Homo sapiens; identical to SEQ ID NO: 3937
  chr1:32757651-32757687
  hypo

SEQ ID NO: 4219 - DNA, 31 bp, Homo sapiens
  chr1:46743579-46743610
  hypo
gccacttctctctgggcgagttgaaggagct

SEQ ID NO: 4220 - DNA, 39 bp, Homo sapiens
  chr1:52089595-52089634
  hypo
acttttttttttttgtcggagtctcgctctgtcacccag

SEQ ID NO: 4221 - DNA, 31 bp, Homo sapiens
  chr1:53859594-53859625
  hypo
cactcgagatgatgctcgcacaggtgccctg

SEQ ID NO: 4222 - DNA, 31 bp, Homo sapiens
  chr1:87797490-87797521
  hypo
gagaaaagtaaacaggcggctgctgccggcg

SEQ ID NO: 4223 - DNA, 21 bp, Homo sapiens
  chr1:93226594-93226615
  hypo
acacagcgaggctccatctca

SEQ ID NO: 4224 - DNA, 37 bp, Homo sapiens
  chr1:100500498-100500535
  hypo
aattcccttttgcttacgttagcgagtactagtttgt

SEQ ID NO: 4225 - DNA, 48 bp, Homo sapiens
  chr1:100500582-100500630
  hypo
gatatcagtctcttagcgcaaagtttgtgaatacggtcatccctccat

SEQ ID NO: 4226 - DNA, 31 bp, Homo sapiens
  chr1:100500649-100500680
  hypo
ttggttgtgggacttccgtggatatccaaat

SEQ ID NO: 4227 - DNA, 33 bp, Homo sapiens
  chr1:154115065-154115098
  hypo
gtatctaagaaaagttcggaggccagtgcggtg

SEQ ID NO: 4228 - DNA, 31 bp, Homo sapiens; identical to SEQ ID NO: 3944
  chr1:160526914-160526945
  hypo

SEQ ID NO: 4229 - DNA, 55 bp, Homo sapiens; identical to SEQ ID NO: 3945
  chr1:160527013-160527068
  hypo

SEQ ID NO: 4230 - DNA, 31 bp, Homo sapiens; identical to SEQ ID NO: 3946
  chr1:160527072-160527103
  hypo

SEQ ID NO: 4231 - DNA, 31 bp, Homo sapiens
  chr1:173714248-173714279
  hypo
ttgtatctcttgggaacgttttatggtttta

SEQ ID NO: 4232 - DNA, 31 bp, Homo sapiens; identical to SEQ ID NO: 3947
  chr1:178995254-178995285
  hypo

SEQ ID NO: 4233 - DNA, 31 bp, Homo sapiens
  chr1:182827757-182827788
  hypo
cttgagattttgcccccggtaagcataaagc

SEQ ID NO: 4234 - DNA, 43 bp, Homo sapiens
  chr1:182827789-182827832
  hypo
gtttagttcacatttacgtagaactctccgtagacaagcaaat

SEQ ID NO: 4235 - DNA, 44 bp, Homo sapiens
  chr1:182827904-182827948
  hypo
gcaaattggctcagttcgaaccatctcagcgacaaaaccaagtg

SEQ ID NO: 4236 - DNA, 62 bp, Homo sapiens
  chr1:203690590-203690652
  hypo
cagagaaagaaggtagcgtgagagcaagtgcacaggtcaggaataagcgcagcttcacctcc

SEQ ID NO: 4237 - DNA, 38 bp, Homo sapiens
  chr1:203690654-203690692
  hypo
gtgcttgctgtgctcccgctacacggtgcattatgcta

SEQ ID NO: 4238 - DNA, 30 bp, Homo sapiens
  chr1:224327150-224327180
  hypo
ataaatacattttggccgagcacagtggct

SEQ ID NO: 4239 - DNA, 31 bp, Homo sapiens; identical to SEQ ID NO: 3954
  chr1:227652538-227652569
  hypo

SEQ ID NO: 4240 - DNA, 31 bp, Homo sapiens; identical to SEQ ID NO: 3955
  chr1:227652661-227652692
  hypo

SEQ ID NO: 4241 - DNA, 44 bp, Homo sapiens; identical to SEQ ID NO: 3956
  chr1:227652700-227652744
  hypo

SEQ ID NO: 4242 - DNA, 34 bp, Homo sapiens
  chr1:227730784-227730818
  hypo
ctggactctccctaggcgtcggggttccttcctg

SEQ ID NO: 4243 - DNA, 34 bp, Homo sapiens
  chr1:247017213-247017247
  hypo
tttggcaaaaagaggacgacgaaaaaccacttta

SEQ ID NO: 4244 - DNA, 3 bp, Homo sapiens
  chr1:247017310-247017313
  hypo
taa

SEQ ID NO: 4245 - DNA, 66 bp, Homo sapiens
  chr2:10110632-10110698
  hypo
ttgtgagcaggttgctcgcagagagatggaacttcgtctttttcttgatggcgtgatcttatctct

SEQ ID NO: 4246 - DNA, 31 bp, Homo sapiens
  chr2:10110735-10110766
  hypo
ttcccagttcagtccccgtccattttttccc

SEQ ID NO: 4247 - DNA, 31 bp, Homo sapiens
  chr2:10110815-10110846
  hypo
caggacaaaatcagagcgccttgttccctgg

SEQ ID NO: 4248 - DNA, 22 bp, Homo sapiens
  chr2:20594842-20594864
  hypo
cattgcccgttttctttctctg

SEQ ID NO: 4249 - DNA, 31 bp, Homo sapiens
  chr2:20594894-20594925
  hypo
tgtactgtgcttgatgcgactctcttaagaa

SEQ ID NO: 4250 - DNA, 31 bp, Homo sapiens
  chr2:20594975-20595006
  hypo
gaataaaatcagtatacggtaagaacaaaat

SEQ ID NO: 4251 - DNA, 31 bp, Homo sapiens
  chr2:24763332-24763363
  hypo
ttttttttttttgagacggagtttcgctttt

SEQ ID NO: 4252 - DNA, 95 bp, Homo sapiens
  chr2:26832823-26832918
  hypo
agggcagaccaggcagcggaagcttagaaaactgcctagaacattcgctcctctgcttctcgtgggagcaggctgggttccgcttggagtggcag

SEQ ID NO: 4253 - DNA, 31 bp, Homo sapiens
  chr2:32142424-32142455
  hypo
tggacactgtgctaggcggtggggtatacag

SEQ ID NO: 4254 - DNA, 35 bp, Homo sapiens
  chr2:32142470-32142505
  hypo
atattgtccctgtcctcgttcggctcacagtacag

SEQ ID NO: 4255 - DNA, 44 bp, Homo sapiens
  chr2:32142527-32142571
  hypo
cctttagcaggtaccacgtaacagtctgtcgagcataccataaa

SEQ ID NO: 4256 - DNA, 31 bp, Homo sapiens
  chr2:32142625-32142656
  hypo
caagcctaaaattttacgattaattatagca

SEQ ID NO: 4257 - DNA, 31 bp, Homo sapiens
  chr2:47236538-47236569
  hypo
ctgagtgaccgcacaacgcctagcccagtac

SEQ ID NO: 4258 - DNA, 63 bp, Homo sapiens
  chr2:54097366-54097429
  hypo
ctcataattttatcatcgtctgtcgagtacgtaacatgttctttgctgcgttcattacactag

SEQ ID NO: 4259 - DNA, 29 bp, Homo sapiens
  chr2:54097492-54097521
  hypo
caatttcttttcttttcgttttttttttt

SEQ ID NO: 4260 - DNA, 31 bp, Homo sapiens
  chr2:61304101-61304132
  hypo
aagattttacttgcccgcgagatcttttgat

SEQ ID NO: 4261 - DNA, 31 bp, Homo sapiens
  chr2:61304162-61304193
  hypo
atctatggatgcccagcgctgggaagaggtg

SEQ ID NO: 4262 - DNA, 34 bp, Homo sapiens
  chr2:61304194-61304228
  hypo
acatttcagttcattgcgacgttcacattttcaa

SEQ ID NO: 4263 - DNA, 39 bp, Homo sapiens
  chr2:62146651-62146690
  hypo
ttgccatgtcgatcaggcttcatcgcgtttttttttttt

SEQ ID NO: 4264 - DNA, 31 bp, Homo sapiens
  chr2:62432139-62432170
  hypo
atcaatttagagatagcggaggctgggggag

SEQ ID NO: 4265 - DNA, 86 bp, Homo sapiens
  chr2:70166085-70166171
  hypo
gttctcacaaacaaaacggtacaatctatttttgtgcgatgttcttgggacctcgctgtgttctgctatctcgaggcacattctcc

SEQ ID NO: 4266 - DNA, 36 bp, Homo sapiens
  chr2:113168034-113168070
  hypo
gtgaactgtctatcaacggtgtttttaaaagattta

SEQ ID NO: 4267 - DNA, 39 bp, Homo sapiens
  chr2:149525278-149525317
  hypo
aactctgcctcttgatcgtgcttccgattttcctaacat

SEQ ID NO: 4268 - DNA, 39 bp, Homo sapiens
  chr2:149525352-149525391
  hypo
cccctggaatctaccccggggaatcgtagttaggaggaa

SEQ ID NO: 4269 - DNA, 31 bp, Homo sapiens
  chr2:149525446-149525477
  hypo
tatcttagaataggtacgttatttgcaaagg

SEQ ID NO: 4270 - DNA, 31 bp, Homo sapiens
  chr2:170620741-170620772
  hypo
gcaaaatagttgttagcgtcctccaaagatg

SEQ ID NO: 4271 - DNA, 31 bp, Homo sapiens; identical to SEQ ID NO: 3964
  chr2:178257947-178257978
  hypo

SEQ ID NO: 4272 - DNA, 31 bp, Homo sapiens; identical to SEQ ID NO: 3965
  chr2:178258004-178258035
  hypo

SEQ ID NO: 4273 - DNA, 31 bp, Homo sapiens; identical to SEQ ID NO: 3966
  chr2:179316144-179316175
  hypo

SEQ ID NO: 4274 - DNA, 31 bp, Homo sapiens
  chr2:198276037-198276068
  hypo
tacttatatactgcctcgtaagtattccaca

SEQ ID NO: 4275 - DNA, 40 bp, Homo sapiens
  chr2:198276102-198276142
  hypo
gttgggagctcttggccgggtgcggtggctcacacccgta

SEQ ID NO: 4276 - DNA, 35 bp, Homo sapiens; identical to SEQ ID NO: 3973
  chr2:217008384-217008419
  hypo

SEQ ID NO: 4277 - DNA, 31 bp, Homo sapiens
  chr2:230136329-230136360
  hypo
cctaaaataaggaaaccgtagccccgggggt

SEQ ID NO: 4278 - DNA, 31 bp, Homo sapiens; identical to SEQ ID NO: 3975
  chr2:230786011-230786042
  hypo

SEQ ID NO: 4279 - DNA, 31 bp, Homo sapiens
  chr2:242167883-242167914
  hypo
ccggatggcctgtgggcggggtggaagtgcc

SEQ ID NO: 4280 - DNA, 13 bp, Homo sapiens
  chr2:242190664-242190677
  hypo
tgtcaggcctaaa

SEQ ID NO: 4281 - DNA, 31 bp, Homo sapiens
  chr3:44975282-44975313
  hypo
tctgagcaaagaacatcgtgaatgctgagaa

SEQ ID NO: 4282 - DNA, 31 bp, Homo sapiens
  chr3:45968553-45968584
  hypo
caagcttgtccaacccgcggcccaggaaggc

SEQ ID NO: 4283 - DNA, 5 bp, Homo sapiens
  chr3:45968592-45968597
  hypo
cagcc

SEQ ID NO: 4284 - DNA, 43 bp, Homo sapiens
  chr3:45968716-45968759
  hypo
tcttccaacgaggcccagggaagccaaacgattggacaccctt

SEQ ID NO: 4285 - DNA, 24 bp, Homo sapiens
  chr3:48923662-48923686
  hypo
atataatagtaatggccgggtgcg

SEQ ID NO: 4286 - DNA, 20 bp, Homo sapiens
  chr3:57905503-57905523
  hypo
aagagcgaaactccatctca

SEQ ID NO: 4287 - DNA, 31 bp, Homo sapiens
  chr3:57906366-57906397
  hypo
gaacctttctggtatacgttacctatggtat

SEQ ID NO: 4288 - DNA, 14 bp, Homo sapiens
  chr3:57906446-57906460
  hypo
gatggcagaatagg

SEQ ID NO: 4289 - DNA, 31 bp, Homo sapiens
  chr3:58554742-58554773
  hypo
atcccacctcaccagacgggcccaccacacc

SEQ ID NO: 4290 - DNA, 21 bp, Homo sapiens
  chr3:105174273-105174294
  hypo
cgacaccgtctcaaaaaaaaa

SEQ ID NO: 4291 - DNA, 104 bp, Homo sapiens; identical to SEQ ID NO: 3980
  chr3:124774250-124774354
  hypo

SEQ ID NO: 4292 - DNA, 31 bp, Homo sapiens
  chr3:127783728-127783759
  hypo
ttgaaggtgctatcatcgcacttttccatct

SEQ ID NO: 4293 - DNA, 31 bp, Homo sapiens
  chr3:182599428-182599459
  hypo
tgaattttatctttgccgattatttttcata

SEQ ID NO: 4294 - DNA, 35 bp, Homo sapiens
  chr3:182650848-182650883
  hypo
aaaaacaagtttgcaacgcatcaaaaagaatactt

SEQ ID NO: 4295 - DNA, 50 bp, Homo sapiens
  chr3:182778695-182778745
  hypo
tccttttttatggctgcgagcatctattaatattacgtaggaggctccca

SEQ ID NO: 4296 - DNA, 31 bp, Homo sapiens
  chr3:183381134-183381165
  hypo
actgtttataatagtgcgtggtttgttttta

SEQ ID NO: 4297 - DNA, 31 bp, Homo sapiens
  chr3:183381208-183381239
  hypo
ttatattatttatgtacgctaataattatta

SEQ ID NO: 4298 - DNA, 47 bp, Homo sapiens
  chr3:183381259-183381306
  hypo
ctgaggtgatagttgtcgttggaggatgtgagcgagttggaggattt

SEQ ID NO: 4299 - DNA, 31 bp, Homo sapiens
  chr3:183479751-183479782
  hypo
gtggagtcattctttacgtatcaagtttcat

SEQ ID NO: 4300 - DNA, 31 bp, Homo sapiens
  chr3:183479787-183479818
  hypo
cattaatccctgcaaacggagaagagtcaga

SEQ ID NO: 4301 - DNA, 37 bp, Homo sapiens
  chr3:183479903-183479940
  hypo
ctggtgaagcccctcacgtgcccgcaacaggagctgc

SEQ ID NO: 4302 - DNA, 31 bp, Homo sapiens
  chr3:183479941-183479972
  hypo
agccagtcaccactcccgcagtatgtgactg

SEQ ID NO: 4303 - DNA, 35 bp, Homo sapiens; identical to SEQ ID NO: 3981
  chr3:194278584-194278619
  hypo

SEQ ID NO: 4304 - DNA, 31 bp, Homo sapiens; identical to SEQ ID NO: 3982
  chr3:194278635-194278666
  hypo

SEQ ID NO: 4305 - DNA, 31 bp, Homo sapiens; identical to SEQ ID NO: 3983
  chr3:194278669-194278700
  hypo

SEQ ID NO: 4306 - DNA, 31 bp, Homo sapiens
  chr3:195012970-195013001
  hypo
aatgtcattgtataaacgcatacccctaata

SEQ ID NO: 4307 - DNA, 31 bp, Homo sapiens
  chr3:195013004-195013035
  hypo
cctgaataagtggtgtcgctttgttttcctc

SEQ ID NO: 4308 - DNA, 31 bp, Homo sapiens
  chr3:195013036-195013067
  hypo
gaattggcccagttcacgtctgcaccatgag

SEQ ID NO: 4309 - DNA, 31 bp, Homo sapiens
  chr3:195013091-195013122
  hypo
ggtttttttcatatgacgccctataaagctg

SEQ ID NO: 4310 - DNA, 31 bp, Homo sapiens
  chr3:195013127-195013158
  hypo
ctggattaagatgtttcgagtcaagaaacat

SEQ ID NO: 4311 - DNA, 39 bp, Homo sapiens
  chr4:1204421-1204460
  hypo
ggaggttgacacttggcggatgacgcggcagggtctgga

SEQ ID NO: 4312 - DNA, 119 bp, Homo sapiens
  chr4:1204504-1204623
  hypo
tgggatggaaacatcccgaggggacccgggttccccagcacccgctgcagcccctcctcgtactacctggacccgctgcagcccctcctcgcaccgcctggacccgctgcagccccttc

SEQ ID NO: 4313 - DNA, 31 bp, Homo sapiens
  chr4:1204646-1204677
  hypo
tgatttgcatggaccacgcttccaaaagcag

SEQ ID NO: 4314 - DNA, 34 bp, Homo sapiens
  chr4:1204697-1204731
  hypo
gggattttgaagaggacgccggtaaacaggctca

SEQ ID NO: 4315 - DNA, 31 bp, Homo sapiens
  chr4:1204980-1205011
  hypo
tcccactggggcactgcgggcaggccgcctc

SEQ ID NO: 4316 - DNA, 36 bp, Homo sapiens
  chr4:3345082-3345118
  hypo
attgcccccttaaagacggggcgtgatccacagaca

SEQ ID NO: 4317 - DNA, 31 bp, Homo sapiens
  chr4:3345127-3345158
  hypo
gtcattttgtgtggctcgtctatctgtgttt

SEQ ID NO: 4318 - DNA, 37 bp, Homo sapiens
  chr4:3345244-3345281
  hypo
ccacttgttaaaaatgcgccgtcgggatcattacgtc

SEQ ID NO: 4319 - DNA, 31 bp, Homo sapiens
  chr4:6952006-6952037
  hypo
taggccttgctaacttcggttactaattcta

SEQ ID NO: 4320 - DNA, 31 bp, Homo sapiens
  chr4:8455227-8455258
  hypo
tcagttctggctcggacggccagtcatgtat

SEQ ID NO: 4321 - DNA, 31 bp, Homo sapiens; identical to SEQ ID NO: 3985
  chr4:9684932-9684963
  hypo

SEQ ID NO: 4322 - DNA, 53 bp, Homo sapiens; identical to SEQ ID NO: 3986
  chr4:9684964-9685017
  hypo

SEQ ID NO: 4323 - DNA, 31 bp, Homo sapiens; identical to SEQ ID NO: 3987
  chr4:9685030-9685061
  hypo

SEQ ID NO: 4324 - DNA, 31 bp, Homo sapiens; identical to SEQ ID NO: 3988
  chr4:9685111-9685142
  hypo

SEQ ID NO: 4325 - DNA, 31 bp, Homo sapiens
  chr4:10077116-10077147
  hypo
aaagggtgcaatttaacgaaaagccaaactt

SEQ ID NO: 4326 - DNA, 35 bp, Homo sapiens; identical to SEQ ID NO: 3990
  chr4:39183861-39183896
  hypo

SEQ ID NO: 4327 - DNA, 53 bp, Homo sapiens; identical to SEQ ID NO: 3991
  chr4:74702696-74702749
  hypo

SEQ ID NO: 4328 - DNA, 32 bp, Homo sapiens
  chr4:95578062-95578094
  hypo
gtgtgagccactgcgcccggccccattatgtt

SEQ ID NO: 4329 - DNA, 82 bp, Homo sapiens
  chr4:103806370-103806452
  hypo
agtttcagaatggcttcggttattgcctttccttggtgtactcgcacttcttggctaccttgcagttcgtccattcctcccg

SEQ ID NO: 4330 - DNA, 31 bp, Homo sapiens
  chr4:186319474-186319505
  hypo
agcttttgcagcttaccgaggaaaaaaacaa

SEQ ID NO: 4331 - DNA, 31 bp, Homo sapiens
  chr5:6625963-6625994
  hypo
atggctctagctacaccgtggcccaatcaga

SEQ ID NO: 4332 - DNA, 17 bp, Homo sapiens
  chr5:32156721-32156738
  hypo
ggcgggggggatggttt

SEQ ID NO: 4333 - DNA, 31 bp, Homo sapiens
  chr5:61938738-61938769
  hypo
gcccagaatttatggacgtgggccttcaacg

SEQ ID NO: 4334 - DNA, 38 bp, Homo sapiens
  chr5:74652648-74652686
  hypo
acacacctgtggtcctcgctacacggtaggctggggca

SEQ ID NO: 4335 - DNA, 36 bp, Homo sapiens
  chr5:118461527-118461563
  hypo
ggaatacaggcgtgagccaccgcgcctggccaatat

SEQ ID NO: 4336 - DNA, 80 bp, Homo sapiens; identical to SEQ ID NO: 4005
  chr5:131831595-131831675
  hypo

SEQ ID NO: 4337 - DNA, 54 bp, Homo sapiens; identical to SEQ ID NO: 4006
  chr5:131831705-131831759
  hypo

SEQ ID NO: 4338 - DNA, 31 bp, Homo sapiens; identical to SEQ ID NO: 4008
  chr5:132387333-132387364
  hypo

SEQ ID NO: 4339 - DNA, 31 bp, Homo sapiens; identical to SEQ ID NO: 4009
  chr5:132387547-132387578
  hypo

SEQ ID NO: 4340 - DNA, 31 bp, Homo sapiens
  chr5:133823804-133823835
  hypo
tgatctaagtgttttccgaagtggttgttcc

SEQ ID NO: 4341 - DNA, 57 bp, Homo sapiens; identical to SEQ ID NO: 4010
  chr5:133862722-133862779
  hypo

SEQ ID NO: 4342 - DNA, 106 bp, Homo sapiens; identical to SEQ ID NO: 4011
  chr5:133862788-133862894
  hypo

SEQ ID NO: 4343 - DNA, 70 bp, Homo sapiens; identical to SEQ ID NO: 4012
  chr5:133862909-133862979
  hypo

SEQ ID NO: 4344 - DNA, 272 bp, Homo sapiens; identical to SEQ ID NO: 4016
  chr5:133863167-133863439
  hypo

SEQ ID NO: 4345 - DNA, 31 bp, Homo sapiens; identical to SEQ ID NO: 4017
  chr5:133863443-133863474
  hypo

SEQ ID NO: 4346 - DNA, 31 bp, Homo sapiens
  chr5:172264178-172264209
  hypo
ctcttgcccttccctacggatacttctgatt

SEQ ID NO: 4347 - DNA, 106 bp, Homo sapiens
  chr5:172264272-172264378
  hypo
tgaggagagtactcaccgaagtagaacagttgagggatgaggcagtgcggaaagcatttagacacagagtaagcgcctcatccattttggccgccatatttatttg

SEQ ID NO: 4348 - DNA, 48 bp, Homo sapiens
  chr6:4061558-4061606
  hypo
aaaattggaagagaacgcgcttgatggatagagcgccttcagtgtact

SEQ ID NO: 4349 - DNA, 36 bp, Homo sapiens
  chr6:4061677-4061713
  hypo
cctagtgacatagaaacgatgcgtagttttcattta

SEQ ID NO: 4350 - DNA, 31 bp, Homo sapiens
  chr6:5108331-5108362
  hypo
ctatgctctctaaaagcgactggaagacatg

SEQ ID NO: 4351 - DNA, 18 bp, Homo sapiens
  chr6:13330102-13330120
  hypo
tgtgttaaaaagtgatcg

SEQ ID NO: 4352 - DNA, 22 bp, Homo sapiens
  chr6:19779513-19779535
  hypo
gccactgcgctcagcctgtatt

SEQ ID NO: 4353 - DNA, 37 bp, Homo sapiens
  chr6:28327738-28327775
  hypo
aggcagctggatgagccggcgccgcaggtagaaagaa

SEQ ID NO: 4354 - DNA, 31 bp, Homo sapiens
  chr6:28327776-28327807
  hypo
aggtttagtatctgagcgctgtggcctgttt

SEQ ID NO: 4355 - DNA, 31 bp, Homo sapiens
  chr6:28327863-28327894
  hypo
catctcttttttgtaccgtgaacctccttgg

SEQ ID NO: 4356 - DNA, 59 bp, Homo sapiens; identical to SEQ ID NO: 4029
  chr6:34359604-34359663
  hypo

SEQ ID NO: 4357 - DNA, 51 bp, Homo sapiens; identical to SEQ ID NO: 4030
  chr6:34359685-34359736
  hypo

SEQ ID NO: 4358 - DNA, 22 bp, Homo sapiens
  chr6:36072474-36072496
  hypo
ttcttgtcgtcattctgttctg

SEQ ID NO: 4359 - DNA, 31 bp, Homo sapiens
  chr6:37352724-37352755
  hypo
caaggtcaggatgaggcgggagtgtccacat

SEQ ID NO: 4360 - DNA, 37 bp, Homo sapiens
  chr6:41827195-41827232
  hypo
ccttctatgtgctctccgagcacgtgtgtactttccc

SEQ ID NO: 4361 - DNA, 36 bp, Homo sapiens
  chr6:41827297-41827333
  hypo
aacctgaagaagacatcgtgccgagaacagagcagg

SEQ ID NO: 4362 - DNA, 50 bp, Homo sapiens
  chr6:41827346-41827396
  hypo
ttgttgaattaaagaccgagtgaataaacaaataacgttctacttcagtg

SEQ ID NO: 4363 - DNA, 31 bp, Homo sapiens
  chr6:107777106-107777137
  hypo
gcacatccaacaattacgctcttgtttttat

SEQ ID NO: 4364 - DNA, 31 bp, Homo sapiens
  chr6:108990718-108990749
  hypo
ctatgactatagtcttcggttatagtatgct

SEQ ID NO: 4365 - DNA, 46 bp, Homo sapiens
  chr6:111085014-111085060
  hypo
aaactttgttcacagacgacgtaattgtctacgaagaaaatcccaa

SEQ ID NO: 4366 - DNA, 31 bp, Homo sapiens
  chr6:111204757-111204788
  hypo
cagatgtctaaaacaacgagagaagggaatc

SEQ ID NO: 4367 - DNA, 39 bp, Homo sapiens
  chr6:136682757-136682796
  hypo
ggcatggccaagatggcggtccagcgagtgcatgagatc

SEQ ID NO: 4368 - DNA, 58 bp, Homo sapiens
  chr6:136682803-136682861
  hypo
agggtacagttgtgttcgtttgaagaacaattatattgacattcgtcttattaggccc

SEQ ID NO: 4369 - DNA, 31 bp, Homo sapiens
  chr6:136682932-136682963
  hypo
ccacctggctaccctccgagaggagttttat

SEQ ID NO: 4370 - DNA, 31 bp, Homo sapiens
  chr6:137147698-137147729
  hypo
aggggacaagtttaaacgttagcatttctta

SEQ ID NO: 4371 - DNA, 49 bp, Homo sapiens; identical to SEQ ID NO: 4034
  chr6:138724646-138724695
  hypo

SEQ ID NO: 4372 - DNA, 40 bp, Homo sapiens; identical to SEQ ID NO: 4035
  chr6:138724703-138724743
  hypo

SEQ ID NO: 4373 - DNA, 38 bp, Homo sapiens; identical to SEQ ID NO: 4036
  chr6:138724744-138724782
  hypo

SEQ ID NO: 4374 - DNA, 31 bp, Homo sapiens; identical to SEQ ID NO: 4037
  chr6:146136027-146136058
  hypo

SEQ ID NO: 4375 - DNA, 100 bp, Homo sapiens; identical to SEQ ID NO: 4038
  chr6:146136066-146136166
  hypo

SEQ ID NO: 4376 - DNA, 59 bp, Homo sapiens; identical to SEQ ID NO: 4039
  chr6:146136222-146136281
  hypo

SEQ ID NO: 4377 - DNA, 24 bp, Homo sapiens
  chr6:150081970-150081994
  hypo
gcaagactccgtctcaaaaaacaa

SEQ ID NO: 4378 - DNA, 31 bp, Homo sapiens
  chr6:150082024-150082055
  hypo
gtatccataatttctacgtatgttccattga

SEQ ID NO: 4379 - DNA, 31 bp, Homo sapiens
  chr6:161586464-161586495
  hypo
tgatttcagcagcccccgtatctgttctaca

SEQ ID NO: 4380 - DNA, 31 bp, Homo sapiens
  chr7:897565-897596
  hypo
gtgagacagtggatgccgtacaagaaagagt

SEQ ID NO: 4381 - DNA, 31 bp, Homo sapiens
  chr7:2834425-2834456
  hypo
tgatcattacaacttacggtgatttagagct

SEQ ID NO: 4382 - DNA, 43 bp, Homo sapiens
  chr7:5240135-5240178
  hypo
cagtcctccttgtgctcgtttgtgtgtgcgtaggttctgtgca

SEQ ID NO: 4383 - DNA, 31 bp, Homo sapiens
  chr7:5391824-5391855
  hypo
ccagaacaaacaggtccgaatacctagtagg

SEQ ID NO: 4384 - DNA, 54 bp, Homo sapiens
  chr7:6077025-6077079
  hypo
ctttcaatgatttcatcgcccccacttaccttcagatctcggtgcacaattccc

SEQ ID NO: 4385 - DNA, 75 bp, Homo sapiens; identical to SEQ ID NO: 4042
  chr7:30517955-30518030
  hypo

SEQ ID NO: 4386 - DNA, 42 bp, Homo sapiens; identical to SEQ ID NO: 4043
  chr7:30518050-30518092
  hypo

SEQ ID NO: 4387 - DNA, 31 bp, Homo sapiens; identical to SEQ ID NO: 4044
  chr7:30518093-30518124
  hypo

SEQ ID NO: 4388 - DNA, 31 bp, Homo sapiens
  chr7:33026794-33026825
  hypo
ctgctttcctggcgatcggaatcttcatgtc

SEQ ID NO: 4389 - DNA, 31 bp, Homo sapiens
  chr7:44611080-44611111
  hypo
tgtggcagacctggagcgcagtggaagctct

SEQ ID NO: 4390 - DNA, 46 bp, Homo sapiens
  chr7:44611140-44611186
  hypo
ctgttccaagaacaggcgtagccggtaactccgttctagagtgttg

SEQ ID NO: 4391 - DNA, 31 bp, Homo sapiens
  chr7:44611191-44611222
  hypo
gagcagagacttgccccgaatcaatgacagc

SEQ ID NO: 4392 - DNA, 61 bp, Homo sapiens; identical to SEQ ID NO: 4047
  chr7:142985517-142985578
  hypo

SEQ ID NO: 4393 - DNA, 61 bp, Homo sapiens; identical to SEQ ID NO: 4048
  chr7:142985588-142985649
  hypo

SEQ ID NO: 4394 - DNA, 78 bp, Homo sapiens; identical to SEQ ID NO: 4049
  chr7:142985657-142985735
  hypo

SEQ ID NO: 4395 - DNA, 88 bp, Homo sapiens; identical to SEQ ID NO: 4050
  chr7:142985757-142985845
  hypo

SEQ ID NO: 4396 - DNA, 31 bp, Homo sapiens
  chr7:151845095-151845126
  hypo
gcatgtgaacggcagacgttacctttaggtg

SEQ ID NO: 4397 - DNA, 31 bp, Homo sapiens
  chr7:156974992-156975023
  hypo
tcgttttaactgttggcgaaaattatttggg

SEQ ID NO: 4398 - DNA, 31 bp, Homo sapiens
  chr7:157052886-157052917
  hypo
aagtaacattcagaatcgtaaaatagaaaac

SEQ ID NO: 4399 - DNA, 43 bp, Homo sapiens
  chr7:157052939-157052982
  hypo
gttacaacagtgagtgcggagaaactgacgtaatgaaagaaaa

SEQ ID NO: 4400 - DNA, 41 bp, Homo sapiens
  chr7:157053048-157053089
  hypo
gaagggtttagtggcacgtccaggttcgtgtgtgaagaaat

SEQ ID NO: 4401 - DNA, 31 bp, Homo sapiens
  chr7:158451212-158451243
  hypo
atggcagtcctttccacgttcaaaaggaaaa

SEQ ID NO: 4402 - DNA, 31 bp, Homo sapiens
  chr8:650716-650747
  hypo
ggaggtcctgccccatcggatggcctcctcc

SEQ ID NO: 4403 - DNA, 31 bp, Homo sapiens
  chr8:23429102-23429133
  hypo
ccacgacccccctggacgtctgtaagaccct

SEQ ID NO: 4404 - DNA, 93 bp, Homo sapiens
  chr8:23429135-23429228
  hypo
tgaacactcaggagaacgtggccctctcgctggccaacatcagcggccggctgtcgggtatggccaatgccttccggacggtgtaccagctca

SEQ ID NO: 4405 - DNA, 31 bp, Homo sapiens
  chr8:29962164-29962195
  hypo
aagtgatattggagaacgtggcttggatctg

SEQ ID NO: 4406 - DNA, 57 bp, Homo sapiens; identical to SEQ ID NO: 4059
  chr8:86132758-86132815
  hypo

SEQ ID NO: 4407 - DNA, 31 bp, Homo sapiens
  chr8:94747733-94747764
  hypo
tttcttaaatctctttcgtcaatactgaggg

SEQ ID NO: 4408 - DNA, 31 bp, Homo sapiens; identical to SEQ ID NO: 4061
  chr8:102217068-102217099
  hypo

SEQ ID NO: 4409 - DNA, 5 bp, Homo sapiens
  chr8:104055448-104055453
  hypo
tgaag

SEQ ID NO: 4410 - DNA, 13 bp, Homo sapiens
  chr8:104055556-104055569
  hypo
tttgttttttttg

SEQ ID NO: 4411 - DNA, 31 bp, Homo sapiens
  chr8:131085737-131085768
  hypo
aagcagtccatgaccacggcctgtggtgctc

SEQ ID NO: 4412 - DNA, 74 bp, Homo sapiens
  chr8:131085773-131085847
  hypo
gctgaggtggaggagacgagaaagcagttaagggggtcgggaaggaactgacagtgcagcgagagtggacaggt

SEQ ID NO: 4413 - DNA, 31 bp, Homo sapiens
  chr8:131085855-131085886
  hypo
gaacacaagtacatagcgttccaggcagggg

SEQ ID NO: 4414 - DNA, 31 bp, Homo sapiens
  chr8:131085900-131085931
  hypo
tgccaagagctgcagacggccaaggaagaca

SEQ ID NO: 4415 - DNA, 46 bp, Homo sapiens
  chr8:131086030-131086076
  hypo
acacacagagacaatgcgatggtgtacacctcgtgatagaacacac

SEQ ID NO: 4416 - DNA, 40 bp, Homo sapiens
  chr8:145158417-145158457
  hypo
ccaagaggactgaccgcgcgccctccgcccccactcaccg

SEQ ID NO: 4417 - DNA, 20 bp, Homo sapiens
  chr9:6423646-6423666
  hypo
ttttaaagaaaagtctcggc

SEQ ID NO: 4418 - DNA, 61 bp, Homo sapiens
  chr9:14607838-14607899
  hypo
aaggttcctaccacagcgattacccaaattattggagactttcaaacgtaaaaaatgtaca

SEQ ID NO: 4419 - DNA, 31 bp, Homo sapiens
  chr9:14607927-14607958
  hypo
cttcacagcacagtatcgtgcactgactgga

SEQ ID NO: 4420 - DNA, 31 bp, Homo sapiens
  chr9:14607972-14608003
  hypo
attgtgggtacttttccgtgatgagaatatc

SEQ ID NO: 4421 - DNA, 31 bp, Homo sapiens
  chr9:14608014-14608045
  hypo
tgaacactgaaaaactcgctaaaagccagac

SEQ ID NO: 4422 - DNA, 652 bp, Homo sapiens; identical to SEQ ID NO: 4067
  chr9:27529269-27529921
  hypo

SEQ ID NO: 4423 - DNA, 31 bp, Homo sapiens
  chr9:32547785-32547816
  hypo
acctacaaactttaaacgggtgaactttatg

SEQ ID NO: 4424 - DNA, 24 bp, Homo sapiens
  chr9:94116470-94116494
  hypo
aaaacctttcggagaaatctgaaa

SEQ ID NO: 4425 - DNA, 31 bp, Homo sapiens
  chr9:97727388-97727419
  hypo
ataactaagaacctcacgcacaaataattct

SEQ ID NO: 4426 - DNA, 31 bp, Homo sapiens
  chr9:97727422-97727453
  hypo
cattctaaatactgctcgtttcctttggtat

SEQ ID NO: 4427 - DNA, 31 bp, Homo sapiens
  chr9:97727470-97727501
  hypo
ctgcaggtgcaaggaacgacttcagttgtga

SEQ ID NO: 4428 - DNA, 48 bp, Homo sapiens
  chr9:97727513-97727561
  hypo
tttggggttgtccccccgctcccattttctttgcgtggtccatttttt

SEQ ID NO: 4429 - DNA, 107 bp, Homo sapiens
  chr9:123210295-123210402
  hypo
tctggctctgcagctgcgtcaccacctcctgggtggcagggagacgatacatatttcctaatgaccgggatggttttattaggattggcaagcgggacttcttagcc

SEQ ID NO: 4430 - DNA, 31 bp, Homo sapiens
  chr9:130266738-130266769
  hypo
tttgcagatctccttacgctctcactagggc

SEQ ID NO: 4431 - DNA, 31 bp, Homo sapiens
  chr9:130266777-130266808
  hypo
gcctcatggaggatctcgaggctcagtgacc

SEQ ID NO: 4432 - DNA, 88 bp, Homo sapiens
  chr9:130266818-130266906
  hypo
aacagcaagggacagccgcatccctggtctccggccacacagccccgtgttctgcacctcagcccttgttgaccgagggaggcccagg

SEQ ID NO: 4433 - DNA, 31 bp, Homo sapiens; identical to SEQ ID NO: 4068
  chr9:132809114-132809145
  hypo

SEQ ID NO: 4434 - DNA, 31 bp, Homo sapiens
  chr9:135275313-135275344
  hypo
aaagaatgcttcttgtcgatctataaatctg

SEQ ID NO: 4435 - DNA, 55 bp, Homo sapiens
  chr9:135275428-135275483
  hypo
tttaaattccttaaaccgttccaagtcgtcccggtacatccgcttgattgtgctg

SEQ ID NO: 4436 - DNA, 47 bp, Homo sapiens
  chr9:135275513-135275560
  hypo
tcctgaagctgtttcacggcagaacccaaatccgcatctgaatcatc

SEQ ID NO: 4437 - DNA, 39 bp, Homo sapiens
  chr9:138718006-138718045
  hypo
gcaggtcacagagcagcgtgtacacgggcaccagcacac

SEQ ID NO: 4438 - DNA, 47 bp, Homo sapiens
  chr9:138718163-138718210
  hypo
gaccccgcctgtgcccgcgggcatggagttaccgccccacctctgct

SEQ ID NO: 4439 - DNA, 75 bp, Homo sapiens
  chr9:138719253-138719328
  hypo
ggtattcaggttcttccgggtgcaggtagtgcctgtgacagccttccgccggcagctgcacggggggctgcagct

SEQ ID NO: 4440 - DNA, 118 bp, Homo sapiens
  chr9:138719350-138719468
  hypo
gctgcctaggaaactgcgtttggtcgcgttggagatcggtacaggaggccggctgctcttctggtgtaacactgttttcgctgcagaaatagcgtttttgcatcgttacttacaacac

SEQ ID NO: 4441 - DNA, 56 bp, Homo sapiens
  chr9:139317509-139317565
  hypo
gcgcgctcgtgtgacacgcgtttgccctctgcactaggcaacgtgaagccggaaga

SEQ ID NO: 4442 - DNA, 82 bp, Homo sapiens
  chr9:139317949-139318031
  hypo
ggagtgcagcgtgccacgaggagggcggtcggtgcttccctcctcgggctgtgggcacatggggccccgcaggttccttgga

SEQ ID NO: 4443 - DNA, 31 bp, Homo sapiens
  chr9:139318062-139318093
  hypo
acctatcaaagcctcccggaggccaccgtgc

SEQ ID NO: 4444 - DNA, 60 bp, Homo sapiens
  chr9:139318200-139318260
  hypo
ggcatctttcttagcacggtgttttccttctcgcctggggaggggcggttcttaagggct

SEQ ID NO: 4445 - DNA, 31 bp, Homo sapiens; identical to SEQ ID NO: 4071
  chr9:139581074-139581105
  hypo

SEQ ID NO: 4446 - DNA, 35 bp, Homo sapiens; identical to SEQ ID NO: 4072
  chr9:139581126-139581161
  hypo

SEQ ID NO: 4447 - DNA, 54 bp, Homo sapiens; identical to SEQ ID NO: 4073
  chr9:139581216-139581270
  hypo

SEQ ID NO: 4448 - DNA, 31 bp, Homo sapiens
  chr10:894780-894811
  hypo
agagagcaccagaaaccgccatgacatggac

SEQ ID NO: 4449 - DNA, 31 bp, Homo sapiens; identical to SEQ ID NO: 4074
  chr10:3862627-3862658
  hypo

SEQ ID NO: 4450 - DNA, 31 bp, Homo sapiens
  chr10:5939819-5939850
  hypo
gcattttggattcagacgtattttctgagat

SEQ ID NO: 4451 - DNA, 44 bp, Homo sapiens
  chr10:7871222-7871266
  hypo
tgttattaaccttttacgtgactatggtacgtgtatcacaatta

SEQ ID NO: 4452 - DNA, 35 bp, Homo sapiens
  chr10:7871282-7871317
  hypo
tgttattattaagtgacgcccgcactgtattgaca

SEQ ID NO: 4453 - DNA, 31 bp, Homo sapiens
  chr10:7871376-7871407
  hypo
ttgtgtttggttgtcacgtctccttagactt

SEQ ID NO: 4454 - DNA, 31 bp, Homo sapiens
  chr10:70218970-70219001
  hypo
ttgacttagatttaagcggtacctgccaaaa

SEQ ID NO: 4455 - DNA, 55 bp, Homo sapiens
  chr10:70219014-70219069
  hypo
tagacttagacttaagcggtacctgccaaaaatatgatagcgaatatgaaagtat

SEQ ID NO: 4456 - DNA, 31 bp, Homo sapiens
  chr10:70219071-70219102
  hypo
atatgagaaaagtaaacgaggacaaaaaaat

SEQ ID NO: 4457 - DNA, 31 bp, Homo sapiens
  chr10:70219108-70219139
  hypo
aagcaacccaactgttcgtcagccaataaat

SEQ ID NO: 4458 - DNA, 43 bp, Homo sapiens; identical to SEQ ID NO: 4080
  chr10:74079590-74079633
  hypo

SEQ ID NO: 4459 - DNA, 58 bp, Homo sapiens; identical to SEQ ID NO: 4081
  chr10:74079634-74079692
  hypo

SEQ ID NO: 4460 - DNA, 34 bp, Homo sapiens; identical to SEQ ID NO: 4082
  chr10:74079752-74079786
  hypo

SEQ ID NO: 4461 - DNA, 31 bp, Homo sapiens; identical to SEQ ID NO: 4085
  chr10:88148418-88148449
  hypo

SEQ ID NO: 4462 - DNA, 38 bp, Homo sapiens
  chr10:94310595-94310633
  hypo
cagcctggcaacagagcgagactcggtctcaaaaaata

SEQ ID NO: 4463 - DNA, 79 bp, Homo sapiens; identical to SEQ ID NO: 4087
  chr10:111767197-111767276
  hypo

SEQ ID NO: 4464 - DNA, 135 bp, Homo sapiens; identical to SEQ ID NO: 4088
  chr10:111767339-111767474
  hypo

SEQ ID NO: 4465 - DNA, 31 bp, Homo sapiens; identical to SEQ ID NO: 4089
  chr10:111767561-111767592
  hypo

SEQ ID NO: 4466 - DNA, 50 bp, Homo sapiens; identical to SEQ ID NO: 4090
  chr10:111767603-111767653
  hypo

SEQ ID NO: 4467 - DNA, 37 bp, Homo sapiens
  chr10:120822533-120822570
  hypo
ctaggattagacgtgagccaccgcgcctagccaagat

SEQ ID NO: 4468 - DNA, 56 bp, Homo sapiens
  chr10:120822571-120822627
  hypo
acctttaacaaggtgacgtggattatccttccagtgtggcacgtttcttcagcttt

SEQ ID NO: 4469 - DNA, 78 bp, Homo sapiens
  chr10:126190212-126190290
  hypo
agtgatgatggtggcacgacgttctgaatgtgctcgatgccagtgaattgaatactctggtcacggtcataaatttta

SEQ ID NO: 4470 - DNA, 89 bp, Homo sapiens
  chr11:688458-688547
  hypo
gactagaaggaaaaaccgctccgtcaggtcacgtccgagagtgacaccaggcgtgtcactgagcccagctgggccgtcctccagcaggg

SEQ ID NO: 4471 - DNA, 46 bp, Homo sapiens
  chr11:1312470-1312516
  hypo
ttcagccctgcagctccggctgcctgtaaagcgtcctgcctggaat

SEQ ID NO: 4472 - DNA, 31 bp, Homo sapiens
  chr11:3704649-3704680
  hypo
tcgaacagccttctcacgtatgctacaggga

SEQ ID NO: 4473 - DNA, 31 bp, Homo sapiens
  chr11:14498536-14498567
  hypo
gatccataatgctcctcggtaaatcctagca

SEQ ID NO: 4474 - DNA, 34 bp, Homo sapiens
  chr11:14498650-14498684
  hypo
aagggccaggcactcacgcctgtaatcccagcac

SEQ ID NO: 4475 - DNA, 52 bp, Homo sapiens
  chr11:19256430-19256482
  hypo
atcatcataatctgctcggcgtacttattctcctccccgatgctcttcaagg

SEQ ID NO: 4476 - DNA, 98 bp, Homo sapiens
  chr11:19256492-19256590
  hypo
tttgttgagattgtgtcgcccgtgccaagtgtacctgtttttggcgaggcggctcaccatatgtaaactctctaggacgttcacgatatcgtaaatgc

SEQ ID NO: 4477 - DNA, 31 bp, Homo sapiens
  chr11:19256629-19256660
  hypo
ttacagatttttgtaacgtgtttagaattga

SEQ ID NO: 4478 - DNA, 367 bp, Homo sapiens; identical to SEQ ID NO: 4095
  chr11:32915159-32915526
  hypo

SEQ ID NO: 4479 - DNA, 31 bp, Homo sapiens
  chr11:46911489-46911520
  hypo
tttacctgcaggttggcgctgggggtgcaag

SEQ ID NO: 4480 - DNA, 57 bp, Homo sapiens
  chr11:59423037-59423094
  hypo
tgtggaggtggtgtagcggagggtggagcactaaagaaggcacggaagcctggtgct

SEQ ID NO: 4481 - DNA, 31 bp, Homo sapiens
  chr11:59423099-59423130
  hypo
aagcatctgcccaactcgcccttgtagcaac

SEQ ID NO: 4482 - DNA, 55 bp, Homo sapiens
  chr11:59423159-59423214
  hypo
aacaaatccagggacccgtgcaaactggctgggagacatccgtccaggctgtagc

SEQ ID NO: 4483 - DNA, 50 bp, Homo sapiens; identical to SEQ ID NO: 4104
  chr11:65419933-65419983
  hypo

SEQ ID NO: 4484 - DNA, 31 bp, Homo sapiens
  chr11:65634005-65634036
  hypo
acccagggcctcctggcgctgtccagagtgg

SEQ ID NO: 4485 - DNA, 39 bp, Homo sapiens; identical to SEQ ID NO: 4113
  chr11:73088103-73088142
  hypo

SEQ ID NO: 4486 - DNA, 58 bp, Homo sapiens
  chr11:91435728-91435786
  hypo
tgtagcactaaatagacggtaaaaaggacactcatgtataatacgagagctgaaatag

SEQ ID NO: 4487 - DNA, 72 bp, Homo sapiens
  chr11:91435842-91435914
  hypo
tttttgccagtctgtgcgtgtctgtgaatgactcgtaagtgccattagtattgattacggtattacaataaa

SEQ ID NO: 4488 - DNA, 24 bp, Homo sapiens
  chr11:134071201-134071225
  hypo
gagccaccacgcctggcccagaat

SEQ ID NO: 4489 - DNA, 36 bp, Homo sapiens
  chr11:134071992-134072028
  hypo
tctccaatgcctggaacgcatcgggaaggaccagat

SEQ ID NO: 4490 - DNA, 43 bp, Homo sapiens
  chr11:134083484-134083527
  hypo
tacaggtgtgagccaccgtgtgtggcctcgtctctcttaaaaa

SEQ ID NO: 4491 - DNA, 31 bp, Homo sapiens
  chr11:134083541-134083572
  hypo
agaaaagccatgaccacgtgacaggcagtct

SEQ ID NO: 4492 - DNA, 31 bp, Homo sapiens
  chr11:134085636-134085667
  hypo
caatccctgtcaaaaccgcagctggcttttt

SEQ ID NO: 4493 - DNA, 31 bp, Homo sapiens
  chr11:134088870-134088901
  hypo
gttaatacatgcaggacgcttagaacaaaac

SEQ ID NO: 4494 - DNA, 74 bp, Homo sapiens
  chr11:134088933-134089007
  hypo
ccactgctgaacctcacgtaaagctacccgtgacctacccttactctaccttaccatcccgttccaccacactt

SEQ ID NO: 4495 - DNA, 31 bp, Homo sapiens
  chr11:134089018-134089049
  hypo
ctcttgacacttcctgcgtgttcccattggg

SEQ ID NO: 4496 - DNA, 25 bp, Homo sapiens
  chr11:134089976-134090001
  hypo
catgcctggtcgcagattttcttaa

SEQ ID NO: 4497 - DNA, 74 bp, Homo sapiens
  chr12:939092-939166
  hypo
cctctgcttctcaccccggtgagtaacgtctgaagcttctgctcgcattgagtctgaatcgttcttttaattta

SEQ ID NO: 4498 - DNA, 37 bp, Homo sapiens
  chr12:939204-939241
  hypo
agaaatatgatgaatccgttgacgtttatgcttttgg

SEQ ID NO: 4499 - DNA, 64 bp, Homo sapiens
  chr12:939266-939330
  hypo
tctgaatatccttactcggagtgccaaaatgctgcacagatctaccgtcgcgtgaccagtgtaa

SEQ ID NO: 4500 - DNA, 37 bp, Homo sapiens
  chr12:9585207-9585244
  hypo
ggacagcaactgtccacgggcccgagagggggttgtg

SEQ ID NO: 4501 - DNA, 109 bp, Homo sapiens
  chr12:9585298-9585407
  hypo
gcctactgtgtctcatcggaacactgtaacgttttacttttgttctccagaaagagcccgtaaaatcatctccaagccaacgattcggaccagacgctcacccagagag

SEQ ID NO: 4502 - DNA, 31 bp, Homo sapiens
  chr12:32490527-32490558
  hypo
ctatccagcaaaaactcgccctgacccagag

SEQ ID NO: 4503 - DNA, 31 bp, Homo sapiens
  chr12:56610572-56610603
  hypo
taaggaagcacacacacggggtccagtagat

SEQ ID NO: 4504 - DNA, 34 bp, Homo sapiens
  chr12:56610629-56610663
  hypo
aaaggacaagagaggccgggcgtggtggctcacg

SEQ ID NO: 4505 - DNA, 30 bp, Homo sapiens
  chr12:56610902-56610932
  hypo
gacacagcaagactccgtcttaaaaaaaaa

SEQ ID NO: 4506 - DNA, 39 bp, Homo sapiens
  chr12:77216171-77216210
  hypo
gtttatattatcagggcgaatcagcgcttgatttggcaa

SEQ ID NO: 4507 - DNA, 31 bp, Homo sapiens
  chr12:108931819-108931850
  hypo
ctcccacaaaaacatccgcaccagaaattac

SEQ ID NO: 4508 - DNA, 31 bp, Homo sapiens
  chr12:120565537-120565568
  hypo
aaatactttctgggaacgccatcttccaagc

SEQ ID NO: 4509 - DNA, 31 bp, Homo sapiens
  chr12:120565716-120565747
  hypo
gaccttcggttaacctcgttcagcacctcca

SEQ ID NO: 4510 - DNA, 31 bp, Homo sapiens
  chr12:120565804-120565835
  hypo
acatagtcagaacatacggctgccacgttct

SEQ ID NO: 4511 - DNA, 31 bp, Homo sapiens; identical to SEQ ID NO: 4120
  chr12:122461112-122461143
  hypo

SEQ ID NO: 4512 - DNA, 31 bp, Homo sapiens
  chr12:123879620-123879651
  hypo
ggagcgccatgaagtccgaggaacagaagat

SEQ ID NO: 4513 - DNA, 31 bp, Homo sapiens
  chr12:124947479-124947510
  hypo
cagcaactggggttgccgcttccatcaatcc

SEQ ID NO: 4514 - DNA, 31 bp, Homo sapiens
  chr12:132205018-132205049
  hypo
aggactcttaagtgttcgtgcctagcaggaa

SEQ ID NO: 4515 - DNA, 31 bp, Homo sapiens
  chr12:132205052-132205083
  hypo
ttttcttggacattttcgtaactggattgca

SEQ ID NO: 4516 - DNA, 39 bp, Homo sapiens
  chr12:132581293-132581332
  hypo
tattccaaatatattccgtgtagggatagatcgtaattt

SEQ ID NO: 4517 - DNA, 31 bp, Homo sapiens
  chr12:132581393-132581424
  hypo
aagcctaggaggaacacgcacttacaagact

SEQ ID NO: 4518 - DNA, 31 bp, Homo sapiens
  chr12:132581459-132581490
  hypo
gtacctaggagtggaacggctggattgtatg

SEQ ID NO: 4519 - DNA, 31 bp, Homo sapiens
  chr12:133256229-133256260
  hypo
tgatttggctataatgcgaagagatcacgct

SEQ ID NO: 4520 - DNA, 31 bp, Homo sapiens
  chr12:133356749-133356780
  hypo
gcatgcacagccccccgcgtgcacacacacc

SEQ ID NO: 4521 - DNA, 31 bp, Homo sapiens
  chr12:133357042-133357073
  hypo
cacccctcttatctgccgaacacaaatggga

SEQ ID NO: 4522 - DNA, 31 bp, Homo sapiens
  chr12:133357095-133357126
  hypo
cttttgcaatgcaacacgacatacaggacac

SEQ ID NO: 4523 - DNA, 31 bp, Homo sapiens
  chr12:133357141-133357172
  hypo
ataaatacacatgcacgcggagctcattggc

SEQ ID NO: 4524 - DNA, 71 bp, Homo sapiens
  chr12:133357192-133357263
  hypo
ctgccatttaatctaacgccaccttctacggaccagagcaggtgctctgcggcctccgtcaccaacaactg

SEQ ID NO: 4525 - DNA, 31 bp, Homo sapiens
  chr13:21563687-21563718
  hypo
gcagaagagaagactgcgtccacatcccgag

SEQ ID NO: 4526 - DNA, 20 bp, Homo sapiens
  chr13:21744612-21744632
  hypo
ctggccggttatatactttc

SEQ ID NO: 4527 - DNA, 31 bp, Homo sapiens
  chr13:24155136-24155167
  hypo
tatttgtttctttggccggagtgtgtcttgc

SEQ ID NO: 4528 - DNA, 45 bp, Homo sapiens
  chr13:73324106-73324151
  hypo
cttattaaaaagaacccgtcacgtaatagccgctcattaaatatt

SEQ ID NO: 4529 - DNA, 37 bp, Homo sapiens
  chr13:73324153-73324190
  hypo
tgtaacaaaaacagaacgaatacgtaggttaagttca

SEQ ID NO: 4530 - DNA, 31 bp, Homo sapiens; identical to SEQ ID NO: 4121
  chr13:74708317-74708348
  hypo

SEQ ID NO: 4531 - DNA, 31 bp, Homo sapiens; identical to SEQ ID NO: 4122
  chr13:74708349-74708380
  hypo

SEQ ID NO: 4532 - DNA, 48 bp, Homo sapiens
  chr14:31456367-31456415
  hypo
gaaagggcaagagtaacgtagaggcatggcagccggaaaaagaaaata

SEQ ID NO: 4533 - DNA, 24 bp, Homo sapiens
  chr14:31456422-31456446
  hypo
caatttaagggccaggcgcagtgg

SEQ ID NO: 4534 - DNA, 31 bp, Homo sapiens
  chr14:35578167-35578198
  hypo
tttgcagagatgggcacgtgagccacagtgc

SEQ ID NO: 4535 - DNA, 31 bp, Homo sapiens
  chr14:35578211-35578242
  hypo
cttttttgtttgctttcgtctgtcttaaggc

SEQ ID NO: 4536 - DNA, 30 bp, Homo sapiens
  chr14:45588021-45588051
  hypo
tgtaatagtggagtcacgttggcacataaa

SEQ ID NO: 4537 - DNA, 29 bp, Homo sapiens
  chr14:45588230-45588259
  hypo
tttttaaaatgttacggcactaagatctt

SEQ ID NO: 4538 - DNA, 18 bp, Homo sapiens
  chr14:53251937-53251955
  hypo
gcccggctattatcaggt

SEQ ID NO: 4539 - DNA, 19 bp, Homo sapiens
  chr14:57073330-57073349
  hypo
tgggtgtagtggttcacgc

SEQ ID NO: 4540 - DNA, 31 bp, Homo sapiens
  chr14:57073695-57073726
  hypo
tttgtgaagtcaatcacgtaagtccttatgt

SEQ ID NO: 4541 - DNA, 15 bp, Homo sapiens
  chr14:57265912-57265927
  hypo
cgtcatttcagtacc

SEQ ID NO: 4542 - DNA, 54 bp, Homo sapiens; identical to SEQ ID NO: 4126
  chr14:57265950-57266004
  hypo

SEQ ID NO: 4543 - DNA, 56 bp, Homo sapiens; identical to SEQ ID NO: 4127
  chr14:57266005-57266061
  hypo

SEQ ID NO: 4544 - DNA, 23 bp, Homo sapiens
  chr14:68166833-68166856
  hypo
agacagagcgagaaaaaaaaaaa

SEQ ID NO: 4545 - DNA, 31 bp, Homo sapiens
  chr14:92554792-92554823
  hypo
tatccctcctctcagccgtgtgatatgtgat

SEQ ID NO: 4546 - DNA, 31 bp, Homo sapiens
  chr14:93763604-93763635
  hypo
tcatgtttaaaaatatcgttaacatttgtgt

SEQ ID NO: 4547 - DNA, 31 bp, Homo sapiens
  chr14:97513199-97513230
  hypo
ataggtatttcacctccgaagaatcccaggc

SEQ ID NO: 4548 - DNA, 20 bp, Homo sapiens
  chr14:100720797-100720817
  hypo
tcttttcttttcttttcgac

SEQ ID NO: 4549 - DNA, 31 bp, Homo sapiens; identical to SEQ ID NO: 4132
  chr14:103430221-103430252
  hypo

SEQ ID NO: 4550 - DNA, 60 bp, Homo sapiens
  chr14:103444035-103444095
  hypo
accctgccaatgctggcggcctattggtcaggggttggcaaactacggcctctgggagaa

SEQ ID NO: 4551 - DNA, 54 bp, Homo sapiens
  chr14:103444114-103444168
  hypo
tgggagaaatcctgcccgaggcctgtttctgcaccatcacgagcatgaatggtt

SEQ ID NO: 4552 - DNA, 31 bp, Homo sapiens
  chr14:103444218-103444249
  hypo
aaacctgaattctttacgacctggatatctg

SEQ ID NO: 4553 - DNA, 15 bp, Homo sapiens
  chr15:31620728-31620743
  hypo
aaaggaatgccctgg

SEQ ID NO: 4554 - DNA, 173 bp, Homo sapiens; identical to SEQ ID NO: 4134
  chr15:31620800-31620973
  hypo

SEQ ID NO: 4555 - DNA, 39 bp, Homo sapiens; identical to SEQ ID NO: 4135
  chr15:60690304-60690343
  hypo

SEQ ID NO: 4556 - DNA, 31 bp, Homo sapiens
  chr15:78450090-78450121
  hypo
tgttgttaatctccaccgattgtcactttaa

SEQ ID NO: 4557 - DNA, 19 bp, Homo sapiens
  chr15:78450289-78450308
  hypo
ccaccgcacctggctggct

SEQ ID NO: 4558 - DNA, 31 bp, Homo sapiens; identical to SEQ ID NO: 4138
  chr15:91414432-91414463
  hypo

SEQ ID NO: 4559 - DNA, 82 bp, Homo sapiens
  chr15:93567907-93567989
  hypo
ttataactggaatgttcggaaaacataaaggacagctcgtaaaggagagagtaagagtcaccaaacacgtggatatttttgg

SEQ ID NO: 4560 - DNA, 138 bp, Homo sapiens
  chr16:736746-736884
  hypo
gttgcggccaagctctcgagccacctttgcgttgtggtcacagagctcggccagtggccggccagccagcgcataacgctcagctgtgtccacaaaccagcgcatgccgccgccacctggctccgtctcaaagacact

SEQ ID NO: 4561 - DNA, 73 bp, Homo sapiens
  chr16:1462653-1462726
  hypo
aaaattaaaataaatacgtaaacatcaagagacgaaacatcccagatatattctacagcgtgaatattctaac

SEQ ID NO: 4562 - DNA, 25 bp, Homo sapiens
  chr16:2310496-2310521
  hypo
aataaaaaaccggcctcctattttg

SEQ ID NO: 4563 - DNA, 31 bp, Homo sapiens
  chr16:2314152-2314183
  hypo
aggctccaggccagcccgccccacctggtac

SEQ ID NO: 4564 - DNA, 62 bp, Homo sapiens
  chr16:2314185-2314247
  hypo
ctgctaccactggaagcgctgcgcctctttcgggttttgtcccggccgcgatccttctcact

SEQ ID NO: 4565 - DNA, 49 bp, Homo sapiens
  chr16:3062886-3062935
  hypo
ctgggccttaaaaccccgcctgcagccgagagcccgcagagtccccagg

SEQ ID NO: 4566 - DNA, 31 bp, Homo sapiens
  chr16:4864722-4864753
  hypo
tgaccaggcctcctggcggcctaccaaggca

SEQ ID NO: 4567 - DNA, 31 bp, Homo sapiens
  chr16:8995325-8995356
  hypo
atttagacagtcaagacggtactgagtgcag

SEQ ID NO: 4568 - DNA, 31 bp, Homo sapiens
  chr16:8996300-8996331
  hypo
ttgcatgggccacaatcgaatttgatcttgt

SEQ ID NO: 4569 - DNA, 31 bp, Homo sapiens
  chr16:8996360-8996391
  hypo
gattaaaataaaaacacgctcatattttagt

SEQ ID NO: 4570 - DNA, 31 bp, Homo sapiens
  chr16:11114091-11114122
  hypo
tggccgccagcacctccgtgcaggagcagaa

SEQ ID NO: 4571 - DNA, 31 bp, Homo sapiens
  chr16:11974693-11974724
  hypo
atgttttctctcattccgtaggttgccaacc

SEQ ID NO: 4572 - DNA, 22 bp, Homo sapiens
  chr16:11974761-11974783
  hypo
tatttgatatttgagacggagt

SEQ ID NO: 4573 - DNA, 36 bp, Homo sapiens
  chr16:20754698-20754734
  hypo
tgtttcatgctgctttcgttgcggccttttatccat

SEQ ID NO: 4574 - DNA, 31 bp, Homo sapiens
  chr16:30941312-30941343
  hypo
tcccctggtgactcctcggggtaggggggtg

SEQ ID NO: 4575 - DNA, 31 bp, Homo sapiens
  chr16:46964712-46964743
  hypo
cctaaaaactttacaacgtttacacagtttt

SEQ ID NO: 4576 - DNA, 45 bp, Homo sapiens
  chr16:47001891-47001936
  hypo
gccgtaagttttaacttataacaatttttacgtggtacagacatt

SEQ ID NO: 4577 - DNA, 102 bp, Homo sapiens
  chr16:58558293-58558395
  hypo
tctgcttgacattattcgtgtttgtgagtctgtcacagtgacacgtttctctaaaggctgccgtccttttattgccgagctcttggacgtgatggtattcaa

SEQ ID NO: 4578 - DNA, 31 bp, Homo sapiens
  chr16:70346138-70346169
  hypo
atgatttggaatgcagcgattcccccccaca

SEQ ID NO: 4579 - DNA, 31 bp, Homo sapiens
  chr16:70811507-70811538
  hypo
caggccaagggggagtcggagcaagtgaaga

SEQ ID NO: 4580 - DNA, 31 bp, Homo sapiens
  chr16:77227370-77227401
  hypo
cccagcccatcaccaccgccccagtcagagg

SEQ ID NO: 4581 - DNA, 31 bp, Homo sapiens
  chr16:77227402-77227433
  hypo
cctgtcaagcacctctcggctctggagtcct

SEQ ID NO: 4582 - DNA, 65 bp, Homo sapiens
  chr16:77227473-77227538
  hypo
gctctggaggccagggcggggaccccagtgatgaggagtggcgcagccagcggaagcatgtgttt

SEQ ID NO: 4583 - DNA, 79 bp, Homo sapiens
  chr16:77227554-77227633
  hypo
gcaagcccatctactcgcggtatggtagtgtggaggcgctgtcggctaccatgggtgtaatgaccgccctggtgtcctt

SEQ ID NO: 4584 - DNA, 42 bp, Homo sapiens
  chr16:77227642-77227684
  hypo
tgcgggagatgccatccgtgccatctacgctggtgagcaaac

SEQ ID NO: 4585 - DNA, 203 bp, Homo sapiens
  chr16:77228258-77228461
  hypo
agggcccactgttgctcgtggccatgtcacggacttctcagtcagcagcccagctgcggggggagctgctagctgtgcacgcacagatcgtgagcacacttacacgtgcaagtgtcgcccgcatcttcgcacacaagcagaactatgacctccgccgcctgctggctggttcagagcgcacactggaccgacttctggacagt

SEQ ID NO: 4586 - DNA, 182 bp, Homo sapiens
  chr16:77228480-77228662
  hypo
ccctgctcctgggtgccgtgcgctgtgtgccccttgcccgcccgctgcgagacgcactaggtgcgctcctccgacgttgcacagcgcctggcctggcgctgtcagtgctggcagtaggcggtcgacttataacagcagcccaggagcgaaatgtgctggccgagtgccggctggacccagct

SEQ ID NO: 4587 - DNA, 31 bp, Homo sapiens
  chr16:77228663-77228694
  hypo
acctgcagttgctgctcgactgggtgggtgc

SEQ ID NO: 4588 - DNA, 31 bp, Homo sapiens
  chr16:77228808-77228839
  hypo
gctgcttggcacccaacgtgaagccttccat

SEQ ID NO: 4589 - DNA, 44 bp, Homo sapiens
  chr16:77229452-77229496
  hypo
cagcagagaggaggagcggcagcggctgtcggacctgtaccacc

SEQ ID NO: 4590 - DNA, 64 bp, Homo sapiens
  chr16:84812704-84812768
  hypo
gtgtgcgcccagtgcccgcttcgtaggacaccacctcacactcacttcccgcctctctttagtg

SEQ ID NO: 4591 - DNA, 31 bp, Homo sapiens
  chr16:87366016-87366047
  hypo
agcacgtgctgtgactcgcaaactggctctg

SEQ ID NO: 4592 - DNA, 31 bp, Homo sapiens
  chr16:87782715-87782746
  hypo
cttcaaacattaacaacggtgtggtgcaacc

SEQ ID NO: 4593 - DNA, 31 bp, Homo sapiens
  chr16:87782782-87782813
  hypo
gctgtctgcctgctctcgttaatccctctcc

SEQ ID NO: 4594 - DNA, 40 bp, Homo sapiens
  chr16:88647116-88647156
  hypo
tgggagccctggggtgcgccgggtccgtgagcagtcagct

SEQ ID NO: 4595 - DNA, 64 bp, Homo sapiens
  chr16:89354319-89354383
  hypo
aaccaggggctctccacggagctctgatgaagacatcagtgagacccgccgcatctccaggcag

SEQ ID NO: 4596 - DNA, 66 bp, Homo sapiens
  chr16:89755907-89755973
  hypo
accatttctgggtaaacgtaagcatccggttgctaatgcccataatccaaacgtgtcactgcagag

SEQ ID NO: 4597 - DNA, 28 bp, Homo sapiens
  chr17:570989-571017
  hypo
tgggccagcaccagtccgtggcctgttg

SEQ ID NO: 4598 - DNA, 60 bp, Homo sapiens
  chr17:662965-663025
  hypo
taagacaatagaagagcgtatcgtcaggcgctgggaatggcaccacgacaaggcattaat

SEQ ID NO: 4599 - DNA, 85 bp, Homo sapiens
  chr17:663047-663132
  hypo
tctcataaaagctacacgattcagaggtaaccctaactatccgcaatcccaaccaaagtcatgttcatgccgctgtcctagtctg

SEQ ID NO: 4600 - DNA, 31 bp, Homo sapiens
  chr17:663159-663190
  hypo
agttatatacagaatgcgcagtcccagcaac

SEQ ID NO: 4601 - DNA, 31 bp, Homo sapiens
  chr17:663192-663223
  hypo
tgtagattacagcaggcgttctctacctgga

SEQ ID NO: 4602 - DNA, 1 bp, Homo sapiens
  chr17:664091-664092
  hypo
t

SEQ ID NO: 4603 - DNA, 18 bp, Homo sapiens
  chr17:664151-664169
  hypo
ccccgtctcatatacata

SEQ ID NO: 4604 - DNA, 31 bp, Homo sapiens
  chr17:1408148-1408179
  hypo
catgaatcctgaggtacgatgggcttgagga

SEQ ID NO: 4605 - DNA, 54 bp, Homo sapiens
  chr17:1940205-1940259
  hypo
gggctgcacatccccccgactgtccaaagaggtggaggccgttgtgtaagttaa

SEQ ID NO: 4606 - DNA, 87 bp, Homo sapiens; identical to SEQ ID NO: 4146
  chr17:4853392-4853479
  hypo

SEQ ID NO: 4607 - DNA, 31 bp, Homo sapiens
  chr17:17104697-17104728
  hypo
caacttcagatgtcatcggagctatctgtat

SEQ ID NO: 4608 - DNA, 31 bp, Homo sapiens
  chr17:20905668-20905699
  hypo
tttgtggaaaaaggagcgggagagggataag

SEQ ID NO: 4609 - DNA, 18 bp, Homo sapiens
  chr17:30529220-30529238
  hypo
acccggctctaagaaggt

SEQ ID NO: 4610 - DNA, 60 bp, Homo sapiens
  chr17:30529310-30529370
  hypo
tttacatttgaaaggacggctaaccccaaagtgtgtgtccctttccgttttatggatcca

SEQ ID NO: 4611 - DNA, 31 bp, Homo sapiens
  chr17:30804492-30804523
  hypo
agtgtgcagaataaatcgctttcatggtttg

SEQ ID NO: 4612 - DNA, 31 bp, Homo sapiens
  chr17:41437690-41437721
  hypo
aatttgttcccttaaccgtaagtatctgaaa

SEQ ID NO: 4613 - DNA, 41 bp, Homo sapiens
  chr17:49281026-49281067
  hypo
ggattacaggtgtgagcggccatgcccggcctttaatttcc

SEQ ID NO: 4614 - DNA, 35 bp, Homo sapiens
  chr17:55917453-55917488
  hypo
aaaaagtctatagggccgggcgtggtggctcacgc

SEQ ID NO: 4615 - DNA, 61 bp, Homo sapiens
  chr17:79653802-79653863
  hypo
ccccaccggccactgacgggcctgtcgaagggctctgctgtcccaccgggttcccctccgg

SEQ ID NO: 4616 - DNA, 31 bp, Homo sapiens
  chr17:80018697-80018728
  hypo
tcaccccctgcaaggccgggctcccaccagc

SEQ ID NO: 4617 - DNA, 95 bp, Homo sapiens
  chr17:80019128-80019223
  hypo
ggggcaggggtgctcccgcacgatgtccagatactcctcggccagctcccacacggcagggctccggccctcgaacagggcggggttgtgcaggt

SEQ ID NO: 4618 - DNA, 66 bp, Homo sapiens
  chr17:80019228-80019294
  hypo
tctgtgggaggaggagcggggaaggacacctcgtgggttgctccaggtggacggcacaggaaagcc

SEQ ID NO: 4619 - DNA, 31 bp, Homo sapiens
  chr17:80019760-80019791
  hypo
acccacacccactcaccgcacagccttgata

SEQ ID NO: 4620 - DNA, 31 bp, Homo sapiens
  chr17:80019861-80019892
  hypo
aggacagagcagtggtcgcttgacccctcca

SEQ ID NO: 4621 - DNA, 31 bp, Homo sapiens
  chr17:80021087-80021118
  hypo
catctggggctgggcccgagcaaggactctg

SEQ ID NO: 4622 - DNA, 39 bp, Homo sapiens
  chr17:80038871-80038910
  hypo
cgcacgcaggtccccacggtgctacgtcaggtgggagtc

SEQ ID NO: 4623 - DNA, 31 bp, Homo sapiens
  chr17:80040621-80040652
  hypo
ggaagtggggagcagccgcagagccccatcc

SEQ ID NO: 4624 - DNA, 31 bp, Homo sapiens
  chr17:80040678-80040709
  hypo
gacagaccccaggcaccgtgacagcccacaa

SEQ ID NO: 4625 - DNA, 31 bp, Homo sapiens
  chr17:80042177-80042208
  hypo
caccagtcccatcacacgcttgccgctggcg

SEQ ID NO: 4626 - DNA, 31 bp, Homo sapiens
  chr17:80042627-80042658
  hypo
ttcgggtgcagtctcccgggaggggcagggc

SEQ ID NO: 4627 - DNA, 62 bp, Homo sapiens
  chr17:80042678-80042740
  hypo
ctccagcaggaagtggcggaaagccccccaggccccgtcgcggtagacgttcatcaccaggt

SEQ ID NO: 4628 - DNA, 31 bp, Homo sapiens
  chr17:80045800-80045831
  hypo
gcagctcccgtgccaccggccctgcttacca

SEQ ID NO: 4629 - DNA, 39 bp, Homo sapiens
  chr17:80046548-80046587
  hypo
gggtcagtgaggggcccgcagccccgctcacccacccca

SEQ ID NO: 4630 - DNA, 60 bp, Homo sapiens
  chr17:80047422-80047482
  hypo
gcgtagaccgtggccgcgtgtccctgccagacttgcaatggcaggcgcaggggacagagg

SEQ ID NO: 4631 - DNA, 31 bp, Homo sapiens
  chr17:80048709-80048740
  hypo
agagccctggggctggcgttgctcacacgct

SEQ ID NO: 4632 - DNA, 31 bp, Homo sapiens
  chr17:80050213-80050244
  hypo
ctggtggggaagcccccgcctccacttggca

SEQ ID NO: 4633 - DNA, 31 bp, Homo sapiens
  chr17:80050505-80050536
  hypo
cctctccaggcatgggcgtaggttaggctca

SEQ ID NO: 4634 - DNA, 31 bp, Homo sapiens
  chr17:80051662-80051693
  hypo
gtcaaggtgccacggccgggccccacagcgc

SEQ ID NO: 4635 - DNA, 31 bp, Homo sapiens; identical to SEQ ID NO: 4153
  chr17:80503277-80503308
  hypo

SEQ ID NO: 4636 - DNA, 31 bp, Homo sapiens; identical to SEQ ID NO: 4154
  chr17:80503315-80503346
  hypo

SEQ ID NO: 4637 - DNA, 54 bp, Homo sapiens; identical to SEQ ID NO: 4156
  chr17:81039184-81039238
  hypo

SEQ ID NO: 4638 - DNA, 31 bp, Homo sapiens
  chr18:9285996-9286027
  hypo
ttgtttcatttctcttcggtacataccatgg

SEQ ID NO: 4639 - DNA, 31 bp, Homo sapiens; identical to SEQ ID NO: 4159
  chr18:12991134-12991165
  hypo

SEQ ID NO: 4640 - DNA, 31 bp, Homo sapiens
  chr18:13033465-13033496
  hypo
gtccattcttggcaccgcgtctacctataat

SEQ ID NO: 4641 - DNA, 51 bp, Homo sapiens
  chr18:13033505-13033556
  hypo
gcatctagcaaagttacgcatgtactatcctgtaaccgagcagttctgctt

SEQ ID NO: 4642 - DNA, 31 bp, Homo sapiens
  chr18:13033628-13033659
  hypo
ttgtctgtgataacaacgttagaagcaatgt

SEQ ID NO: 4643 - DNA, 32 bp, Homo sapiens
  chr18:43767313-43767345
  hypo
ctttttttttttgagacggagtcttgctctgt

SEQ ID NO: 4644 - DNA, 31 bp, Homo sapiens; identical to SEQ ID NO: 4160
  chr18:72921090-72921121
  hypo

SEQ ID NO: 4645 - DNA, 31 bp, Homo sapiens
  chr18:74670146-74670177
  hypo
attaactacagctgatcgcaaacttatttga

SEQ ID NO: 4646 - DNA, 49 bp, Homo sapiens
  chr19:1756823-1756872
  hypo
caggcttgagccaccccgccgggcctccctctgacgtttaaacaccaac

SEQ ID NO: 4647 - DNA, 52 bp, Homo sapiens
  chr19:2796572-2796624
  hypo
cagtctggggagtactcggcatggggagtactgggcacggggagtgctcagt

SEQ ID NO: 4648 - DNA, 91 bp, Homo sapiens
  chr19:2796816-2796907
  hypo
ccacacagacatggggcgcagaggctcggtaacgaggggagcccctccacccactgcccggtgtgcctgatgtgggcgtctcaggggtgac

SEQ ID NO: 4649 - DNA, 49 bp, Homo sapiens
  chr19:2796918-2796967
  hypo
ggtgcagagctgggagcgcagcgctgaagtcaagcgtagtgtgttagca

SEQ ID NO: 4650 - DNA, 101 bp, Homo sapiens
  chr19:3336854-3336955
  hypo
ctgccacccgcccccacggctgcctgggaaacgccacggcctaatcctggctcaagaggacacgttgtaccagagattatataaaccgacctctccctttg

SEQ ID NO: 4651 - DNA, 62 bp, Homo sapiens
  chr19:4429585-4429647
  hypo
ccctgggcccaggacacggtgagctagccccagagtgcctccgtccccgtacctcctcactg

SEQ ID NO: 4652 - DNA, 93 bp, Homo sapiens; identical to SEQ ID NO: 4164
  chr19:10197445-10197538
  hypo

SEQ ID NO: 4653 - DNA, 31 bp, Homo sapiens
  chr19:10265327-10265358
  hypo
tgctcatcactgtccccggcctcgtcataac

SEQ ID NO: 4654 - DNA, 31 bp, Homo sapiens; identical to SEQ ID NO: 4166
  chr19:12900298-12900329
  hypo

SEQ ID NO: 4655 - DNA, 77 bp, Homo sapiens; identical to SEQ ID NO: 4167
  chr19:12900388-12900465
  hypo

SEQ ID NO: 4656 - DNA, 45 bp, Homo sapiens; identical to SEQ ID NO: 4168
  chr19:12900468-12900513
  hypo

SEQ ID NO: 4657 - DNA, 93 bp, Homo sapiens; identical to SEQ ID NO: 4169
  chr19:12900555-12900648
  hypo

SEQ ID NO: 4658 - DNA, 91 bp, Homo sapiens; identical to SEQ ID NO: 4170
  chr19:12900661-12900752
  hypo

SEQ ID NO: 4659 - DNA, 31 bp, Homo sapiens
  chr19:19121157-19121188
  hypo
aacaaaacaagcataacgggacatttatgaa

SEQ ID NO: 4660 - DNA, 31 bp, Homo sapiens
  chr19:47111850-47111881
  hypo
cagccctctccaggggcggctctgagactga

SEQ ID NO: 4661 - DNA, 44 bp, Homo sapiens; identical to SEQ ID NO: 4173
  chr19:47731297-47731341
  hypo

SEQ ID NO: 4662 - DNA, 31 bp, Homo sapiens; identical to SEQ ID NO: 4174
  chr19:47731361-47731392
  hypo

SEQ ID NO: 4663 - DNA, 18 bp, Homo sapiens
  chr19:47868800-47868818
  hypo
gcccggcctataaaggtt

SEQ ID NO: 4664 - DNA, 31 bp, Homo sapiens
  chr19:47868831-47868862
  hypo
tgggtgaactcatagacggcatcaaggcttg

SEQ ID NO: 4665 - DNA, 52 bp, Homo sapiens
  chr19:47868886-47868938
  hypo
gctgcttgcaggtggacgccagaacttctagtgccctcggatcaaagccagg

SEQ ID NO: 4666 - DNA, 106 bp, Homo sapiens
  chr19:51302698-51302804
  hypo
gggcccctcagacccccgggtgtcaaaggtcccggggggcaccgtgtcctcagtggcagtcggagcccagtgctggacatcatggaggccccggtgccctcacccc

SEQ ID NO: 4667 - DNA, 31 bp, Homo sapiens
  chr19:51303005-51303036
  hypo
gtgtttctctggaaaacgggactagagatgc

SEQ ID NO: 4668 - DNA, 31 bp, Homo sapiens
  chr19:51303057-51303088
  hypo
gggttcagtgagaggacggggccaaaccctt

SEQ ID NO: 4669 - DNA, 62 bp, Homo sapiens
  chr19:51303095-51303157
  hypo
ggcctcccatgcctaacgggatacccctcaatcgcctctgctgcccccggcccagctcttct

SEQ ID NO: 4670 - DNA, 100 bp, Homo sapiens
  chr19:51303431-51303531
  hypo
gtgtccaagagccacccgtggccagtggctgccagactggacaaggcgaggaacatttctatctggacagtcgtaaggaaggcgccggcccagaatccac

SEQ ID NO: 4671 - DNA, 26 bp, Homo sapiens
  chr19:52431824-52431850
  hypo
ggtaaggtggcctggcgcggtggctc

SEQ ID NO: 4672 - DNA, 31 bp, Homo sapiens
  chr19:57229771-57229802
  hypo
gcccagccattgaccacgacctgtccatggt

SEQ ID NO: 4673 - DNA, 34 bp, Homo sapiens
  chr20:25284745-25284779
  hypo
catgggctgccaggaccggcggagcctgggctct

SEQ ID NO: 4674 - DNA, 31 bp, Homo sapiens
  chr20:37114355-37114386
  hypo
cagagttgagttttatcgcttgttttgttag

SEQ ID NO: 4675 - DNA, 22 bp, Homo sapiens
  chr20:39893818-39893840
  hypo
atcactgaagtcattacgataa

SEQ ID NO: 4676 - DNA, 31 bp, Homo sapiens
  chr20:47688820-47688851
  hypo
aggatgaagaggaagccggcttattggagct

SEQ ID NO: 4677 - DNA, 80 bp, Homo sapiens
  chr20:47688862-47688942
  hypo
agatttgtgataatgccgcactctatgcacaaaagtacgatgaagaattccagcgatacctgcctcgttttgttacagcc

SEQ ID NO: 4678 - DNA, 31 bp, Homo sapiens
  chr20:47688948-47688979
  hypo
aatttactagttacaacgggtcaagaggtta

SEQ ID NO: 4679 - DNA, 31 bp, Homo sapiens
  chr20:54974275-54974306
  hypo
ttgagaaagcacatgacggtgctgaagtttg

SEQ ID NO: 4680 - DNA, 31 bp, Homo sapiens; identical to SEQ ID NO: 4191
  chr20:58323973-58324004
  hypo

SEQ ID NO: 4681 - DNA, 46 bp, Homo sapiens
  chr20:62550814-62550860
  hypo
ccagggcccgggacagcgccacggaagaggacgcacccggctgtgt

SEQ ID NO: 4682 - DNA, 87 bp, Homo sapiens
  chr20:62551030-62551117
  hypo
acatgtgcccagggcccgggacagcgccacggaagaggacgcacaggacagcgccacggaagaggacgcacccggctgtgtgcacat

SEQ ID NO: 4683 - DNA, 47 bp, Homo sapiens
  chr20:62551126-62551173
  hypo
gcccgggacagcgccacggaagaggacgcacccggctgtgtgcacat

SEQ ID NO: 4684 - DNA, 92 bp, Homo sapiens
  chr20:62551401-62551493
  hypo
ccagggcccgggacagcgccacggaagaggacgcacccggctgtgtggacatgtgcccagggcccgggacagcgccacggaagaggacgcac

SEQ ID NO: 4685 - DNA, 31 bp, Homo sapiens
  chr20:62551499-62551530
  hypo
gcgccacggaagaggacgcacccggctgtgt

SEQ ID NO: 4686 - DNA, 58 bp, Homo sapiens
  chr21:30357056-30357114
  hypo
tgcttggaggaaaagccgcttcaaatgcatcttttgctgcaaacgcagctggtgtgta

SEQ ID NO: 4687 - DNA, 40 bp, Homo sapiens
  chr21:30357207-30357247
  hypo
ttgttgtgtggcttctcggacgcgacggtcatgatcctat

SEQ ID NO: 4688 - DNA, 36 bp, Homo sapiens
  chr22:18074667-18074703
  hypo
tcaataaagttgtgcacgtcacgctgaagagccatg

SEQ ID NO: 4689 - DNA, 31 bp, Homo sapiens
  chr22:29758227-29758258
  hypo
agaaatccaatctgcacgtgtgttttacttg

SEQ ID NO: 4690 - DNA, 31 bp, Homo sapiens
  chr22:32804845-32804876
  hypo
atgtctgagtacatgcgcggcaagtgtaggc

SEQ ID NO: 4691 - DNA, 31 bp, Homo sapiens
  chr22:32804921-32804952
  hypo
ttaccaaacactttcacgttaccttaagcac

SEQ ID NO: 4692 - DNA, 45 bp, Homo sapiens
  chr22:32804961-32805006
  hypo
ttcctatcaaagactacgagctgctcccatcggaaaatatacctt

SEQ ID NO: 4693 - DNA, 31 bp, Homo sapiens
  chr22:40655975-40656006
  hypo
ttctggcagcatgcagcgagggaggtacaga

SEQ ID NO: 4694 - DNA, 31 bp, Homo sapiens
  chr22:45591072-45591103
  hypo
gtgctggccaagcctccgagcttggccaaat

SEQ ID NO: 4695 - DNA, 62 bp, Homo sapiens
  chr22:45591115-45591177
  hypo
ggagacaaccttctcccgcccctcacctctgagaacagagggcgggccgctgtgctcctcac

SEQ ID NO: 4696 - DNA, 35 bp, Homo sapiens
  chr22:45591185-45591220
  hypo
ctgcctcatcttcccacggacgagctgtcagggct

SEQ ID NO: 4697 - DNA, 23 bp, Homo sapiens
  chr22:47465576-47465599
  hypo
tgttgtttggttggagcggggct

SEQ ID NO: 4698 - DNA, 31 bp, Homo sapiens
  chr22:47465861-47465892
  hypo
ccctgtttggttggagcggagctgacctgac

SEQ ID NO: 4699 - DNA, 56 bp, Homo sapiens
  chr22:47465958-47466014
  hypo
tgttgtttggttggacgctgtcccctgttgtttggttggagcggagctgacttgat

SEQ ID NO: 4700 - DNA, 11 bp, Homo sapiens
  chr22:47466258-47466269
  hypo
cctggctgttc

SEQ ID NO: 4701 - DNA, 31 bp, Homo sapiens
  chr22:47466271-47466302
  hypo
tgttgtttggttggagcggagctgacctgac

SEQ ID NO: 4702 - DNA, 31 bp, Homo sapiens
  chr22:50191340-50191371
  hypo
gcatgctagtggctcccggaccatgctgata

SEQ ID NO: 4703 - DNA, 31 bp, Homo sapiens
  chr22:50192157-50192188
  hypo
tccacagtcacacatgcggcaggacagacga

SEQ ID NO: 4704 - DNA, 41 bp, Homo sapiens
  chr22:50853284-50853325
  hypo
accttttccactgtcccgacttaactcgctcagaagcacag

SEQ ID NO: 4705 - DNA, 31 bp, Homo sapiens
  chr22:50853330-50853361
  hypo
agaggtcccttctccccgcagtctccagcct

SEQ ID NO: 4706 - DNA, 40 bp, Homo sapiens
  chrY:5572739-5572779
  hypo
gattacaggcgtgagccaccgcgcccggccaaatagtgct

SEQ ID NO: 4707 - DNA, 31 bp, Homo sapiens
  chrY:7149235-7149266
  hypo
gatgccaagtactggacgggtacaatatgta

SEQ ID NO: 4708 - DNA, 31 bp, Homo sapiens
  chrY:14374844-14374875
  hypo
aggaaaaggtgggaggcgggggaagcagaga

SEQ ID NO: 4709 - DNA, 31 bp, Homo sapiens
  chrY:14777172-14777203
  hypo
tgtatttgagaatctacgtaataaagaagtg

SEQ ID NO: 4710 - DNA, 19 bp, Homo sapiens
  AC208171.3_11673-19430:7279-7298
  hypo
gcctcgagtaaataatttt

SEQ ID NO: 4711 - DNA, 108 bp, Homo sapiens
  chr1:1072535-1072643
  hyper
ccccctgccccctctgcggtgcgttgggagctcccgtcctcctgcgcacactcagggaaagaccggaggaaccgtggcgggggtcgaggccggcgtggggtgggggcg

SEQ ID NO: 4712 - DNA, 38 bp, Homo sapiens
  chr1:1072654-1072692
  hyper
ggcggggcccagagcccgggacacgcgacgaggggccg

SEQ ID NO: 4713 - DNA, 72 bp, Homo sapiens
  chr1:6321177-6321249
  hyper
gggcgcatgtctccgccggggcctccgcaccgcccctcggcccgccccgcccccgcccgctcagaggcgcgg

SEQ ID NO: 4714 - DNA, 31 bp, Homo sapiens
  chr1:36883607-36883638
  hyper
ataaataagaaatagacgtaatggcttcact

SEQ ID NO: 4715 - DNA, 44 bp, Homo sapiens
  chr1:59369442-59369486
  hyper
ccgctcgccacgtcagcgcacgcccgccccggcgctccgcccgg

SEQ ID NO: 4716 - DNA, 31 bp, Homo sapiens
  chr1:180606644-180606675
  hyper
gacttgacaagaagttcgccaaaaatttaaa

SEQ ID NO: 4717 - DNA, 106 bp, Homo sapiens
  chr2:128459398-128459504
  hyper
ggtgttgctgctgcgcgcgcgcaagttcgcgctgctctggtcactgggctcggcgctggcgttggcgggaagcgcgctgctgcggggcggcgcggcgtgcggacgc

SEQ ID NO: 4718 - DNA, 25 bp, Homo sapiens
  chr5:6765598-6765623
  hyper
cccaaagtgccgtgtgccaccatac

SEQ ID NO: 4719 - DNA, 31 bp, Homo sapiens
  chr5:66299575-66299606
  hyper
ccctttcaaggtctaacgtacttgaaggggc

SEQ ID NO: 4720 - DNA, 31 bp, Homo sapiens
  chr5:66299639-66299670
  hyper
tagtgtctttccacatcggggctcaccatta

SEQ ID NO: 4721 - DNA, 58 bp, Homo sapiens
  chr5:66299671-66299729
  hyper
ctagatctgtagttgccggccatgaagccaaacaggtgtgcaccgtggtcattgatgg

SEQ ID NO: 4722 - DNA, 53 bp, Homo sapiens
  chr5:66299752-66299805
  hyper
agtttactgaggttttcggtgagtgtggcttcccgtccgcgtgcttttcctat

SEQ ID NO: 4723 - DNA, 140 bp, Homo sapiens
  chr5:66299956-66300096
  hyper
gatccattccgggctccggggagggggagcggcggcccaggctgcggggctgtcccggcaccggctggggtcgcgccgcggccgcctgctccctttcccgtgagcccccgctcctcaggcgcggccggggctggtggggg

SEQ ID NO: 4724 - DNA, 31 bp, Homo sapiens
  chr5:66300106-66300137
  hyper
caggaaagctgggggcgcggccaccaagctg

SEQ ID NO: 4725 - DNA, 45 bp, Homo sapiens
  chr5:66300140-66300185
  hyper
agggacaaggccctgccgcctcctcccagccggaccctggaaggg

SEQ ID NO: 4726 - DNA, 31 bp, Homo sapiens
  chr5:66300233-66300264
  hyper
agtgcttttaagtttccgcttttttcaggag

SEQ ID NO: 4727 - DNA, 47 bp, Homo sapiens
  chr5:66300314-66300361
  hyper
ataccaaaaggaaactcggcactgggcatgttcggatgtgaatggtt

SEQ ID NO: 4728 - DNA, 31 bp, Homo sapiens
  chr5:134463604-134463635
  hyper
tttctgaatggcttttcgggccagcctgtga

SEQ ID NO: 4729 - DNA, 122 bp, Homo sapiens
  chr5:134463695-134463817
  hyper
caacagaggccattcccgggaccacaggcagctggctgcaggcattgcgcaggcgccgtgcctgctgggagtgtcttttcggacacagagcatgggcttcgtgggtgcgcttccagggctgg

SEQ ID NO: 4730 - DNA, 46 bp, Homo sapiens
  chr6:114662112-114662158
  hyper
cccacccacccactttcgcccccacccaacccgaccctgcatgcta

SEQ ID NO: 4731 - DNA, 31 bp, Homo sapiens
  chr6:114662201-114662232
  hyper
ctattaaatgtatccacgaagtaatatgaca

SEQ ID NO: 4732 - DNA, 37 bp, Homo sapiens
  chr6:114662275-114662312
  hyper
agaagaaactggtattcgtattcggagacagagagga

SEQ ID NO: 4733 - DNA, 45 bp, Homo sapiens
  chr6:135503607-135503652
  hyper
cggcagcacccaaggccgctgccgcgcaaccgggacgcgatcccc

SEQ ID NO: 4734 - DNA, 39 bp, Homo sapiens
  chr6:135503993-135504032
  hyper
ggttgggctctggggacgagagggcgacttgggggagct

SEQ ID NO: 4735 - DNA, 31 bp, Homo sapiens
  chr6:139350568-139350599
  hyper
ggcgcttcggggcgcccgggccacgggggag

SEQ ID NO: 4736 - DNA, 31 bp, Homo sapiens
  chr7:63040542-63040573
  hyper
gcagctggcctcacatcgataatctaggagg

SEQ ID NO: 4737 - DNA, 31 bp, Homo sapiens
  chr8:107669365-107669396
  hyper
ccctgaaaggtagatccgcaaactaaatccc

SEQ ID NO: 4738 - DNA, 31 bp, Homo sapiens
  chr8:107669656-107669687
  hyper
acccctcctaggctcccgaactccatgcaac

SEQ ID NO: 4739 - DNA, 31 bp, Homo sapiens
  chr8:107671066-107671097
  hyper
aaacagtcatttgtagcgacatgatattgat

SEQ ID NO: 4740 - DNA, 23 bp, Homo sapiens
  chr9:174124-174147
  hyper
caacacagcgagactccatctca

SEQ ID NO: 4741 - DNA, 31 bp, Homo sapiens
  chr9:114937351-114937382
  hyper
gtcctcgaggcccagccgggggccccgccgg

SEQ ID NO: 4742 - DNA, 31 bp, Homo sapiens
  chr10:16870062-16870093
  hyper
agataaaatagagccacgtgtccaaattttc

SEQ ID NO: 4743 - DNA, 31 bp, Homo sapiens
  chr10:16870134-16870165
  hyper
ctaggcagtgcactgacgtcacagagggagc

SEQ ID NO: 4744 - DNA, 74 bp, Homo sapiens
  chr10:16870167-16870241
  hyper
ttttttaaaaaaacagcgtgctgtgactcctccctgggaaatcccgattcagtgggtttcggtgggaactggaa

SEQ ID NO: 4745 - DNA, 31 bp, Homo sapiens
  chr10:54072981-54073012
  hyper
cctagaaagggtattgcgtggtcccgtgcaa

SEQ ID NO: 4746 - DNA, 31 bp, Homo sapiens
  chr12:101762739-101762770
  hyper
ctgaactagctgatcccggtgctttcaaagg

SEQ ID NO: 4747 - DNA, 39 bp, Homo sapiens
  chr13:113622875-113622914
  hyper
catccccggccagccacggacccacgcatggacccagcg

SEQ ID NO: 4748 - DNA, 70 bp, Homo sapiens
  chr13:113623472-113623542
  hyper
ccgccgagccgccccccgccccccgcggcgcagcgcgcgcccccctcccggtggcgcggaaccaatcctg

SEQ ID NO: 4749 - DNA, 72 bp, Homo sapiens
  chr14:73393456-73393528
  hyper
cgtggggccctccggccggatcagtgctgcaaccgtaaacacgcagggagggcaccccgagtgtcgccgctg

SEQ ID NO: 4750 - DNA, 37 bp, Homo sapiens
  chr15:42263897-42263934
  hyper
cggtgcatgaactgaacgtaggcggcctctttatccc

SEQ ID NO: 4751 - DNA, 31 bp, Homo sapiens
  chr15:45459389-45459420
  hyper
aaggaacttgatgcttcgaaagtgcttttca

SEQ ID NO: 4752 - DNA, 58 bp, Homo sapiens
  chr16:68298828-68298886
  hyper
gcgagggtgaccgggacgctgagtgcgcgggccgcgccgcgagcgtgagactgtgcga

SEQ ID NO: 4753 - DNA, 35 bp, Homo sapiens
  chr16:69373089-69373124
  hyper
ctggaagctgggcaaacggtcgagcaggcggccga

SEQ ID NO: 4754 - DNA, 42 bp, Homo sapiens
  chr16:74659503-74659545
  hyper
cagctgtcttatagaacgcccacaacccggacttgtgtatat

SEQ ID NO: 4755 - DNA, 31 bp, Homo sapiens; identical to SEQ ID NO: 603
  chr16:74659594-74659625
  hyper

SEQ ID NO: 4756 - DNA, 103 bp, Homo sapiens
  chr17:18907822-18907925
  hyper
cggcacagaggcgccccgcaaaccgagggcttccgggtaagggaggggtcttaaaatttccgggtgccggcaacccaggaggcctgcccggaggaggctgggg

SEQ ID NO: 4757 - DNA, 317 bp, Homo sapiens
  chr17:18907939-18908256
  hyper
caggagacccagaaacgcggttgcggggcggcgacgccccgcgagacccgggatccggggggcgcggccgggacttgcttaccgagcgggcgctggcggagcggggcgcacacgcggcggctgcggcggcggcgcgaggctgggcgggggcgcgccggtgactcagggccgccccgcttaccccgccgccgccacctgcggtcacgtgccgcccggggcggggccggaagctgattcacccctcgacagacagacagacctggggcggacgcactgcccacggtcccctggtgcccgaattccgaaaatatcagagg

SEQ ID NO: 4758 - DNA, 31 bp, Homo sapiens
  chr17:18908307-18908338
  hyper
ccctgaggtcacacagcgggtcaacagcctt

SEQ ID NO: 4759 - DNA, 31 bp, Homo sapiens
  chr17:26925693-26925724
  hyper
ctgggttctgccagcccgcccctcctccctc

SEQ ID NO: 4760 - DNA, 245 bp, Homo sapiens
  chr17:26925726-26925971
  hyper
taagaagcccaaaatgcgattagaagagtacgctcgcaccctagtcgcgcaggagcagcaaggcgaacaaagactccacaagcccccaaccccgggctcgacccaactttccaggacagtagacacggccggtgcccccgcgacagcagcccggcccagttctctccgccagagatctcccgcttaccgtctggggcgaaggcgacaggctgaggctcagttttttcactcgccacatcttcaac

SEQ ID NO: 4761 - DNA, 52 bp, Homo sapiens
  chr17:26925973-26926025
  hyper
gaaggcaggcctatcacgtctcagaccaagtcgaggacgccatgttcacccg

SEQ ID NO: 4762 - DNA, 128 bp, Homo sapiens
  chr17:26926083-26926211
  hyper
cgctcgggggtagagcccggggggcggggcccgcgttgaccacgcccccggccctgcctgcccctccgttgtcgagcgttttccgctgacggagccctcacctcagacaccggcggtagggctggatg

SEQ ID NO: 4763 - DNA, 42 bp, Homo sapiens
  chr17:26926383-26926425
  hyper
ctcagtcctctccagccgcagccttgacgggaaagagccggc

SEQ ID NO: 4764 - DNA, 31 bp, Homo sapiens
  chr17:40830981-40831012
  hyper
aaacgcccaccaaaaacgggaatcccctgcc

SEQ ID NO: 4765 - DNA, 353 bp, Homo sapiens
  chr17:54910846-54911199
  hyper
aaaccgcggccgggctcggggtcagcggcgacgagcgggcggctgccccgctcgccctcggcctccgcgcccgcccgccgctccgcagcggaggagccctcaggtttgcgttactgcggccgccacacctacctcagcccgccgcggccaggtcgggcggtgccgcgcaggccgcctccccccctcgcttcccagtcggcttacgcatccccggcggcggcggcgccggcatcggctagaggttcggctcaagtcgggggcactcgtgtctgcgccgagcggcgggcgtgagcgcggcccctgggccccgcgcggcgcggtgctgcgaggaggatcctcgtggccttgccccg

SEQ ID NO: 4766 - DNA, 31 bp, Homo sapiens
  chr19:5608065-5608096
  hyper
cctgagctatgccatccgccctggaggctct

SEQ ID NO: 4767 - DNA, 31 bp, Homo sapiens
  chr19:54206967-54206998
  hyper
atttagtgtaatcaatcgaaatcatttcctt

SEQ ID NO: 4768 - DNA, 31 bp, Homo sapiens
  chr20:10491693-10491724
  hyper
aacctggctttggtgccgtgttcttgtccct

SEQ ID NO: 4769 - DNA, 98 bp, Homo sapiens
  chr20:55966871-55966969
  hyper
ttcgtaagtggcccccgcgcccgggcccgcaccccgccgcacaccttatcgcggcccgggcgccgagtccactccggggcacacgcccagacggcccg

SEQ ID NO: 4770 - DNA, 17 bp, Homo sapiens
  chr22:35697198-35697215
  hyper
gacgcagggagagccca

SEQ ID NO: 4771 - DNA, 98 bp, Homo sapiens
  chr22:50970391-50970489
  hyper
ttctaccggtgttgggcggcagcttgtatttgggcccggggcctccgtagtgcgccgcgatggggccgcggggccggtgtggccgccaaaggcccacc

SEQ ID NO: 4772 - DNA, 134 bp, Homo sapiens
  chr1:2025877-2026011
  hypo
aggcacccgctgtgcccggctcgttgaaccttgggcgctgcccgttctgaggcgccctctgtgcccggctcgttgaaccttgggcgctgcccgttctgaggcgccctctgtgcccggctcgatgaaccttgggc

SEQ ID NO: 4773 - DNA, 66 bp, Homo sapiens
  chr1:2026092-2026158
  hypo
ctcgttgaaccttgggcgctgcccgttctgaggcgcccgctgtgcccggctcgttgaaccttgggc

SEQ ID NO: 4774 - DNA, 135 bp, Homo sapiens
  chr1:2450620-2450755
  hypo
ggtcacggggtggccccggataaagaagcctccaaagtacacgcggtccaggctgtgcagccgtgcgtggaggcaggccagctgcccaatgtcgttgctgatcatgtgcagcaggctcttcgccatgtcttcttt

SEQ ID NO: 4775 - DNA, 46 bp, Homo sapiens
  chr1:3746111-3746157
  hypo
acccactgtgtcctcacggctatcgttattccgtttgcagcctggg

SEQ ID NO: 4776 - DNA, 72 bp, Homo sapiens; identical to SEQ ID NO: 4713
  chr1:6321177-6321249
  hypo

SEQ ID NO: 4777 - DNA, 135 bp, Homo sapiens
  chr1:6738111-6738246
  hypo
gcacccttgaagaaatcgtctcccatcaaccccctgctccgcttgctcccgccccacacctgggttaaaaattactggttcggtccatccctcttccgttttacttgacaggttagggaacgaaggacaagtcag

SEQ ID NO: 4778 - DNA, 19 bp, Homo sapiens
  chr1:19949422-19949441
  hypo
ttttttttttttgaaacgg

SEQ ID NO: 4779 - DNA, 31 bp, Homo sapiens
  chr1:19950670-19950701
  hypo
accatgttggccaggccgtggttctgctttt

SEQ ID NO: 4780 - DNA, 51 bp, Homo sapiens
  chr1:20060817-20060868
  hypo
tctgccgagttgctgccgtgtgagtgtgtgcagatgcgtgtatgaatgtgt

SEQ ID NO: 4781 - DNA, 31 bp, Homo sapiens
  chr1:20060881-20060912
  hypo
tgagtgtgcatatgtgcgcatgtgtgtgaac

SEQ ID NO: 4782 - DNA, 31 bp, Homo sapiens
  chr1:20060922-20060953
  hypo
ccagcaccagtgcccccgggtcctccttggc

SEQ ID NO: 4783 - DNA, 31 bp, Homo sapiens
  chr1:20060994-20061025
  hypo
ctcaatctttccccagcgttgaaccagttgt

SEQ ID NO: 4784 - DNA, 56 bp, Homo sapiens
  chr1:20977498-20977554
  hypo
acctttgcccctaacacgaggaactcgtttgaagggggcagcgtagcatgtctgat

SEQ ID NO: 4785 - DNA, 46 bp, Homo sapiens
  chr1:20983633-20983679
  hypo
ccaggtgcaaagtccccgaggggggtgggcacggtcaccagcaagg

SEQ ID NO: 4786 - DNA, 55 bp, Homo sapiens
  chr1:20983715-20983770
  hypo
cagcaggaggtaaggccgggtgaagtgagggcccaggctgcgcagggctctgcac

SEQ ID NO: 4787 - DNA, 31 bp, Homo sapiens; identical to SEQ ID NO: 4714
  chr1:36883607-36883638
  hypo

SEQ ID NO: 4788 - DNA, 72 bp, Homo sapiens
  chr1:43310137-43310209
  hypo
tattggggcaggggggcggtggttattataaggaattggctcacgtgattatggaggcggttaaatcccaag

SEQ ID NO: 4789 - DNA, 31 bp, Homo sapiens
  chr1:43310270-43310301
  hypo
atggcagcaggcttgacgccaaggaagagat

SEQ ID NO: 4790 - DNA, 31 bp, Homo sapiens
  chr1:43310302-43310333
  hypo
atgtttaattcaagtccgaaggcaaggaaaa

SEQ ID NO: 4791 - DNA, 31 bp, Homo sapiens
  chr1:55573225-55573256
  hypo
tatcattaaggccaggcgagctggctcacat

SEQ ID NO: 4792 - DNA, 44 bp, Homo sapiens; identical to SEQ ID NO: 4715
  chr1:59369442-59369486
  hypo

SEQ ID NO: 4793 - DNA, 34 bp, Homo sapiens
  chr1:110947364-110947398
  hypo
tataaccttaaaatatcgtgattaggccgggtgt

SEQ ID NO: 4794 - DNA, 31 bp, Homo sapiens
  chr1:110947713-110947744
  hypo
aaaaatcctagcttaacgacttactagctgc

SEQ ID NO: 4795 - DNA, 23 bp, Homo sapiens
  chr1:110947795-110947818
  hypo
ttttgagacagagtctcgctctt

SEQ ID NO: 4796 - DNA, 31 bp, Homo sapiens
  chr1:117715857-117715888
  hypo
cagaaggaataaattccggacacaattgcag

SEQ ID NO: 4797 - DNA, 31 bp, Homo sapiens
  chr1:175957579-175957610
  hypo
ttaaaatttcttggcacgaaactcatcacta

SEQ ID NO: 4798 - DNA, 18 bp, Homo sapiens
  chr1:180265586-180265604
  hypo
cagagtttcactctgtcg

SEQ ID NO: 4799 - DNA, 31 bp, Homo sapiens; identical to SEQ ID NO: 4716
  chr1:180606644-180606675
  hypo

SEQ ID NO: 4800 - DNA, 65 bp, Homo sapiens
  chr1:224345146-224345211
  hypo
aaacaaatggtgctggcgtgactgttctcaggcgtgaaatttctgagcttcgcaccaaagtgcaa

SEQ ID NO: 4801 - DNA, 58 bp, Homo sapiens
  chr1:224345270-224345328
  hypo
aggtgaacaaaatgcacggttggcagagctagaacgcaaactacgagaagtaatggaa

SEQ ID NO: 4802 - DNA, 31 bp, Homo sapiens
  chr1:224345338-224345369
  hypo
gaaattcctcagggtccgggcagaatgagga

SEQ ID NO: 4803 - DNA, 31 bp, Homo sapiens
  chr1:235317094-235317125
  hypo
aatatgagcaggataccgagctaaggattgc

SEQ ID NO: 4804 - DNA, 41 bp, Homo sapiens
  chr1:235317165-235317206
  hypo
gttttgcttcagtgatcgtcacacaacggaagaaactcagg

SEQ ID NO: 4805 - DNA, 31 bp, Homo sapiens
  chr1:247348620-247348651
  hypo
gaaggtctgaggggcacgggatacaagggta

SEQ ID NO: 4806 - DNA, 82 bp, Homo sapiens
  chr1:247348721-247348803
  hypo
ctcagaggctggggctcggaggcggggcaggggtcaggcgtcaggccttagtgccttctgctggggtcggcgggtgttttct

SEQ ID NO: 4807 - DNA, 31 bp, Homo sapiens
  chr2:3418814-3418845
  hypo
ccaggagtcctggaaccggtccccggcagat

SEQ ID NO: 4808 - DNA, 61 bp, Homo sapiens
  chr2:10334909-10334970
  hypo
gtccttccctcccctgcgtcctcatctgtcactccttggtcacagccgccccctgactttc

SEQ ID NO: 4809 - DNA, 31 bp, Homo sapiens
  chr2:10528985-10529016
  hypo
gctgagaccctcactccgagtaggatgttat

SEQ ID NO: 4810 - DNA, 31 bp, Homo sapiens
  chr2:20247560-20247591
  hypo
ataaatgggaggttttcgtactacttcacta

SEQ ID NO: 4811 - DNA, 31 bp, Homo sapiens
  chr2:38585485-38585516
  hypo
caaagttcaaaaaagtcgaggtacataaaac

SEQ ID NO: 4812 - DNA, 28 bp, Homo sapiens
  chr2:62107144-62107172
  hypo
gagccaccacgcccggcctctaccactc

SEQ ID NO: 4813 - DNA, 31 bp, Homo sapiens
  chr2:62679583-62679614
  hypo
ttggtcttgtgtgactcgtaactagaacgta

SEQ ID NO: 4814 - DNA, 31 bp, Homo sapiens
  chr2:70020009-70020040
  hypo
ggggcttggttgcttccgtatgttcccaggt

SEQ ID NO: 4815 - DNA, 31 bp, Homo sapiens
  chr2:85292073-85292104
  hypo
aagtggccctgtgcatcgctgccgtgagtgg

SEQ ID NO: 4816 - DNA, 31 bp, Homo sapiens
  chr2:85871980-85872011
  hypo
gaacaattttgtggtccgtttgtgtaggaca

SEQ ID NO: 4817 - DNA, 31 bp, Homo sapiens
  chr2:85872030-85872061
  hypo
ctttgtctgattattccggctttattttaac

SEQ ID NO: 4818 - DNA, 31 bp, Homo sapiens
  chr2:85878687-85878718
  hypo
cctatcaaacattgtgcgtgcgtgcgtgcgt

SEQ ID NO: 4819 - DNA, 31 bp, Homo sapiens
  chr2:113975770-113975801
  hypo
atccccccaagttcctcggctattgcttctt

SEQ ID NO: 4820 - DNA, 106 bp, Homo sapiens; identical to SEQ ID NO: 4717
  chr2:128459398-128459504
  hypo

SEQ ID NO: 4821 - DNA, 31 bp, Homo sapiens
  chr2:128472924-128472955
  hypo
tgggattacaggcatgcgccactgcacctgg

SEQ ID NO: 4822 - DNA, 31 bp, Homo sapiens
  chr2:166790774-166790805
  hypo
ttatgacagtcaagagcgaaaaaaagagcca

SEQ ID NO: 4823 - DNA, 41 bp, Homo sapiens
  chr2:166790812-166790853
  hypo
tgttataagagaaacacggagaactccgtctctactaaaaa

SEQ ID NO: 4824 - DNA, 8 bp, Homo sapiens
  chr2:166790855-166790863
  hypo
caaaaaat

SEQ ID NO: 4825 - DNA, 17 bp, Homo sapiens
  chr2:191793066-191793083
  hypo
ttttttttttttgagac

SEQ ID NO: 4826 - DNA, 17 bp, Homo sapiens
  chr2:191794488-191794505
  hypo
cccggccttataacttt

SEQ ID NO: 4827 - DNA, 31 bp, Homo sapiens
  chr2:201502745-201502776
  hypo
ttattccctgacctaacgggaggaaagccca

SEQ ID NO: 4828 - DNA, 31 bp, Homo sapiens
  chr2:209137007-209137038
  hypo
taatagagaaagtagtcgtctttttttgtta

SEQ ID NO: 4829 - DNA, 31 bp, Homo sapiens
  chr2:219509561-219509592
  hypo
cacagcctgcttgtggcggctctggtaactg

SEQ ID NO: 4830 - DNA, 31 bp, Homo sapiens
  chr2:230743183-230743214
  hypo
acaaaaagaaatcacacgcaaagctgcccta

SEQ ID NO: 4831 - DNA, 74 bp, Homo sapiens
  chr2:242170149-242170223
  hypo
ccactgtgcttccagccggctcaccttgaattcgtccatgattttgcgaatggctttgccgcgggcaccaatga

SEQ ID NO: 4832 - DNA, 31 bp, Homo sapiens
  chr3:14510138-14510169
  hypo
gctccctctaagcagacgcattcatccatcc

SEQ ID NO: 4833 - DNA, 31 bp, Homo sapiens
  chr3:14510390-14510421
  hypo
cagtggcttagaatcacggactctgcacaga

SEQ ID NO: 4834 - DNA, 31 bp, Homo sapiens
  chr3:49023683-49023714
  hypo
gtatgcaagtgattcacgtgctctagcttcc

SEQ ID NO: 4835 - DNA, 25 bp, Homo sapiens
  chr3:49023828-49023853
  hypo
ctgctcactgcggcctccactcctg

SEQ ID NO: 4836 - DNA, 31 bp, Homo sapiens
  chr3:129372650-129372681
  hypo
attgtatattctgtatcgctcaattactaaa

SEQ ID NO: 4837 - DNA, 31 bp, Homo sapiens
  chr3:132398974-132399005
  hypo
cctgtgaatagtaactcggccttaagagaac

SEQ ID NO: 4838 - DNA, 37 bp, Homo sapiens
  chr3:132399370-132399407
  hypo
tcaagttctaaaaaaagttcaacgtatttctttaaaa

SEQ ID NO: 4839 - DNA, 18 bp, Homo sapiens
  chr3:141637292-141637310
  hypo
ttttttttttttgagacg

SEQ ID NO: 4840 - DNA, 31 bp, Homo sapiens
  chr3:171363248-171363279
  hypo
ttctcatagcctagatcgcaggggcaaaaag

SEQ ID NO: 4841 - DNA, 37 bp, Homo sapiens
  chr3:171363375-171363412
  hypo
aagaattctgagtggccggccgggcgtggtggctcat

SEQ ID NO: 4842 - DNA, 31 bp, Homo sapiens
  chr3:195393195-195393226
  hypo
ggccttgatataaccacgtgagggtgatggc

SEQ ID NO: 4843 - DNA, 87 bp, Homo sapiens
  chr3:195393264-195393351
  hypo
acagcagcacctgcctcggggtgagaaagcatggccctcattagtcggtagtggctgccgtcaggttcacagcgtacctctcccgat

SEQ ID NO: 4844 - DNA, 61 bp, Homo sapiens
  chr4:722181-722242
  hypo
agtaatctggggatggcgtagagtgcgtggggggtggcgtgcacagcgtgttaagtgtcgt

SEQ ID NO: 4845 - DNA, 39 bp, Homo sapiens
  chr4:722243-722282
  hypo
agtaatctggggatggcgtagagcgcgttggggggcagc

SEQ ID NO: 4846 - DNA, 47 bp, Homo sapiens
  chr4:1325022-1325069
  hypo
accctgcggggtcagccgtgtggactcacccccgactcccagtccct

SEQ ID NO: 4847 - DNA, 31 bp, Homo sapiens
  chr4:3529879-3529910
  hypo
tcaagttaaatgttaacgcatcaagttagaa

SEQ ID NO: 4848 - DNA, 31 bp, Homo sapiens
  chr4:5754867-5754898
  hypo
agtgtgcccatgatgccgggcacaggctgcc

SEQ ID NO: 4849 - DNA, 31 bp, Homo sapiens
  chr4:7033477-7033508
  hypo
ggtgctctgcactccacggcccttctcagcc

SEQ ID NO: 4850 - DNA, 31 bp, Homo sapiens
  chr4:25812477-25812508
  hypo
ctgcagttgggcaccccgagtagccccgcca

SEQ ID NO: 4851 - DNA, 31 bp, Homo sapiens
  chr4:39964134-39964165
  hypo
aagtaggcaggttgggcgcagtggatcatgc

SEQ ID NO: 4852 - DNA, 24 bp, Homo sapiens
  chr4:78727284-78727308
  hypo
aaaattaacttcaggccgggcaca

SEQ ID NO: 4853 - DNA, 60 bp, Homo sapiens
  chr4:87993063-87993123
  hypo
gaaaagattggagtttcgggtcaggagctctggattaaaggccaacgggaatcttttaaa

SEQ ID NO: 4854 - DNA, 54 bp, Homo sapiens
  chr4:87993129-87993183
  hypo
ggttgtgtgtgtgtgtcggtgtgtgaagtcagaggcagacgatgagagaaataa

SEQ ID NO: 4855 - DNA, 17 bp, Homo sapiens
  chr4:87993506-87993523
  hypo
tccgtctcaaaaaaaaa

SEQ ID NO: 4856 - DNA, 31 bp, Homo sapiens
  chr4:87993559-87993590
  hypo
acatttattttttaaacgattttctccttgg

SEQ ID NO: 4857 - DNA, 45 bp, Homo sapiens
  chr4:88941047-88941092
  hypo
agtgactgtggacttgcgtttaacacaggacgggagaggcaaaga

SEQ ID NO: 4858 - DNA, 31 bp, Homo sapiens
  chr4:88941167-88941198
  hypo
tgaccagccagttcatcgtcagtggtggtga

SEQ ID NO: 4859 - DNA, 31 bp, Homo sapiens
  chr4:88941199-88941230
  hypo
tttcactatgagatacgcgtggcaacttgcc

SEQ ID NO: 4860 - DNA, 30 bp, Homo sapiens
  chr4:107219812-107219842
  hypo
aaaggtgaaagttctcgacttgataaggaa

SEQ ID NO: 4861 - DNA, 31 bp, Homo sapiens
  chr4:111109685-111109716
  hypo
ttcctgagttgtccatcgtgcaaaagatcat

SEQ ID NO: 4862 - DNA, 31 bp, Homo sapiens
  chr4:111320333-111320364
  hypo
atgcaacaaagcagatcgccttcctccatgg

SEQ ID NO: 4863 - DNA, 31 bp, Homo sapiens
  chr4:170612104-170612135
  hypo
acctaatgttctttgacgggttagttgttac

SEQ ID NO: 4864 - DNA, 47 bp, Homo sapiens
  chr4:170652115-170652162
  hypo
agaattaaatgatctgcgtgtgggtatgcactcgtgcacatgtgcac

SEQ ID NO: 4865 - DNA, 31 bp, Homo sapiens
  chr4:170652196-170652227
  hypo
tgttggaaagcttgcccgatcttacacactg

SEQ ID NO: 4866 - DNA, 31 bp, Homo sapiens
  chr4:170652258-170652289
  hypo
agaaacaggtcatatccgctacaccttattg

SEQ ID NO: 4867 - DNA, 31 bp, Homo sapiens
  chr4:170652300-170652331
  hypo
ttcaggcaactatggtcgagtaagcactggt

SEQ ID NO: 4868 - DNA, 31 bp, Homo sapiens
  chr4:183809395-183809426
  hypo
gattcatataccctcacgatgaaatggcttt

SEQ ID NO: 4869 - DNA, 43 bp, Homo sapiens
  chr4:183809428-183809471
  hypo
attcttccaacagttccgaaataaaagtcgagctagctaaagg

SEQ ID NO: 4870 - DNA, 31 bp, Homo sapiens
  chr4:183809520-183809551
  hypo
cccagggttattttgccggcacctctgcagc

SEQ ID NO: 4871 - DNA, 31 bp, Homo sapiens
  chr4:183809560-183809591
  hypo
ataactctagtcatcacggttccctgacaag

SEQ ID NO: 4872 - DNA, 35 bp, Homo sapiens
  chr4:184166140-184166175
  hypo
aaaggaggggctgagacgtgcggatcacgaggtca

SEQ ID NO: 4873 - DNA, 45 bp, Homo sapiens
  chr5:457005-457050
  hypo
ctgagatgatgaggaacgtggagctggccccggaagtggatgtcg

SEQ ID NO: 4874 - DNA, 25 bp, Homo sapiens
  chr5:6765598-6765623
  hypo
cccaaagtgccgtgtgccaccatac

SEQ ID NO: 4875 - DNA, 31 bp, Homo sapiens
  chr5:54665638-54665669
  hypo
tagccagtcactaacccgtgttatttctttt

SEQ ID NO: 4876 - DNA, 31 bp, Homo sapiens
  chr5:54665690-54665721
  hypo
gcttttgtaatctagccgctcttctaattca

SEQ ID NO: 4877 - DNA, 61 bp, Homo sapiens
  chr5:65988336-65988397
  hypo
tgaaccagggctattccgcaagctgggcttccgtcctttgaatattcgaggcaataggtgt

SEQ ID NO: 4878 - DNA, 50 bp, Homo sapiens
  chr5:65988492-65988542
  hypo
tttgcatatcattcatcgccttttgattcccttaccgttctgcaatcatc

SEQ ID NO: 4879 - DNA, 29 bp, Homo sapiens
  chr5:79986400-79986429
  hypo
gctgggattacagacgtgagccactgcac

SEQ ID NO: 4880 - DNA, 31 bp, Homo sapiens
  chr5:79986470-79986501
  hypo
ctcattaaactttaaccgttaagtgctcctt

SEQ ID NO: 4881 - DNA, 31 bp, Homo sapiens
  chr5:79986533-79986564
  hypo
tgcagaaactgaagcacgtagcaatattcat

SEQ ID NO: 4882 - DNA, 31 bp, Homo sapiens
  chr5:96362697-96362728
  hypo
aggttacttagctcagcgtggctacagacta

SEQ ID NO: 4883 - DNA, 21 bp, Homo sapiens
  chr5:96362762-96362783
  hypo
aatacctctgtatggccgggc

SEQ ID NO: 4884 - DNA, 61 bp, Homo sapiens
  chr5:115570378-115570439
  hypo
taatttacacacagatcgagttaggaacttccgaaaaaatagtactcgttctaaaaacatc

SEQ ID NO: 4885 - DNA, 60 bp, Homo sapiens
  chr5:115570519-115570579
  hypo
taaagtataatggtggcggagcacagggaagagctcacatgcagccgcaggagagctagg

SEQ ID NO: 4886 - DNA, 31 bp, Homo sapiens
  chr5:131037382-131037413
  hypo
ttctaaaccattctaacgggtctacccacct

SEQ ID NO: 4887 - DNA, 48 bp, Homo sapiens
  chr5:134278931-134278979
  hypo
agaaatccatggtgaccgaagcacttgtgacttcggagcagtgtgatc

SEQ ID NO: 4888 - DNA, 56 bp, Homo sapiens
  chr5:134278993-134279049
  hypo
ttttgaaaactggggacggtatacataaggtgcaaagatcacggaaacatgaatta

SEQ ID NO: 4889 - DNA, 31 bp, Homo sapiens
  chr5:134279058-134279089
  hypo
gcctcagtctaggttacgagtgctttaggac

SEQ ID NO: 4890 - DNA, 31 bp, Homo sapiens; identical to SEQ ID NO: 4728
  chr5:134463604-134463635
  hypo

SEQ ID NO: 4891 - DNA, 122 bp, Homo sapiens; identical to SEQ ID NO: 4729
  chr5:134463695-134463817
  hypo

SEQ ID NO: 4892 - DNA, 19 bp, Homo sapiens
  chr5:139922384-139922403
  hypo
ttaagacctttggggccgg

SEQ ID NO: 4893 - DNA, 31 bp, Homo sapiens
  chr5:145453475-145453506
  hypo
cattcgagttgagacccgaagactaagaggg

SEQ ID NO: 4894 - DNA, 31 bp, Homo sapiens
  chr5:159459176-159459207
  hypo
tcacaagagcctaatccggcaatctgattga

SEQ ID NO: 4895 - DNA, 31 bp, Homo sapiens
  chr5:176456647-176456678
  hypo
aagaggaccaagatggcgacttgagagagac

SEQ ID NO: 4896 - DNA, 37 bp, Homo sapiens
  chr5:176663883-176663920
  hypo
ggagtgcagagatgcacgaacacggttcactgcagcc

SEQ ID NO: 4897 - DNA, 31 bp, Homo sapiens
  chr5:176663932-176663963
  hypo
gtttaagcaatgtttccgtctcagcctcctg

SEQ ID NO: 4898 - DNA, 47 bp, Homo sapiens
  chr5:179030601-179030648
  hypo
actcaccagaagcagacgtggaacagagctggcgtggagctggcttc

SEQ ID NO: 4899 - DNA, 31 bp, Homo sapiens
  chr5:179482573-179482604
  hypo
gactctctcattcatccgtttgttttcagat

SEQ ID NO: 4900 - DNA, 31 bp, Homo sapiens
  chr5:180621422-180621453
  hypo
ctccttatccaagcagcgtttgtactttggc

SEQ ID NO: 4901 - DNA, 54 bp, Homo sapiens
  chr6:15523494-15523548
  hypo
tgtgaatcagaattgccgccaacagctgtggaatgtgcccgtcatgaaaggggg

SEQ ID NO: 4902 - DNA, 44 bp, Homo sapiens
  chr6:35033861-35033905
  hypo
acccttcctccctgttcgtcgtctgtcacgcgggccttcatttg

SEQ ID NO: 4903 - DNA, 60 bp, Homo sapiens
  chr6:43745060-43745120
  hypo
cagtaggagggacttacgttagattttggaaggacttgcctgattcggaagctccaaaga

SEQ ID NO: 4904 - DNA, 49 bp, Homo sapiens
  chr6:43745319-43745368
  hypo
tgcccctgatgcgatgcgggggctgctgcaatgacgagggcctggagtg

SEQ ID NO: 4905 - DNA, 36 bp, Homo sapiens
  chr6:43755592-43755628
  hypo
tcccaatcactgaccacgtgccgacccctacattgg

SEQ ID NO: 4906 - DNA, 78 bp, Homo sapiens
  chr6:86325373-86325451
  hypo
actttagggctgggagcggtcatgcctgtaatcccagctatgcgggaggctgagtgaagcaggtgaatcgcttgaacc

SEQ ID NO: 4907 - DNA, 18 bp, Homo sapiens
  chr6:86325510-86325528
  hypo
gagcgagactctgactca

SEQ ID NO: 4908 - DNA, 35 bp, Homo sapiens
  chr6:88280032-88280067
  hypo
ttttctaaaagctcctcgcacgactgttaatacat

SEQ ID NO: 4909 - DNA, 31 bp, Homo sapiens
  chr6:107132181-107132212
  hypo
tggatgactatgctccgcgggagagtccaga

SEQ ID NO: 4910 - DNA, 18 bp, Homo sapiens
  chr6:134817632-134817650
  hypo
ctccgtctcaaaaaaaaa

SEQ ID NO: 4911 - DNA, 31 bp, Homo sapiens
  chr6:134817684-134817715
  hypo
cagcaaagggagctgccgtgcatagccatga

SEQ ID NO: 4912 - DNA, 45 bp, Homo sapiens; identical to SEQ ID NO: 4733
  chr6:135503607-135503652
  hypo

SEQ ID NO: 4913 - DNA, 31 bp, Homo sapiens; identical to SEQ ID NO: 4735
  chr6:139350568-139350599
  hypo

SEQ ID NO: 4914 - DNA, 31 bp, Homo sapiens
  chr6:149915184-149915215
  hypo
caggaggcctacatgccgccacttgtgctgc

SEQ ID NO: 4915 - DNA, 31 bp, Homo sapiens
  chr6:149915370-149915401
  hypo
gacctcaccaagagggcgggagaactcactg

SEQ ID NO: 4916 - DNA, 31 bp, Homo sapiens
  chr6:149915540-149915571
  hypo
ctgtgaagacctggagcgactgaaaaagatt

SEQ ID NO: 4917 - DNA, 31 bp, Homo sapiens
  chr6:157351859-157351890
  hypo
tatgttaacatcacaccgccttgaaattgtg

SEQ ID NO: 4918 - DNA, 65 bp, Homo sapiens
  chr6:157351998-157352063
  hypo
caatacattcagaggacggccgctgtactcagcagcacgaggctaccgtgcgtgttctttccact

SEQ ID NO: 4919 - DNA, 31 bp, Homo sapiens
  chr7:810520-810551
  hypo
ccaagtctgaggtgggcgtgtgcagtgaccc

SEQ ID NO: 4920 - DNA, 31 bp, Homo sapiens
  chr7:1142124-1142155
  hypo
tcacttccacaggggacggtcttgcttcttt

SEQ ID NO: 4921 - DNA, 36 bp, Homo sapiens
  chr7:2071760-2071796
  hypo
tgacccctcattcatgcgggacgcccggccccagtc

SEQ ID NO: 4922 - DNA, 31 bp, Homo sapiens
  chr7:2678377-2678408
  hypo
cgctgggagcctgggccgagtgtgctatggg

SEQ ID NO: 4923 - DNA, 96 bp, Homo sapiens
  chr7:2679694-2679790
  hypo
gcgtggctccaggacacgggccctatgtcttcgcttccctccctgctcagggcagacccgcagcagtgtccagccgaggagcgagcagccgtggct

SEQ ID NO: 4924 - DNA, 31 bp, Homo sapiens
  chr7:27914926-27914957
  hypo
cactttcctctttcctcggcacagctggaat

SEQ ID NO: 4925 - DNA, 72 bp, Homo sapiens
  chr7:47581606-47581678
  hypo
gcaggttattaggaagcgtaaaggtctcagcttccatgcgtcgtgggatgggagactcgggagttatgtgca

SEQ ID NO: 4926 - DNA, 44 bp, Homo sapiens
  chr7:47605355-47605399
  hypo
tagttaacaccaacctcgctttccaatttcgcactctgctggat

SEQ ID NO: 4927 - DNA, 35 bp, Homo sapiens
  chr7:47605478-47605513
  hypo
cagcttattcctcacacgggcgctgggaggctttg

SEQ ID NO: 4928 - DNA, 31 bp, Homo sapiens
  chr7:47605533-47605564
  hypo
ctgatggcatgatatgcgtggattactgcaa

SEQ ID NO: 4929 - DNA, 51 bp, Homo sapiens
  chr7:55212335-55212386
  hypo
gctgctcagagcagccgcgcacatgcttgtgctgtgcgtgcctcctgtgag

SEQ ID NO: 4930 - DNA, 31 bp, Homo sapiens
  chr7:70645461-70645492
  hypo
aaagaaggctccttcacgttgacctcctgct

SEQ ID NO: 4931 - DNA, 31 bp, Homo sapiens
  chr7:100849484-100849515
  hypo
cccccaactcccaggacgggggccaggcccc

SEQ ID NO: 4932 - DNA, 31 bp, Homo sapiens
  chr7:101649425-101649456
  hypo
ctccctccttttaacccgggagtaaagagaa

SEQ ID NO: 4933 - DNA, 31 bp, Homo sapiens
  chr7:101649597-101649628
  hypo
cgcctcagtgctccctcgaaggacaactctg

SEQ ID NO: 4934 - DNA, 23 bp, Homo sapiens
  chr7:101649635-101649658
  hypo
agtttttatctcatctcggtaga

SEQ ID NO: 4935 - DNA, 31 bp, Homo sapiens
  chr7:128098036-128098067
  hypo
gatctcgcccttaccccggggtctggtgtat

SEQ ID NO: 4936 - DNA, 41 bp, Homo sapiens
  chr7:129689369-129689410
  hypo
aatctcttcagaaattcgactttttttttttttgagatgga

SEQ ID NO: 4937 - DNA, 1 bp, Homo sapiens
  chr7:129689709-129689710
  hypo
a

SEQ ID NO: 4938 - DNA, 46 bp, Homo sapiens
  chr7:129689776-129689822
  hypo
aaccaattagaaaattcgaatcaaagatcttcgggagatttcatga

SEQ ID NO: 4939 - DNA, 31 bp, Homo sapiens
  chr7:133234147-133234178
  hypo
ctgtgaattgggaagccggaggagagagaga

SEQ ID NO: 4940 - DNA, 15 bp, Homo sapiens
  chr7:138974787-138974802
  hypo
cgccaccacacctgg

SEQ ID NO: 4941 - DNA, 31 bp, Homo sapiens
  chr7:138974845-138974876
  hypo
tatttttagtagagaccggggttagtagaga

SEQ ID NO: 4942 - DNA, 24 bp, Homo sapiens
  chr7:138974884-138974908
  hypo
ttggtcaggctggtttcgaattcc

SEQ ID NO: 4943 - DNA, 16 bp, Homo sapiens
  chr7:138974967-138974983
  hypo
ccgtgccttgccaact

SEQ ID NO: 4944 - DNA, 31 bp, Homo sapiens
  chr7:140710388-140710419
  hypo
actgagacgagacatgcggaaggcatattct

SEQ ID NO: 4945 - DNA, 46 bp, Homo sapiens
  chr7:155502688-155502734
  hypo
ttagatggtctccttccgtcttctttaccctcgttcatctcacact

SEQ ID NO: 4946 - DNA, 48 bp, Homo sapiens
  chr7:155502754-155502802
  hypo
taccaaagagatcattcgtgatcccttattatacgtgttgtctctgtg

SEQ ID NO: 4947 - DNA, 31 bp, Homo sapiens
  chr7:155502826-155502857
  hypo
gaatttagaagccctccgtaatttggcatca

SEQ ID NO: 4948 - DNA, 31 bp, Homo sapiens
  chr7:157259720-157259751
  hypo
aggtcctgccacccagcggcacaaggctgcc

SEQ ID NO: 4949 - DNA, 31 bp, Homo sapiens
  chr8:1717584-1717615
  hypo
attctggggtctcttccggagagcagagggt

SEQ ID NO: 4950 - DNA, 31 bp, Homo sapiens
  chr8:26242168-26242199
  hypo
tgtccaagttcacaaccggctgggagcaaag

SEQ ID NO: 4951 - DNA, 37 bp, Homo sapiens
  chr8:28206996-28207033
  hypo
ctgcaggggacttagacggagccgctatgcctggaag

SEQ ID NO: 4952 - DNA, 90 bp, Homo sapiens
  chr8:28207068-28207158
  hypo
atttacagtgtgacaccgccctgcaggagataactcaagaccagcgcctgctaggtagagttcaaaatgacttcccgcttacttgagttg

SEQ ID NO: 4953 - DNA, 38 bp, Homo sapiens
  chr8:28207470-28207508
  hypo
caccgacctgtggccacgtgccccgtgcccaagggatg

SEQ ID NO: 4954 - DNA, 91 bp, Homo sapiens
  chr8:28207524-28207615
  hypo
tgtgtgggagagccctcggccatacgaggccccagccgtgctgcccgcacactcaccggagagagagagcaggcggcggagggggcagcag

SEQ ID NO: 4955 - DNA, 31 bp, Homo sapiens
  chr8:28210633-28210664
  hypo
ccacacagacatcatccgctccagcctgggc

SEQ ID NO: 4956 - DNA, 31 bp, Homo sapiens
  chr8:74361076-74361107
  hypo
aacgcaagtggacagccggtccctgccgtgg

SEQ ID NO: 4957 - DNA, 31 bp, Homo sapiens
  chr8:81549087-81549118
  hypo
tccatggaagtttgttcgctaacatgctatt

SEQ ID NO: 4958 - DNA, 31 bp, Homo sapiens; identical to SEQ ID NO: 4738
  chr8:107669656-107669687
  hypo

SEQ ID NO: 4959 - DNA, 40 bp, Homo sapiens
  chr8:120846230-120846270
  hypo
ttattgaaagacatttcgaagccatcgtgtttgtatttca

SEQ ID NO: 4960 - DNA, 31 bp, Homo sapiens
  chr8:124195677-124195708
  hypo
cagataattggggcttcggatggaggggctt

SEQ ID NO: 4961 - DNA, 31 bp, Homo sapiens
  chr8:124804119-124804150
  hypo
aaaagaaattctctgccgggtgtggtggctc

SEQ ID NO: 4962 - DNA, 31 bp, Homo sapiens
  chr8:134289833-134289864
  hypo
cagttctgaaaatggacgatagtgatggttg

SEQ ID NO: 4963 - DNA, 31 bp, Homo sapiens
  chr8:140758283-140758314
  hypo
gtgcaccttcactccacggctctgtgatcag

SEQ ID NO: 4964 - DNA, 31 bp, Homo sapiens
  chr8:144601156-144601187
  hypo
agcaatgcctgcctcccggtgatgcatcccc

SEQ ID NO: 4965 - DNA, 31 bp, Homo sapiens
  chr9:173862-173893
  hypo
tttggccagtgtaccacgtgctcatttaaaa

SEQ ID NO: 4966 - DNA, 44 bp, Homo sapiens
  chr9:173901-173945
  hypo
tatagggaggccaaggcgggcggatcacgaggtcaggagaccga

SEQ ID NO: 4967 - DNA, 23 bp, Homo sapiens
  chr9:174124-174147
  hypo
caacacagcgagactccatctca

SEQ ID NO: 4968 - DNA, 31 bp, Homo sapiens
  chr9:7028537-7028568
  hypo
tgcctgaaattgaggtcggaggtggcacaag

SEQ ID NO: 4969 - DNA, 31 bp, Homo sapiens
  chr9:7028569-7028600
  hypo
acttcctcagctgcctcgactggtgtctcag

SEQ ID NO: 4970 - DNA, 8 bp, Homo sapiens
  chr9:7028630-7028638
  hypo
gtccagca

SEQ ID NO: 4971 - DNA, 36 bp, Homo sapiens
  chr9:7028697-7028733
  hypo
gcaccccagagtactctagcccgtggtggcaaggct

SEQ ID NO: 4972 - DNA, 31 bp, Homo sapiens
  chr9:7028749-7028780
  hypo
tgtgatctccctctgacgtggactggttaaa

SEQ ID NO: 4973 - DNA, 31 bp, Homo sapiens
  chr9:19376712-19376743
  hypo
aaacatcagaaataaacgtaagcttaacagc

SEQ ID NO: 4974 - DNA, 59 bp, Homo sapiens
  chr9:27340152-27340211
  hypo
gcccacattactgacacggagggcgtttccacgatggaggggtgcgtgtgtgtgaatgt

SEQ ID NO: 4975 - DNA, 60 bp, Homo sapiens
  chr9:27340260-27340320
  hypo
gataaacacacacactcgccacccacggagaatatttattcataccgatacaaaaatcaa

SEQ ID NO: 4976 - DNA, 31 bp, Homo sapiens
  chr9:33834157-33834188
  hypo
tgtttaggtgtagtgacggattcttggagct

SEQ ID NO: 4977 - DNA, 31 bp, Homo sapiens
  chr9:92178352-92178383
  hypo
gtcagggacctgggttcgctgctttgtgttg

SEQ ID NO: 4978 - DNA, 31 bp, Homo sapiens
  chr9:94447741-94447772
  hypo
acaccgtgcaatctgccggggcctcagaaag

SEQ ID NO: 4979 - DNA, 31 bp, Homo sapiens
  chr9:95003569-95003600
  hypo
tctcatagaatgagaccggagcaaatgatta

SEQ ID NO: 4980 - DNA, 21 bp, Homo sapiens
  chr9:95003649-95003670
  hypo
cagggtcttgctctgtcgccc

SEQ ID NO: 4981 - DNA, 39 bp, Homo sapiens
  chr9:95010671-95010710
  hypo
cagctgggtgtggtggcgcaaacttgtaatcttagcact

SEQ ID NO: 4982 - DNA, 31 bp, Homo sapiens
  chr9:96256150-96256181
  hypo
tctggagctcctggagcgctctctcagtggg

SEQ ID NO: 4983 - DNA, 76 bp, Homo sapiens
  chr9:96256253-96256329
  hypo
ttccttcaattcctagcggttgcaggtctgacacatgcggtttaaatactagtgcaccttgcgaagtctctgatcg

SEQ ID NO: 4984 - DNA, 31 bp, Homo sapiens
  chr9:97901310-97901341
  hypo
ccctgaatgaaggaatcgccgaagcagtatc

SEQ ID NO: 4985 - DNA, 31 bp, Homo sapiens; identical to SEQ ID NO: 4741
  chr9:114937351-114937382
  hypo

SEQ ID NO: 4986 - DNA, 17 bp, Homo sapiens
  chr9:123926438-123926455
  hypo
gccggaactttcatata

SEQ ID NO: 4987 - DNA, 31 bp, Homo sapiens
  chr9:126362199-126362230
  hypo
aacccataccatgagtcggctgagcatggtg

SEQ ID NO: 4988 - DNA, 11 bp, Homo sapiens
  chr9:133592859-133592870
  hypo
gcaggtggatc

SEQ ID NO: 4989 - DNA, 31 bp, Homo sapiens
  chr9:133592871-133592902
  hypo
cctgaggtcaggagttcgaacccagctgtgc

SEQ ID NO: 4990 - DNA, 39 bp, Homo sapiens
  chr9:133592954-133592993
  hypo
actggagccaaagagtcgaggctgcggtgagccatgaac

SEQ ID NO: 4991 - DNA, 31 bp, Homo sapiens
  chr9:133593014-133593045
  hypo
ggcaatagagggagaccgtgtctctgggggg

SEQ ID NO: 4992 - DNA, 31 bp, Homo sapiens
  chr9:139361343-139361374
  hypo
gcagagaagcactagcgcgccctggctgccc

SEQ ID NO: 4993 - DNA, 31 bp, Homo sapiens
  chr9:139361591-139361622
  hypo
gatatcactaaagaagcgacaccaccccagg

SEQ ID NO: 4994 - DNA, 31 bp, Homo sapiens
  chr9:139361628-139361659
  hypo
tgctccaaggactcctcgagaaacccagctt

SEQ ID NO: 4995 - DNA, 31 bp, Homo sapiens
  chr9:140157541-140157572
  hypo
ggtgctgcagtttctgcgcacgctcttcctg

SEQ ID NO: 4996 - DNA, 40 bp, Homo sapiens
  chr9:140157612-140157652
  hypo
tgctcatgtccctgcacgacctggacgtgggtgaaatctg

SEQ ID NO: 4997 - DNA, 31 bp, Homo sapiens
  chr10:426251-426282
  hypo
cctggaagatggttaacgtgcagaagaggct

SEQ ID NO: 4998 - DNA, 31 bp, Homo sapiens
  chr10:5809843-5809874
  hypo
agctcaagaatatactcgggtcagttaacta

SEQ ID NO: 4999 - DNA, 31 bp, Homo sapiens
  chr10:13150490-13150521
  hypo
catgatgtcataccctcgtctccctccccca

SEQ ID NO: 5000 - DNA, 43 bp, Homo sapiens
  chr10:13692404-13692447
  hypo
tgcatgagcatgaactcgtgtatgtattcgtgtatgtatgtag

SEQ ID NO: 5001 - DNA, 31 bp, Homo sapiens
  chr10:13692459-13692490
  hypo
gtgcctacattcccaccgcagctctttcaaa

SEQ ID NO: 5002 - DNA, 44 bp, Homo sapiens
  chr10:13692531-13692575
  hypo
acctttagcagatgatcgccctcccataccgggggagaaaaagg

SEQ ID NO: 5003 - DNA, 31 bp, Homo sapiens
  chr10:14975093-14975124
  hypo
gtgcactctggtattccgccagcatgtcaac

SEQ ID NO: 5004 - DNA, 31 bp, Homo sapiens; identical to SEQ ID NO: 4745
  chr10:54072981-54073012
  hypo

SEQ ID NO: 5005 - DNA, 36 bp, Homo sapiens
  chr10:104837946-104837982
  hypo
atactttaacagaaaacgagtcggaccttctagctg

SEQ ID NO: 5006 - DNA, 31 bp, Homo sapiens
  chr10:104837983-104838014
  hypo
actctgtactgtgtgccgagaaggcatttct

SEQ ID NO: 5007 - DNA, 31 bp, Homo sapiens
  chr10:133790490-133790521
  hypo
acacttattggcacagcggttcatgcctgta

SEQ ID NO: 5008 - DNA, 35 bp, Homo sapiens
  chr11:471550-471585
  hypo
ggtgacgcacgcctgtcgggcggagggcggcctgg

SEQ ID NO: 5009 - DNA, 31 bp, Homo sapiens
  chr11:880350-880381
  hypo
gctcagtgacccagagcgcacccagggccag

SEQ ID NO: 5010 - DNA, 25 bp, Homo sapiens
  chr11:939450-939475
  hypo
ttgactttttttgagacggggtttc

SEQ ID NO: 5011 - DNA, 38 bp, Homo sapiens
  chr11:1715582-1715620
  hypo
gacaaccgtgggtcagcggaggccggcaacttcatttc

SEQ ID NO: 5012 - DNA, 31 bp, Homo sapiens
  chr11:18419901-18419932
  hypo
atctctgaaagatgggcggaaatcagacttt

SEQ ID NO: 5013 - DNA, 21 bp, Homo sapiens
  chr11:48015394-48015415
  hypo
ttttgagaggcagtctcgctc

SEQ ID NO: 5014 - DNA, 29 bp, Homo sapiens
  chr11:71647183-71647212
  hypo
ggcgtaaactgctgcgcctggcctataat

SEQ ID NO: 5015 - DNA, 31 bp, Homo sapiens
  chr11:71647449-71647480
  hypo
tttttagacagagtctcgctctgtcacccag

SEQ ID NO: 5016 - DNA, 55 bp, Homo sapiens
  chr11:71948503-71948558
  hypo
accagggccagtggtccggggccgtggtggggctgaggcccgtggcccaccacct

SEQ ID NO: 5017 - DNA, 31 bp, Homo sapiens
  chr11:111484752-111484783
  hypo
gggaactgacccccctcgggggtcagttgaa

SEQ ID NO: 5018 - DNA, 35 bp, Homo sapiens
  chr12:2995015-2995050
  hypo
taggcgtgaaccaccgcgcccggcctactttgact

SEQ ID NO: 5019 - DNA, 31 bp, Homo sapiens
  chr12:2995074-2995105
  hypo
tgctgactcttctgcccggcctactttgact

SEQ ID NO: 5020 - DNA, 31 bp, Homo sapiens
  chr12:57605266-57605297
  hypo
cagctgcacggatggccgggtggcccccagc

SEQ ID NO: 5021 - DNA, 35 bp, Homo sapiens
  chr12:76879056-76879091
  hypo
agtaaatgactaagaccgggcgcagtagctcatgc

SEQ ID NO: 5022 - DNA, 31 bp, Homo sapiens
  chr12:101711199-101711230
  hypo
ctttcagattggtgtgcgttcttcatcagta

SEQ ID NO: 5023 - DNA, 31 bp, Homo sapiens
  chr12:101711233-101711264
  hypo
tgtgactttctttccacggtagcaatgagta

SEQ ID NO: 5024 - DNA, 31 bp, Homo sapiens
  chr12:101711288-101711319
  hypo
tccaacccaggatctacggagaaaaggcaaa

SEQ ID NO: 5025 - DNA, 46 bp, Homo sapiens
  chr12:101711323-101711369
  hypo
tggtggcagaggaaatcgaagaggaacctgccgcaggagatgatga

SEQ ID NO: 5026 - DNA, 31 bp, Homo sapiens
  chr12:101718239-101718270
  hypo
tgtagagatgttgtcccggctggtctcaaaa

SEQ ID NO: 5027 - DNA, 31 bp, Homo sapiens; identical to SEQ ID NO: 4746
  chr12:101762739-101762770
  hypo

SEQ ID NO: 5028 - DNA, 31 bp, Homo sapiens
  chr12:102280965-102280996
  hypo
aaagagacaaattgtccgaaaaaaatttgta

SEQ ID NO: 5029 - DNA, 38 bp, Homo sapiens
  chr12:104506940-104506978
  hypo
ttacagacgtgagccaccgcgcccggcctggatattga

SEQ ID NO: 5030 - DNA, 49 bp, Homo sapiens
  chr12:120134817-120134866
  hypo
cctgttcaggaggtctcgcattccagggaaggcacgaggctggccagga

SEQ ID NO: 5031 - DNA, 31 bp, Homo sapiens
  chr12:120134868-120134899
  hypo
ccctgacctgctctcacgacctcacatctct

SEQ ID NO: 5032 - DNA, 31 bp, Homo sapiens
  chr12:120134951-120134982
  hypo
ctccctgcccccacctcgtatctgatgggaa

SEQ ID NO: 5033 - DNA, 31 bp, Homo sapiens
  chr12:120134983-120135014
  hypo
tcctccctcacctccacgtccaggctttcaa

SEQ ID NO: 5034 - DNA, 31 bp, Homo sapiens
  chr12:121038110-121038141
  hypo
tgcacggctcattagccgcattctgctgctc

SEQ ID NO: 5035 - DNA, 31 bp, Homo sapiens
  chr12:122261978-122262009
  hypo
taacctcaggtaatcccggtagcctggtgaa

SEQ ID NO: 5036 - DNA, 31 bp, Homo sapiens
  chr12:124819653-124819684
  hypo
aagcagcagcagagaacgcgtagttacactg

SEQ ID NO: 5037 - DNA, 45 bp, Homo sapiens
  chr12:133088779-133088824
  hypo
ccagtgtgacaggggtcgagacccccctctcggctcatgcctggg

SEQ ID NO: 5038 - DNA, 31 bp, Homo sapiens
  chr12:133112078-133112109
  hypo
ggtgtgaagaggtgagcggagctgatccgca

SEQ ID NO: 5039 - DNA, 31 bp, Homo sapiens
  chr12:133153970-133154001
  hypo
gaggagtttggcctctcgctgaacagtagga

SEQ ID NO: 5040 - DNA, 40 bp, Homo sapiens
  chr13:25026479-25026519
  hypo
ctgcagggcaacaagacgacctccccgtgggtctggacta

SEQ ID NO: 5041 - DNA, 37 bp, Homo sapiens
  chr13:25026528-25026565
  hypo
ctctctgagactcacccgataccgcaggcgaataacc

SEQ ID NO: 5042 - DNA, 74 bp, Homo sapiens
  chr13:60492534-60492608
  hypo
cctttgagaaaagactcgagttctggcctatatcactgacggatgactgcagcgaccttcgtttacagaaaata

SEQ ID NO: 5043 - DNA, 31 bp, Homo sapiens
  chr13:60492664-60492695
  hypo
acaacattaagaaccacgaaagtaagcctga

SEQ ID NO: 5044 - DNA, 31 bp, Homo sapiens
  chr13:103453932-103453963
  hypo
gcctggaagagggaaccgcaatcaatcaaaa

SEQ ID NO: 5045 - DNA, 31 bp, Homo sapiens
  chr13:111881138-111881169
  hypo
ccccagcacagaaggtcggaagaggacgtgg

SEQ ID NO: 5046 - DNA, 51 bp, Homo sapiens
  chr13:111881626-111881677
  hypo
ccctctgttttaatccgcgtattttaatctactttgcgtatctgtttgttt

SEQ ID NO: 5047 - DNA, 31 bp, Homo sapiens
  chr14:20786685-20786716
  hypo
tgaggtgacctacctgcgtgctctcctggaa

SEQ ID NO: 5048 - DNA, 31 bp, Homo sapiens
  chr14:23240342-23240373
  hypo
ggacaaattacctccacgggaaggcttccta

SEQ ID NO: 5049 - DNA, 30 bp, Homo sapiens
  chr14:35070701-35070731
  hypo
tataggctgagccaccgtgcctggctccta

SEQ ID NO: 5050 - DNA, 31 bp, Homo sapiens
  chr14:55522690-55522721
  hypo
tttcatttaatatgttcggaccttaggtaat

SEQ ID NO: 5051 - DNA, 31 bp, Homo sapiens
  chr14:55522742-55522773
  hypo
atcaccctaacatgaacgctgtttattctag

SEQ ID NO: 5052 - DNA, 31 bp, Homo sapiens
  chr14:55523173-55523204
  hypo
tgtgtgatgtgattgacgttaaaccttaaca

SEQ ID NO: 5053 - DNA, 44 bp, Homo sapiens
  chr14:55819828-55819872
  hypo
gggctatgaaagtgcacgttaaacctgagcgcctttacctttag

SEQ ID NO: 5054 - DNA, 31 bp, Homo sapiens
  chr14:55819886-55819917
  hypo
ccctctgtgaatagcacgattaaaatccagt

SEQ ID NO: 5055 - DNA, 31 bp, Homo sapiens
  chr14:55819921-55819952
  hypo
tataatggacagctaacggaacaatataatc

SEQ ID NO: 5056 - DNA, 31 bp, Homo sapiens
  chr14:55819962-55819993
  hypo
agctaggatagtgttgcggctataattttgt

SEQ ID NO: 5057 - DNA, 56 bp, Homo sapiens
  chr14:56088960-56089016
  hypo
ggatagcatgtatgaacggtttttgtgactgaagatcacaccgttcaaagaacctc

SEQ ID NO: 5058 - DNA, 31 bp, Homo sapiens
  chr14:59789611-59789642
  hypo
ttgtaaccagattcatcgacttggatggcct

SEQ ID NO: 5059 - DNA, 72 bp, Homo sapiens; identical to SEQ ID NO: 4749
  chr14:73393456-73393528
  hypo

SEQ ID NO: 5060 - DNA, 42 bp, Homo sapiens
  chr14:74628385-74628427
  hypo
cacgggaacactctgccggtgcattgccggagcagcccacct

SEQ ID NO: 5061 - DNA, 46 bp, Homo sapiens
  chr14:74628501-74628547
  hypo
tagctgagaccctgcacgccaacctgcttgtcgctgcacagaagag

SEQ ID NO: 5062 - DNA, 25 bp, Homo sapiens
  chr14:78189474-78189499
  hypo
ccactgcgcccggccaccatgattg

SEQ ID NO: 5063 - DNA, 61 bp, Homo sapiens
  chr14:78189558-78189619
  hypo
atgctgtctctcttttcgcctgtcatgccggatttcatccctctcacgtgcctccccatcc

SEQ ID NO: 5064 - DNA, 15 bp, Homo sapiens
  chr14:89627945-89627960
  hypo
cgtgcacagggccaa

SEQ ID NO: 5065 - DNA, 31 bp, Homo sapiens
  chr14:96015611-96015642
  hypo
acaggcatgagccaccgcgcctggcctttaa

SEQ ID NO: 5066 - DNA, 31 bp, Homo sapiens
  chr14:96912062-96912093
  hypo
actgcacatttggaagcgtgcattcgattta

SEQ ID NO: 5067 - DNA, 31 bp, Homo sapiens
  chr14:105729868-105729899
  hypo
cacctgggtcctgccacgatccttcagccgg

SEQ ID NO: 5068 - DNA, 31 bp, Homo sapiens
  chr15:34546025-34546056
  hypo
catactttaaagtattcgcactagggagttg

SEQ ID NO: 5069 - DNA, 22 bp, Homo sapiens
  chr15:34546167-34546189
  hypo
agcacgtcgggaggccaaggtg

SEQ ID NO: 5070 - DNA, 31 bp, Homo sapiens
  chr15:55508246-55508277
  hypo
ttaacctctgtgcctccgctgcttcatctgt

SEQ ID NO: 5071 - DNA, 31 bp, Homo sapiens
  chr15:57792922-57792953
  hypo
tgtaacaaagtgaggccgactttagccagga

SEQ ID NO: 5072 - DNA, 31 bp, Homo sapiens
  chr15:57792987-57793018
  hypo
ctatgaatgaatgaatcggctaactgaatgc

SEQ ID NO: 5073 - DNA, 31 bp, Homo sapiens
  chr15:57793021-57793052
  hypo
ttttaggaacagagggcgctaacattttatt

SEQ ID NO: 5074 - DNA, 59 bp, Homo sapiens
  chr15:63901442-63901501
  hypo
gaggtaggcagactgtcgtaaggctgtggagagagacccagagccgtgactggggacat

SEQ ID NO: 5075 - DNA, 8 bp, Homo sapiens
  chr15:64682783-64682791
  hypo
cagtatca

SEQ ID NO: 5076 - DNA, 31 bp, Homo sapiens
  chr15:69590166-69590197
  hypo
cgcacgcacacacacacgcacatgcatacac

SEQ ID NO: 5077 - DNA, 55 bp, Homo sapiens
  chr15:69590238-69590293
  hypo
aaggtgcccaagaccacggttcaggatccgtaaaaatggccggagataattgact

SEQ ID NO: 5078 - DNA, 31 bp, Homo sapiens
  chr15:69590335-69590366
  hypo
ggccagagacttgacccgagtcacagagtag

SEQ ID NO: 5079 - DNA, 70 bp, Homo sapiens
  chr15:70352912-70352982
  hypo
cttccatgctgtagtccgcagagccccggtgcttctcactggcccggaggctttccgagggtgacacaga

SEQ ID NO: 5080 - DNA, 97 bp, Homo sapiens
  chr15:70352992-70353089
  hypo
aaggaaaaagagggttcggggttaaaactttctgctgcgtgtaacaattcacacatccgcacacagctaagtgcaggtgacacggaggtcaggggag

SEQ ID NO: 5081 - DNA, 31 bp, Homo sapiens
  chr15:70353108-70353139
  hypo
tctctgccctgcagatcgtggctccatcaga

SEQ ID NO: 5082 - DNA, 31 bp, Homo sapiens
  chr15:70355591-70355622
  hypo
gtccaatccaggcctccgcctatctaggcaa

SEQ ID NO: 5083 - DNA, 31 bp, Homo sapiens
  chr15:80471842-80471873
  hypo
ctgggacaggcatgggcgtgcattgcatctg

SEQ ID NO: 5084 - DNA, 31 bp, Homo sapiens
  chr16:534202-534233
  hypo
aagaacaaaacactcccgcacccagggtcct

SEQ ID NO: 5085 - DNA, 31 bp, Homo sapiens
  chr16:534248-534279
  hypo
gcagccagctctccaccggccctgcatcttc

SEQ ID NO: 5086 - DNA, 31 bp, Homo sapiens
  chr16:534322-534353
  hypo
cttccacttgctgttgcgcttgtggatttag

SEQ ID NO: 5087 - DNA, 9 bp, Homo sapiens
  chr16:534357-534366
  hypo
ttttttttt

SEQ ID NO: 5088 - DNA, 31 bp, Homo sapiens
  chr16:1818974-1819005
  hypo
agggagtgcggggatgcggatcagctgggag

SEQ ID NO: 5089 - DNA, 1 bp, Homo sapiens
  chr16:3812493-3812494
  hypo
t

SEQ ID NO: 5090 - DNA, 31 bp, Homo sapiens
  chr16:4780258-4780289
  hypo
ccagtgcagtcaaccccgggagtaactcaga

SEQ ID NO: 5091 - DNA, 31 bp, Homo sapiens
  chr16:11192847-11192878
  hypo
tacttgctctgtgacacggagagacagctgt

SEQ ID NO: 5092 - DNA, 36 bp, Homo sapiens
  chr16:11192896-11192932
  hypo
tgtgctctgcagagagcgtggcggctaaggtgaggc

SEQ ID NO: 5093 - DNA, 31 bp, Homo sapiens
  chr16:12609441-12609472
  hypo
atcttcaggtgacctccgaagtcacctcctc

SEQ ID NO: 5094 - DNA, 31 bp, Homo sapiens
  chr16:21635697-21635728
  hypo
cttgtaaaggaaacttcgtatgtgttgagat

SEQ ID NO: 5095 - DNA, 31 bp, Homo sapiens
  chr16:30010434-30010465
  hypo
tagtgttttgtcagaacgcatgatacccatt

SEQ ID NO: 5096 - DNA, 31 bp, Homo sapiens
  chr16:30617002-30617033
  hypo
cgggcacagtggatcacgcttgtaatcgtaa

SEQ ID NO: 5097 - DNA, 27 bp, Homo sapiens
  chr16:53218078-53218105
  hypo
atctcctgacctcgtgatcctggctaa

SEQ ID NO: 5098 - DNA, 31 bp, Homo sapiens
  chr16:56399063-56399094
  hypo
tgccttcagctaagctcgagagggaacttca

SEQ ID NO: 5099 - DNA, 139 bp, Homo sapiens
  chr16:67175557-67175696
  hypo
ggcaggcagctccaggcgccagcataggcaccagctccacgtaagggtgaggctagatcacgtgtaccgcaagcggcttccattgcgggcacccatgtctggacaaggagaatgcggtggcacccggaagcttggggac

SEQ ID NO: 5100 - DNA, 31 bp, Homo sapiens
  chr16:67363908-67363939
  hypo
cccattttttttccctcgcattttcaattgt

SEQ ID NO: 5101 - DNA, 31 bp, Homo sapiens
  chr16:67469688-67469719
  hypo
ccaggagacattagccgcgtgctagagttca

SEQ ID NO: 5102 - DNA, 86 bp, Homo sapiens
  chr16:67469725-67469811
  hypo
cccacaccaccagcaccggtcagtggcaagtgtccaccaggcaagggcgtggcaggggagtgggaaggacacggggactggaagtt

SEQ ID NO: 5103 - DNA, 40 bp, Homo sapiens
  chr16:67469856-67469896
  hypo
caggcctgtggggcctcgtcaacaacgcaggccacaatga

SEQ ID NO: 5104 - DNA, 71 bp, Homo sapiens
  chr16:67469986-67470057
  hypo
cctcctgcccctgctgcgcagctcaaggggccgcatcgtgactgtggggagcccagcgggtgagtgccccc

SEQ ID NO: 5105 - DNA, 50 bp, Homo sapiens
  chr16:67470487-67470537
  hypo
cagagtcagtgagaaacgtgggtcagtgggaaaagcgcaagcaattgctg

SEQ ID NO: 5106 - DNA, 53 bp, Homo sapiens
  chr16:67470862-67470915
  hypo
acccaaacctgagccccggcccttccccagcagtggctcggtgagccatgtgc

SEQ ID NO: 5107 - DNA, 52 bp, Homo sapiens
  chr16:67470933-67470985
  hypo
gcagcacaggaggctccgtgagcccttggttcctccccgaaaacccccagca

SEQ ID NO: 5108 - DNA, 54 bp, Homo sapiens
  chr16:67472274-67472328
  hypo
aggagaactgggcagccgctaggacagcgtactacaccccggacaggcaggtga

SEQ ID NO: 5109 - DNA, 8 bp, Homo sapiens
  chr16:67472346-67472354
  hypo
accacata

SEQ ID NO: 5110 - DNA, 58 bp, Homo sapiens; identical to SEQ ID NO: 4752
  chr16:68298828-68298886
  hypo

SEQ ID NO: 5111 - DNA, 35 bp, Homo sapiens; identical to SEQ ID NO: 4753
  chr16:69373089-69373124
  hypo

SEQ ID NO: 5112 - DNA, 9 bp, Homo sapiens
  chr16:70151412-70151421
  hypo
tccatctca

SEQ ID NO: 5113 - DNA, 46 bp, Homo sapiens
  chr16:70151517-70151563
  hypo
gcacagaacctggagccgaatagaacactcacgcctcacctgatat

SEQ ID NO: 5114 - DNA, 117 bp, Homo sapiens
  chr16:70808261-70808378
  hypo
cattggagggatgtcacggaagtgctgcgcctcagtgcaccctatcgggggaacgtgttgtctgttagcctcattactggtgacgttaacctcatcgcctgacgcacagtgtctgct

SEQ ID NO: 5115 - DNA, 31 bp, Homo sapiens
  chr16:74659433-74659464
  hypo
caggcgcaatggctcacgcctataatccaac

SEQ ID NO: 5116 - DNA, 42 bp, Homo sapiens; identical to SEQ ID NO: 4754
  chr16:74659503-74659545
  hypo

SEQ ID NO: 5117 - DNA, 31 bp, Homo sapiens; identical to SEQ ID NO: 603
  chr16:74659594-74659625
  hypo

SEQ ID NO: 5118 - DNA, 31 bp, Homo sapiens
  chr16:75464994-75465025
  hypo
taatctgtataacatacggttcagctgtcaa

SEQ ID NO: 5119 - DNA, 62 bp, Homo sapiens
  chr16:81580583-81580645
  hypo
gcaaaggccactcccccgggagtgcacagccttgcggtattaaagaccggcacatattctgt

SEQ ID NO: 5120 - DNA, 31 bp, Homo sapiens
  chr16:81596519-81596550
  hypo
tctgctgggatctgccgcgtcctcgagctga

SEQ ID NO: 5121 - DNA, 35 bp, Homo sapiens
  chr16:85661741-85661776
  hypo
ggcctcaagggagctgcgcccggctgctgcggccc

SEQ ID NO: 5122 - DNA, 48 bp, Homo sapiens
  chr16:87447845-87447893
  hypo
cggccctctctgtgtacgagtaacccacctgcccggcacacgggccct

SEQ ID NO: 5123 - DNA, 95 bp, Homo sapiens
  chr16:87895431-87895526
  hypo
ctgtgagctccccctacggccttgccccgaatcccgtgatgcagcgtgacctgcctaggtgccggcggcactttcatgtgcggctgggaaagtca

SEQ ID NO: 5124 - DNA, 48 bp, Homo sapiens
  chr16:87895535-87895583
  hypo
actaatcactggctgccgcctgcaatgagcccacggcttgagctctgg

SEQ ID NO: 5125 - DNA, 54 bp, Homo sapiens
  chr16:89815124-89815178
  hypo
gcctggaagctgctgccgcagaggacagacgaaggcaggcggaggaggatcctg

SEQ ID NO: 5126 - DNA, 42 bp, Homo sapiens
  chr16:89815185-89815227
  hypo
ggggctgtattggtggcgacagcacagcgtacactctgctcc

SEQ ID NO: 5127 - DNA, 31 bp, Homo sapiens
  chr17:1446392-1446423
  hypo
ccccccacaaggaggacgaatggcagagtgt

SEQ ID NO: 5128 - DNA, 31 bp, Homo sapiens
  chr17:1446645-1446676
  hypo
gcatcagagcgttctccggcgcctcccaccc

SEQ ID NO: 5129 - DNA, 31 bp, Homo sapiens
  chr17:3721568-3721599
  hypo
aactgagattccacttcgtcagcatacatag

SEQ ID NO: 5130 - DNA, 31 bp, Homo sapiens
  chr17:3721611-3721642
  hypo
ttttctttggtgaaggcgtggaaatcatttt

SEQ ID NO: 5131 - DNA, 51 bp, Homo sapiens
  chr17:7224769-7224820
  hypo
gctccccacctaggaccgaggtaggacaaggacggacgatgttcagcccac

SEQ ID NO: 5132 - DNA, 31 bp, Homo sapiens
  chr17:7224881-7224912
  hypo
cagcctctctaggttccggccatagttcatc

SEQ ID NO: 5133 - DNA, 31 bp, Homo sapiens
  chr17:7224914-7224945
  hypo
ctggagctgcccatcacgcctcacttcacag

SEQ ID NO: 5134 - DNA, 35 bp, Homo sapiens
  chr17:7224952-7224987
  hypo
ccatccaagtggtcttcgtccggagctctggcagg

SEQ ID NO: 5135 - DNA, 81 bp, Homo sapiens
  chr17:7224996-7225077
  hypo
agccctgggccaccaccgcctgccccgggtcccatctcccccggtgctagtgtggtcagccccagccgcagggaacctgcc

SEQ ID NO: 5136 - DNA, 97 bp, Homo sapiens
  chr17:7225093-7225190
  hypo
cttccactttcacctacgagacagagaaaacataagctggccctgtcgtgatgggcctcgcagcccctctgtcacatcactacggcctacctcaaag

SEQ ID NO: 5137 - DNA, 31 bp, Homo sapiens
  chr17:8424445-8424476
  hypo
gttagggttggtgtttcggagagttgccatc

SEQ ID NO: 5138 - DNA, 31 bp, Homo sapiens
  chr17:15945326-15945357
  hypo
tgtgagccaccgtgcccggccagaatgtgaa

SEQ ID NO: 5139 - DNA, 24 bp, Homo sapiens
  chr17:18110682-18110706
  hypo
aaaaaaatgttttggccggcacag

SEQ ID NO: 5140 - DNA, 31 bp, Homo sapiens; identical to SEQ ID NO: 4759
  chr17:26925693-26925724
  hypo

SEQ ID NO: 5141 - DNA, 245 bp, Homo sapiens; identical to SEQ ID NO: 4760
  chr17:26925726-26925971
  hypo

SEQ ID NO: 5142 - DNA, 52 bp, Homo sapiens; identical to SEQ ID NO: 4761
  chr17:26925973-26926025
  hypo

SEQ ID NO: 5143 - DNA, 128 bp, Homo sapiens; identical to SEQ ID NO: 4762
  chr17:26926083-26926211
  hypo

SEQ ID NO: 5144 - DNA, 31 bp, Homo sapiens
  chr17:36967833-36967864
  hypo
agtctcctttgaggggcgtggctcatgcaca

SEQ ID NO: 5145 - DNA, 31 bp, Homo sapiens
  chr17:46152935-46152966
  hypo
tcatcaatgtctgaagcgcatgagattttcc

SEQ ID NO: 5146 - DNA, 353 bp, Homo sapiens; identical to SEQ ID NO: 4765
  chr17:54910846-54911199
  hypo

SEQ ID NO: 5147 - DNA, 35 bp, Homo sapiens
  chr17:55426662-55426697
  hypo
tttgtgtgtgtgtgcacgtgcgcttccatccctga

SEQ ID NO: 5148 - DNA, 18 bp, Homo sapiens
  chr17:60127001-60127019
  hypo
aaatgtgaaggctgggcg

SEQ ID NO: 5149 - DNA, 31 bp, Homo sapiens
  chr17:65109648-65109679
  hypo
tacaggcgtgagcaaccgccaagtagagatt

SEQ ID NO: 5150 - DNA, 31 bp, Homo sapiens
  chr17:78614859-78614890
  hypo
ccttgtttgtgtacttcgtggcccctatttt

SEQ ID NO: 5151 - DNA, 31 bp, Homo sapiens
  chr17:78817768-78817799
  hypo
ggccgggcaacccagacgctcagcccagcag

SEQ ID NO: 5152 - DNA, 51 bp, Homo sapiens
  chr17:79234792-79234843
  hypo
gcaccatgcatgggcacgggggacagaaatggccttcgcctctccttagct

SEQ ID NO: 5153 - DNA, 103 bp, Homo sapiens
  chr17:79803002-79803105
  hypo
gctgtgaccccactcacgtcatcatcccctgccccatcctggccaccgctctccaggaatttcttaaaaccatccagcgtgcgttccccgttgtaatcaatga

SEQ ID NO: 5154 - DNA, 22 bp, Homo sapiens
  chr18:20554443-20554465
  hypo
tgtttttgagactctccgccac

SEQ ID NO: 5155 - DNA, 22 bp, Homo sapiens
  chr18:20554704-20554726
  hypo
gccactgcgcctggcctatttt

SEQ ID NO: 5156 - DNA, 31 bp, Homo sapiens
  chr18:46624147-46624178
  hypo
ccttgcatttatatttcgtttatagagcagt

SEQ ID NO: 5157 - DNA, 40 bp, Homo sapiens
  chr18:59975662-59975702
  hypo
agagctttggactgtgcgctgtggctcacgcctgtaatct

SEQ ID NO: 5158 - DNA, 31 bp, Homo sapiens
  chr18:72171141-72171172
  hypo
cacgcagccacactgccgctgggacaaatga

SEQ ID NO: 5159 - DNA, 31 bp, Homo sapiens
  chr18:72171538-72171569
  hypo
tgggacaaatgaggggcgtcaggccatacac

SEQ ID NO: 5160 - DNA, 31 bp, Homo sapiens
  chr18:77463263-77463294
  hypo
gcttcttcatgagggtcgtaactaacttaga

SEQ ID NO: 5161 - DNA, 31 bp, Homo sapiens
  chr18:77463372-77463403
  hypo
acaggatttaaaggatcgaagtttagcttcc

SEQ ID NO: 5162 - DNA, 50 bp, Homo sapiens
  chr18:77463413-77463463
  hypo
agactcatttgcatgtcgatcatatgtaagcgagtcggtgttgctcattt

SEQ ID NO: 5163 - DNA, 48 bp, Homo sapiens
  chr18:77463532-77463580
  hypo
ctgaaaatcacccatgcgttataccaggttacccgggaatgttgattt

SEQ ID NO: 5164 - DNA, 107 bp, Homo sapiens
  chr19:581581-581688
  hypo
gtcctggatggtgagccgtctgccctcctgcccacatgccctgctctcggggtggcccagggccactcctggtccgtccctgccagccccaccgctgacccagagct

SEQ ID NO: 5165 - DNA, 37 bp, Homo sapiens
  chr19:582136-582173
  hypo
gcactcagaagatgcacgtggccggggctgatgagct

SEQ ID NO: 5166 - DNA, 82 bp, Homo sapiens
  chr19:994441-994523
  hypo
ctcctcagttctgtgtcgtgttcgggtttttcctctgtgactgggccgtcttggtgtctcgtggcacgcgtcacagtggtgc

SEQ ID NO: 5167 - DNA, 31 bp, Homo sapiens
  chr19:1648784-1648815
  hypo
ctgtttcaaccccaaacgctgccactgggca

SEQ ID NO: 5168 - DNA, 50 bp, Homo sapiens
  chr19:2120003-2120053
  hypo
tggctggggaccctttcgggatcccagaagtcaggcgccttcctgagccg

SEQ ID NO: 5169 - DNA, 31 bp, Homo sapiens; identical to SEQ ID NO: 4766
  chr19:5608065-5608096
  hypo

SEQ ID NO: 5170 - DNA, 35 bp, Homo sapiens
  chr19:5608770-5608805
  hypo
agactcttggctaggcgcggtggctcacgcctgta

SEQ ID NO: 5171 - DNA, 36 bp, Homo sapiens
  chr19:5609544-5609580
  hypo
ctttaggtgatacgcccgcctcggcctcccaaatta

SEQ ID NO: 5172 - DNA, 30 bp, Homo sapiens
  chr19:10463022-10463052
  hypo
caggcttgagccaccgcgcctggcccagcc

SEQ ID NO: 5173 - DNA, 31 bp, Homo sapiens
  chr19:12347792-12347823
  hypo
cttcaagcccccctgacgggaccccaaagaa

SEQ ID NO: 5174 - DNA, 31 bp, Homo sapiens
  chr19:12787009-12787040
  hypo
cacagagggaggacaccgtagccaaacaggc

SEQ ID NO: 5175 - DNA, 31 bp, Homo sapiens
  chr19:13879830-13879861
  hypo
cgatgttaatggggtccggattgcagcacct

SEQ ID NO: 5176 - DNA, 31 bp, Homo sapiens
  chr19:15484900-15484931
  hypo
cagacttcagcagccacgaggcctgtccatg

SEQ ID NO: 5177 - DNA, 31 bp, Homo sapiens
  chr19:17692025-17692056
  hypo
gccttctctgtggagccgctgctcatctacc

SEQ ID NO: 5178 - DNA, 31 bp, Homo sapiens
  chr19:34625925-34625956
  hypo
gtgcttcacctaaattcgcctaaattttcac

SEQ ID NO: 5179 - DNA, 21 bp, Homo sapiens
  chr19:40749071-40749092
  hypo
caagagcgatcaccaatttcc

SEQ ID NO: 5180 - DNA, 31 bp, Homo sapiens
  chr19:41872642-41872673
  hypo
catgagccactgctcccggctgaggtcttca

SEQ ID NO: 5181 - DNA, 31 bp, Homo sapiens
  chr19:48681748-48681779
  hypo
actacataccaggccccgggcagtctgtgtt

SEQ ID NO: 5182 - DNA, 31 bp, Homo sapiens; identical to SEQ ID NO: 4767
  chr19:54206967-54206998
  hypo

SEQ ID NO: 5183 - DNA, 31 bp, Homo sapiens
  chr20:371969-372000
  hypo
tatgcgcggctgcccccgcacaagcatgtgg

SEQ ID NO: 5184 - DNA, 31 bp, Homo sapiens; identical to SEQ ID NO: 4768
  chr20:10491693-10491724
  hypo

SEQ ID NO: 5185 - DNA, 42 bp, Homo sapiens
  chr20:20372435-20372477
  hypo
aggtggggaggcctcccgcacagggcccgcctttcccaggac

SEQ ID NO: 5186 - DNA, 112 bp, Homo sapiens
  chr20:20372496-20372608
  hypo
cctgagttaggggctgcgtctctcgtgctgctgtcccttcccactgcagggcgttgctctgtacctggccgctgtgagaacaaagcctgcgcagtggcgatggactctggta

SEQ ID NO: 5187 - DNA, 31 bp, Homo sapiens
  chr20:20380169-20380200
  hypo
aactgtggccaactggcggctcagacacaga

SEQ ID NO: 5188 - DNA, 31 bp, Homo sapiens
  chr20:20392392-20392423
  hypo
acactcctgaatgaaccggagcacattactg

SEQ ID NO: 5189 - DNA, 31 bp, Homo sapiens
  chr20:34730052-34730083
  hypo
aaaaaagaacaaaaaacgtattttgtagaaa

SEQ ID NO: 5190 - DNA, 31 bp, Homo sapiens
  chr20:47745702-47745733
  hypo
tagtaaaataaaaacacgaaaagaagctcag

SEQ ID NO: 5191 - DNA, 98 bp, Homo sapiens; identical to SEQ ID NO: 4769
  chr20:55966871-55966969
  hypo

SEQ ID NO: 5192 - DNA, 39 bp, Homo sapiens
  chr20:57241749-57241788
  hypo
tctgggattacaggcgtgagccaccgcgcccagccgatt

SEQ ID NO: 5193 - DNA, 31 bp, Homo sapiens
  chr20:61025493-61025524
  hypo
ggcagacatcccagggcgctgggctgtagct

SEQ ID NO: 5194 - DNA, 59 bp, Homo sapiens
  chr20:61913594-61913653
  hypo
gtcagcttctggttcccgccagggccgccgttttctcgtctgcacgggagggctgcggc

SEQ ID NO: 5195 - DNA, 86 bp, Homo sapiens
  chr21:45346438-45346524
  hypo
ctgggtttccatgctgcggcatttaagaaaagagctctgtgtcgtgctgctggggtagcttccgtgagctacgctggccttttttt

SEQ ID NO: 5196 - DNA, 58 bp, Homo sapiens
  chr21:45558784-45558842
  hypo
ctgggactgatgtgcccgtgtgtctgagcccacgtcccctgggcgaagctcccatttt

SEQ ID NO: 5197 - DNA, 90 bp, Homo sapiens
  chr21:45558843-45558933
  hypo
actgacctgtccagagcgttctgggtgagcctgccctgcgtgtccatggtgcggcgcgctctaatgagctgcagccgtggccactctgca

SEQ ID NO: 5198 - DNA, 34 bp, Homo sapiens
  chr21:45558943-45558977
  hypo
cagtcacccatggggacggcgaacacccactgcc

SEQ ID NO: 5199 - DNA, 31 bp, Homo sapiens
  chr21:47689812-47689843
  hypo
gacacagtttactctgcgcaaaccccagggg

SEQ ID NO: 5200 - DNA, 30 bp, Homo sapiens
  chr22:18434476-18434506
  hypo
ttttgagacagggtctcgctcaggcatcca

SEQ ID NO: 5201 - DNA, 31 bp, Homo sapiens
  chr22:18443244-18443275
  hypo
acaggtaccacacatgcgaacccagcatatg

SEQ ID NO: 5202 - DNA, 31 bp, Homo sapiens
  chr22:18443287-18443318
  hypo
gcaccctggaacaccccgcccaggagtgtgt

SEQ ID NO: 5203 - DNA, 31 bp, Homo sapiens
  chr22:18443328-18443359
  hypo
gactccaggagctctgcgaactgttctggaa

SEQ ID NO: 5204 - DNA, 31 bp, Homo sapiens
  chr22:18443373-18443404
  hypo
gattggcaaggggctccgggaacagatcctg

SEQ ID NO: 5205 - DNA, 35 bp, Homo sapiens
  chr22:18443408-18443443
  hypo
tgtgagactgtgtccccgtccgcttagggaaggac

SEQ ID NO: 5206 - DNA, 36 bp, Homo sapiens
  chr22:18443477-18443513
  hypo
tttggaaacagacacccgccccggggtcagatttga

SEQ ID NO: 5207 - DNA, 31 bp, Homo sapiens
  chr22:20908749-20908780
  hypo
ggactctgcaacagcacgagtggagctgtgt

SEQ ID NO: 5208 - DNA, 85 bp, Homo sapiens
  chr22:20908796-20908881
  hypo
gccctccctgggagagcgtcccctggccactgtgttaccgcttgctcagaagggcccatcgtgctttgtacgctcacccagcagg

SEQ ID NO: 5209 - DNA, 31 bp, Homo sapiens
  chr22:24054815-24054846
  hypo
ccccagtaataatcagcgctctctcatcctt

SEQ ID NO: 5210 - DNA, 102 bp, Homo sapiens
  chr22:24054867-24054969
  hypo
ctctctcagggtgaaccgtgtattttggacttcacgatctttttttagatggggtctcgctctgtcacccaggctgtctcagcctcccgagtacctgggatt

SEQ ID NO: 5211 - DNA, 31 bp, Homo sapiens
  chr22:30977856-30977887
  hypo
ggtcccaagggttagacgcatcctggaagtc

SEQ ID NO: 5212 - DNA, 62 bp, Homo sapiens
  chr22:30977924-30977986
  hypo
ctggtccctgctgctccgaagactggctggccctcccctccctgctccggctctcccacttc

SEQ ID NO: 5213 - DNA, 47 bp, Homo sapiens
  chr22:30977990-30978037
  hypo
aggtctagctcagactcggacagaccactttccgacctggccagagc

SEQ ID NO: 5214 - DNA, 31 bp, Homo sapiens
  chr22:37007645-37007676
  hypo
tgctgtccaagcaccccgaaatgccccttct

SEQ ID NO: 5215 - DNA, 31 bp, Homo sapiens
  chr22:40621437-40621468
  hypo
aaaacatatttgaggccgggtgcagtggctc

SEQ ID NO: 5216 - DNA, 4 bp, Homo sapiens
  chr22:40621473-40621477
  hypo
agta

SEQ ID NO: 5217 - DNA, 2 bp, Homo sapiens
  chr22:40624791-40624793
  hypo
tg

SEQ ID NO: 5218 - DNA, 31 bp, Homo sapiens
  chr22:40624801-40624832
  hypo
acagacatgagccaccgcgcccagccccagg

SEQ ID NO: 5219 - DNA, 31 bp, Homo sapiens
  chr22:43038393-43038424
  hypo
caggtataagcccctgcgtccagcccataaa

SEQ ID NO: 5220 - DNA, 31 bp, Homo sapiens
  chr22:43098230-43098261
  hypo
cagagagggccagggccgggctcacaggact

SEQ ID NO: 5221 - DNA, 31 bp, Homo sapiens
  chr22:43537480-43537511
  hypo
tccatggtcacactgacgccaacccagggct

SEQ ID NO: 5222 - DNA, 31 bp, Homo sapiens
  chr22:46585907-46585938
  hypo
atctatttctgtgaaccgatgctaggtgaag

SEQ ID NO: 5223 - DNA, 53 bp, Homo sapiens
  chr22:47299399-47299452
  hypo
cttccaccctagctctcgcctctggttgctgctctgagcgtgagtctagaggg

SEQ ID NO: 5224 - DNA, 31 bp, Homo sapiens
  chr22:47393301-47393332
  hypo
gcttatcacctgacatcgggaaatactggcc

SEQ ID NO: 5225 - DNA, 98 bp, Homo sapiens; identical to SEQ ID NO: 4771
  chr22:50970391-50970489
  hypo

SEQ ID NO: 5226 - DNA, 31 bp, Homo sapiens
  chrY:15562413-15562444
  hypo
aacaagcatggccaggcgcagttgctcacgc

SEQ ID NO: 5227 - DNA, 31 bp, Homo sapiens
  NW_001838987.1_19978397-19979692:186-217
  hypo
gtctttagctgtcttacgaaagtattcttca

SEQ ID NO: 5228 - DNA, 45 bp, Homo sapiens
  chr1:154931444-154931489
  hypo
atggcatcctggtcatcgttcacctcactccgacaggcaccacat

SEQ ID NO: 5229 - DNA, 96 bp, Homo sapiens
  chr2:239074293-239074389
  hypo
ccatctctgtgaatggcgtcctgtacctgcaggtgagtgcggcaggcttgggcatcgaggggcaccgcctgggcatggccacgggtggctgggtgc

SEQ ID NO: 5230 - DNA, 31 bp, Homo sapiens
  chr2:239074408-239074439
  hypo
ctcaggatcactgggtcgggtgcagcaccct

SEQ ID NO: 5231 - DNA, 29 bp, Homo sapiens
  chr3:10061732-10061761
  hypo
aatgaaattctgaggtcggccaggcgtgg

SEQ ID NO: 5232 - DNA, 31 bp, Homo sapiens
  chr11:2987099-2987130
  hypo
tctgagatccaacttgcgggcaccatggaag

SEQ ID NO: 5233 - DNA, 31 bp, Homo sapiens
  chr11:2987133-2987164
  hypo
gggcatcatggaagagcgtacaattcttatc

SEQ ID NO: 5234 - DNA, 31 bp, Homo sapiens
  chr14:103977416-103977447
  hypo
ctgaggttcttatttgcgtttccagctccct

SEQ ID NO: 5235 - DNA, 53 bp, Homo sapiens
  chr14:103977506-103977559
  hypo
gataaacagggggcttcgctggagcgggggcagggggcgcggtcactgaacag

SEQ ID NO: 5236 - DNA, 31 bp, Homo sapiens
  chr16:2282518-2282549
  hypo
ctgtggggcctccttccgcaccaagggctca

SEQ ID NO: 5237 - DNA, 74 bp, Homo sapiens
  chr17:2182383-2182457
  hypo
gtggttattacaaaggcgaaatggccagtctcagggatcaggaaacgcttccttgaaaacgtgacatttaggct

SEQ ID NO: 5238 - DNA, 36 bp, Homo sapiens
  chr17:2182504-2182540
  hypo
cagtgagaggtaagagcggtgcgggcagagagatga

SEQ ID NO: 5239 - DNA, 30 bp, Homo sapiens
  chr17:19842112-19842142
  hypo
cagctcactgcagcctcgacctcccaaggc

SEQ ID NO: 5240 - DNA, 31 bp, Homo sapiens
  chr17:19842380-19842411
  hypo
tgaaaagaataccatacgttacagagctggc

SEQ ID NO: 5241 - DNA, 31 bp, Homo sapiens
  chr17:72811188-72811219
  hypo
gttgaaaatttgaggacggggtgtcagagag

SEQ ID NO: 5242 - DNA, 31 bp, Homo sapiens
  chr17:72811222-72811253
  hypo
gaccttctccctctgccgctttctggctgtg

SEQ ID NO: 5243 - DNA, 57 bp, Homo sapiens
  chr17:72811288-72811345
  hypo
agtaagatgagggcatcgtcacctgcaccagtgaccttgcagcgggccatgagcatg

SEQ ID NO: 5244 - DNA, 31 bp, Homo sapiens
  chr17:72811350-72811381
  hypo
aaaccatgtgtgttagcgcttggcagagtgt

SEQ ID NO: 5245 - DNA, 41 bp, Homo sapiens
  chr19:8004834-8004875
  hypo
caataatccaatcaggcggaaggggccgcctgtggtcaact

SEQ ID NO: 5246 - DNA, 22 bp, Homo sapiens
  chr19:11121908-11121930
  hypo
ttttttttttttgaaacggagc

SEQ ID NO: 5247 - DNA, 31 bp, Homo sapiens
  chr22:50894557-50894588
  hypo
caagcaaacctagacccgtccacttggctct

SEQ ID NO: 5248 - DNA, 43 bp, Homo sapiens
  chr22:50894599-50894642
  hypo
gggcccagcaccaaggcgggcagagggacggggcagtgcagag

SEQ ID NO: 5249 - DNA, 62 bp, Homo sapiens
  chr22:50894659-50894721
  hypo
tgagtcctccagtgagcgcaggaaggaggctgggctgggctcagcagcggggcagcctggga

SEQ ID NO: 5250 - DNA, 31 bp, Homo sapiens
  chr22:50895155-50895186
  hypo
tggggctggctgggcccggcctccagggagg

SEQ ID NO: 5251 - DNA, 31 bp, Homo sapiens
  chr1:1535609-1535640
  hyper
tacgggtgcgggggatcgggggtggggggga

SEQ ID NO: 5252 - DNA, 60 bp, Homo sapiens
  chr1:2574438-2574498
  hyper
cccgacccgtagttcacggcccggggtggtagtgaagcctcggcccgcgcaggacccgca

SEQ ID NO: 5253 - DNA, 31 bp, Homo sapiens
  chr1:85463079-85463110
  hyper
agggaggcgtggggcacgccaagggcgccgt

SEQ ID NO: 5254 - DNA, 149 bp, Homo sapiens
  chr1:166944963-166945112
  hyper
gaggcgcgggggaggccgccccgcgggccgcgccgagcggggagcgaccatcgcggcttctcccagggacgcccgcgctcgggaacccgggcgagaacgctggctggggactcgagcaggggagcctgtgtctgcgggcagccacagcc

SEQ ID NO: 5255 - DNA, 37 bp, Homo sapiens
  chr1:170043653-170043690
  hyper
caggcgcggttatttccggggacggtggccaaagtac

SEQ ID NO: 5256 - DNA, 80 bp, Homo sapiens
  chr1:236444827-236444907
  hyper
tcaggtctctgctccccgggttttctgctcgccagaaatcacctcttttctggcccggccctgcccggccctccccgcgt

SEQ ID NO: 5257 - DNA, 78 bp, Homo sapiens
  chr1:236445120-236445198
  hyper
cggggccggggaacgacgggcggcccaggcgacgacccaaggggacggttcccagcggccgagcgactccagggtcag

SEQ ID NO: 5258 - DNA, 102 bp, Homo sapiens
  chr1:236445298-236445400
  hyper
ggccccgcccccggctcgcttggctcctcggccacgcccccaagcgcggggccttgtgggagttgtggtcctgggcggtcgcctaggcgccgcggcaggaag

SEQ ID NO: 5259 - DNA, 87 bp, Homo sapiens
  chr1:236445484-236445571
  hyper
aatgaggcgggaccacgcgggcctccaaaacaccggggggtgcgggcgggggaagcggggcgacctcttctccgggaaaccaggctg

SEQ ID NO: 5260 - DNA, 59 bp, Homo sapiens
  chr1:244013706-244013765
  hyper
catcaccagaaaacaccgctcgggcgggggccgggtcacgccggcggggcggcggctct

SEQ ID NO: 5261 - DNA, 36 bp, Homo sapiens
  chr1:244013804-244013840
  hyper
gcctcctcccgggctgcgcctcgctgaggggacccc

SEQ ID NO: 5262 - DNA, 31 bp, Homo sapiens
  chr1:244014059-244014090
  hyper
aaaccagcggtgccccgcgccccctctcctc

SEQ ID NO: 5263 - DNA, 31 bp, Homo sapiens
  chr2:677763-677794
  hyper
gacattgcccactcctcggaccctgcaggac

SEQ ID NO: 5264 - DNA, 31 bp, Homo sapiens
  chr2:73511725-73511756
  hyper
gaggggtcttcggcgccgccctaggggtgta

SEQ ID NO: 5265 - DNA, 35 bp, Homo sapiens
  chr2:85360497-85360532
  hyper
ctcctccctccctccccgctcgcccctccccggcg

SEQ ID NO: 5266 - DNA, 31 bp, Homo sapiens
  chr2:177502433-177502464
  hyper
gggaaaaacgggaacccggtacccgcccgcg

SEQ ID NO: 5267 - DNA, 63 bp, Homo sapiens
  chr2:198175714-198175777
  hyper
acctgcacgcggcgcccggccgggccggccccgggccctgggcggatcgcgggcctccctgac

SEQ ID NO: 5268 - DNA, 77 bp, Homo sapiens
  chr2:200715513-200715590
  hyper
gccaggctgccgcaacgcgtgctggggccagaaccccgctgctgggattccctgcgcggtgccgactaggttcctgg

SEQ ID NO: 5269 - DNA, 86 bp, Homo sapiens
  chr2:200715612-200715698
  hyper
gggctgaaagggaacccgaagtgactcccggcctccccacaggtctcgcgggacgcagcagcggcgagggcgcggggttgtggcgc

SEQ ID NO: 5270 - DNA, 31 bp, Homo sapiens
  chr2:200715826-200715857
  hyper
accgcccagcccaagtcgccgccgcgcgtgg

SEQ ID NO: 5271 - DNA, 91 bp, Homo sapiens
  chr2:200715859-200715950
  hyper
cgcgcgcagcctccgccgccgcgcgtggcccgcgcgcagcgtctgccgccggctccgcctcccggacgcccggagcgcgccccaccccagc

SEQ ID NO: 5272 - DNA, 88 bp, Homo sapiens
  chr2:200715992-200716080
  hyper
ggcaccacgtgcctggcgtccttgaacgcttcagatttttatcagtgttgccttttcgtttgctcttccgtatcgccagaccctccac

SEQ ID NO: 5273 - DNA, 140 bp, Homo sapiens
  chr2:230932577-230932717
  hyper
ctgcgcgccctgggtgcgggatcgtgcccgcggggtccggcctcgcgccccacccttcgagcgcccgcccccacccgcgctcggtgctcccgctcccttggcaccccgagaccacatccccacttcgggcaccccgcatc

SEQ ID NO: 5274 - DNA, 31 bp, Homo sapiens
  chr2:230933366-230933397
  hyper
agatttgttgcaatgtcgcctatcatcctgg

SEQ ID NO: 5275 - DNA, 42 bp, Homo sapiens
  chr3:101231553-101231595
  hyper
ggaaagtggggtcaggcgctgagaagccgaaatgaaattgga

SEQ ID NO: 5276 - DNA, 67 bp, Homo sapiens
  chr3:101231733-101231800
  hyper
ggcttcgatgacagctcggaccgggtcttcgactccaggggcgggggcgacccgggagccttccatt

SEQ ID NO: 5277 - DNA, 79 bp, Homo sapiens
  chr3:101231825-101231904
  hyper
cccgccctcgcccccgcggcttcgggccgcaaccccagctgccgcctgcgcctcccgtttcccccgggtaggagacaat

SEQ ID NO: 5278 - DNA, 124 bp, Homo sapiens
  chr3:101231918-101232042
  hyper
tctgaccctttctcaccggatgaagatggccgtcgcccgagctttctcttgtccatcttctcccgctgctgaaatttcagttgcaggcgctgtcacctcaggacccctccggcttggagaggga

SEQ ID NO: 5279 - DNA, 101 bp, Homo sapiens
  chr3:101232085-101232186
  hyper
aaaagcccgcaaagtgcgaagcgcgcttgcgcaagagccgtcgcctgcccttcgaccggaaatcagccgcccctcccaccttcgaccggaaatcacttcct

SEQ ID NO: 5280 - DNA, 45 bp, Homo sapiens
  chr3:101232201-101232246
  hyper
gggctgcctcttccagcgtttttttggtggcgtttatttcatgat

SEQ ID NO: 5281 - DNA, 50 bp, Homo sapiens
  chr3:123167992-123168042
  hyper
tgggaggtggagaggacgggggagggggcgacgggcggagcaacagctcc

SEQ ID NO: 5282 - DNA, 61 bp, Homo sapiens
  chr3:159481557-159481618
  hyper
cctgcccggcgtgggccgagagcgccccccaccccgagccttccggcgggtgggaggaggg

SEQ ID NO: 5283 - DNA, 48 bp, Homo sapiens
  chr3:186544978-186545026
  hyper
tctctgactttcttctcggaattgcagggcgaccggcagcaccaagaa

SEQ ID NO: 5284 - DNA, 34 bp, Homo sapiens
  chr3:195636197-195636231
  hyper
cgccctcctcctgcaccgccgggcccaccccgcc

SEQ ID NO: 5285 - DNA, 39 bp, Homo sapiens
  chr4:2043631-2043670
  hyper
aggttcctctaaacccgcggccagcgcagtctcgggttt

SEQ ID NO: 5286 - DNA, 100 bp, Homo sapiens
  chr4:2043956-2044056
  hyper
gggcttggacaagggtcgtggggcccgcgggaggggacgggggctcaccggcccggggcgggcggggcgggcgccgctgacccctcgctggcttcagggc

SEQ ID NO: 5287 - DNA, 96 bp, Homo sapiens
  chr4:2044138-2044234
  hyper
ctgctgctgagtctggcgctgctgggcgcccgggcccgcgccgagcccgccgggagtgccgtccccgcgcagagtaggtgccgggggccgggttcc

SEQ ID NO: 5288 - DNA, 55 bp, Homo sapiens
  chr4:75858572-75858627
  hyper
aactgcaggtaattggcgccatcctcccggaagggcaggtcgcggggtgggcccc

SEQ ID NO: 5289 - DNA, 31 bp, Homo sapiens
  chr5:17217632-17217663
  hyper
gaggagggaggctgggcgggcggacgcgcgg

SEQ ID NO: 5290 - DNA, 72 bp, Homo sapiens
  chr5:78531491-78531563
  hyper
cctaacaggctgggggcgagccccacatagttcagcacaccgttccccgcggcaacacgctacttctgaacg

SEQ ID NO: 5291 - DNA, 71 bp, Homo sapiens
  chr5:78531630-78531701
  hyper
tacctggaattcgaaacgtctcagttcctccgccttagttcctcttttcccgggttcggaggccacctgtg

SEQ ID NO: 5292 - DNA, 58 bp, Homo sapiens
  chr5:110074797-110074855
  hyper
cgcgtcatcctgcccccgctgcgatgcatccgcggcgcccggacggatttgatggctt

SEQ ID NO: 5293 - DNA, 31 bp, Homo sapiens
  chr5:110075104-110075135
  hyper
tgagaagcatggggaccgacacagggatgag

SEQ ID NO: 5294 - DNA, 31 bp, Homo sapiens
  chr5:176036591-176036622
  hyper
gggaagatgaatcaacgcgggaggacgccct

SEQ ID NO: 5295 - DNA, 67 bp, Homo sapiens
  chr5:177540464-177540531
  hyper
ccccgccccccacatccgggggccggggccgggctgtgggcttgccgcgcgccggtgagtcaggccg

SEQ ID NO: 5296 - DNA, 115 bp, Homo sapiens
  chr5:177540915-177541030
  hyper
cgggggtggcaaggtgcggcgtgcgcccaggtgtcccctgctcccggtcaccgaggcaccggatcggggaccgaccccgatgctccgctggaggggcaggcggcaggctaccttg

SEQ ID NO: 5297 - DNA, 51 bp, Homo sapiens
  chr6:5085406-5085457
  hyper
cttccaggtgtcccagcggccgcgcctccccgcccccggccctcccccgtc

SEQ ID NO: 5298 - DNA, 31 bp, Homo sapiens
  chr6:11537479-11537510
  hyper
acagtatccacctcaccgagttcagcagccc

SEQ ID NO: 5299 - DNA, 74 bp, Homo sapiens
  chr6:11537522-11537596
  hyper
gggctgcccctgcagcgcgggcccccgaaatgcccgcaccgcccacgccgcccgcaccgcgcgcacccagccgg

SEQ ID NO: 5300 - DNA, 31 bp, Homo sapiens
  chr6:11537919-11537950
  hyper
agaggcgcgcgcgtgcgcgtgcacgagtggc

SEQ ID NO: 5301 - DNA, 41 bp, Homo sapiens
  chr6:28219717-28219758
  hyper
tgggcgtccagggctgcgttttttctcggttctctagccat

SEQ ID NO: 5302 - DNA, 40 bp, Homo sapiens
  chr6:91006337-91006377
  hyper
ctcgttcccagccccccgagtgcgccgggaagggggaggg

SEQ ID NO: 5303 - DNA, 56 bp, Homo sapiens
  chr6:91006379-91006435
  hyper
aggggcgaggggaggccggggggaaagcgagagcggggcggcggcgggagtgggca

SEQ ID NO: 5304 - DNA, 114 bp, Homo sapiens
  chr6:97284790-97284904
  hyper
ccagcaggaaaggagccggcatggggtgcccctctgcagccgaccgttttcctagaaggcctaaccgctcagacgggcaggggaggggggcgggcggcccgggagaaaccgagt

SEQ ID NO: 5305 - DNA, 46 bp, Homo sapiens
  chr6:110500691-110500737
  hyper
ggtcgccggtccccctcggctcgcgggactccgcctagagccccca

SEQ ID NO: 5306 - DNA, 37 bp, Homo sapiens
  chr7:77649268-77649305
  hyper
ggagaactccagggggcgggttcgtctgtggacggga

SEQ ID NO: 5307 - DNA, 31 bp, Homo sapiens
  chr7:149570765-149570796
  hyper
ggacgccccgaaagaccgctggggtgggacc

SEQ ID NO: 5308 - DNA, 156 bp, Homo sapiens
  chr7:149570812-149570968
  hyper
tttggaaataagaatgcggcgtgacgttggctgtgcgggcgcggggctgacgcggaccctataacccatcgccgaaaccgggcggccgcgcccctattcctcggcatttctctctgtccgcggccctgctcagccaatcagcgagtgggctcctag

SEQ ID NO: 5309 - DNA, 31 bp, Homo sapiens
  chr7:149571412-149571443
  hyper
ctgggtctctgacagccgggaacaggcagga

SEQ ID NO: 5310 - DNA, 80 bp, Homo sapiens
  chr8:17013472-17013552
  hyper
gcttcccccgaaagcccgagtagtaaagggaggctccttgcggcccccgcgggctcccagggacccgcaagttgaagcgc

SEQ ID NO: 5311 - DNA, 38 bp, Homo sapiens
  chr8:17013563-17013601
  hyper
gcgggctgcggggacgcgggcctcggtgctgcagactt

SEQ ID NO: 5312 - DNA, 45 bp, Homo sapiens
  chr8:23539859-23539904
  hyper
cggtggagggcggtggcgctgcagtcgcgccggcttctgagcccc

SEQ ID NO: 5313 - DNA, 52 bp, Homo sapiens
  chr8:67524785-67524837
  hyper
ggtcagaaatctggacgcgcattacggggagagtcaccgagaaacctgggca

SEQ ID NO: 5314 - DNA, 145 bp, Homo sapiens
  chr8:81397817-81397962
  hyper
acagcaataagacactcggggcggtgcattttctgtgaaatgactactgtccggggcccgaggtgctgcctcgcacaatgcatcaaaggaggttgtgtccgtggtcgtaacctcttcgcgtgaaaggcaccgcctggtccagtct

SEQ ID NO: 5315 - DNA, 31 bp, Homo sapiens
  chr8:81397983-81398014
  hyper
tcacttccttgggcaccgccacccaccctca

SEQ ID NO: 5316 - DNA, 137 bp, Homo sapiens
  chr8:81398179-81398316
  hyper
gtagcccggccccggccgcacacgcccgccccctccctgagacccccagcccgccgcccggccttttgtccccaacccctcggccgacttccttccccgcggccgcacccccgcccccaggccggaggcgcagccca

SEQ ID NO: 5317 - DNA, 31 bp, Homo sapiens
  chr8:81398321-81398352
  hyper
tttcccggtcccctggcgcccccaccccacc

SEQ ID NO: 5318 - DNA, 31 bp, Homo sapiens
  chr8:81398373-81398404
  hyper
cccccctcccccagcccggcccccacccttt

SEQ ID NO: 5319 - DNA, 132 bp, Homo sapiens
  chr8:81398461-81398593
  hyper
tttgccattcgacctccgccagggcctggtcggacggaaacgctccgccggctttattgtcgcttcgttatgtggcggagccgagcagtttagcgtgcctctcaccctcagcgcctgcgaagccggcggcgg

SEQ ID NO: 5320 - DNA, 31 bp, Homo sapiens
  chr8:81398659-81398690
  hyper
tttaaagagggggcagcggagggtctccccg

SEQ ID NO: 5321 - DNA, 52 bp, Homo sapiens
  chr8:81398908-81398960
  hyper
ggcgaggccgagccccgcgagaccggaacgccgggggcgggggcgagacaga

SEQ ID NO: 5322 - DNA, 31 bp, Homo sapiens
  chr8:121823345-121823376
  hyper
atgctgccaccccctgcgccacccttccccc

SEQ ID NO: 5323 - DNA, 31 bp, Homo sapiens
  chr8:121824597-121824628
  hyper
cttctctccagcccaccgcagccccctttct

SEQ ID NO: 5324 - DNA, 76 bp, Homo sapiens
  chr8:126010221-126010297
  hyper
tgtctgattcctctttcggactccggggactgacatatcataagcgctcaataaatgctagcggaatgaatggaaa

SEQ ID NO: 5325 - DNA, 98 bp, Homo sapiens
  chr8:126011071-126011169
  hyper
ggctgtacagtgtctccgtccgcggaaaaagaagcctctgaacccgcgccggcccgcagcccccgtgccttccggccgctgctcgccgtcgccagagg

SEQ ID NO: 5326 - DNA, 36 bp, Homo sapiens
  chr8:142425764-142425800
  hyper
ggtgaagggtagggggcgtggcggggagaggggatg

SEQ ID NO: 5327 - DNA, 232 bp, Homo sapiens
  chr9:36136545-36136777
  hyper
ggagccctcggcagtcgcggagctgcttcccaggggtgagctctccgggaggcccacggggtggccccgggcgcctccgccctcagctgtcgctccttataaggcgggggccgggcggcgccggaggaggggccgcggcatcagcccggtcctgggctctggggcggcgctgggccgggcgagcgcagtgcagcgcagccgcggggagcgaggagcgcgcggagccggccat

SEQ ID NO: 5328 - DNA, 40 bp, Homo sapiens
  chr9:131183033-131183073
  hyper
tgagggtgcactgccccgccctctccgggtctgcctcggc

SEQ ID NO: 5329 - DNA, 113 bp, Homo sapiens
  chr9:132805514-132805627
  hyper
ggcgggaggggaggggcggggccggtctgacagctcgcgcacgcgcgcccgccccaccccggcccggccccctcccccgggctcccccggccgggtccgcgtcgccctggggt

SEQ ID NO: 5330 - DNA, 382 bp, Homo sapiens
  chr10:12391016-12391398
  hyper
ccgcctccatcccagccgccgccgccgcccgtcgccataacaaccggcccccaccccccccaccccacgccttgcccctcgggtcccccgggccacaggccacagcgcgggaaggcgccccgccctcggcgccccgcatccggccgccgcgcacccccgcccgcccggcgcttccgagccacgcagaggcgccccctcccgccggagacgggaaagccccggcgcccccagactgggctccgtttccagctcccggaggggctggggctctcccgcgtgcgccccgcacctgccgggggcccgtacccgccctcgccggggctccagggggcacgacggccgtggcccggcgctcttgggaggggagcgggacatccccgaa

SEQ ID NO: 5331 - DNA, 45 bp, Homo sapiens
  chr10:12391498-12391543
  hyper
gggggagcgcggcgggcggcagggagggagcgggagggaggcaag

SEQ ID NO: 5332 - DNA, 77 bp, Homo sapiens
  chr10:12391554-12391631
  hyper
aagtgaggctggcaggcggcggcaaaggagccggcgcgcggcggcggcaggaagtctgtgcccgagaacagcagaaa

SEQ ID NO: 5333 - DNA, 215 bp, Homo sapiens
  chr10:12391634-12391849
  hyper
gagccagggagggaccgcggccgcggcggcggcggcgagagcgaaagaggaaactgcagaggaggaagctgcgccgcagcccgagccgcccggcatccccgccgcctctgcgcccgcgccgcgcccccggcgccccctccccagcgcgcccccggccgctcctccgcgccgcgctcgtcggccatggcccgggagaacggcgagagcagctcctc

SEQ ID NO: 5334 - DNA, 333 bp, Homo sapiens
  chr10:12391869-12392202
  hyper
acatcaagaagatcttcgagttcaaagagaccctcggaacgtaagtggggaccggggaggcgagggtggaggtggccgcggcaggggctgcacgggcagctccagctgccgccgccgccactaccgcggcagaaacccagcctgtcaccgcgtcctcattgtcccgttctcggcgctgcggagcccccccgagcgcgcccgacgcgtgggcctgcgacccccgggtgggcgccgttcccgggagggggagggggcagcgccgggctgtcagggagcagcccacgcgggcgcgcgacttcccacttctcctgccaccgccgccctctccgctgc

SEQ ID NO: 5335 - DNA, 92 bp, Homo sapiens
  chr10:12392255-12392347
  hyper
gctgtgtgcgtttactcgccgtgtgcatgggcgcaccgcgttggcgagacgtggtcacgagaagatcagcctccagtcgttcccatttctgt

SEQ ID NO: 5336 - DNA, 35 bp, Homo sapiens
  chr10:12392368-12392403
  hyper
ggaattggcatctgcacgtacgaggtgtaggcaag

SEQ ID NO: 5337 - DNA, 31 bp, Homo sapiens
  chr10:12392634-12392665
  hyper
aagtcgatggcaggaacgctccaagcatgtg

SEQ ID NO: 5338 - DNA, 31 bp, Homo sapiens
  chr10:94833812-94833843
  hyper
ccctcccattgccccccgggactatgggctt

SEQ ID NO: 5339 - DNA, 112 bp, Homo sapiens
  chr10:101381345-101381457
  hyper
caaggccagcgattcccggccttaggacctcctgctctagggagcacgggcgtcttcttccatttgccttccccgagcgtgttggcacaagctgcccgcggtttccagctct

SEQ ID NO: 5340 - DNA, 36 bp, Homo sapiens
  chr10:103536026-103536062
  hyper
gggcctggatgcagcccggggcgggggcggggcggc

SEQ ID NO: 5341 - DNA, 31 bp, Homo sapiens
  chr11:2398444-2398475
  hyper
ggggccgggggcggggcgtgagctggccggg

SEQ ID NO: 5342 - DNA, 31 bp, Homo sapiens
  chr11:120894618-120894649
  hyper
actcaatgggtgggcacgagaaagagcagat

SEQ ID NO: 5343 - DNA, 185 bp, Homo sapiens
  chr11:120894673-120894858
  hyper
ccagtgcagccatccccgtcgccatggcaaccccagcgcggttggggaggacccgctcctccggcgccccctcccattcacgcagcggacgtgacacgtgcggcggggtcacgtgttgttgttgggccgggaaagctgcttccgggtcaatgcaggacactgggctccggcggccagagtggggg

SEQ ID NO: 5344 - DNA, 92 bp, Homo sapiens
  chr11:120894995-120895087
  hyper
gaggggtgagtggagccgggcccgctggctctgccgggctctcgaggcccgaggcgttcccctctggagccgaggcgcggagggtcgctcct

SEQ ID NO: 5345 - DNA, 31 bp, Homo sapiens
  chr11:120895094-120895125
  hyper
gctgggataggacactcggggaagggtgaaa

SEQ ID NO: 5346 - DNA, 99 bp, Homo sapiens
  chr11:130786365-130786464
  hyper
gcgacagcttccgggtcgacgtcgacgggagcgaggcatgctgggagagcgtccgcgcgcgccccgaggagcggcgctgcccggcgccctctgctggcg

SEQ ID NO: 5347 - DNA, 36 bp, Homo sapiens
  chr11:130786507-130786543
  hyper
gagcgtgagcctgagcgcgcacggggcgcgtgctcg

SEQ ID NO: 5348 - DNA, 31 bp, Homo sapiens
  chr12:1639826-1639857
  hyper
catcggggggggggcccgagacgcctcggcg

SEQ ID NO: 5349 - DNA, 31 bp, Homo sapiens
  chr12:13197533-13197564
  hyper
ctgtgccaccagagggcgagaggggcgccca

SEQ ID NO: 5350 - DNA, 148 bp, Homo sapiens
  chr12:21590453-21590601
  hyper
aaagctctgaacaccacgagacaattcgttgcttccgaaacgcagccggcagcaggtactcgagatgagtagtgtgagctcccgagcacccgtaggtcggattatctggtaaggcaccggaagtgaccgcctcgcggctgcttcctct

SEQ ID NO: 5351 - DNA, 39 bp, Homo sapiens
  chr12:21590602-21590641
  hyper
ctggagtccagagtcccgttgctccgccgcgatattcag

SEQ ID NO: 5352 - DNA, 31 bp, Homo sapiens
  chr12:21590826-21590857
  hyper
tccctttttcttcttccgggttccttttttg

SEQ ID NO: 5353 - DNA, 66 bp, Homo sapiens
  chr12:111052027-111052093
  hyper
tgggctgctgggcctccgtgagcgcccagaccgatgccaccccggcggtgacgacagagggcctca

SEQ ID NO: 5354 - DNA, 48 bp, Homo sapiens
  chr13:23949730-23949778
  hyper
gccgcccgcggggacacgcccacccgccgggaccgttagctggggatc

SEQ ID NO: 5355 - DNA, 31 bp, Homo sapiens
  chr14:52117842-52117873
  hyper
cccccaaagccactatcgggaggggacaaaa

SEQ ID NO: 5356 - DNA, 31 bp, Homo sapiens
  chr14:52117981-52118012
  hyper
cgccccctccatccagcgtgaaacccacgag

SEQ ID NO: 5357 - DNA, 342 bp, Homo sapiens
  chr14:52118073-52118415
  hyper
ggggaccgccttctctcggagtggcctcccctccggcgttccgctttagtaagacgacactcaggccaaacagccgcccccggccagcccgactcggctctggagggagcgccccgagggagtccagccggaggcggagaaggccactcggccagaaggtggggagccgccggcgtcccctcgcacctccgtctccacagcagggggaaaggccctgatcgccgtggtccacaccaccgcgtccacctgaggctcgcctcgcttcctgggtccctagaggggtggcgtactccgctttctcctgcccccaagtggccgcacccctccgcgggacgcttggtt

SEQ ID NO: 5358 - DNA, 98 bp, Homo sapiens
  chr14:52118429-52118527
  hyper
gcgggcgggcgctccccgtactgccgcgagctcagcgcgcagctcccgcggctcggctgccgccgcggccagttggggcgggtcgggggcggggtctc

SEQ ID NO: 5359 - DNA, 82 bp, Homo sapiens
  chr14:52118543-52118625
  hyper
ggggggcgggtcgggtcgggaggcgtgggtggggggcggggcggacgcggagcgcccctctggctggcggggccaaggggct

SEQ ID NO: 5360 - DNA, 36 bp, Homo sapiens
  chr14:105196123-105196159
  hyper
gcgtcgtggggaggagcgtggcgtcggcgtcgtggg

SEQ ID NO: 5361 - DNA, 73 bp, Homo sapiens
  chr15:29562018-29562091
  hyper
ctgagactgcgtgctgcgtcatgaagcctgcgccttgcgtcagggcggctgggcggtgcgcctgcgcggctgc

SEQ ID NO: 5362 - DNA, 78 bp, Homo sapiens
  chr15:45479959-45480037
  hyper
cgccgccgccccccccgcggaagcccaggtgctcccggagccacttggctactccgccgctgccgccccctcctgggc

SEQ ID NO: 5363 - DNA, 92 bp, Homo sapiens
  chr15:60884799-60884891
  hyper
ttacaccgcgcccctccgcttcctcccggggcgggaggcgggaggcgggaggcgggaggcaggcgcgccccagcgccgcgccccgccccgcc

SEQ ID NO: 5364 - DNA, 52 bp, Homo sapiens
  chr15:82338055-82338107
  hyper
gtgcgcgccgcgcccccgccggccctcggctcggcggcgagaagctgcggcc

SEQ ID NO: 5365 - DNA, 71 bp, Homo sapiens
  chr15:83654897-83654968
  hyper
agagccttagttatcgcgagacttgacaggcaccctcaactttagcccgccggaagcggaagtcaggtggt

SEQ ID NO: 5366 - DNA, 51 bp, Homo sapiens
  chr15:89902213-89902264
  hyper
cctcaggtctggaatccggcgggatgggggactgggcgacggcattgtgag

SEQ ID NO: 5367 - DNA, 67 bp, Homo sapiens
  chr15:89902271-89902338
  hyper
cggaggcgccagggggcgctagctggctcctcgcagccgatccaggccgcggcggttccacgaggtc

SEQ ID NO: 5368 - DNA, 31 bp, Homo sapiens
  chr16:30022360-30022391
  hyper
gtgagcgaggtggaggcgaggatgcagccgg

SEQ ID NO: 5369 - DNA, 86 bp, Homo sapiens
  chr16:47175852-47175938
  hyper
cctaccctatccagctcgattttatcaagttctgcaggtaaagcggtgtgacagatctacgcgatttcatccgggggtgctctcgg

SEQ ID NO: 5370 - DNA, 36 bp, Homo sapiens
  chr16:50582217-50582253
  hyper
cttgcctttgatgcgccgcaccggccaatgggcgcg

SEQ ID NO: 5371 - DNA, 62 bp, Homo sapiens
  chr16:77756525-77756587
  hyper
ccgggccctggcaccccgagcttggtcaggcccggccttgatcgtagcggaggccaccgggg

SEQ ID NO: 5372 - DNA, 56 bp, Homo sapiens
  chr16:77756638-77756694
  hyper
cggatgggggagcactcgcctccagcaacccgcagggtccccgaacctttgcactg

SEQ ID NO: 5373 - DNA, 31 bp, Homo sapiens
  chr16:77756697-77756728
  hyper
tggccaggaacagagccggcttaagccagta

SEQ ID NO: 5374 - DNA, 129 bp, Homo sapiens
  chr16:77756744-77756873
  hyper
tgctccccttcccagccggcttggctgttctgcaatccgcgtctccagagttggaccccaggacccccgacagtggcacagacccgcagcaggcagccccggattcaagtcccccggtggctactttca

SEQ ID NO: 5375 - DNA, 31 bp, Homo sapiens
  chr16:77756882-77756913
  hyper
ttgggtctgtcagtttcgtaaactctctgag

SEQ ID NO: 5376 - DNA, 65 bp, Homo sapiens
  chr16:80837506-80837571
  hyper
cagccccccgggaccccgcctcgccccggccaggctccgctccgatcgcccgcccccctcctccc

SEQ ID NO: 5377 - DNA, 40 bp, Homo sapiens
  chr16:80838371-80838411
  hyper
gagcgccgcggcccccgcgacccggcgacccggcggcggt

SEQ ID NO: 5378 - DNA, 31 bp, Homo sapiens
  chr16:80838938-80838969
  hyper
ggggatccaggacaggcgtggccaccccata

SEQ ID NO: 5379 - DNA, 31 bp, Homo sapiens
  chr16:89007778-89007809
  hyper
ccgcgcgctccgcctccgcctcctgcccccc

SEQ ID NO: 5380 - DNA, 31 bp, Homo sapiens
  chr16:89007989-89008020
  hyper
ggagaggggagaggggcgcggggagggggcg

SEQ ID NO: 5381 - DNA, 31 bp, Homo sapiens
  chr17:1133188-1133219
  hyper
ccttcgccgcccgccccgatcccggccccgg

SEQ ID NO: 5382 - DNA, 31 bp, Homo sapiens
  chr17:5019613-5019644
  hyper
cccgcctcaccactcccggcttcccggggct

SEQ ID NO: 5383 - DNA, 91 bp, Homo sapiens
  chr17:8649034-8649125
  hyper
aagaaatgtcaaaacacggtaacggaaatgaccctatttaaaatgttgactccgtggtggccgccttccttgatcccgtcaggctgcgtgc

SEQ ID NO: 5384 - DNA, 31 bp, Homo sapiens
  chr17:42441041-42441072
  hyper
aacagccgcgcgaggacgctggggccactcg

SEQ ID NO: 5385 - DNA, 115 bp, Homo sapiens
  chr17:42441079-42441194
  hyper
catcgcggggctaggccgggccctagcggtccatggctcccgcctggtcccgctcgcccggccccgcgcagccccagctctgcgccgcgcctcgcagctccggctcccgctcccg

SEQ ID NO: 5386 - DNA, 31 bp, Homo sapiens
  chr17:45331118-45331149
  hyper
tgcgtcccacccaccgcgtcccctcccctcc

SEQ ID NO: 5387 - DNA, 31 bp, Homo sapiens
  chr17:48207254-48207285
  hyper
ccccgcccctgccgcccgccaggcctggccg

SEQ ID NO: 5388 - DNA, 31 bp, Homo sapiens
  chr17:48638201-48638232
  hyper
cgcctccactcccgcccgggactgcccccca

SEQ ID NO: 5389 - DNA, 55 bp, Homo sapiens
  chr18:12657374-12657429
  hyper
ctcccctgcgggtccccgccggatcctcccgggggtctcccgtggcaaaatgggg

SEQ ID NO: 5390 - DNA, 31 bp, Homo sapiens
  chr18:13217472-13217503
  hyper
ggcgcagcctgtgagccggggacccctgagc

SEQ ID NO: 5391 - DNA, 51 bp, Homo sapiens
  chr18:13217884-13217935
  hyper
gaaagtggaagcagggcggggagcgcgggggaggcccgggggtgaggtcct

SEQ ID NO: 5392 - DNA, 48 bp, Homo sapiens
  chr18:33877649-33877697
  hyper
agcccgggctgcagcccggcgcgcctgagcctgcgagtccgcgagcca

SEQ ID NO: 5393 - DNA, 35 bp, Homo sapiens
  chr19:42498241-42498276
  hyper
cggcgagagagccaggcgggcggggcggggacctc

SEQ ID NO: 5394 - DNA, 31 bp, Homo sapiens
  chr19:42498570-42498601
  hyper
gattcccagagacctccgcaataggggactt

SEQ ID NO: 5395 - DNA, 31 bp, Homo sapiens
  chr19:46476797-46476828
  hyper
tcatggtgggggggggcggggggcggggggc

SEQ ID NO: 5396 - DNA, 41 bp, Homo sapiens
  chr19:55962683-55962724
  hyper
tgcgttcaagaggaggcgggcccgggcgggtggggaaagcc

SEQ ID NO: 5397 - DNA, 39 bp, Homo sapiens
  chr20:1875079-1875118
  hyper
tttgcgcaaagtggagcggggacccggcctctgggcagc

SEQ ID NO: 5398 - DNA, 31 bp, Homo sapiens
  chr20:30458093-30458124
  hyper
gaggctgcgcggggcccgccccctaccttgg

SEQ ID NO: 5399 - DNA, 36 bp, Homo sapiens
  chr20:31172327-31172363
  hyper
gccccgcggcgggacccgcccgcggccgccgcgcgc

SEQ ID NO: 5400 - DNA, 72 bp, Homo sapiens
  chr20:31172881-31172953
  hyper
cctgctcgggcggcggcggcggcgttggcggcggcggctccggctcgcctcctgctccgcctcctcctcccc

SEQ ID NO: 5401 - DNA, 101 bp, Homo sapiens
  chr20:57466876-57466977
  hyper
ggacaagcaggtctaccgggccacgcaccgcctgctgctgctgggtaagggcgggcggggggcgccggccccggcccgggggccctcgaagggcgccccgc

SEQ ID NO: 5402 - DNA, 34 bp, Homo sapiens
  chr20:62463024-62463058
  hyper
acgggagcggcgaccccggcgagggcacccgctc

SEQ ID NO: 5403 - DNA, 31 bp, Homo sapiens
  chr20:62601392-62601423
  hyper
gggggcgggggcccggcgctggcctgtggtt

SEQ ID NO: 5404 - DNA, 31 bp, Homo sapiens
  chr22:31090545-31090576
  hyper
atcattgttcctccagcgcctggcacggctg

SEQ ID NO: 5405 - DNA, 31 bp, Homo sapiens
  AC010098.8_29020-31687:1032-1063
  hyper
ttgccccccagccaccgcggctttttgcccc

SEQ ID NO: 5406 - DNA, 46 bp, Homo sapiens
  FP325318.4_87426-89530:1057-1103
  hyper
cggaggcaaaaagccgcggcgggcaaaaacccgaggcggcgggcgg

SEQ ID NO: 5407 - DNA, 20 bp, Homo sapiens
  chr1:52559282-52559302
  hypo
cagagcgagactccatctcc

SEQ ID NO: 5408 - DNA, 31 bp, Homo sapiens; identical to SEQ ID NO: 5253
  chr1:85463079-85463110
  hypo

SEQ ID NO: 5409 - DNA, 31 bp, Homo sapiens
  chr1:231367187-231367218
  hypo
tctcttccctcctacccgctccactgaagta

SEQ ID NO: 5410 - DNA, 80 bp, Homo sapiens; identical to SEQ ID NO: 5256
  chr1:236444827-236444907
  hypo

SEQ ID NO: 5411 - DNA, 102 bp, Homo sapiens; identical to SEQ ID NO: 5258
  chr1:236445298-236445400
  hypo

SEQ ID NO: 5412 - DNA, 87 bp, Homo sapiens; identical to SEQ ID NO: 5259
  chr1:236445484-236445571
  hypo

SEQ ID NO: 5413 - DNA, 76 bp, Homo sapiens
  chr2:97485584-97485660
  hypo
ctttcattttccaaaccgccagtgtcaggatcttcgctgccatggtcttgtctttcagatgcgatggatgagcttg

SEQ ID NO: 5414 - DNA, 67 bp, Homo sapiens
  chr2:97485696-97485763
  hypo
aaaaaatgttcatgttcgttgggaaggagcgcagaggcaggatgtcccctggcgggggggcttgtgt

SEQ ID NO: 5415 - DNA, 31 bp, Homo sapiens; identical to SEQ ID NO: 5266
  chr2:177502433-177502464
  hypo

SEQ ID NO: 5416 - DNA, 31 bp, Homo sapiens
  chr2:239167113-239167144
  hypo
actcggctggaaatgccggcatacctgatga

SEQ ID NO: 5417 - DNA, 124 bp, Homo sapiens; identical to SEQ ID NO: 5278
  chr3:101231918-101232042
  hypo

SEQ ID NO: 5418 - DNA, 101 bp, Homo sapiens; identical to SEQ ID NO: 5279
  chr3:101232085-101232186
  hypo

SEQ ID NO: 5419 - DNA, 45 bp, Homo sapiens; identical to SEQ ID NO: 5280
  chr3:101232201-101232246
  hypo

SEQ ID NO: 5420 - DNA, 50 bp, Homo sapiens; identical to SEQ ID NO: 5281
  chr3:123167992-123168042
  hypo

SEQ ID NO: 5421 - DNA, 25 bp, Homo sapiens
  chr3:137890018-137890043
  hypo
atagcaaaatacaggccgggcgtgg

SEQ ID NO: 5422 - DNA, 31 bp, Homo sapiens
  chr3:137891419-137891450
  hypo
gaaccagaccttgtctcgaaaaataaaggga

SEQ ID NO: 5423 - DNA, 48 bp, Homo sapiens; identical to SEQ ID NO: 5283
  chr3:186544978-186545026
  hypo

SEQ ID NO: 5424 - DNA, 31 bp, Homo sapiens
  chr3:195005356-195005387
  hypo
aactatatattaatctcgttaaaataaatgg

SEQ ID NO: 5425 - DNA, 34 bp, Homo sapiens; identical to SEQ ID NO: 5284
  chr3:195636197-195636231
  hypo

SEQ ID NO: 5426 - DNA, 46 bp, Homo sapiens
  chr3:196817781-196817827
  hypo
cctgacatagagggatcgcttctggctagttcgaagagaacctgac

SEQ ID NO: 5427 - DNA, 58 bp, Homo sapiens
  chr3:196817844-196817902
  hypo
attcatcatctgctcccgtaaatcatgtattttagcttcaaaacgactgtattctgat

SEQ ID NO: 5428 - DNA, 31 bp, Homo sapiens
  chr3:196817943-196817974
  hypo
agttatttgaagataacgtattaaatatgta

SEQ ID NO: 5429 - DNA, 31 bp, Homo sapiens
  chr4:3324702-3324733
  hypo
ggtgtactggagtacccgagagctacatctg

SEQ ID NO: 5430 - DNA, 20 bp, Homo sapiens
  chr4:160016975-160016995
  hypo
gactccgtctcaaaaaaaga

SEQ ID NO: 5431 - DNA, 31 bp, Homo sapiens; identical to SEQ ID NO: 5289
  chr5:17217632-17217663
  hypo

SEQ ID NO: 5432 - DNA, 58 bp, Homo sapiens; identical to SEQ ID NO: 5292
  chr5:110074797-110074855
  hypo

SEQ ID NO: 5433 - DNA, 31 bp, Homo sapiens; identical to SEQ ID NO: 5293
  chr5:110075104-110075135
  hypo

SEQ ID NO: 5434 - DNA, 31 bp, Homo sapiens
  chr7:12971156-12971187
  hypo
tctcccagaatttccacgtgttgtgtgtcgg

SEQ ID NO: 5435 - DNA, 31 bp, Homo sapiens; identical to SEQ ID NO: 5318
  chr8:81398373-81398404
  hypo

SEQ ID NO: 5436 - DNA, 132 bp, Homo sapiens; identical to SEQ ID NO: 5319
  chr8:81398461-81398593
  hypo

SEQ ID NO: 5437 - DNA, 31 bp, Homo sapiens; identical to SEQ ID NO: 5320
  chr8:81398659-81398690
  hypo

SEQ ID NO: 5438 - DNA, 31 bp, Homo sapiens; identical to SEQ ID NO: 5323
  chr8:121824597-121824628
  hypo

SEQ ID NO: 5439 - DNA, 31 bp, Homo sapiens
  chr8:134330746-134330777
  hypo
gttccataggtacttccgcatacttacttgt

SEQ ID NO: 5440 - DNA, 36 bp, Homo sapiens; identical to SEQ ID NO: 5326
  chr8:142425764-142425800
  hypo

SEQ ID NO: 5441 - DNA, 40 bp, Homo sapiens; identical to SEQ ID NO: 5328
  chr9:131183033-131183073
  hypo

SEQ ID NO: 5442 - DNA, 113 bp, Homo sapiens; identical to SEQ ID NO: 5329
  chr9:132805514-132805627
  hypo

SEQ ID NO: 5443 - DNA, 44 bp, Homo sapiens
  chr10:1230857-1230901
  hypo
gcccccacagctcctccgcccagtggtggcgttgataatctcca

SEQ ID NO: 5444 - DNA, 382 bp, Homo sapiens; identical to SEQ ID NO: 5330
  chr10:12391016-12391398
  hypo

SEQ ID NO: 5445 - DNA, 45 bp, Homo sapiens; identical to SEQ ID NO: 5331
  chr10:12391498-12391543
  hypo

SEQ ID NO: 5446 - DNA, 77 bp, Homo sapiens; identical to SEQ ID NO: 5332
  chr10:12391554-12391631
  hypo

SEQ ID NO: 5447 - DNA, 215 bp, Homo sapiens; identical to SEQ ID NO: 5333
  chr10:12391634-12391849
  hypo

SEQ ID NO: 5448 - DNA, 92 bp, Homo sapiens; identical to SEQ ID NO: 5335
  chr10:12392255-12392347
  hypo

SEQ ID NO: 5449 - DNA, 35 bp, Homo sapiens; identical to SEQ ID NO: 5336
  chr10:12392368-12392403
  hypo

SEQ ID NO: 5450 - DNA, 31 bp, Homo sapiens
  chr10:74518789-74518820
  hypo
ctctttatgtctgttccgcaagtctgcatgt

SEQ ID NO: 5451 - DNA, 31 bp, Homo sapiens
  chr10:126497161-126497192
  hypo
gaaataccagacagtgcgagaagaattctat

SEQ ID NO: 5452 - DNA, 31 bp, Homo sapiens
  chr11:1433607-1433638
  hypo
gcgccgccccgtcctgcggtgggtggagtct

SEQ ID NO: 5453 - DNA, 78 bp, Homo sapiens
  chr11:9328212-9328290
  hypo
atagagcgagactccgtctcaaaaaaaaaaagaaagccagaatcacgctcttggcctacaagacgttcaacatgtttt

SEQ ID NO: 5454 - DNA, 31 bp, Homo sapiens
  chr12:26966973-26967004
  hypo
gcagctggaccatcatcgagccagccattgc

SEQ ID NO: 5455 - DNA, 31 bp, Homo sapiens
  chr12:26967077-26967108
  hypo
gacagaggtaaggctgcggcagatagcagcc

SEQ ID NO: 5456 - DNA, 60 bp, Homo sapiens
  chr12:26967113-26967173
  hypo
ataaacaaaacacctgcgcaagggcaggactaatgctgatgacgccgcagaatgaaggaa

SEQ ID NO: 5457 - DNA, 31 bp, Homo sapiens
  chr13:113638952-113638983
  hypo
gggtgagtgatctcagcggaattccccttta

SEQ ID NO: 5458 - DNA, 27 bp, Homo sapiens
  chr14:51358238-51358265
  hypo
gcgtgagccaccgcgcccagctgataa

SEQ ID NO: 5459 - DNA, 342 bp, Homo sapiens; identical to SEQ ID NO: 5357
  chr14:52118073-52118415
  hypo

SEQ ID NO: 5460 - DNA, 98 bp, Homo sapiens; identical to SEQ ID NO: 5358
  chr14:52118429-52118527
  hypo

SEQ ID NO: 5461 - DNA, 36 bp, Homo sapiens; identical to SEQ ID NO: 5360
  chr14:105196123-105196159
  hypo

SEQ ID NO: 5462 - DNA, 56 bp, Homo sapiens
  chr15:31194967-31195023
  hypo
atcaataattacacaacgctagccactgctgcaggcagcagcgattttatagtaaa

SEQ ID NO: 5463 - DNA, 71 bp, Homo sapiens; identical to SEQ ID NO: 5365
  chr15:83654897-83654968
  hypo

SEQ ID NO: 5464 - DNA, 90 bp, Homo sapiens
  chr16:30566777-30566867
  hypo
gcccgcagtccgggcacgggtagggcttctcgccggtgtgggtgcgcacgtggcgccgcaggtccgaggggtaggcgaaggcgcggccac

SEQ ID NO: 5465 - DNA, 65 bp, Homo sapiens; identical to SEQ ID NO: 5376
  chr16:80837506-80837571
  hypo

SEQ ID NO: 5466 - DNA, 31 bp, Homo sapiens; identical to SEQ ID NO: 5379
  chr16:89007778-89007809
  hypo

SEQ ID NO: 5467 - DNA, 31 bp, Homo sapiens; identical to SEQ ID NO: 5380
  chr16:89007989-89008020
  hypo

SEQ ID NO: 5468 - DNA, 31 bp, Homo sapiens
  chr16:89472192-89472223
  hypo
tcacaccttcccccagcgctcctcacaaagg

SEQ ID NO: 5469 - DNA, 31 bp, Homo sapiens
  chr17:10555783-10555814
  hypo
ctggctcattcaggtgcgtcagcatggccat

SEQ ID NO: 5470 - DNA, 31 bp, Homo sapiens; identical to SEQ ID NO: 5384
  chr17:42441041-42441072
  hypo

SEQ ID NO: 5471 - DNA, 115 bp, Homo sapiens; identical to SEQ ID NO: 5385
  chr17:42441079-42441194
  hypo

SEQ ID NO: 5472 - DNA, 37 bp, Homo sapiens
  chr19:11117136-11117173
  hypo
atatttaaagccaggcgcggtgtctcacgcctgtaat

SEQ ID NO: 5473 - DNA, 31 bp, Homo sapiens
  chr19:48685674-48685705
  hypo
agtgatgtgaccagggcggtggtggttcctc

SEQ ID NO: 5474 - DNA, 65 bp, Homo sapiens
  chr19:48685940-48686005
  hypo
tcctactgcaagggccgcgaccacggcgtcctggacgccctgcacgtgctcgagggcctcttccg

SEQ ID NO: 5475 - DNA, 54 bp, Homo sapiens
  chr20:5072893-5072947
  hypo
gaagatcatcttgagtcgatgttcagaatgaggagtcctcgatcctgggccagc

SEQ ID NO: 5476 - DNA, 31 bp, Homo sapiens; identical to SEQ ID NO: 5403
  chr20:62601392-62601423
  hypo

SEQ ID NO: 5477 - DNA, 57 bp, Homo sapiens
  chr1:85040190-85040247
  hyper
gaagggcggggaggggcgggaggggcggggctccggggcgggcgtgggaggtcgggc

SEQ ID NO: 5478 - DNA, 31 bp, Homo sapiens
  chr1:181058993-181059024
  hyper
cctggagcacagccatcgtggccttctgagc

SEQ ID NO: 5479 - DNA, 115 bp, Homo sapiens
  chr1:181059074-181059189
  hyper
agggccaggcccttcccggctgcgaggacgcccagagaccgcgggcgctgagcgcgttgggcagactggttgcctctgggcatcgcaaactgcccccgggcgcatctggcttatc

SEQ ID NO: 5480 - DNA, 35 bp, Homo sapiens
  chr1:181059209-181059244
  hyper
gctcattggaagaggacgatcgttaacttttgtgt

SEQ ID NO: 5481 - DNA, 31 bp, Homo sapiens
  chr1:205721777-205721808
  hyper
ttttttgaagaattgccgtatggattctcca

SEQ ID NO: 5482 - DNA, 31 bp, Homo sapiens
  chr1:231053307-231053338
  hyper
aaagtaccaatatatccgtaatcctgggtaa

SEQ ID NO: 5483 - DNA, 46 bp, Homo sapiens
  chr1:236305442-236305488
  hyper
gggatggggaaggggccggggacgggtagcgcgcggcccctgggat

SEQ ID NO: 5484 - DNA, 31 bp, Homo sapiens
  chr1:247278690-247278721
  hyper
tctctgtcagtgagaccgtcaactgtgatgc

SEQ ID NO: 5485 - DNA, 31 bp, Homo sapiens
  chr2:637196-637227
  hyper
ccctcattttagagaacggaaaatgaagccc

SEQ ID NO: 5486 - DNA, 69 bp, Homo sapiens
  chr2:20101401-20101470
  hyper
gcccaaacaaccccaacgtcgcctccacccggggtcgccgcggccccaggtctcgcgatagttacctcc

SEQ ID NO: 5487 - DNA, 31 bp, Homo sapiens
  chr2:85198256-85198287
  hyper
agcgccgcgccgctgccgggagccggcaggc

SEQ ID NO: 5488 - DNA, 31 bp, Homo sapiens
  chr2:178483624-178483655
  hyper
gacgactactccgggccgttcagagactgaa

SEQ ID NO: 5489 - DNA, 31 bp, Homo sapiens
  chr2:191400042-191400073
  hyper
agagtacagaggggctcgtaaaatgttcctt

SEQ ID NO: 5490 - DNA, 62 bp, Homo sapiens
  chr2:201727375-201727437
  hyper
ggtctcttcacagacacgtgaaacacacgtcattctccccgtttaaacgtgtaccagaaact

SEQ ID NO: 5491 - DNA, 52 bp, Homo sapiens
  chr2:201727464-201727516
  hyper
tgttcctcaccaacaccgcattactgattactgcaaacgtaatcagagttat

SEQ ID NO: 5492 - DNA, 31 bp, Homo sapiens
  chr2:227656659-227656690
  hyper
gaaggaatgcaggaagcggaggtgacccgga

SEQ ID NO: 5493 - DNA, 118 bp, Homo sapiens
  chr3:100120033-100120151
  hyper
ccgggttaagggaaagcgtgggtgtgagtaggagtcttcggaaaccctttttctttcttttcgccccgctgctgttcgggagatggacttctggagtccccgtcgtagctggtgttgt

SEQ ID NO: 5494 - DNA, 95 bp, Homo sapiens
  chr3:100120186-100120281
  hyper
tcttgcctactgaagccgaggaggggcgcgtatacagcgggctaagggcgctcaagagatccgagtggaagaaaaagcagcggcacagcactgga

SEQ ID NO: 5495 - DNA, 97 bp, Homo sapiens
  chr3:100120385-100120482
  hyper
tttccagttatagccacgttggcacctcttgaacctctgtggccgttagcacggttttctgcccgcgtgcccgagaaaccaacggattagaaggact

SEQ ID NO: 5496 - DNA, 31 bp, Homo sapiens
  chr3:147131373-147131404
  hyper
agagactgatcacacacgtatacacaacatt

SEQ ID NO: 5497 - DNA, 265 bp, Homo sapiens
  chr4:169753055-169753320
  hyper
aggttacgagtgggtgcggggaagcctccctaacctgggggccgcgtcccagagctgcgagccacgcctcctctctcccgcccgccgcgccgccggactcttattttgaagggcggcgggtgaaggctcggagcctcctgagtcacccggcgggcgaggtataaagcccgatacctgccccgcgcccggtccgcggagcccgctgcagctcccgctcgctccggacgcggaatcgggcagcagcgggaggcggcccggagagccg

SEQ ID NO: 5498 - DNA, 84 bp, Homo sapiens
  chr4:169753404-169753488
  hyper
tcgggagtgcagggctcgggacagggtgggggcggggaggacaagagactcgtcagcgcactttccacccggccggttccttcc

SEQ ID NO: 5499 - DNA, 9 bp, Homo sapiens
  chr4:169753496-169753505
  hyper
ctccctccc

SEQ ID NO: 5500 - DNA, 15 bp, Homo sapiens
  chr4:169753535-169753550
  hyper
cggagctccagatag

SEQ ID NO: 5501 - DNA, 31 bp, Homo sapiens
  chr4:169753565-169753596
  hyper
cttggcagggcccagacgggagaagatgctc

SEQ ID NO: 5502 - DNA, 41 bp, Homo sapiens
  chr4:169753630-169753671
  hyper
tcttctctgaacacctcgcacccccacggccccccgcccct

SEQ ID NO: 5503 - DNA, 31 bp, Homo sapiens
  chr4:185311056-185311087
  hyper
ggtgtacagcaagcagcggcctcagggctgg

SEQ ID NO: 5504 - DNA, 31 bp, Homo sapiens
  chr6:6320597-6320628
  hyper
ttcgggagagctgcctcgagagcctgagaga

SEQ ID NO: 5505 - DNA, 49 bp, Homo sapiens
  chr6:119671065-119671114
  hyper
gggagtttacgggaagcgcagcctcggcggggcccggccggcggcgggg

SEQ ID NO: 5506 - DNA, 37 bp, Homo sapiens
  chr6:119671586-119671623
  hyper
tgcttaggacttttttcgtatgcgccctttcttcccc

SEQ ID NO: 5507 - DNA, 31 bp, Homo sapiens
  chr6:133134687-133134718
  hyper
ccaggacctggccctgcgtcaggcacattgt

SEQ ID NO: 5508 - DNA, 53 bp, Homo sapiens
  chr6:139694963-139695016
  hyper
ggtggtgatgggggctcgggaactgccccatgcccatgcggtgggcagggtga

SEQ ID NO: 5509 - DNA, 103 bp, Homo sapiens
  chr6:139695104-139695207
  hyper
gcagataatgagacccgcgccacacgtgtcgcccaccacagcgcaccccacttttgctcgcctctgccccccaggattcccgggcgcacgtcggctgcgaacc

SEQ ID NO: 5510 - DNA, 31 bp, Homo sapiens
  chr7:150497118-150497149
  hyper
ccagccagggtccaggcgtgcaggcggcaga

SEQ ID NO: 5511 - DNA, 77 bp, Homo sapiens
  chr10:75385747-75385824
  hyper
aaggcaaccagctctcgcgacactttccttggccatggcgagagcacacgagaagagactctcgcaagaaagtaaat

SEQ ID NO: 5512 - DNA, 48 bp, Homo sapiens
  chr10:75385879-75385927
  hyper
gcttcaaggcgtttcacgggtgtcccggacaggcgtggaggtggggcg

SEQ ID NO: 5513 - DNA, 31 bp, Homo sapiens
  chr10:124639062-124639093
  hyper
agcgtcgaaaaaccgccgtggtgcccgcgca

SEQ ID NO: 5514 - DNA, 31 bp, Homo sapiens
  chr11:1970023-1970054
  hyper
tgggcccacaagggttcgagaacaaaagaga

SEQ ID NO: 5515 - DNA, 31 bp, Homo sapiens
  chr11:1970071-1970102
  hyper
ctggggccctgggtgtcgacagtgcagattg

SEQ ID NO: 5516 - DNA, 78 bp, Homo sapiens
  chr11:1970121-1970199
  hyper
atgcacaggcagctggcgctccagcctggagaggctcggcctgtgggaacaaggacagtgaatcgtcctggcccaacc

SEQ ID NO: 5517 - DNA, 62 bp, Homo sapiens
  chr11:65189905-65189967
  hyper
cgcccactcaagagggcgcccccgcccgccacgcccccagcccctctcggggaagcgcgtcc

SEQ ID NO: 5518 - DNA, 31 bp, Homo sapiens
  chr11:65189973-65190004
  hyper
cgacctcaacaacatccgggaagaaaagggg

SEQ ID NO: 5519 - DNA, 79 bp, Homo sapiens
  chr12:12877457-12877536
  hyper
gcgtgggcttcacaggcgaggagcggggcgagaggcctctcaggccggggtgcgcccaccgccccggcctcagggagcg

SEQ ID NO: 5520 - DNA, 56 bp, Homo sapiens
  chr12:14923204-14923260
  hyper
gacctcccatttcctgcgacttagcaagccctgcacacgcacgaaccgcccttgac

SEQ ID NO: 5521 - DNA, 47 bp, Homo sapiens
  chr12:27038032-27038079
  hyper
agcgcctctttcctcccgcagtgtctctttatcgccctctgctggca

SEQ ID NO: 5522 - DNA, 31 bp, Homo sapiens
  chr12:122214279-122214310
  hyper
gttcccgtctgtgcttcggggttccctgacc

SEQ ID NO: 5523 - DNA, 142 bp, Homo sapiens
  chr14:45431366-45431508
  hyper
tcaccatggaagcaatcggtttggtcacgtggtgcccttggttacgcccggtggcagctgtggggtctagggctcagacgggggccattttgccagaggctgcctcccggagttgggggcggcctggcggcaggctgaagct

SEQ ID NO: 5524 - DNA, 31 bp, Homo sapiens
  chr14:45431551-45431582
  hyper
gaagtctgggctccatcgagccctttggaga

SEQ ID NO: 5525 - DNA, 31 bp, Homo sapiens
  chr14:45432097-45432128
  hyper
tctctcggacgttctccggggtcagggggag

SEQ ID NO: 5526 - DNA, 6 bp, Homo sapiens
  chr15:45722444-45722450
  hyper
ttttag

SEQ ID NO: 5527 - DNA, 31 bp, Homo sapiens
  chr16:3156726-3156757
  hyper
ggggccgttgcttgggcgacaggctccagcg

SEQ ID NO: 5528 - DNA, 48 bp, Homo sapiens
  chr16:27280120-27280168
  hyper
tcccattggtggcctgcggcttattcgcccgtccgttgagtgacgcac

SEQ ID NO: 5529 - DNA, 31 bp, Homo sapiens
  chr16:27280313-27280344
  hyper
aaggaggaagaattggcgtgcagcctgggct

SEQ ID NO: 5530 - DNA, 31 bp, Homo sapiens
  chr16:27280348-27280379
  hyper
tcaatggccaccattccgctggcacaatgta

SEQ ID NO: 5531 - DNA, 62 bp, Homo sapiens
  chr16:88851817-88851879
  hyper
cggacccctcccctcccgcagtcttggccccgcggctccgagcgtgcgcggcggtgggcagg

SEQ ID NO: 5532 - DNA, 31 bp, Homo sapiens
  chr16:88851901-88851932
  hyper
gcggctggggcccgggcgctacataaggggt

SEQ ID NO: 5533 - DNA, 31 bp, Homo sapiens
  chr17:1588081-1588112
  hyper
ccctcacacaagaggccgctttccccgcagc

SEQ ID NO: 5534 - DNA, 34 bp, Homo sapiens
  chr17:5390232-5390266
  hyper
cttagacagctcaactcgccgagatgacctgggc

SEQ ID NO: 5535 - DNA, 31 bp, Homo sapiens
  chr17:77099946-77099977
  hyper
aaagaaaaagcggcagcggcagcaacaacac

SEQ ID NO: 5536 - DNA, 31 bp, Homo sapiens
  chr18:63417766-63417797
  hyper
gtacagatccgccaggcgggaggtggaggag

SEQ ID NO: 5537 - DNA, 31 bp, Homo sapiens
  chr19:1253419-1253450
  hyper
acccccccccccatcccggccactggggaga

SEQ ID NO: 5538 - DNA, 68 bp, Homo sapiens
  chr19:1260498-1260566
  hyper
ctgcagggtggggggcgcgtcccctgcactccaggacccgcccctcgggatgccgacccccaccccag

SEQ ID NO: 5539 - DNA, 89 bp, Homo sapiens
  chr19:3061519-3061608
  hyper
gatggggggcagggtgcgccctctaccgccctccaaagcgccgggagggagtgcacatccgaggggggtagaaacgcgccctagggagc

SEQ ID NO: 5540 - DNA, 31 bp, Homo sapiens
  chr19:37282770-37282801
  hyper
tcccattggcgcctgacgggttggttagggc

SEQ ID NO: 5541 - DNA, 44 bp, Homo sapiens
  chr19:50837555-50837599
  hyper
acacctacctggatgacgtaatcctgggccgtgagattaaacca

SEQ ID NO: 5542 - DNA, 31 bp, Homo sapiens
  chr19:50860731-50860762
  hyper
cggtttgtgatcaggtcggcctccaccatca

SEQ ID NO: 5543 - DNA, 54 bp, Homo sapiens
  chr19:50871937-50871991
  hyper
tccaactgcacccaagcgcccttaagtagtttgagaggccgtgcctgcaaattc

SEQ ID NO: 5544 - DNA, 38 bp, Homo sapiens
  chr19:50872031-50872069
  hyper
gccaagattccccagccgccacccgtttctagagctgg

SEQ ID NO: 5545 - DNA, 86 bp, Homo sapiens
  chr19:50872092-50872178
  hyper
ccagctttcctgcttccgccctagcagttcccaccgcctggaatgccgacttgctcgctctctgcaccccacgggaaaaggagcag

SEQ ID NO: 5546 - DNA, 42 bp, Homo sapiens
  chr20:362797-362839
  hyper
gtaacccgccctcatttccctgggtcccgagtgtggcaggga

SEQ ID NO: 5547 - DNA, 31 bp, Homo sapiens
  chr1:2847353-2847384
  hypo
gctccagaagccagggcgtctgttatttatg

SEQ ID NO: 5548 - DNA, 31 bp, Homo sapiens
  chr1:8005573-8005604
  hypo
ctgttgcctccaagaacggcagggagggtgt

SEQ ID NO: 5549 - DNA, 61 bp, Homo sapiens
  chr1:11308056-11308117
  hypo
tgacgaggttttgttccgaagcccatgagatctttgcagtacttgtcgtgtaccagctgct

SEQ ID NO: 5550 - DNA, 31 bp, Homo sapiens
  chr1:11308133-11308164
  hypo
catttcttctctcagacgctatatatatgag

SEQ ID NO: 5551 - DNA, 31 bp, Homo sapiens
  chr1:11308230-11308261
  hypo
tacatttgcctaatcccgaaacgcaactact

SEQ ID NO: 5552 - DNA, 31 bp, Homo sapiens
  chr1:19708690-19708721
  hypo
tctactggctcacagacgatagcatttcaag

SEQ ID NO: 5553 - DNA, 31 bp, Homo sapiens
  chr1:19721242-19721273
  hypo
aaaagtgagcaagccacgcaacatagatttg

SEQ ID NO: 5554 - DNA, 31 bp, Homo sapiens
  chr1:19721284-19721315
  hypo
catacagcacatctggcggagtaacacagat

SEQ ID NO: 5555 - DNA, 31 bp, Homo sapiens
  chr1:28727741-28727772
  hypo
aaaaaaagttttaaaacgcattttgaggctg

SEQ ID NO: 5556 - DNA, 21 bp, Homo sapiens
  chr1:51897402-51897423
  hypo
gttaccgcgcctggccagaaa

SEQ ID NO: 5557 - DNA, 31 bp, Homo sapiens
  chr1:53238153-53238184
  hypo
tctctcacgattacaccgatctgtgaaggag

SEQ ID NO: 5558 - DNA, 34 bp, Homo sapiens
  chr1:53238207-53238241
  hypo
taaatctgctccttcacgtcgtcagatgtcaact

SEQ ID NO: 5559 - DNA, 34 bp, Homo sapiens
  chr1:53238245-53238279
  hypo
ccaagtggggaagctgcgtcgatagggtaaagcc

SEQ ID NO: 5560 - DNA, 31 bp, Homo sapiens
  chr1:54685802-54685833
  hypo
cagctggaggccactgcggggatcctggggc

SEQ ID NO: 5561 - DNA, 31 bp, Homo sapiens
  chr1:55144367-55144398
  hypo
caaaaatagggagatccggcctcactgagaa

SEQ ID NO: 5562 - DNA, 31 bp, Homo sapiens
  chr1:60220991-60221022
  hypo
acgatatgccagatgccgagtttggcagtga

SEQ ID NO: 5563 - DNA, 31 bp, Homo sapiens
  chr1:60221035-60221066
  hypo
aattcctgctttaaggcgctcacagtctagt

SEQ ID NO: 5564 - DNA, 43 bp, Homo sapiens
  chr1:60221097-60221140
  hypo
ggtgccatgtcataaacgctatgatagacggaagcagaagttg

SEQ ID NO: 5565 - DNA, 31 bp, Homo sapiens
  chr1:60221165-60221196
  hypo
ggtgggaggcaggcagcggggatgagtcaga

SEQ ID NO: 5566 - DNA, 31 bp, Homo sapiens
  chr1:204424455-204424486
  hypo
gttggggaaaggggaccggcaggggcggggt

SEQ ID NO: 5567 - DNA, 31 bp, Homo sapiens; identical to SEQ ID NO: 5481
  chr1:205721777-205721808
  hypo

SEQ ID NO: 5568 - DNA, 31 bp, Homo sapiens
  chr1:213346046-213346077
  hypo
taacagagatgcctgccgtggacttgaccag

SEQ ID NO: 5569 - DNA, 31 bp, Homo sapiens; identical to SEQ ID NO: 5484
  chr1:247278690-247278721
  hypo

SEQ ID NO: 5570 - DNA, 44 bp, Homo sapiens
  chr2:3173338-3173382
  hypo
agacgccaagccccctcggccagggctggcggcaggagggatgg

SEQ ID NO: 5571 - DNA, 31 bp, Homo sapiens
  chr2:3173409-3173440
  hypo
tgatcctatgcagtgccgatcccaacgtcct

SEQ ID NO: 5572 - DNA, 69 bp, Homo sapiens; identical to SEQ ID NO: 5486
  chr2:20101401-20101470
  hypo

SEQ ID NO: 5573 - DNA, 31 bp, Homo sapiens
  chr2:63192181-63192212
  hypo
cttgtgttcactggaacgttatgattagttt

SEQ ID NO: 5574 - DNA, 31 bp, Homo sapiens
  chr2:63192220-63192251
  hypo
tttgtttgattttagccgcagaaactgtttg

SEQ ID NO: 5575 - DNA, 31 bp, Homo sapiens
  chr2:71615794-71615825
  hypo
acactgcaagggatcacgacggaacccccga

SEQ ID NO: 5576 - DNA, 31 bp, Homo sapiens; identical to SEQ ID NO: 5487
  chr2:85198256-85198287
  hypo

SEQ ID NO: 5577 - DNA, 31 bp, Homo sapiens
  chr2:106718550-106718581
  hypo
tctgcgttttcctttacgacaaatgcgtatt

SEQ ID NO: 5578 - DNA, 31 bp, Homo sapiens
  chr2:159340499-159340530
  hypo
gtgagcataacaagaacgtgcacagttgcac

SEQ ID NO: 5579 - DNA, 28 bp, Homo sapiens
  chr2:170716502-170716530
  hypo
aggcgtgagccaccgcacctggtcttat

SEQ ID NO: 5580 - DNA, 31 bp, Homo sapiens
  chr2:183587686-183587717
  hypo
gtttttcatatattatcgttaaaaatttatt

SEQ ID NO: 5581 - DNA, 31 bp, Homo sapiens
  chr2:242182172-242182203
  hypo
ttggtggtgatgaacacgcaggcctagagcc

SEQ ID NO: 5582 - DNA, 31 bp, Homo sapiens
  chr3:49781387-49781418
  hypo
gcaccactgcacaatgcgccacaattattac

SEQ ID NO: 5583 - DNA, 21 bp, Homo sapiens
  chr3:119755627-119755648
  hypo
agactccgactcaaaaaaaaa

SEQ ID NO: 5584 - DNA, 56 bp, Homo sapiens
  chr3:128070500-128070556
  hypo
aagagggacacacacacgtgtaatgacataattatatgcaccggcagccaagtcct

SEQ ID NO: 5585 - DNA, 34 bp, Homo sapiens
  chr4:1348026-1348060
  hypo
atagagctctgccctgcgccggacactgagggtg

SEQ ID NO: 5586 - DNA, 50 bp, Homo sapiens
  chr4:2704072-2704122
  hypo
actttgtgtcatggttcgatgctccgggctcatctcgtgtcttctctctc

SEQ ID NO: 5587 - DNA, 22 bp, Homo sapiens
  chr4:4221402-4221424
  hypo
gacagagcgagactctgtctca

SEQ ID NO: 5588 - DNA, 31 bp, Homo sapiens
  chr4:4487688-4487719
  hypo
tgctctcttagaagtacgagtggtggatggt

SEQ ID NO: 5589 - DNA, 57 bp, Homo sapiens
  chr4:8473096-8473153
  hypo
gggacgtgggtcaccccgttccctccttgctcctctggacctcgtcccatgcgatgt

SEQ ID NO: 5590 - DNA, 59 bp, Homo sapiens
  chr4:108132181-108132240
  hypo
gcaacagtagttgtttcgaggagtcgtgaggctgggacagttgtcgtctgctgggaaga

SEQ ID NO: 5591 - DNA, 116 bp, Homo sapiens
  chr4:108132284-108132400
  hypo
tgcacagtgctcagagcggacagcaccgatgcggccgcttgctgtttactccccagcttaaaccgtagcctcatcgcaacaatgtctgaatctgcccttcccgtctcctctgccaa

SEQ ID NO: 5592 - DNA, 18 bp, Homo sapiens
  chr4:122606040-122606058
  hypo
aaatatattttatggccg

SEQ ID NO: 5593 - DNA, 31 bp, Homo sapiens
  chr4:144141583-144141614
  hypo
atacagttggcagactcgtattttgatcctg

SEQ ID NO: 5594 - DNA, 36 bp, Homo sapiens
  chr4:144141622-144141658
  hypo
caaaatgcactggtcacgaaacgtctaatactatga

SEQ ID NO: 5595 - DNA, 31 bp, Homo sapiens
  chr4:188682666-188682697
  hypo
gaagagcagatgttcccgttcaaaggcagtc

SEQ ID NO: 5596 - DNA, 123 bp, Homo sapiens
  chr5:233692-233815
  hypo
gtcgcgaaggacctggcgtctagagatgtggtgtctcggtccatgactctggagatccgagaaggaaggtgcgtgtgatttaccaccagcactgtctgagcgggcacacgggccggggttgct

SEQ ID NO: 5597 - DNA, 48 bp, Homo sapiens
  chr5:235347-235395
  hypo
agacagccatgatcttcgctggcgtggacgtcacgaaggagccgatcc

SEQ ID NO: 5598 - DNA, 41 bp, Homo sapiens
  chr5:10548512-10548553
  hypo
agatagatacacacggcggtgcattgcgcttttgtttacaa

SEQ ID NO: 5599 - DNA, 31 bp, Homo sapiens
  chr5:31454672-31454703
  hypo
caacagaaaagaatcacgatcaaatcccatt

SEQ ID NO: 5600 - DNA, 71 bp, Homo sapiens
  chr5:96111421-96111492
  hypo
aaagagggtcccctctcggagctaagaccctcaggggaggccagcccgaggcatcccgcaagggaatcagg

SEQ ID NO: 5601 - DNA, 51 bp, Homo sapiens
  chr5:96111504-96111555
  hypo
cacctactacctcctccgaccccagctccagctctccggctccccactgac

SEQ ID NO: 5602 - DNA, 31 bp, Homo sapiens
  chr5:126260014-126260045
  hypo
tgtgagaggcttaatacgtggggagcacagc

SEQ ID NO: 5603 - DNA, 16 bp, Homo sapiens
  chr5:138052138-138052154
  hypo
gcgtgagctaccaccc

SEQ ID NO: 5604 - DNA, 31 bp, Homo sapiens
  chr5:176976122-176976153
  hypo
cttgtgttaagcataccgcacttgttggacc

SEQ ID NO: 5605 - DNA, 17 bp, Homo sapiens
  chr6:34785644-34785661
  hypo
tgggggggtggagtctc

SEQ ID NO: 5606 - DNA, 31 bp, Homo sapiens; identical to SEQ ID NO: 5507
  chr6:133134687-133134718
  hypo

SEQ ID NO: 5607 - DNA, 103 bp, Homo sapiens; identical to SEQ ID NO: 5509
  chr6:139695104-139695207
  hypo

SEQ ID NO: 5608 - DNA, 31 bp, Homo sapiens
  chr6:167384338-167384369
  hypo
aaagtcccaccctgagcgcaggaacactccc

SEQ ID NO: 5609 - DNA, 31 bp, Homo sapiens
  chr6:167384373-167384404
  hypo
agagccctgaggtgaccgctctgaggtgtcg

SEQ ID NO: 5610 - DNA, 31 bp, Homo sapiens
  chr7:882989-883020
  hypo
ctgccattcagggaaacggggatgtgggagc

SEQ ID NO: 5611 - DNA, 31 bp, Homo sapiens
  chr7:883081-883112
  hypo
aaggacgtgctcacggcgcaccccgcggccc

SEQ ID NO: 5612 - DNA, 31 bp, Homo sapiens
  chr7:2873500-2873531
  hypo
ggctgcttcaaagttccgtacgtcctggcaa

SEQ ID NO: 5613 - DNA, 154 bp, Homo sapiens
  chr7:5428493-5428647
  hypo
tgcgccgcagcagccgcgcgccctcgtcctgccgggcagcctccttggcacccccgcgccccgcttcggccaccagcgcgggcagccccacgtccccggcgccgccgttgcacatggtcagtaccgacggctgcagcgccgcattcttggtctt

SEQ ID NO: 5614 - DNA, 180 bp, Homo sapiens
  chr7:5428649-5428829
  hypo
actcagccaggaagggcgacaggcgctcagccaggcgcgggggcccccggtcctggcggccctcggcgcgcgcctcctgggtcaggtccaccacgccccgtggccccgaggcctcctcgccccgggcgcgcgggtccttcttgccgaaaagcggaggcggctccccgccgcggcccgccc

SEQ ID NO: 5615 - DNA, 37 bp, Homo sapiens
  chr7:5429013-5429050
  hypo
cccacccctgcctgggcggaggcggacccctgagagg

SEQ ID NO: 5616 - DNA, 31 bp, Homo sapiens
  chr7:23211710-23211741
  hypo
ccttactgttgtttggcgtctcttggtttaa

SEQ ID NO: 5617 - DNA, 31 bp, Homo sapiens
  chr7:135611087-135611118
  hypo
actctaaaaaagtgctcgtagttgagtttgg

SEQ ID NO: 5618 - DNA, 31 bp, Homo sapiens
  chr7:135611169-135611200
  hypo
atcagaggtttaaccacgactccattttctt

SEQ ID NO: 5619 - DNA, 31 bp, Homo sapiens
  chr7:135611205-135611236
  hypo
cccctgaagatcctgacgatctgggatgtgc

SEQ ID NO: 5620 - DNA, 44 bp, Homo sapiens
  chr7:135611238-135611282
  hypo
gctacaccctgctccccgtcaaccaggagcgttactgaagttac

SEQ ID NO: 5621 - DNA, 31 bp, Homo sapiens; identical to SEQ ID NO: 5510
  chr7:150497118-150497149
  hypo

SEQ ID NO: 5622 - DNA, 31 bp, Homo sapiens
  chr7:155105652-155105683
  hypo
gagggagagtttgcaccgtattaatcttgcc

SEQ ID NO: 5623 - DNA, 31 bp, Homo sapiens
  chr8:22471905-22471936
  hypo
ctgctgctctcttccccggggttggaggaat

SEQ ID NO: 5624 - DNA, 17 bp, Homo sapiens
  chr8:27684304-27684321
  hypo
tccgtctcaaaaaaaaa

SEQ ID NO: 5625 - DNA, 49 bp, Homo sapiens
  chr8:48348566-48348615
  hypo
tgttccttacctatttcgtagggttgttgtgaatcgagtatgagaatgg

SEQ ID NO: 5626 - DNA, 31 bp, Homo sapiens
  chr8:48348666-48348697
  hypo
gcatggccaggcacttcgtggtacatttgct

SEQ ID NO: 5627 - DNA, 52 bp, Homo sapiens
  chr8:48348718-48348770
  hypo
gtgctcttggggtagccgctactgtgtccatttaaaacggaggacactctta

SEQ ID NO: 5628 - DNA, 48 bp, Homo sapiens
  chr9:7172201-7172249
  hypo
tgtattttaatgacttcggctcacccagacacacgctgactgggggag

SEQ ID NO: 5629 - DNA, 31 bp, Homo sapiens
  chr9:7172308-7172339
  hypo
acttcagaagcagccccgttaccttttattg

SEQ ID NO: 5630 - DNA, 31 bp, Homo sapiens
  chr9:7172345-7172376
  hypo
agaataaccatagcaacggtgcataattagc

SEQ ID NO: 5631 - DNA, 57 bp, Homo sapiens
  chr9:7172377-7172434
  hypo
agagctcctggtaaatcggttttattattgtatttgagaggccgacttttgctgttt

SEQ ID NO: 5632 - DNA, 31 bp, Homo sapiens
  chr9:7785324-7785355
  hypo
gccccacacacacacacgcacaccatcccac

SEQ ID NO: 5633 - DNA, 44 bp, Homo sapiens
  chr9:7785419-7785463
  hypo
aggccaggagaggggccgtttcatgactacgccaaatatcctat

SEQ ID NO: 5634 - DNA, 31 bp, Homo sapiens
  chr9:16268703-16268734
  hypo
ggagcctggggcgggtcgtggccctggagtt

SEQ ID NO: 5635 - DNA, 46 bp, Homo sapiens
  chr9:16268771-16268817
  hypo
gggctgcatcaggcagcgccagcctgcaaatcgctcagagtgctta

SEQ ID NO: 5636 - DNA, 31 bp, Homo sapiens
  chr9:16268826-16268857
  hypo
gcacacctggaaggctcgggcctgcacactg

SEQ ID NO: 5637 - DNA, 31 bp, Homo sapiens
  chr9:16268879-16268910
  hypo
tgtgtagctattaagacgagagattgctttt

SEQ ID NO: 5638 - DNA, 31 bp, Homo sapiens
  chr9:93837381-93837412
  hypo
cttccatatcgccacccgcagagcacaacag

SEQ ID NO: 5639 - DNA, 42 bp, Homo sapiens
  chr9:95039645-95039687
  hypo
gcagtcagccaagatcgcgctattgcacgatatttgcactcc

SEQ ID NO: 5640 - DNA, 31 bp, Homo sapiens
  chr9:97983531-97983562
  hypo
ctgaaattatgttcaacgagctaaaacaaga

SEQ ID NO: 5641 - DNA, 31 bp, Homo sapiens
  chr9:107729488-107729519
  hypo
ggaggatgttcattagcggctgtaagaaatc

SEQ ID NO: 5642 - DNA, 41 bp, Homo sapiens
  chr9:138824556-138824597
  hypo
agaggccagaggtaggcggaggcagccgtgcttgggctcag

SEQ ID NO: 5643 - DNA, 19 bp, Homo sapiens
  chr9:140030219-140030238
  hypo
cgcccggctgggaggtgtt

SEQ ID NO: 5644 - DNA, 31 bp, Homo sapiens
  chr9:140645404-140645435
  hypo
cacttgtgtcagggcacgtaacaaatgtgag

SEQ ID NO: 5645 - DNA, 31 bp, Homo sapiens
  chr10:5784320-5784351
  hypo
tgctgaagtatccttccgtgatcctaactgc

SEQ ID NO: 5646 - DNA, 30 bp, Homo sapiens
  chr10:65160317-65160347
  hypo
ttttctgcctttcccccggccccgagatgg

SEQ ID NO: 5647 - DNA, 35 bp, Homo sapiens
  chr10:75493100-75493135
  hypo
gagggcgcgcagggggcgggcggggtgctgttcgc

SEQ ID NO: 5648 - DNA, 31 bp, Homo sapiens
  chr10:98350861-98350892
  hypo
caggtttcctggcttccgaaacaatctcttc

SEQ ID NO: 5649 - DNA, 90 bp, Homo sapiens
  chr10:134577902-134577992
  hypo
gtgacactcaggaacacggtcgggtcagtcctgctgcggtgggagggtgtgcgtggtgacactcagaaacacggtcgggtcagtcctgca

SEQ ID NO: 5650 - DNA, 35 bp, Homo sapiens
  chr10:134578012-134578047
  hypo
gtgacactcaggaacacggtcgggccagtcctgca

SEQ ID NO: 5651 - DNA, 31 bp, Homo sapiens
  chr10:135117510-135117541
  hypo
ctgtcaccaagagttccgatacaaggccatt

SEQ ID NO: 5652 - DNA, 62 bp, Homo sapiens; identical to SEQ ID NO: 5517
  chr11:65189905-65189967
  hypo

SEQ ID NO: 5653 - DNA, 31 bp, Homo sapiens; identical to SEQ ID NO: 5518
  chr11:65189973-65190004
  hypo

SEQ ID NO: 5654 - DNA, 31 bp, Homo sapiens
  chr11:85692739-85692770
  hypo
aacactaaataacacacggagaaaacaatgt

SEQ ID NO: 5655 - DNA, 31 bp, Homo sapiens
  chr11:85692790-85692821
  hypo
ttagtggttccatttccgatgccaagatcta

SEQ ID NO: 5656 - DNA, 36 bp, Homo sapiens
  chr11:85692839-85692875
  hypo
aaagcattttataacacgagacgcagtttaataaaa

SEQ ID NO: 5657 - DNA, 31 bp, Homo sapiens
  chr11:85692878-85692909
  hypo
cataaaagaagattaacgtatccaaagacta

SEQ ID NO: 5658 - DNA, 79 bp, Homo sapiens; identical to SEQ ID NO: 5519
  chr12:12877457-12877536
  hypo

SEQ ID NO: 5659 - DNA, 44 bp, Homo sapiens
  chr12:69133794-69133838
  hypo
atagttgctggcagcccgcccgctagtatcggaattcattataa

SEQ ID NO: 5660 - DNA, 31 bp, Homo sapiens
  chr12:71925321-71925352
  hypo
aatcattaggaggtaacgtgggggtagcttt

SEQ ID NO: 5661 - DNA, 31 bp, Homo sapiens
  chr12:112814900-112814931
  hypo
gcaagaatctctgtctcgaacataaataatt

SEQ ID NO: 5662 - DNA, 31 bp, Homo sapiens; identical to SEQ ID NO: 5522
  chr12:122214279-122214310
  hypo

SEQ ID NO: 5663 - DNA, 31 bp, Homo sapiens
  chr12:122266346-122266377
  hypo
agggggaggtgcactgcgtgcatctgtgctg

SEQ ID NO: 5664 - DNA, 135 bp, Homo sapiens
  chr12:124911341-124911476
  hypo
aggttctgcagggaaacggagggcagggtcagaggcccagggacgaggtgctccggccggcgcaggggacccagggaagacacagaggggacggatggtctgcgccagagcagggaaaacgcgaaaccaaggaga

SEQ ID NO: 5665 - DNA, 31 bp, Homo sapiens
  chr12:124911527-124911558
  hypo
aatgtaaaggcctccccgacaggtttatggt

SEQ ID NO: 5666 - DNA, 31 bp, Homo sapiens
  chr13:28818188-28818219
  hypo
agcatctttttatgttcgaggcatttttctt

SEQ ID NO: 5667 - DNA, 142 bp, Homo sapiens; identical to SEQ ID NO: 5523
  chr14:45431366-45431508
  hypo

SEQ ID NO: 5668 - DNA, 31 bp, Homo sapiens
  chr14:102349235-102349266
  hypo
gtgggacactcctaggcgacaggctgcaaat

SEQ ID NO: 5669 - DNA, 31 bp, Homo sapiens
  chr14:105477331-105477362
  hypo
aacagcctctgcctggcgctccacagggggg

SEQ ID NO: 5670 - DNA, 31 bp, Homo sapiens
  chr15:49997485-49997516
  hypo
ttatcattctgatagtcgtgatataatgtgt

SEQ ID NO: 5671 - DNA, 56 bp, Homo sapiens
  chr15:49997611-49997667
  hypo
ttgttttcttattgaccggcccgggttctttctgtgttccacgtacctattagtcc

SEQ ID NO: 5672 - DNA, 31 bp, Homo sapiens
  chr15:49997672-49997703
  hypo
tgaggcttgtagtttccgtctgtttatggtg

SEQ ID NO: 5673 - DNA, 44 bp, Homo sapiens
  chr15:93546306-93546350
  hypo
tttacagccttggcaacgtagggagacctcgtctctacaaaata

SEQ ID NO: 5674 - DNA, 44 bp, Homo sapiens
  chr15:93546363-93546407
  hypo
atctagctgggcattgcggcatgtgcctacgggcccagttgcat

SEQ ID NO: 5675 - DNA, 14 bp, Homo sapiens
  chr15:93546430-93546444
  hypo
cttaggcccaggag

SEQ ID NO: 5676 - DNA, 18 bp, Homo sapiens
  chr16:1919743-1919761
  hypo
gcccggcctcagtgggac

SEQ ID NO: 5677 - DNA, 31 bp, Homo sapiens; identical to SEQ ID NO: 5527
  chr16:3156726-3156757
  hypo

SEQ ID NO: 5678 - DNA, 48 bp, Homo sapiens; identical to SEQ ID NO: 5528
  chr16:27280120-27280168
  hypo

SEQ ID NO: 5679 - DNA, 31 bp, Homo sapiens
  chr16:84701645-84701676
  hypo
cctttccttgtcccttcggcaggtcagcatc

SEQ ID NO: 5680 - DNA, 102 bp, Homo sapiens
  chr16:88787976-88788078
  hypo
atgagctgcaccaggtcgtacttgatgtagccgtcagtcttctccaggcccaggatgcggggcgggaagtagggcttgttctcgtagcgccgcagcaccacg

SEQ ID NO: 5681 - DNA, 63 bp, Homo sapiens
  chr16:88788383-88788446
  hypo
acactggtacacggcccgcagcagccgcagcgcccggccctgcccctccgcaaacagctctgc

SEQ ID NO: 5682 - DNA, 62 bp, Homo sapiens; identical to SEQ ID NO: 5531
  chr16:88851817-88851879
  hypo

SEQ ID NO: 5683 - DNA, 31 bp, Homo sapiens; identical to SEQ ID NO: 5532
  chr16:88851901-88851932
  hypo

SEQ ID NO: 5684 - DNA, 31 bp, Homo sapiens; identical to SEQ ID NO: 5533
  chr17:1588081-1588112
  hypo

SEQ ID NO: 5685 - DNA, 31 bp, Homo sapiens
  chr17:8197592-8197623
  hypo
gcagatcagaagactccgaagcctaccagca

SEQ ID NO: 5686 - DNA, 36 bp, Homo sapiens
  chr17:8197793-8197829
  hypo
atggccccagctgctgcgctgcgggcaggactgtgg

SEQ ID NO: 5687 - DNA, 31 bp, Homo sapiens
  chr17:42942199-42942230
  hypo
gatttctgacctccatcgctgggtgagaaaa

SEQ ID NO: 5688 - DNA, 80 bp, Homo sapiens
  chr17:42942241-42942321
  hypo
tacctgtggcagggcacgaggatgacagagttaaggggccacgagcacattattacctgtgaactcgccaaagaactttt

SEQ ID NO: 5689 - DNA, 31 bp, Homo sapiens
  chr17:42942328-42942359
  hypo
cagcctgagcaaggggcggatgttcagcttc

SEQ ID NO: 5690 - DNA, 31 bp, Homo sapiens
  chr17:80503129-80503160
  hypo
ctcccactcctcagctcggaattcctatccc

SEQ ID NO: 5691 - DNA, 31 bp, Homo sapiens; identical to SEQ ID NO: 5536
  chr18:63417766-63417797
  hypo

SEQ ID NO: 5692 - DNA, 31 bp, Homo sapiens
  chr18:74168121-74168152
  hypo
tgctcactttagctcacgctcctggcctgac

SEQ ID NO: 5693 - DNA, 64 bp, Homo sapiens
  chr19:623405-623469
  hypo
cccggctcagcccctgcggcggacacgggaccccggctcagcccctaccgcgtgcttgacctcc

SEQ ID NO: 5694 - DNA, 31 bp, Homo sapiens
  chr19:651270-651301
  hypo
gagtggggccctgcgacggctcccccaggct

SEQ ID NO: 5695 - DNA, 44 bp, Homo sapiens
  chr19:651311-651355
  hypo
cccaaggcctggacagcgtttgacgacacgcgtgtggacagcag

SEQ ID NO: 5696 - DNA, 143 bp, Homo sapiens
  chr19:6414853-6414996
  hypo
agcagttcagaagtcccgcctgcgagtctcagcgctccccagcatcacgacagcggcacacaggaacaagcagccggcgcagggaggcctcttcgtttaacctctggacccagcgaatgcttccctggcggtgcgtggggact

SEQ ID NO: 5697 - DNA, 31 bp, Homo sapiens
  chr19:10943884-10943915
  hypo
gactcctacagggcagcgggaggggaagggt

SEQ ID NO: 5698 - DNA, 64 bp, Homo sapiens
  chr19:19416920-19416984
  hypo
tgcagggcacctctcccggcttccgacctaacctaggtgctgtgggccccgggggagctgggtc

SEQ ID NO: 5699 - DNA, 64 bp, Homo sapiens
  chr19:39664415-39664479
  hypo
cccccgctcaccacagcgggagccacagcgagtatcccatgagcagttccgggctgccctgcag

SEQ ID NO: 5700 - DNA, 31 bp, Homo sapiens
  chr19:39664480-39664511
  hypo
tggtggtggacccaggcgacccccgctccta

SEQ ID NO: 5701 - DNA, 31 bp, Homo sapiens
  chr19:39664519-39664550
  hypo
acttcatcaagattggcgagggctccacggg

SEQ ID NO: 5702 - DNA, 56 bp, Homo sapiens
  chr19:39664630-39664686
  hypo
gcgagctgctcttcaacgaggtgcgggcgctgctgccctgccgccctgctggtcct

SEQ ID NO: 5703 - DNA, 42 bp, Homo sapiens
  chr19:41616325-41616367
  hypo
ttacaggcgtgagccaccatgcccagccgtagattttcattt

SEQ ID NO: 5704 - DNA, 31 bp, Homo sapiens
  chr20:47768035-47768066
  hypo
tagaaaagataatgtgcggtgacatctcccc

SEQ ID NO: 5705 - DNA, 31 bp, Homo sapiens
  chr20:49610453-49610484
  hypo
aagcaggatccaggcacgggctccagtgcat

SEQ ID NO: 5706 - DNA, 31 bp, Homo sapiens
  chr20:56941587-56941618
  hypo
cagtccattacacattcgatacaggtatcaa

SEQ ID NO: 5707 - DNA, 31 bp, Homo sapiens
  chr20:56941667-56941698
  hypo
tgaaagaaaaaaaaaccggccagagcattaa

SEQ ID NO: 5708 - DNA, 31 bp, Homo sapiens
  chr20:62220462-62220493
  hypo
cccacatgggaatcctcgacctccatagtga

SEQ ID NO: 5709 - DNA, 66 bp, Homo sapiens
  chr20:62220555-62220621
  hypo
gacccctgggaggggccggctcagggacaggctgcccaggacctccgcacccggtcaagtgcactc

SEQ ID NO: 5710 - DNA, 31 bp, Homo sapiens
  chr21:38893253-38893284
  hypo
actggagtgtcaccctcgcccaggaatgtgg

SEQ ID NO: 5711 - DNA, 55 bp, Homo sapiens
  chr22:18081584-18081639
  hypo
tgggtatacagacaaacggatagaaagcaggacagatatccgtatacccatgttt

SEQ ID NO: 5712 - DNA, 60 bp, Homo sapiens
  chr22:18081686-18081746
  hypo
tccagtgacagatgaacggataaacacaacgtggggcatccataccgtggaatattattc

SEQ ID NO: 5713 - DNA, 50 bp, Homo sapiens
  chr22:50169785-50169835
  hypo
cacatgctgctctggccgacttctgcggagaggggcgtcagcaggacaca

SEQ ID NO: 5714 - DNA, 31 bp, Homo sapiens
  chrX:9191714-9191745
  hypo
tagtgtaggtaatagacgaagaaaacaggga

SEQ ID NO: 5715 - DNA, 31 bp, Homo sapiens
  chrX:9571727-9571758
  hypo
ggggctgctgtagcaacgtgccaccaactgg

SEQ ID NO: 5716 - DNA, 43 bp, Homo sapiens
  chrX:13062332-13062375
  hypo
gcagggactgcccattcgccagcctggacgcccaggggacccc

SEQ ID NO: 5717 - DNA, 289 bp, Homo sapiens
  chr1:101702081-101702370
  binary
cagacttttcgagagaaaagttttcaaagtctctccaccttttttttttttcaggggctcgggagaatcctctccacagccagggatcagcgtctatctgggcgagggcagtgatttatacagtagaatccaggggttaccgggctccgccccttctctctctctctttttttctttcatttgttgtttggggaggaggggttcttttttttttttttttttttttttttgcttctgccccagatctttcctggacagtgcgtctcagcagttcagatccgggggcccc

SEQ ID NO: 5718 - DNA, 393 bp, Homo sapiens
  chr1:101702796-101703189
  binary
tctctgggctactaaggagcccatctcgatcagattgttcttgggcacttgtgatttatggagttcagaaaaaaggttaattcccaactgtggaacctacgggtgtaggggcagtgaaaattgcagttggtcggaggaataggagggaaggcgttaaattttggaaatcctatagacaaagaatatggtgggtggtgtggagcgtgggtaatggcttaaattagtactgcccaggagcagggtataaaattagttgggggaaaatgcggagcttcttggcttgagcagcctctgctgttcgcggagttgctgggattgttctcatctctattacctcattttattgcattgctgcattaccttgaaatatttaagcaacttagaagtagactt

SEQ ID NO: 5719 - DNA, 64 bp, Homo sapiens
  chr1:12123950-12124014
  binary
attcattcattcagtgtgaattggactgagagcactgccatacgcgggaggcgctctttagccc

SEQ ID NO: 5720 - DNA, 91 bp, Homo sapiens
  chr1:220102055-220102146
  binary
acttggcaggtggccacgagccgatgtctctctttgtgggacaggactgtgcagagaggggcgctgcggaggagagggggcgtgtctggac

SEQ ID NO: 5721 - DNA, 62 bp, Homo sapiens
  chr1:231297736-231297798
  binary
cgagcccttattcgctgagctgaagcctcctcccccctcctccccattactctctgctctgg

SEQ ID NO: 5722 - DNA, 51 bp, Homo sapiens
  chr1:241520533-241520584
  binary
gaggagggaggaggggacagtcacgtgggacaggggcgtccgaaggtgccg

SEQ ID NO: 5723 - DNA, 148 bp, Homo sapiens
  chr1:241520612-241520760
  binary
cacaccgcccgggcctcccgggcctccccggcctcccgccctcgcgcccctcgggaggctgtagtcctgcccccggcgcggccagcccgcgctcccgcacaccccgcccgctcgcccgcgcgtgtgtacgtgcgccggaggcctggag

SEQ ID NO: 5724 - DNA, 91 bp, Homo sapiens
  chr1:241520789-241520880
  binary
ggaaagggaggaaggctgtgcgatgggtgggtgggtggtaggtgggtgggtggtctagtgaatggatggacagatggacggacggatgcac

SEQ ID NO: 5725 - DNA, 138 bp, Homo sapiens
  chr1:247170868-247171006
  binary
cgggagtcgggactctcccgacaacccctccgtcatcacagcacaatccagggaagacgcggcgctgcgggcgcggggctgccccgggagggctctgggccgtgccgaagtcaccaggcagagaccggacagtcaccc

SEQ ID NO: 5726 - DNA, 38 bp, Homo sapiens
  chr10:112431835-112431873
  binary
cgatgacggctctcggaggctcctggttttgatgtctg

SEQ ID NO: 5727 - DNA, 236 bp, Homo sapiens
  chr10:112432125-112432361
  binary
gaagcctgagaggtctcagcgagacagtcaaaggggaggctcccctcgccgagtgtcacccgggaccctgcgtccccgctctgcagagaccttctctccgggctgctgccgtcctccctcgcccggcggagcttccgtgatcgtcagccaaagcccccggggcggtgcgccgcaggcggtcttcccgggtgttcgcggaagctgcgcgctcgcgcccccacggttctccagcgacc

SEQ ID NO: 5728 - DNA, 209 bp, Homo sapiens
  chr10:17270445-17270654
  binary
ctgagacttgaatcaatctggtctaacggtttcccctaaaccgctaggagccctcaatcggcgggacagcagggcgcggtgagtcaccgccggtgactaagcgaccccacccctctccctcgggctttcctctgccaccgccgtctcgcaactcccgccgtccgaagctggactgagcccgttaggtccctcgacagaacctcccctcc

SEQ ID NO: 5729 - DNA, 216 bp, Homo sapiens
  chr10:50969681-50969897
  binary
cggttcggcgaatgcgtactgcagcctgctgtggcctcgggattaccccgtccccctcccacatctcccggggggcggaagaagcgcatcccatgcaagcagcgacctcaggccatgccgccctctctcaggcctcagttttctcatctgtaatcggagaccgcggttaaaaccgtctattaggctccttggtagtccgaagctgcctatgggtcc

SEQ ID NO: 5730 - DNA, 192 bp, Homo sapiens
  chr10:50970412-50970604
  binary
gcccctgagactccgcgcgtcgtgacgtctccatggatgccccgccccgctcctggcgctgtccacggtgctggcggcccaggcccgaggtcgcccacggccgaaggggggactcctctctgagaccgcagaacggggctgaggccctgaaccccgtgtgctcgtcctaaaactaggacgaatgtaccagac

SEQ ID NO: 5731 - DNA, 79 bp, Homo sapiens
  chr10:94449318-94449397
  binary
gcagaggtgcctcggggccgcggacagggccgctggagcccgcactccagaaggcggtcttcctcgcgcctcccccgac

SEQ ID NO: 5732 - DNA, 399 bp, Homo sapiens
  chr11:115375434-115375833
  binary
gctccagggggcgggtctagcttcttgtacacctttattaggaatgtttatagcaatcgctgtatcagaccgacgactggagaatctcccttaagagggtcctctgtcccgcacaccgagtgcatctggcctagcgaaccagacgttgcaaatttccgtcactcaccttgcaccgaaggaatagatctttgggaacgggggctgtgcgggagtggagagtaagaaggcaggtccccggattgacaaaacaatctgggagaagtgcatgcgtgctttgcacgtccggcggagcgggagagcccgctcaacagcctagcggtagactcggggatagttggagaaggcagccgtagagtcgggttctgagattttccagtcggtctttttgcggcagaatct

SEQ ID NO: 5733 - DNA, 161 bp, Homo sapiens
  chr11:133939437-133939598
  binary
ggcggtgggctcatcccccgggtgggctcctcccaggcggggtcctgtgctgggcggtgggctcgtccccggggtggacccctcccgggcggtgggcacggccctctggagggagcgcggcagctgcggcgtgggcgctggaacttgctggaagaccctgc

SEQ ID NO: 5734 - DNA, 33 bp, Homo sapiens
  chr11:65307510-65307543
  binary
cgcggccggagggcccgggcacccagggcgggc

SEQ ID NO: 5735 - DNA, 510 bp, Homo sapiens
  chr11:76381512-76382022
  binary
cggctccacgcgcgcagtggggatggcgggaggggagtgtttggggggcgtcccttgggaccagcccccgccttgcgctcgctagaggcgcgcgacagtgcgccccccgagggccggccagcctcgcctgcccggcggctcctacctggctcagcgcggccgcagctcctctcccgggcagtctcggcacattttgcgcaaacccgcccccgggtcccaccccgcgccagaccccggggtcacggcccgaggaggagcaggccgctcagctgccccaccggagcccccgcgctccggctgcaatttaaatacctctcccgccggcccgccccgccacgcccccctctggcgaggccgtggggtcctagcgcctggccccgtgcctcggtttatccggagccggcgggggcggagtggggtggggcggcgaagcatcttcaccaccctgggacctcggccgggaaggggcgggggcccagtgtggggggatgagagggcgggagggagagg

SEQ ID NO: 5736 - DNA, 129 bp, Homo sapiens
  chr11:8615887-8616016
  binary
cgccttagagaaggacctaaaaccccgtctggggcacagaggagcagccacgtgttacgtaaaataaagctttgtagcaggaatatcacagtactgaggtgattgatgctcaggccactcttctcactc

SEQ ID NO: 5737 - DNA, 97 bp, Homo sapiens
  chr12:111284508-111284605
  binary
cgattgcatggcgttggccgagggaggggctaagactgttgattgactcaagaagtcacttagcgtcatgagggtccgggtagtctggtaaggggtc

SEQ ID NO: 5738 - DNA, 117 bp, Homo sapiens
  chr12:21681020-21681137
  binary
ccctctggctgccagggtgtgcagaggtccccagggagttaggacctgaggtgcagctcagaggggtaaggcgagataggaagaactatgcaaatgcttctagaaatgtatctgcgc

SEQ ID NO: 5739 - DNA, 397 bp, Homo sapiens
  chr12:3601625-3602022
  binary
atgggtctgcagccacccgtcccgcaagggcttttgaggaggtcgctctagctccgcaaattgtgttctcggcccccgccttcggcagcctttttctctactctccagctggccctgagccgcagagagccctgctgggctttgcgtcccgagactcgaggctgtgatccctcgcctccctctgaccccgctgtcattacaacaaccggactattccgtaggctctgggcacctgtagtcacgaaggggatcagcgtgggcagcccccttaccttcctggagaaacggtgcgccgagatgggggcggagtggggcatgtgtgtgaagatcatcccttactcagtggcaggaaaaagacacagagagcaaactcccaggctctattaatagctgggtg

SEQ ID NO: 5740 - DNA, 77 bp, Homo sapiens
  chr12:40618264-40618341
  binary
cggtgtcctcttttcccagcgccctgatttctattcttagatctggagataggcggctttcatttttcctgctccca

SEQ ID NO: 5741 - DNA, 35 bp, Homo sapiens
  chr12:40619048-40619083
  binary
tggaggatctgctggtgttcacgtactccgagcgc

SEQ ID NO: 5742 - DNA, 86 bp, Homo sapiens
  chr12:4377809-4377895
  binary
cgtgggctcactctgcagctgcagttttcagcccttgcagtttagaagattctgcatgagcacggatgccacgagggtatccagcg

SEQ ID NO: 5743 - DNA, 245 bp, Homo sapiens
  chr12:4378558-4378803
  binary
tcccagccccttcccccacgtgtggatgacgtcaaaattccgcgaaaaagccgcgtggtggctccccgagcggaggcgcgattccgccgcccagcggccccctcccgggggcgcctggagggggagaagggcggaggcggccggttccttctcctcccgggaggcaggaccccccgacgccgaccgccggacgccccccgccccaaagcttattggaaaattcacttttgtaaagcaaatgtatt

SEQ ID NO: 5744 - DNA, 31 bp, Homo sapiens
  chr12:94543992-94544023
  binary
ggagcacggcctgaggtccccaaagggagag

SEQ ID NO: 5745 - DNA, 86 bp, Homo sapiens
  chr12:94544052-94544138
  binary
ttagactcaaaactctagtggctgcatcccattgccatccttccctgtccaaacggggacgcttgtttggggctgagtctcctcgc

SEQ ID NO: 5746 - DNA, 166 bp, Homo sapiens
  chr13:108519932-108520098
  binary
gagaaggcgcgcgggggcgggcggcggcggggccgcggggcccgggggcccccgcccggctccccgggctcaggcgcctgctctttcctttctgtccccctgtccacgatattttgttttaatcactgaagagaaaaataaaagtcagactgcggacggcatggcc

SEQ ID NO: 5747 - DNA, 68 bp, Homo sapiens
  chr13:108520309-108520377
  binary
cgtctcggatcccggaccgcgagatccatcgctcccagtgcgtgcagttattccgtcctgctgtgtga

SEQ ID NO: 5748 - DNA, 201 bp, Homo sapiens
  chr13:29292491-29292692
  binary
cgtaagttcaacaatgaggttccttttgggaagcgacagttgcacaattgttattgttattttgctgcgtattaaaaacggacagggagggggcgttttaaaaagcagctcccaatcgaaagggccttatttttaactcaccccacgattacagtcttcctgccaggctgggtacaggtcgggccgtgccaggggctgtcg

SEQ ID NO: 5749 - DNA, 242 bp, Homo sapiens
  chr13:29293342-29293584
  binary
tctggagttgcaaagcatttctgaatccgaatatcctttctcatagaaacacataaaacaacagttggaaaagtaacatgtttgggctgtagcccccagcaggatcccggtcggcccgcagaagaggggaatgggcgcaggtggagggcataggaaagagagtgctcaatgcagagttagcggagggttggaatgtggtcgctggcttttcctggggaggggaggggggacttgggcaaatc

SEQ ID NO: 5750 - DNA, 39 bp, Homo sapiens
  chr14:23355352-23355391
  binary
cgggctgggaggccgcaccacgacctacccgttatcctc

SEQ ID NO: 5751 - DNA, 53 bp, Homo sapiens
  chr14:23355484-23355537
  binary
gctctcccttccaagtcacctcttctccctaaggcctttttaccatcgcggac

SEQ ID NO: 5752 - DNA, 80 bp, Homo sapiens
  chr14:60097114-60097194
  binary
cgggtttcccgtgcgcctcaggcatgcactactgaaataaagagaataccctgacttttccagttgctccacacacagtc

SEQ ID NO: 5753 - DNA, 45 bp, Homo sapiens
  chr14:60385935-60385980
  binary
cgtaccttacagcacatgtcaatttggacaagccacatttcaagc

SEQ ID NO: 5754 - DNA, 507 bp, Homo sapiens
  chr15:31774606-31775113
  binary
cgcccaggggcccgccagcgacagtccactgtggaagtgccttcaaaggagaaatgtgagcagcctgtcctatctgctcctctatgagcaaatccaaattgtgagatgggaaccctgctttttggaccctaggtgtctttggaaagctcctgtcacctgaactgcccggcactgggagccatcgctgtacctcacggcgcccgcgagacgggtggtccagtgccctttccacggccgcccgcggcttggatggcagtgtgaatggtgcttgagccggggctgggggaggaggttttgcttatgaaatggagctgtgtgtttctaaagggccacagtgaccaccagggcgtcagctggcggccaggtacccgccttctcctaggcctcgggatgggaggcaggtagagctcacagaggagcctccaccgcagccccgggtgcgcgctcgctctaagccctgggtactaccaaccgcgcacaagggaccgctacctggaagaggtcatc

SEQ ID NO: 5755 - DNA, 78 bp, Homo sapiens
  chr15:48936649-48936727
  binary
cgaacggggtggggactaaacaaccctagcacctctaaggtgcccccaggaggtcttgccaaggagtcttccacaggg

SEQ ID NO: 5756 - DNA, 76 bp, Homo sapiens
  chr15:60289235-60289311
  binary
cgtcggtaagtccttggggcaacctggttttcccctgctgacaagctgtgtcagttaactgcaacccaccaagagt

SEQ ID NO: 5757 - DNA, 351 bp, Homo sapiens
  chr15:63795501-63795852
  binary
tgctctaggactgcattgcggggaggtgcccggctctaaccactgcccggcccggttaatcatttcctgaccttccttcctcctctcgctctggccgcaggattgccacatcagtcttccccctcctcctgctcgccttctggccccgaggctccttcgccgggttttacaaggagccccaacttggaagcaatatttgtaatagccccggacgtcctcaagtgccccagtgagatcgcaggctcgatccagggtatgccggcccaagcggccccttgaggcttgccctcttctctaatccctcactaaaaagaggtcagagggtcagggatccaatctccatacagatca

SEQ ID NO: 5758 - DNA, 338 bp, Homo sapiens
  chr15:63795894-63796232
  binary
ggtaacagctggtagggtgttgcgaggcttaaatgcggtatgggaagtgcctggctgggagaccttaggtatctaacaaatgctagatcccttcccttcttatcgcctggtaatggggagtttagcttgcccagcaatcccaggctacgtttatctcacttgaacttcctggcttgaaagtcctacgatgtgctggaggtaacgcagatggtgagtcacagtgacaggatttgaacgtgggttcatgggcgcccctgcgggcccacccacgcagcatctaggtggctggctaacgccacgtgttcagaacctagaaagggctacggatcgcacctgcc

SEQ ID NO: 5759 - DNA, 178 bp, Homo sapiens
  chr16:85932121-85932299
  binary
cgcctagcaccttcgatgctcctgtttcagtcgcggtctcagcgggcagtggcctcctttgaagctgggattctcctgcccctcccgggcagcgcaggccaccggtgacccgggacggtctgtaaacgaccttcgcgtccccgtccccgtggaataacgcgcggcgggcatcactgcc

SEQ ID NO: 5760 - DNA, 148 bp, Homo sapiens
  chr17:76034983-76035131
  binary
cgcaggcgaccagcgagagtgtgggaaaaggcgacgctggtgtgctgttggtcggaatgtaaggaggcatgtggcaggatttatcaaaatgttgggtaatatgacgtagtacatcctgcagacacctagagcacagctctttactgac

SEQ ID NO: 5761 - DNA, 94 bp, Homo sapiens
  chr18:13823932-13824026
  binary
cgaccgacccaccgacccgaccgaccaaccaaccaaccaagcaaccatccaaccattcaagagtgtgttcggggggattttcgctcggggctga

SEQ ID NO: 5762 - DNA, 113 bp, Homo sapiens
  chr18:13824102-13824215
  binary
cggaggcgggcccggcgcgggcaggcaggaggcttaaagccccgcagagccgcagccgcctagctgggggagaggcccgtccggggctggctctgagcgccgcacggccgtcg

SEQ ID NO: 5763 - DNA, 202 bp, Homo sapiens
  chr18:25756986-25757188
  binary
ggaggcggagaggggccgagcgaagagccggaggaggcggcggcggcggcggcggcggcggaggaggaggaggcagcggcagcaccaacagcggcgcggagaaacggctccaggcagtttccacccccttcccttcccctcccctccccacccccttcttcgctgctctccgctccccgccaatggagagcgagctgatgac

SEQ ID NO: 5764 - DNA, 282 bp, Homo sapiens
  chr18:30349781-30350063
  binary
ggcgcatactgcatgcgggtctcgcggtcgtgctccagccacagcacggacatctggaagagcgccagctccgactccacggggggcggcagcgagtccagcagggcgcgcatctcctcgaagttgagcagcagcacatcctccaccaggtacttgttggccagcttcttggtctcctccaggccgtgcagcgcggcgatcttgcacacctgcttgtagttctgcaccgagatctggtcgttgaggaactgcacgcagagcttggtgacctgggggatgtgc

SEQ ID NO: 5765 - DNA, 1208 bp, Homo sapiens
  chr18:32556625-32557833
  binary
cgtttgcaggtaattaattcacagtgtggcggcgccttttcaagccccctctgcaagccgcgccggcctcctccctctcgagcggggtcaaaccacttagtttatttcacccgctggcactttcttccctgtcacgaattcagcctggcttcctttggcctgagacagcgtcttcaggcgggtcggctcggacctgcccagtggggcgcccacctgcacccgcacccgcacccgcacccgcgggaaggggcggcgctggccggactctctcgggtggactcccggagcggcggcggcggcggcggtggcagactgcgagtcacgtgcgacagaggaggcggagcacggcggccgggtgggtggagaaaacaaagcccccagctgtcagcagaggaaggaggcgacagcgccggagcaggtgagtcaagtgcatttaaagcggtaccgccctggcgcaccccgacaccccctgcactgaagcagtccctcccaggccaggggctggctgcgcctcctcctgccgctgaggtctgcagcccgcggggctcggagcaaccggaaccgggggtccagagtctagcaagaagttgtgcaagggtcggctaggcggtctccgggtgtgcaccccgccgctctcccgcgggccacatctctggttcggtgccccagctctgtgcaccccaggaaagtggagggagggagttggggctgccacgctggcagaagcgaagtggactggttctgaggggtgaggctggggctgtccagggtaggaacacggcgttggtgaaggaggggggctcgcgactgcgcgaccgcggcgcacgaccctccaggctctagctggggcgccggcactgagagagctgggggctctggcaggggctgcgcgcttgggggcagatcaggaagtgcagcgcgctggcgctcgcgcgcttgggagcatcccctggaccccgggcacttccccttcggcagccaccactctcccactccgacgccggccaccatccgcgctcccgggactcaggagccgggtgggtgcaaaaggaagcgggttgttattctgcgcccaagcatctcttctgcagggagccccgggagcgcagggcgagggctactcagcgacttcgcactcggcttagtgggaaattcttcggtctacccttagaagggctatgcggaagccagaaatcccacaaagagcc

SEQ ID NO: 5766 - DNA, 65 bp, Homo sapiens
  chr18:32557864-32557929
  binary
tctgaacctggggcgctcgataaagctgattttcagaccccaaaagggctagtgggtttggtcac

SEQ ID NO: 5767 - DNA, 284 bp, Homo sapiens
  chr18:46418923-46419207
  binary
cgcccgtgaggaggtgggccctgatttggcaggtgtgcatgaggccccctccacacatgcatgctggtgcgggtgccagcacggccacagtggagggtaagaacacacttccaggcggcactgccagccctcgccgtgttccagcttgttgacaccgtgatggcataattacagtttcaatcgcagattaataataagtcatttttgcaaacgaggaggcaggtctgcactggaaagggccccaaagggcctgtcgcctctgctatctgaggctgctggccgcc

SEQ ID NO: 5768 - DNA, 39 bp, Homo sapiens
  chr19:10616220-10616259
  binary
cgcgagactacgtctcgaaaggaaaagaaaaaaaaaaaa

SEQ ID NO: 5769 - DNA, 116 bp, Homo sapiens
  chr19:10691764-10691880
  binary
cgctcaatcatgaaacagcctttgcagtcagccaatggctgcaatactggccgtgatcagcagatggtgagcgagcgcttatttcaaaacgggctgcgattctcttaagtccccac

SEQ ID NO: 5770 - DNA, 116 bp, Homo sapiens
  chr19:1979018-1979134
  binary
catcccgtaccgcgagcacaagagcctgacgggcacggcgcgctacatgagcatcaacacgcacctgggcaagggtgagctgcgcgcgcgcggcggggggcgggcgcccggacccc

SEQ ID NO: 5771 - DNA, 262 bp, Homo sapiens
  chr19:19843330-19843592
  binary
aggaacctgaccccggcagcaaggacctagccaggcttcggttctcacaagtgaggaaacgcacccgtggattcatcgtaaggtttccaaccaagtggtttcttaaacgcacaaaccccacagaccgagatgggatctccccaggaccctcccgctgtcaccgaacaatccggggagacgcggggctgcgggcgcagagctgcccatagagggctccaggaccgggggccgaggtcgccccgcggggacgggacaggacgct

SEQ ID NO: 5772 - DNA, 47 bp, Homo sapiens
  chr19:19844044-19844091
  binary
ctggcttcagtccggcttgtccccgccaggacgtttgcgtttaaacc

SEQ ID NO: 5773 - DNA, 453 bp, Homo sapiens
  chr19:2702553-2703006
  binary
tccgcagccgaatccgagctgtcccagtcccctctccgggacgccggccgcgccctcacttcccctggcccggttcgcgggcgcccttacctgcgctcgggccccgcggccgcctcagccccgccgcgcagccgaaccctccgccccggcccgcgagcgctcgctcccctctgcgggggcggggccgacactcggggggcgggccctggcgtcccggcaaggccaatcgcgagccccggctgcgggaggccggagcgggggcggggcgcggggcaggcagcggggtaggctgcgcccaggagagtggggcggggctccgggcgcgggcggggccgggggcggggcgaagagcggctttccagggtgacttcgtgacgtcaggaaggcgcgagtagtttcgcgagttcgaatcccgcgctaggtgagctggttcgaatcctgcatgccagctcc

SEQ ID NO: 5774 - DNA, 296 bp, Homo sapiens
  chr19:37568994-37569290
  binary
cgcacctgcctggccggcgggtcccaccctctctcctgccaggggtagaccctgggaccactcagctcgctctcgcaggccctgagcgtctgacgcctgcgcactgagcgcgggcgggcgggcactcccagaaacctccggggcgctgcaggcgggacaagcaggttccacaggccgagcccacgagcccctcgaggggtgagcggcccgggcctcctggcgttctggccggctagccaagcgctggactacatttcccagaggcacggcgtccggagcgctggactacatttccc

SEQ ID NO: 5775 - DNA, 182 bp, Homo sapiens
  chr19:37569554-37569736
  binary
gtgtgcaggctacagcctgcctggtattggcgactgcctgtgcatacacgactggacgtgtgtggctgtggttttgtgtatgagcatttgtatgagtgtgagttgtgactctgagggtgtttgtgactgtttgcttacctggctgggatatacttatgtgactgtgattttatgtgtgccgc

SEQ ID NO: 5776 - DNA, 359 bp, Homo sapiens
  chr19:41190162-41190521
  binary
cggggtttcaccgtgatagccaggactgccggcctcacgctttttaacaccaacttcaaacgacttgggctggtgtcccagccaggccgcgcacccgcacagcacagcacagcggcccccgtccccctcgccccgccgcaccctgccgcgcccactcaccctgaccgggaagctgcacgtgcccttccgcaccgcgtcctcgtctgcctgccactggtgcgggcgcgacgcctcgggcacgtaggctggcttcctccgccgcaggctctgccgtaacttgttcatggtgcccgccccgtctggtgacacaggacagtgatgtgggtcaagggtgggggtcagaaggtatggagctcaac

SEQ ID NO: 5777 - DNA, 76 bp, Homo sapiens
  chr19:42927302-42927378
  binary
cgggaaccctggtccacgaagctcgcattccggactctgctcccaagccgatccgggcgtcagctagtccctgtgc

SEQ ID NO: 5778 - DNA, 248 bp, Homo sapiens
  chr19:42927478-42927726
  binary
ccctgtggcagtgggccagtccacgctgtccccactgccccgtaggatgtacgaggttccttccgggctgctgccggtctccgcgcgctcacctttggccttgtcttttcgccaccgccggcgaccgtggctccttgagccctctttggcattcttcgaggccggggccatagcggcctcggcgggctccgttcccccggccaactccatcaattccccgcggtcctcccgcgggggccaattccagc

SEQ ID NO: 5779 - DNA, 219 bp, Homo sapiens
  chr19:50553779-50553998
  binary
cggctcctggccacgccctaaccccacccccgctgcctctaaacccgtccccacccctgcagcctcacaggctgccgtcagattctcaagcccctattcctctcggtggcctaaatccccaactgctcggggccacttttcaggccaaaatgggcccaaaatggggagggcaagtgatgaatgtcactagacagtggggccctcaaggacctggcaaat

SEQ ID NO: 5780 - DNA, 208 bp, Homo sapiens
  chr19:52531884-52532092
  binary
ttatagctgagagtggagccttagctggagcaccatgggcacggccatcttagaggaaggcagcagccgtacggcagagaagatgctcatatccaggacaatttggaaaaataaacaaggtttgaagaagtcacggtgctggccaggaagcggtcacagagttgccaaaaccagtggtcactgaaagtgttagatttggggatagggc

SEQ ID NO: 5781 - DNA, 819 bp, Homo sapiens
  chr19:53237625-53238444
  binary
cggaggagcgcattttccacgccctggagctccgcaggcaagaataccccgtgccgcaggacaggcccctgggacctccccagtgcaggttcaatgaaagcggtgactgcggaggggagacctggggagcagcaggccccggcatgaggaggaaggtgcggggcggggggggggggcgcgacggcgccttaggaccaggatggggtctgcaggatcccaggacctggcagaggactcggcctccccgggactggggctgcggcgcggcgctcccggggctgaggagggggaggctgggaggcgccctgggcaagaatccacatcgcgggtgaagactttaaaaagcgcggggcgcgaggagtcagaacaaggttttcagcaggaaaactacgcaacagaaagtgtatacattgacctatagcagaaagaccggggacgagaccagcctcaggacgactttaaacccaaaaggaagcgaccctcgggctctcacggggatgtctcaatttgctctgggcaaaggaagacgccggagaatttccaggtctgtggggaccccacgtcccagggacagaagccctgggaacctagttagcgcagacttaatacaacacagagcaaaactcaccgcggcgatatgacctacactccacccgatccgcttccgggtttgcgttaatctgcgcgcgcaggacaaaagccaggcctgggcgggaagtgggaggtaggcggggcctgggcgaggtaggggcggggcgcgaggcggagagaccttgccttttagaaccggcagagggcagggccggggcgggatctgcg

SEQ ID NO: 5782 - DNA, 352 bp, Homo sapiens
  chr19:53445359-53445711
  binary
cgcgggctcaggagaaacggtgattacggagggaagacctggggagcataagggcccggcacgaggagggaggtggggggcgacggcgccttaagacaagactgggaggcgcccagggcgggaatccgcctcgcggtaaggactttaaaaagtgcgggttgggaggagtcagaaaaaagttttgagcaggaaaactacgcgatgggaagtgtatacgttaccctatagcagaaagattcgggacgggaccggtctatggtgactttaaacccaaaaggaagcgacccccagactctcacggggacttctcaatttgctctgggtaaagaaagacggaggagaacttccaggt

SEQ ID NO: 5783 - DNA, 231 bp, Homo sapiens
  chr19:53445822-53446053
  binary
cccgcttccgggtttgtgcgaatctgctctctggggacagaagccaggcctgggcgggacccgcggggaggtaggcggggcctgagcgaggtaggggcggggcgcgaggcggagagaccttgcccttcagaacagacagagggcggggcgggggcggggccggggcgggacctgtgcgtctctcagcctggctcccagagcctcaatttttcgggttttggaggcgagacc

SEQ ID NO: 5784 - DNA, 140 bp, Homo sapiens
  chr19:53606073-53606213
  binary
cgggccccgggcacctccccaacgagggctcaagggaagcggtgactgcgaaggggaggcctggggagcagcagggcccggcacgaggaggagggaggtggggggcgacggcgccttaggacaggggtgggatgtgcagg

SEQ ID NO: 5785 - DNA, 222 bp, Homo sapiens
  chr19:53606354-53606576
  binary
gtaaaggattttaagcaggaaaatcctgcttaaacgtttaaaaaaccgggaaaggccgtgtttacttggcccaaggcagaaagaccgggggcagggaccagcctcagggcgactttaacccaaaaggaagcgtctccgggcccacacagcaaggcctatttacctgaggtggagggtgcggtgcggagattttaagtccgtagcgacccccgggcatcgggt

SEQ ID NO: 5786 - DNA, 31 bp, Homo sapiens
  chr19:58125385-58125416
  binary
cgaagccacgccctgacctcagagtctcagg

SEQ ID NO: 5787 - DNA, 405 bp, Homo sapiens
  chr19:59010484-59010889
  binary
cgcacctggcacgcacacgccatacacgttaacctgttgcaagaagtccacctgcgacaacacgccctccacctcgtgcgtggacacgttctcgcccttccatctgcaaggagggagccggcgcttgtgaccacgcccccgggaaggagaggccccgcctcttgcccccgccccgccccttttggggatcaggaggcccagtcagccccgccccctcgaaaatcgagaagccccgccttcgcgtgagaagtcctgactccaagttccgccctcttacgacaggaaagtcccgcctcttcagcctgactccctctaggatctgaaagcgtccgtggccccgcgccagccccgccccgagaaaccctgcctcggaccggaaggtgtccccgaggcggtcgcggaagt

SEQ ID NO: 5788 - DNA, 48 bp, Homo sapiens
  chr19:59010962-59011010
  binary
gcgcaccagcttccgttccgacagctctcgggggccgcggtagcccac

SEQ ID NO: 5789 - DNA, 97 bp, Homo sapiens
  chr2:105468467-105468564
  binary
cggcaggaaaggaaaacacggggtgctggcaccgactattcaaacgtctgcacctggagatctcagattgattcaatgaaatctgtgttccatcttt

SEQ ID NO: 5790 - DNA, 144 bp, Homo sapiens
  chr2:105471069-105471213
  binary
aggactcttgtttcagaggcaaccaagagctccggcaatagcaacttcagagaaatgcaccatcgcaagaagttttcctaggacagaacaaaacttgaaacgagaggaccagagggggagagcaggagccagcctcccctctcc

SEQ ID NO: 5791 - DNA, 354 bp, Homo sapiens
  chr2:135476396-135476750
  binary
tcagcggggccgggccgggggcggcagccggtggcgcgtggccccggggcggcggcgggacggtgggcccctgggagctgcggcgctggatgcccgcggccggctccatggcgcggggctgcggatcccggcggcggcgacgacaagcgcggcggggactcgagtcagaagtgcgaggcgccgcggctctggcgggggcaggagcggacggactggccgcgtggacagggagggagggcgggcgggcgccgcggagtggaggtgcacgggcgggggcggggacgagcggagagccgctcggctccgcggccggtggcggaggctggggccgcgttgttgccgccgcgctccgcc

SEQ ID NO: 5792 - DNA, 483 bp, Homo sapiens
  chr2:136875399-136875882
  binary
tttctcctcgactcacagagaaaaagattccaatcctgctccccccccacccacccgcactatataggcatggtcaagaaaactcctttcggtgacccttttttggagtacgggtacctccaatgtcctggccgcttctgcccgctcggagaggggctgcgctctaagttcaaacgtttgtacatttatgacaaagcaggttgaaactggacttacactgatcccctccatggtaaccgctggttctccagatgcggtggctactggagcactcaggccctcggcgtcactttgctacctgctgccgcagccaacaaactgaagtttctggccgcggccggacttttataaaaacacgctccgagcgcggcgcatgcgccgctggggcggggagggagaaggcggggtgggggagaggggcagacgcgaggaaggagggcgcaggggcggggcggagaggtgcgcggcttgggaagcccaggg

SEQ ID NO: 5793 - DNA, 69 bp, Homo sapiens
  chr2:139538166-139538235
  binary
ggcggcggctcgggcgcttgggtgatgggttcagtgcgaggctgccctccagatccgatcccgccgggc

SEQ ID NO: 5794 - DNA, 101 bp, Homo sapiens
  chr2:168148871-168148972
  binary
cgtttatttggagggaagacggggaaggtccactctgcctacaactccgacatttctccgtgtgcctctttgctagctggggacacttcgtggctgattac

SEQ ID NO: 5795 - DNA, 240 bp, Homo sapiens
  chr2:168149264-168149504
  binary
ccaggcccacccctgcgggcccggctttccctcctcacctaaggctccggggccacgagtcccccatcctgcgcccctcccgcgcctcccccatcccaaaccccagcagcgtcgctgcctctcccggaaacaagcccgctgagcaaaggcggaggaaaaccttgggccttccgctctgattggtctccccccgccgagcggggcgaggcagcgattggctgccgggcgttgtcagtcgcc

SEQ ID NO: 5796 - DNA, 221 bp, Homo sapiens
  chr2:168149556-168149777
  binary
ccgccgcggctgctcggctagtgcagctgggcgagctcgcgcgggcgccgccgccgcctctgctgctgcccaccccgccgcgccgccggcgctgccggtcttgcaggcggccgccggggaggggcggccgagagagcggagcacgaggaggcgggggcggcagagaagtgatgctggcgccggggatcggggcagcggcagcggagcagcagcatcttcgg

SEQ ID NO: 5797 - DNA, 325 bp, Homo sapiens
  chr2:219232221-219232546
  binary
cgaagttcctggaccggaaggtgaggggaggctccaccagcctggggttcccattcccccatgggccttaaattcattactgatctctgcacctgattgaaatgcacacccgtaggggctagaaggctccagcgccccttagctctccttggagcgagcggctgggggctcctggggcgcgggggtcccgtccggctgaggctcgggctctgtcccctgccaggaggagctccggctcggccacgccagctatctgcggcagcaccccgaagcccacgcgctcatctccgacttcctgctcttcctgctgctgcgccagccggag

SEQ ID NO: 5798 - DNA, 32 bp, Homo sapiens
  chr2:219232859-219232891
  binary
gctagaaataggaaccgttaccgtcgtacctc

SEQ ID NO: 5799 - DNA, 342 bp, Homo sapiens
  chr2:232790312-232790654
  binary
cggtcgcccttgagattggcgcccccgcccccgggagccttgtcgcccttcttctgaccgccgcccgcagcctgcggctcggccagctcctctgccggcggggttcgcgggacctgtccgaggaaagagcgggcaggtgaagggacacgcggctgcagcacgggggactctgatgctccagccccacgcgcccgccggcgcggggtgtccctcccaagcccagagccgcccccaccgatgccggccagcttggccccgcatccacctgccacgcggccgccttcgccgctccctccggaagccccctgccctccctttgctgctcgccgggcaggccacact

SEQ ID NO: 5800 - DNA, 264 bp, Homo sapiens
  chr2:232790784-232791048
  binary
tctcctgggtcctgcgcgccgcattctccaagcccccagcctcccacgcctctcccaggctcggcgtccccacgacagcacccaccttcggcggcgccccgggcttggcttcggagggccggagggagagcagcgtgagcagcagggcgcaggccagcagctgggagagatgcatggtgccgctggggtcgaggggcgcacacgggcggcagcgagggcgcgcaggtcggcgggcagaccagcagggggatgcggagcaggctg

SEQ ID NO: 5801 - DNA, 395 bp, Homo sapiens
  chr2:43452443-43452838
  binary
tgccgctctcctcgaagggccggcacagctcggtcttgtagcgcgtggagttgatctgggagccgccgccccccttctgctgctgctgcaggtgcaggaggtgctggctgcgatcgccgttctcgctaaacgagcggtcccggaatttgttctccttgttgagcagggctgtgccgccgccccccgacggctccttaagggtgccgtaggaggtcggaccgccggccgccgcgctgccgcagctgctgccgttagcggcgcccgggaacttgggcgagcagctgccggggctgggcgcggggtgggcgagtgcatgcaggttgctggccgagtgccgtcggaggaatcccggcgcgaagcccgagctgggggcggcggccacaggcgtccccacc

SEQ ID NO: 5802 - DNA, 373 bp, Homo sapiens
  chr2:60784505-60784878
  binary
agtcctagtttatgctttataatgtgttgacaagttttctaacagactttctgaaataatgcacatatattcacgtcggttagaaacccaccgtatttttagagttgagtagatctataccctaatgcagtgagagagtgtaaatcatacaggatttcatagtcctttcagtagttttcggtatgaagtatgagccgcgtggcctccagacgtaaccttttagaaaaaaaaaaagacagtgcttttattttatggtgtaaagtgcttttagctcaagggctctgaacgtgaatgtggtcaacaaacagctcgaagagggagacttaatacagtcccagccctcggaccgaggatcgcctggcgcgaggaactc

SEQ ID NO: 5803 - DNA, 236 bp, Homo sapiens
  chr2:74781700-74781936
  binary
cggctaatccgggggtctccaccattccttctcgctcctctccctcaccccaccgcgacccccccagcggctgccggcgggggccggggaggggcggaaactcctccagggaacccggccccgcctcccgccccgcctcccgccgcagggccaggaagcgcggaaggaaccgccgggggccatggacggagcagtgatggaagggccgctttttttgcagagtcagcgctttggga

SEQ ID NO: 5804 - DNA, 222 bp, Homo sapiens
  chr20:21686742-21686964
  binary
tcctggagaagctgcattctcctctgatccccagccttcagggggcagttgagcaagtctgggaagggagtgttccaagtagacgcgctaaaagtcgcgaaagggcacggagggctacaatgcgccgcgctccactccgcggctcctctgcgcccttgcccactccaagccagacccaggcggtttgcccttggactccgagctgtctggggacccacaggt

SEQ ID NO: 5805 - DNA, 143 bp, Homo sapiens
  chr20:2820861-2821004
  binary
cccggggctccgcggtgttcacccgcgacccgggtatgcctgcgcaccgcgcgcctggcccgcagcgggctcctagccaagcctcatgttcccgcgccccagtcggccagtcggttctgcaaagctcccgccccgcagagacc

SEQ ID NO: 5806 - DNA, 233 bp, Homo sapiens
  chr20:57978841-57979074
  binary
gctgcacccccactctggcgcagcgaagtctgcagatctctgggccccggcgctgccgaagcctcccccacgcgccgcgctcactcgctgcacaacagcgccaccacgaggccgcgggcggaactgccggcagcacagcggtcgcaccccccgggccccccgccggctgtgcggatcccgaatccctgcttggctcggagctgccaggtctaagccgaccctcagagacgcac

SEQ ID NO: 5807 - DNA, 115 bp, Homo sapiens
  chr20:58514400-58514515
  binary
acacgcgcaccgtaccgctgatgccaaggtccgagcaagtgacacgctccaggcacacgagctgccgctgcaggcgctcgccaaagtcggcggcctcgacgggcggcgggaaatc

SEQ ID NO: 5808 - DNA, 109 bp, Homo sapiens
  chr20:58515463-58515572
  binary
cggagctgcgcgcctccgcctccagctcccctgccgcagcgcgccgcagccgggcgtccccgcgcgggcgccggagaggaaggaaggctggcagcctcgtcacgtgtcc

SEQ ID NO: 5809 - DNA, 55 bp, Homo sapiens
  chr21:47062898-47062953
  binary
tccccgcccaccgcggatccgccccgtccaccaaggtctcgctcaccaacggccc

SEQ ID NO: 5810 - DNA, 143 bp, Homo sapiens
  chr21:47063290-47063433
  binary
cgcccactactagtgaccggcccgcccgttcgaggccccgcctcctccccgcccaatgctcggccccgccccgcgcgtcattgggccaggtccccgccccgcccccagccccacccccgcccctttgactggagttggctttt

SEQ ID NO: 5811 - DNA, 137 bp, Homo sapiens
  chr22:22862472-22862609
  binary
cgacagcgacgcagtaaatgagacaagacgctgcggtaggggagagagacccatacattcaaatgccttaaggggtctgggcctacaggtctccagaactggggagggcctggggttacaaagcagttttcagattt

SEQ ID NO: 5812 - DNA, 61 bp, Homo sapiens
  chr22:25678186-25678247
  binary
cgaggttgggggcccggcccgctgggcgctgttcacaggtagcttggaccagagcaggggc

SEQ ID NO: 5813 - DNA, 58 bp, Homo sapiens
  chr22:47023191-47023249
  binary
gggcgttgtctggaagccgctggtgcctggcttgtcttctattcaagccaaggtgcac

SEQ ID NO: 5814 - DNA, 59 bp, Homo sapiens
  chr22:50170525-50170584
  binary
cggtgtgtgatgaacccttccccgggaggttggccagggtggggctccacacagggcac

SEQ ID NO: 5815 - DNA, 154 bp, Homo sapiens
  chr3:123168102-123168256
  binary
tcgcggcgagagtggatgcgtggccccggcgaaagccgagccgagccttcggcgcgtccgcgcagggggcggggtccgggtcagggaccggctcctgcggtgcggcccttcccctctcgcctctccctttcccgcaaacggagcggggccggcc

SEQ ID NO: 5816 - DNA, 283 bp, Homo sapiens
  chr3:170626174-170626457
  binary
ctgagccccggcgggtcccgcgctcgcctctgttcccccatccattctccttctttctctcggtcagcgctcagttctgggcgccttccccggccctgcctcactctggccccatccccaccagcttttccccaccagcttttccccaggtcttcacctttcagctggcaaagagcgcctttcgtctgcgcacccgcgctggtcccctacagcagcggcgccggcagcggcggtggcggccgcggcagttccaagagacggggcggggccgccacactttcca

SEQ ID NO: 5817 - DNA, 508 bp, Homo sapiens
  chr3:170626710-170627218
  binary
aggtttgttgcgttcgggtcgcagtcgactttaatgggaaccaagcaaagcacccaatggcccctgccatcaggtgcgtggcagttatcacatgacgatcgtcagaactcgcgaggcgcgcagattcagcgagtgccagtgtggctggctgtgaagcgaactttgggttcgagcttctggttcagcttgcagcctttcttggggttcgaacctcctcctggtccttaaagaagaattcaggtgcagtattttattacccagctcggcaccgcaggtcctgaggaccccccattcaccccttggtgagatttttggcagcgactgccgccggatgcccctgtagagtcagcactgctccctggggtgggaactcccgaagcgtccgccagctaacaagccagcagtgaaatgaattaacccacttctcacaccaaaggctgttgggaagttgtggaggcgaagggtgtctgactcctacggcattgtgggtccagagaggtgttctgcc

SEQ ID NO: 5818 - DNA, 207 bp, Homo sapiens
  chr3:180397104-180397311
  binary
cgttcgccaccgggatggcgaacccatcctcccagtgcagctcagccaggaattcgctactcatgactgcaaacggatagagaagatacagagcaaagatccgccttcttgtacagcgggtgagcagcacccgcgtcaagcccaggcacctgcacagtgccgcggcaattgccgggggagccctagcaaccttcccgcgtccttagt

SEQ ID NO: 5819 - DNA, 809 bp, Homo sapiens
  chr3:183165024-183165833
  binary
cgacagtctcccgccccgtttcttcacctcagttctctaaagattgaaggtcaagaggagggtttcttgccctggagcctgcgatagggtgggcccttgcggttcttgggcggaaacggcgatagggacacccagggcctaaggaggctggggacagagcagatcctcccagcccccaacatcaccccggagtagatgcagacccccagggtcccggaggccgagaccacaccccgcgggcacgagcccgattggcagattgtagccgagtggtttcaacggtgacgccccccacccgaatgcctcgctgggattggctcatttcttggttcagacctggacggtggccagaggaggacaagaggcttttacaccgaacggaggtgatgtggacgacaacggagacgcagccgcacttcaccaagcggccggtccgaggggacatggcggcaacctctgcagcgtcagtgctgctggcgggtgcaagaaactggtggcgacactgcctgagcccgctgctgttgccaaggtgacgaggcataaagccgcggtggatcggtgcgtgggggcgcggggtgggtggtgaagggagaacgaagctcgagcggaaagacaggaccgcgaccgcttgtcaggggattcggcttccagtcccccttccagagggcgtccttctgcagccaggcctctgtcttcccccgcccccacacggtacgagctacagaatgcttttctgttttctctttttctatagtaaggaagcgctttcctttctcccccgtttattcatttgcttacttctggttccc

SEQ ID NO: 5820 - DNA, 291 bp, Homo sapiens
  chr3:186079331-186079622
  binary
aaaagcatctcctgcttctcggactgcctggagcgcgaactggatatcaaggagccaaggttaagtccagaagaagaaggaaatccgaccagttgctttagcaaactgcctggagcaaggccgcctcccacccgcacagctttgaggcttgagggggcctctcagtcgcagagagagccgagccccaccctgtgcgttccccaagcctgcacccctcgagcggggcatcccttcctgcagggctttgtggcaggtggaactgtcggggtgggcgccgtggctttggctgca

SEQ ID NO: 5821 - DNA, 559 bp, Homo sapiens
  chr3:32433054-32433613
  binary
cgcagccgcacccacacaaaatcccaggaggctcagtaccagctgtggtccgggccttgcccacctcggagaggccacgacccaaggcatccggtttcctctcgctccagtctaacttccgcgcatctacgagggccgggactgccgctacctttctggaaggcgccggccggccagtcaccggagggatcccgccagaggcggctccgcgtctccagcagcggggcagggacccgggcgccccgccctcgccagcgcccgcccccgcccgcccccggcccgccctctgtatctggcccctgggcagctgcccggggaggcggccagcgagctggggccgcgcaatgtcgcacggagccgggctcgtccgcaccacgtgcagcagcggcagcgcgctcggacccggggccggcgcggcccagcccagcgcgagccccttggaggggctgctggacctcagctacccccgcacccacgcggccctgctgaaagtggcgcaaatggtaagtgagcgcggggcgcgaggccgaggttctacagggcgtcccgggaaagcagg

SEQ ID NO: 5822 - DNA, 201 bp, Homo sapiens
  chr3:32433665-32433866
  binary
atcgcgcagcgggcggggcaccgcgtcgctaaagttcgcggcaggcttcctccgggaaagttgctgccgcagcccccgcgctggagctcagtccccagagccgccccggcccttgctcccgcggacccaggtcgccagggtcgcaagtttctccggccacccccctgcgaagcctgacccgcctactgactgaaaccacgg

SEQ ID NO: 5823 - DNA, 81 bp, Homo sapiens
  chr3:32434068-32434149
  binary
gagggtcttgtgttccatagtggggaaaaagaactgggaccgttgagacggccgtcctggtcccctgcgccctcaagttcc

SEQ ID NO: 5824 - DNA, 234 bp, Homo sapiens
  chr3:49906737-49906971
  binary
cgcggcagccccgcccagccccctccgggttgtcgcccataaagaactctccgttgtcatggaaattagtgactgctaagcgggagggaaggggcccggggacagttgggaggggctggaggcggctctgggaacggggagggacggctcagctctcggcccctatcctcacgggggaccacgaatcttcgagggttaatcttttcacaattccgagccgcagaagcttccccc

SEQ ID NO: 5825 - DNA, 49 bp, Homo sapiens
  chr3:49907379-49907428
  binary
gggcgggctgggggcggggcctcccaaccggccccgccccgaccctggc

SEQ ID NO: 5826 - DNA, 40 bp, Homo sapiens
  chr4:156298073-156298113
  binary
gctcttcggcccaacgtgtcgctggggcaaccacccagac

SEQ ID NO: 5827 - DNA, 251 bp, Homo sapiens
  chr4:85503985-85504236
  binary
cgtcacctcacggggaggcggggctgtgggaaccgcagtgcagcgcagaggggcggggcctgcggcgcgagacctggtgcgggaggcccgggcagggagaagtgtgcggggccgggacaagccggctccgagtccggctccggggggcggggcgggaggggcctgcgcggcggcgggagcccagagccgcgctaaagcgggtcaagcgtcctccttttctccccgccccttctcctcctcctacctgggcc

SEQ ID NO: 5828 - DNA, 38 bp, Homo sapiens
  chr5:124084158-124084196
  binary
cgcacattcccctgcatgaagtccccgctaagtgctat

SEQ ID NO: 5829 - DNA, 60 bp, Homo sapiens
  chr5:124084302-124084362
  binary
attataatctcttcaacaaatttattattaaagaagatggaccatcaaatgtcacagacc

SEQ ID NO: 5830 - DNA, 112 bp, Homo sapiens
  chr5:124084660-124084772
  binary
cgtataaaacacacactgagagcgggtgggggtgctgtggggggtggttgtggagacaaagcgttttattttccaaccagattggggttgaggaacctcccgcagtaagaag

SEQ ID NO: 5831 - DNA, 64 bp, Homo sapiens
  chr5:124084977-124085041
  binary
ggctggctgtgtggaactgactgcgagcattttgccggcttcccttccttgttccaaggacttc

SEQ ID NO: 5832 - DNA, 717 bp, Homo sapiens
  chr5:14142816-14143533
  binary
cagcagccgaaagtcccctgggagatggggatacaccgagaggaatcccattttacaggagagctttgtacccttaggagtaccgtggcctccgggactggagcagataacctgttttcgggccctctatgttcactcaacaactattaagaagccccctccccgagccagggccagcgctgagcccactagggaggcacccgccccggcccgcgtcaccccgccttgcgggctagacgacgaaacgcctcggcgctcaggggaccgcgcaccggtgcaggagccagcgccccggttgggggcgcaatgccgggcctgggaaggtccgccccggctggtcagagctttcctgcgccttccaaggcttggagctgccccggggaagcagaccgaaccaaaccgaacgttcctgcagcctccccgccagccctgcgggagcccatccgcccaacgcggccccgcccctcccccaggctccgcccaccgccgagcccaggctcggcccttgacgaagttcgccggaaattaccgaagcccctcttttttttccttcctctccgttccctgttctcccttttcctttcacccgggttccctcggccgtgatttccccctcccccctccttccttccccattgaaatcaagatggaggctcgcggcagccgccggcgcccgtgatcccggaggtctcgccggccacgggcccccgccctcgc

SEQ ID NO: 5833 - DNA, 195 bp, Homo sapiens
  chr5:176558657-176558852
  binary
cgccaaaaatggcctttctcccaggtgggctcaaagttaacagaaggcagtgagtaaacagtccactggggcaataactatgcacatttactaagccatgggaagaatagtagtcacgtggccctcgagggcggtgccctcagcttgagatggagttaactccaaatctaatcacagaaggctttctggaggagg

SEQ ID NO: 5834 - DNA, 374 bp, Homo sapiens
  chr5:75379694-75380068
  binary
gtgtggtttgaccggcagggataggcagattcaaatctagcagcctagagccccgggctgggtacctggacctataccttcatagctgccttaggctcaacttttcggcggggatccctctgcagacgtgcaggtggcgggagagcagaggtagccgcagtaagtgctgagagagcctgaaagaaacaccatgaattttcaaactctcccacatacattcccgaagcgcctgtctggcgtctaagagagagcaagagagggctggagagcaggggagcccgcggggctgaggctctttgtcagcgcctgcacttcctacgttacaacgccttcattcagcaaaaaccttttgggcgcctgctgtgcgccaggcc

SEQ ID NO: 5835 - DNA, 53 bp, Homo sapiens
  chr5:75698192-75698245
  binary
cgtgagccgccgcgcccggctctaaataatttcttatcgccctccctcagttt

SEQ ID NO: 5836 - DNA, 1186 bp, Homo sapiens
  chr5:75698274-75699460
  binary
ttccacaattgtcaaataggtgagggcacaggtacggaagcgtcccgcattccctccagattttatcacgctgagacacaaagagaaaaatagctcctggcgaccgcatgaaaaccccgatttcaaaacagccacatgcagtttaatttccttaaaagcttagccggaaaaggtttctgtggcttgcgaccccagctgggcttgagagaaggctctgcacactggggcgggggcgggcacaaggtgatcggagggagggggatgactcgcagttgtgttttgagtggttgccttgggttatcttgttcctccagcacacacacactcagtttcttgtcataaggggaaccctgttattttgtagacaaaaagtgacagaagcaactttcgaagcaaaaaaaaaaaaaaaacaaaaaaaaacaaaaccaaaaagacgaagaagaagaacaaaagtcaacgtgaaatctccccagaggaaaaggaaccgcgctgtttgtccctcagtaactgagcaacaccccggacacgaagggctccctgtgacttctgcggtttttcttgcacttctccgcgttggttcacttccaccctcgaaactctccagaagcgagaaataaggcggggtggccgccacccccaggccaccagctgtgcgggggccccagctgcagggggtcccggcccagcgtccctctcggccccttccctctcccccgggggagaaggggcgggtccacgcggcctgggcgctgcgcccgacacgcggtaggggtcgctgcgtctcggcgcgcgctcccaccgcggtgaataacggggcctggctggaggagaaaggaaacctgctgcgggaggcggcggcgaccggccagggagcgagggaggagagttcacttttacttcagtgtcagcgcgcggcggccgtggctggctctggcgagagagcaccgagggagtgggtcgcagatcttcgggcggctaggggaaatcggcgagaggcgggatccgagcgcgccggcggggcgcagagcccgcgagcctggccagcgagggtagccgcggggggcgcgccccgggcgggcccccggagacgcgcaggatgccacacgaagagctgccgtcgctgcagagaccccgctatggctgtaagtgcgccgggcgcgcggggttcctgctggccttggggagc

SEQ ID NO: 5837 - DNA, 735 bp, Homo sapiens
  chr5:87436769-87437504
  binary
gccttgatatacaagacaaatgcacactttactctgggcttaaaaaaccatctatcatcatcctttgggcatgacaaatacattgtgtgtttcagagaaattaatctggtatttagggggagaaaggcatttccaaccagtctccgtgcagaaccttcccgcaaaccctgtagcggcatttttcgacacttttctcctcctttcggcaagcctcaaacttgaccttcgagaggattttaagggtagagccttcctccctttccctcgtctgctccaagagctcacgtaggccttcttctgggaaacagcggctcaggaccagagctcggagaactgcgcgtccaggagcgcgggcgcggccggggaaaagggaggaggcggcaggagggggcaggaggtggagggaggaggaggatcggtctgaatatgcatgaggcacccagcactgccctcttccccggcagctgctcgggcgggggcgaaggagggaaggggaggggaggggaggaaatgaggctggggcggggtggccagagcagccgcagaggctgacgcgggtttggagaacggaagagatgatttgcatggcgcctggtgattggctgatggccgggggctgggtctgagaggcggcccctgaatggtttaacggaggaaattacaagattcattcgactaaagaaagccggggcgggcctggtcggcgcaatatgcagcctgtccgcaagggggcgc

SEQ ID NO: 5838 - DNA, 440 bp, Homo sapiens
  chr6:127836226-127836666
  binary
ctcgcttccagcccttccgacacacaccgtacacaccccattccaattccaaattctcagctttaattgccctctctctccacgagacaggagtgacaaggagctgagtacagaagaggaaactgggggaaaaaggcccactttaggccctctctcgttctcttactctacctctctccaggaagaagtgtgacaaaccattataattagagaaacggaggcccagatttgaatttaaatgaaaacctcgcgttactgagagcagattcaaattccggcaaggcctaggaaaccccctccctcctttcttgttctcctccctcttcaaggctccctaacaggttagcagcctctgatccctgccggtacacgccctaatcctcccaggcccactcttcccatcccccagccgggtccccccaccctcctcaccttgagag

SEQ ID NO: 5839 - DNA, 31 bp, Homo sapiens
  chr6:127837749-127837780
  binary
gctgactcatggctatgaacctaccagatgc

SEQ ID NO: 5840 - DNA, 41 bp, Homo sapiens
  chr6:159591277-159591318
  binary
tcggctccaggcggcaggaggcccgcgcgcccggggggaac

SEQ ID NO: 5841 - DNA, 55 bp, Homo sapiens
  chr6:393764-393819
  binary
cgcgcctgtgccggcggctgttttcgtctctcaccgcgtctctgtttctcttttc

SEQ ID NO: 5842 - DNA, 373 bp, Homo sapiens
  chr6:46097250-46097623
  binary
cggtaaaggtgctcgcttatccagtaagacggacagacgtctatggtagatccacgtttcatttatcccaactcactggaactggctgaagcttctccagacttgtgccggaccttggtgcagccaaagttgctttctccgcggccacctaagctgccaggtgcacattaactaagtggcagaaggccatcggcttggcaattgcctgaggcctttccgggactcgctggtttttaggttccatgaagggcatccagatctaggatgatacgaaaagtgcgtggtgggagagtggaatcaacctctactcttaggtccgatacaacccctccaagcacctgtctaaccaatcggaaagaaagttacattcaac

SEQ ID NO: 5843 - DNA, 521 bp, Homo sapiens
  chr6:46097694-46098215
  binary
cgccttagacgctcgcctggcagctgcgcacactcggagcgccccgagcggcgcagatagggacgttggggctgtgccccgcggcgcggcgcctgccactgcgcaggcgcctcaggaagagctcggcatcgcccctcttcctccaggtcccccttccccgcaacttcccacgagtgccaggtgccgcgagcgccgagttccgcgcattggaaagaagcgaccgcggcggctggtgagtacgcgcctcgcgcgctcggcgttctggggggcaatgtcaccccctctccagtcccctaggggctttgaaaatagagatggtgagaccagaccctatgacccactctcccccactacacgcacatcccctggggcgcggcggggacgtccacgaagggactcaaagagccagggaggtggcgggccgaggcggaggccaggaagggaagaggaaagaaaaattagcaggtgctggggaaggcaacctgtggtgttaagtgtgaagggagggaagtcagccgaac

SEQ ID NO: 5844 - DNA, 465 bp, Homo sapiens
  chr6:4948996-4949461
  binary
cgaagagcctgcatttcactcggcgtgaattctacactttctgagcagagtatctgacgaagcctctctacagaaagtgaataaacgttgttcagatgacttcgacaactcttgttgaaagtgactatgcagatgatgtaaatgatgtcgttcctttcatgagcctttggtgtacttgagctttcagcagcctgaggcaagactggacaagtgtggttttccccactttgcatgtgcagagctctgccaggaggataagctaaaggaatcacattatcaagataaaaagaatatgcaaatagtgcaggctgtgtggcctctcctttcttacagcaggccctccgctgtaggcgagggctacgtaaatcagccaaggagtctcttccagtttagccttcctggtgcccagtagacattcatggagtgcatggaggatggcacggtctgacgcccacaggctcccac

SEQ ID NO: 5845 - DNA, 80 bp, Homo sapiens
  chr6:6009552-6009632
  binary
ggacgtggctgcgcctcaccgccctaccccgggagggaacccccgctgactttttcctctcttcattttcctccccaggc

SEQ ID NO: 5846 - DNA, 295 bp, Homo sapiens
  chr6:69344649-69344944
  binary
ttcacttcccacccttcagagtcgccttcccatcctccgcacccccctgcctcgcctcccagtgagtttctcttacagttggtcgccgccagccccagcggtgggaactgaggatgcaaaaacctcccagacgcagaaaataccgctttcgggacgtgcttgggtttgagtagccgtgacgtgcaggcgaaccgcggccctggctggagctccgtggagcccccctcccgccagcctctcccccgccctcccgccgggactccctcctctcccaccccgcggctcccttcgcctt

SEQ ID NO: 5847 - DNA, 84 bp, Homo sapiens
  chr7:3083602-3083686
  binary
agataaggaagagagggagggggcggagtcggtgcttcgggaggagggcggcaaggaggtgggggtgggagtggggacagggcc

SEQ ID NO: 5848 - DNA, 168 bp, Homo sapiens
  chr7:37960958-37961126
  binary
ggggatagcatggtccgggactgggaggggcgctgcgcccaccgagggcggcctgctggcgggggactcagtaacacccagcgaggcggtggcaggtaaagaagggacccatccagggcgggatcaagctgcagagtgccccatgcccaggttcgcccctgttctcac

SEQ ID NO: 5849 - DNA, 195 bp, Homo sapiens
  chr7:79082826-79083021
  binary
cggctgggcagaggtaggagagcttggatgaggttgtgctgtcccttgaatgacactcaaggctgtggccccgcagcagaggaagcagtggtggtggcgtcggcggcggcggcggcggcagccggagcgagcagtagccgagctggtgagcgggtgtggtgggggtggggaaggagggtagggatgccgggggcc

SEQ ID NO: 5850 - DNA, 252 bp, Homo sapiens
  chr8:11550368-11550620
  binary
agcgccgccgagtttgcgccgcccgccgccccgcgctcgcctccagccgcctggggttccgcggcggccgtcagcgcgcacctcatcaataaggcctgccaggcgccggccccgcggccatccatcacccgggctgcacccccggccgcgcaccgaggcttctgccagcgcctgcggggcctctgcgtggagtgggccggcagcgtttttctacccggcaacaaatacatggctttattccacttcttaatc

SEQ ID NO: 5851 - DNA, 231 bp, Homo sapiens
  chr8:33372206-33372437
  binary
tcccgaggagctgcttccatttaggaccttgtgactctcatagcttccacggtttcgcaggagcccgaggaggcaaacttcatttgtgccactgcacaggcgggagcttcggaccctgggaggggtggcgcgagagagacgtgtcgccagctgctcggagagggactcttattcagcctctaaggcgtcaattgcgcctccagggttccaggagtccagagaaagcccttc

SEQ ID NO: 5852 - DNA, 117 bp, Homo sapiens
  chr8:56014011-56014128
  binary
cggacccgcccgccctcagctgccggcgcggcaccaggctccgcgctccgagccccgtacgcctttctctcccctgcactctctggcaaggccgggcacgcccactgccgctgctgg

SEQ ID NO: 5853 - DNA, 239 bp, Homo sapiens
  chr8:60030908-60031147
  binary
aaagagttgtggggcagttttccctgtggggggcaggggcgcctcccaggtccctgcaccccgactcccggctgctcccctggcaactaatccggagaagggaagtggtgccacgagcccccactgcccggggagggagggagagagaagggggaactgggaaataaactgaattctcttactctgcctccgttcctggaccccagacacacccccaaagtattccacggttttctctt

SEQ ID NO: 5854 - DNA, 350 bp, Homo sapiens
  chr8:60031791-60032141
  binary
ctccaccgccgcctcttggtcccgccgccgccgctgccgccgccgccgggcaggtaacttcatgcgctcattgtcccccccgcccgcccccccatccccgcctcccgcgcccctcgcagcccggcacacgcgctcgggctctaggtactgggcgttttattggagattctgagttgttctgcttgtagtttattttctccaccttggaggcccgggatgtggggggtgggggggtggggcggggatccagaagggacagggcgggaggggggcgagcgtcccgggccgggcggggtagggagcgcggccggacgcgggctcgtcaaggcccaatggctgctgttcggaac

SEQ ID NO: 5855 - DNA, 293 bp, Homo sapiens
  chr8:61193765-61194058
  binary
cggggctggagccggagcggagcgcgcgtgggggagtgtgagcacgcgtgagcggcagtgtgagtgcgagagcgcctccgggtgtgaaccgcagtgtgagtgcaagcaggcgtgcgttcggaccgagtgttccagagacccgcgtgggaagcgcgtccggaggccccagcagagcgagggagcggctgtggcctggggagcgagcgcctggcgaattttatacccgaccggggcgtgtctggtacgcgaggatccgcccccttctctctctggccgttggggccaggggagcc

SEQ ID NO: 5856 - DNA, 55 bp, Homo sapiens
  chr8:72756949-72757004
  binary
caggtaatcttagcagtggcaaagattaccagacacttagaaacgacgggattcc

SEQ ID NO: 5857 - DNA, 195 bp, Homo sapiens
  chr8:77589904-77590099
  binary
cgccgaagaaaaagtctagaagtggaaattaccttttgtctcaatgttaattactccttgcctccaacactcaacacctaaccacctggtagtcctttttggttctcccctaactcggtgctcaatgtcagggtccgagtgctctgcagtggatgtggctgggctggggttgccctgtaaagtgttgaagaggat

SEQ ID NO: 5858 - DNA, 156 bp, Homo sapiens
  chr9:93955774-93955930
  binary
cggcacggggctcgggcactcggggacacacggtggtcgtcgctgtgtctcagcaggaccctgtgcgctggagagcttggggccgcgagtcgcgcagcaaggaggcttctggcttctctatttttagcctctgaacgttttccaaaataattacca

SEQ ID NO: 5859 - DNA, 268 bp, Homo sapiens
  chr9:93956177-93956445
  binary
gacccgcaggaatgcgaggggcaagacagatcgccggaggagcaggggtcagaagtcagtgtttaaccactcactggctttcggtgaagccagaatgttagcagcgagtcgcggtcgggggccttggggttgcacacgcttgctccaagcaccgaggctcagctgagcacatgcacaaccctctcgatgcagcggaaagtcgtgtggcttagggccgcaccccgaatttcgccgcacccgccgctgtgccatttacaaccccccaccc

SEQ ID NO: 5860 - DNA, 225 bp, Homo sapiens
  chrX:16730628-16730853
  binary
cctcctcgcccaccttcccctctcctccctgctgctggcccagctcactcacgctggtgagcttggggtttgcacccgggtttgtgcaatggtccaaaacaagcgcctaaaaagtgattcctccagcacaggcagctcccgtcaccctccgctctggacgcactgggccccaggcctcgcccagcccggggaccgctcctccctcccgtggctcactttgcaaag

SEQ ID NO: 5861 - DNA, 35 bp, Homo sapiens
  chrX:16730902-16730937
  binary
tcctggcaagccgagaccctcgctcgggtcctccc

SEQ ID NO: 5862 - DNA, 264 bp, Homo sapiens
  chrX:41112874-41113138
  binary
cggcgctctctctgccccggttctatcacgcgcatccgttaggaactaagcggcacctgcgcgaggctaggcttgttgacatatttcttgctggcggcgtcctctcgcgtggagcacgactgcgcaaagcgccgacagtcccccgagcgaggacggcagcgagactccgaagcccccttagcaaccaagccggtgccgctgcccttgcgccgggactgcagccgggtcttccgaagtgaggatatgctgccctctagaggccgc

SEQ ID NO: 5863 - DNA, 80 bp, Homo sapiens
  chrX:9433633-9433713
  binary
cgccaactgtccccgcggcgctcggactggggtgcggcgcgctcccaggagcctgaacaataccccgaggtggccgctcc

SEQ ID NO: 5864 - DNA, 60 bp, Homo sapiens
  AC241851.2_88-34049:15074-15134
  hyper
cggcgccgcggctttttgcggctttttgccgccgcgggtttttcctgccgcggcttcttg

SEQ ID NO: 5865 - DNA, 43 bp, Homo sapiens
  AC241851.2_88-34049:15553-15596
  hyper
gctttttgcccccgccaccgcggcttcttacccccgccaccgc

SEQ ID NO: 5866 - DNA, 244 bp, Homo sapiens
  chr1:103574168-103574412
  hyper
ggctgagggtcagacccaatcacacgactctggggcggccccaagcccgcccccgcctccctcagcccaagaatgaggactccgagcaggcccagcccaccaaccaccccccatctccccactcctctcctccctcctcgcctaccaaatccccgagaaaaaatgggagggagttacgggggacgcgtgcttggctccagcactttgggaatgaaaggaattgcaggagagccccggagcacac

SEQ ID NO: 5867 - DNA, 306 bp, Homo sapiens
  chr1:108506290-108506596
  hyper
cgtcatagaggattagtgctgaaatgtgtcagggagagggctctgtcctctcccttttaagttgaaagcagtttggttttttgttttgttttaacattctgaaagagaaagaggctctgaaccgagtttaacatccttctgtacaaaaattttccgacaggacaaataaactactcttccactgaactgtgacttttgagctgactctagggtgcacccaaccttccagaggtgtctggcttaaccctcaaagaggcagctccagccccaggagccgaccggcaccacagcacctgagcagggcac

SEQ ID NO: 5868 - DNA, 360 bp, Homo sapiens
  chr1:111506646-111507006
  hyper
cttggtggcaccacccccaacagagcctggtcagtgctgaagactgcgtcagtctggctctgccgccccgcccactgaagccgatagctggagcaaagctcggtcgggcgtcttccggggtcgtcacgtccggttgccaaggtgactggctcgctaaagcccaacccttatgatgcaatccaatggcaagtgatatttgctatcttttcttccggatcaaggaacaaatcgcaaaagaaagctctcccgacacctacgcaaaataaaatgtttccggggtcaatcataaattttctgcttctgtgctcgccgctagcgtacgtttttctctcccgtcagtgcattaaaagacatcggcgc

SEQ ID NO: 5869 - DNA, 65 bp, Homo sapiens
  chr1:161368929-161368994
  hyper
cggcaatcagcgcaaagcgagataatcaccagcgcactcttggatctgtatacaggtttgtaaac

SEQ ID NO: 5870 - DNA, 95 bp, Homo sapiens
  chr1:161369405-161369500
  hyper
gggatctcactgcgatctgggcgaattcttacgtagaattcgaaaggatatggggaaggaaaaaaacaaaaacgggaaccactttgtttccgccc

SEQ ID NO: 5871 - DNA, 139 bp, Homo sapiens
  chr1:165414053-165414192
  hyper
cgcagtgaagcccaagggagatacttacctccatagcctgcgggaaacttcatgaagtgagaataatttccatacatgtttactcgtcagttcatgttcctctcctgtgcagcttctaaatattaccgcctctctcggc

SEQ ID NO: 5872 - DNA, 201 bp, Homo sapiens
  chr1:20512799-20513000
  hyper
gagcctggagaaaagtctgctcccgaggcaaagcaagcctggccagagctcacctttaccaaaatagggtgactcccgggctctgcagaaaccgagggacctatgcaaccgctgggccatgccctccaggctgggatgtagcgacggggacacagacccagggagagaaaaggatgtcccagtctccggcagggcagagac

SEQ ID NO: 5873 - DNA, 155 bp, Homo sapiens
  chr1:214161233-214161388
  hyper
cgtcagatagactgtgacgtgcagtcttcctgtttccttcagctgtgtcttaaagtaaatcttgttgtggagcggagccctcagctgagggagcgctctgaaataatacaccattgcagccggggaaagcagagcggcgcaaaagagctctcgcc

SEQ ID NO: 5874 - DNA, 70 bp, Homo sapiens
  chr1:214387777-214387847
  hyper
tcagtgctgaccaagtcaccctggcctcctccccggcccctttttctactgcaggaaaggctggagcttc

SEQ ID NO: 5875 - DNA, 84 bp, Homo sapiens
  chr1:221051890-221051974
  hyper
cgaaccccacgtgatccggagatgtggtggaggggtgaggctaacatttcctacaacctcctgcaaaggatggaagcgcgtgcc

SEQ ID NO: 5876 - DNA, 38 bp, Homo sapiens
  chr1:223936543-223936581
  hyper
cggcgttcaagcatttgaacggggtaggaaaggttctc

SEQ ID NO: 5877 - DNA, 162 bp, Homo sapiens
  chr1:234812061-234812223
  hyper
cggggagagggtagagtggtgactggtgggaataaaggattctggatgggaagccccggaggaagccactgaccgcagtgcatgctgggggttgtagttctcgtgtactccacgggtaaacaagtcagagaagcaggcagaggaaccaactcagtaaaaccc

SEQ ID NO: 5878 - DNA, 421 bp, Homo sapiens
  chr1:241519651-241520072
  hyper
cgggtctcccacacagagccggagtatatgcttcgcctactttcacctgcctgcgctgccagccaccggctgctctcctttctccccacttcgcttcggaagtccggaggtaatcctgcctaatttttgcaagaagacaccagaatatgtcccggcaacaagaactagtgggaggtcaagccttcaggccattttacccgggtcaccgtgggtaaaagcctaactgcagaagcctccagagcaaccagccaaagaggagaaaacaggcaagcccctgctccccttgctcgctctcacggcagcagcaaatggcaggcgagcctgtgccccgcgccgcggcggccgccggagccgggcagcagtttcagcaccgtggaccgcggggtgcgcgcggcgcccgtagcccagccccggcgcgggg

SEQ ID NO: 5879 - DNA, 819 bp, Homo sapiens
  chr1:247267064-247267883
  hyper
cgccgtttgctcaaacacacggtttaacgttttaacaaagcctcggcttaattttaggggaagaaaggtgggactggaagccccatgaaccacagctcctcccatgctggaaccccgcacaccgagacaccgagtcggggctctcccgcatcaccctcccgtggtcaccacactacctggataggggaggcgaggggttcccgacagggctccggccggcggaagtggcgcccgcaggtacagacaggatgcaggggttccgctgcccgccccgcccggcccggccctgaacagaagaggactgagccccggctacgccacggcgactcggtccgcaggttccggagccgatggcgtggaggcccgagtcgcgccacagcaggtttcaaccagccctcttctccacttcgggaagccaggcgcagtccactcaccattcctcggcttcccgggtgtcctggcgtcagctagggatgtcccaatactcgcaggtcacagggtggcagaggctgctgcagagccacctgggcctcccagagccaagaactagcagcggagactaacaggaagagccggctccggcgaaggagagacaaagcaaccgccaggcagatcccggaagccgccctctcctttccggcggcgcgcctgattgaacggtccccaccccagcgcccctgattggatggggcttcaggccccgcccctcaggccctgagtgacaggagattgcgatctcacgtgaggctggatgaggtcagaatgaccgcttttggcctagcggtttgtaggcggtgcgtccttcctgcgctgggatcc

SEQ ID NO: 5880 - DNA, 262 bp, Homo sapiens
  chr1:32180427-32180689
  hyper
gccggctctgggcctgagcgcagactgaagggaaggggggcctcgtggggggcgcaggcgcctgaccagctcctccagctcggggctcaagccccaggccctccagctgtctacttggaaaagggtggaagcacatggagggtgggtgtcagggtgtgcggcgcaggcccagagaatgcgccccccttccccacaaggcctggcagttccagagaactgggcgcggcctcccaaataacgacctctgttaagtgggaccagg

SEQ ID NO: 5881 - DNA, 913 bp, Homo sapiens
  chr1:43389625-43390538
  hyper
cggtacagcgtggagagcgctttgatggaggaaatacaagccgatgtagtgttcccgggaaaacctgatccagaaggcttccagggagaggagattttgcgcctaagatttcaaatgaaagatctcataacactgtcagtgaaacaactaagcactgctgggaaaagatggtggcctggagaacagtcccgttatctatttaccccttttcgtcagaaaccgtagacgtcaccttacgcgggataggaacccgggtgagctacgtccccagggatgcccagcgatacacaagtcaccgtcaccccctccagagtaaaccgcatcgcctggcaagcaggcgcccaggtcgtccccaagggccagcgcctggaaccgccagggtgtgattggtggagtcttggagcccgcccctcgtcgggcccaacaatgcgcctctgattggtggagaaaccacctggccccgcccatccccaatcgtgtccgtgcgccgccggtggcccggcttaggggaccgctgtgaggtctggagaggatgcgccatcgaccccggcagtaggcggccgaaccttggccccaaatcttctaccccggggtggattgcggcccctagaggaaaggcgtcaggggaccgaccggcagctgtgccgtcgcggcactctggaccacgctgagggcgggccggcttccctgcgcctgcgctgacattttgcagtttgggaaatggcggtgctcggggacgtcgatactgacccagggcgggaggcagctgcgagtggattgtcgggccttttcagaccggggtctgaacctctgggccggggcggggctcgggtgctgcctggctctgccaacgttctgggccctcgagtgtgaatgagctccgcccgccatccgccttgtagtcctcgcgtcc

SEQ ID NO: 5882 - DNA, 114 bp, Homo sapiens
  chr1:50893877-50893991
  hyper
tgcttggcacgcagtccttgggggaagatgcgatgttccacatttcagacacgaggtagccaaagttcaacaaggcgacataacttgcctggggccagagtgctgccgaacttc

SEQ ID NO: 5883 - DNA, 137 bp, Homo sapiens
  chr1:53168691-53168828
  hyper
cgttggtaaaggagccgccccgtgagagagaccggaccaatcacgtttgctgtgaggtcactttggaggcctgagattggtgctcgtgtctaaacggacccgatctttctgagtggctggtgcagctgagggaggtt

SEQ ID NO: 5884 - DNA, 260 bp, Homo sapiens
  chr1:63793072-63793332
  hyper
tcaacactactgatatccactttttattccacttaagaaaaaaaaactaaaggaaggggggcagatttatttgcaataaaagaagaaagcgggttgatttttatggggaagattttagctttcggctacacacgcatttagacgtttctactttctctagcactcattcctagaaaaatcaatccagccctgaggcctgtggcccctagagcgttctcaggaccaaggtctgagttgggaccgcccgtatctagttcctc

SEQ ID NO: 5885 - DNA, 613 bp, Homo sapiens
  chr1:72749029-72749642
  hyper
ggcaccgtaagtttgaagtcctccaagttgtggtcggcgccatcatgacgccggcgactgtgagttgtttttttgtttattttcttctaatcttgcctgggtggctacgctgcagttagcgagcagccaactagttctctctgcgttttctcgggaataggtagggacggtggcggggcgctgcttttttgcggggacacgaggaggtgcaaggccttgcggcagagcagcttgcgtgtttgtggcggtcggcccgtatggattgcaggacgcccctcttttatctgtgggtgttgacactaagttgtgtgtgtgagtaggggattgtttatggtcaacatggagtgtgtgtgtgatagagagcgtgtcgtgcgcgcgggggcctgtgcacgcgcggcacgcaggcgcgctgggagggacggggcgggtcatgctgggatgtagagtcgggaaaagactgcaatcaagtgttttaattgtgtagagcccaggcggtccagttatgtaagaggcagtttaacccatttgagcctatcaggccgaataatcggcgcatccgagtcaaggcagggcagagttaaggggtttaacgagtcgcagggttgtatttctt

SEQ ID NO: 5886 - DNA, 100 bp, Homo sapiens
  chr1:72750578-72750678
  hyper
ggaaataattgtgaaatgacagactctcactaatatcgatgccaaatacctaagtaacactgtcatcttgttaactgcatttttctatcttgcgtggcac

SEQ ID NO: 5887 - DNA, 127 bp, Homo sapiens
  chr1:76080152-76080279
  hyper
cgctttccagtaagtgctttgagtactccggagcaattaaaaagcaagctgacgcgccaagataaagttgtgtccccctagtgacctctagagcggagctaagctcccacaagccagacttgggagg

SEQ ID NO: 5888 - DNA, 212 bp, Homo sapiens
  chr1:76081826-76082038
  hyper
cggcggcggctgctgtgctgctcctgctgctggagggggcagcgctgggtcccctgagcgcccgcccagcgctgacctcccccttctccacaccctccctcccccacgcccccacccccggtgtcccgtctgagccgccagcccccatccaaccggctaccgcgccgtcatccagcagcctctactggaaagacaacggtggcggcggcggg

SEQ ID NO: 5889 - DNA, 120 bp, Homo sapiens
  chr1:77333644-77333764
  hyper
cgatggaggagtgggcagattgctcaagggatgggggtgcccaaaagcaacagcctgccaaaaactaagagggacggggaggggggacctttgcagactttcttcgttttcttagatttc

SEQ ID NO: 5890 - DNA, 224 bp, Homo sapiens
  chr1:78956569-78956793
  hyper
cgagcacggtgccctcttctctcccagtactgctctgtgcccatggaaaagggggcggaggcgagagagaagaggaagaggcggaggtcactcgcgcgccccatccctcccaggctgccagcgcagctaggtgcagagggatcccaggagccgcgcgcgccccgcagtttccgcgctaagggaacgagtgcgcggaggggacgagcggctggaccacagccggc

SEQ ID NO: 5891 - DNA, 226 bp, Homo sapiens
  chr1:92949466-92949692
  hyper
ctggagagctgtagttcccatcgggtgggttaccccaactcagctactcatcgcctgcctggctgtgctttacggctggcgagggagggcggggacacgcggatcggtttaggggccggggatgcccagtggtcgaggacccggaaggggcaaggagccaagacctccaagagccagctaccaactggagtgaaaggaccggggggaggggggaacagaacacaag

SEQ ID NO: 5892 - DNA, 228 bp, Homo sapiens
  chr1:92950207-92950435
  hyper
ccaatcagttcacctaataccaggtcgaaatctgagcgcagcgggagggcgtggctgcgcctgccgctaggctccagccggctccgggggcggtaccccacagtcgaggtggtctggagtaaacgaatctgccttcctcccggggtgaaggcgatggtgaccgggttcacacgtgagctgcagtacagcagttctccgtggcctcggctggttcagaaacgagggtgc

SEQ ID NO: 5893 - DNA, 124 bp, Homo sapiens
  chr10:100994695-100994819
  hyper
aaaaaattttaactccgatccaacttgcccaccactcaagcctctgcttaaattcgttttctgagagtgggagagaactgacgaaacgatctttccgtggaaaattccagtttcgtgcaatccc

SEQ ID NO: 5894 - DNA, 293 bp, Homo sapiens
  chr10:106398982-106399275
  hyper
ttttggcaccgggtggaaaggcaagttcaagagggcgggggctctcgggaatcgctggatgtcttcttccttggccagcttagattctcagtcgcctcttctgcctcctccatccctcttggctcttacctggcgccctttcgcctcctcttctatctccctcttccttttgcaccattctctcgccccttttctccttcatcttgtctttcctctctccccttttccctctattttctccttcattccttcctctcacctttctttcctctccgcgcattcccctccctctc

SEQ ID NO: 5895 - DNA, 296 bp, Homo sapiens
  chr10:118927594-118927890
  hyper
ctagagccgttcctgagctcgtcagccagcacgtatttaatgaatggccactgggtgctaggccttgcacgcaaccctttcgtcctcccccggggctgagccgagggtgacccaacactagtcggaacgagcctggagacatggcgccggggctgcgctctgcaggcctggcctggtcgctctccacgcacccctctctctgtagctgccgccccgcccggctctgcctgtgggcgccccctggcggcaggaagccgagcgcgcaccacgccctcggggctccatccccactcacc

SEQ ID NO: 5896 - DNA, 116 bp, Homo sapiens
  chr10:17272233-17272349
  hyper
atttcttaaaactaccactttgtgtgcagttgaaggcccttgggcacaatgagagccagtcctccaaactttcagaaagtttcctgccccttctggcaggctgccaatcaccgggc

SEQ ID NO: 5897 - DNA, 117 bp, Homo sapiens
  chr10:18429033-18429150
  hyper
cgtcgtccttcccctccaaagttaagagatctgctctaagggttcctgaggggtggtctggggccatgggaacaggatcaaggccccctgagcgccgggcctggcttctgtggcttc

SEQ ID NO: 5898 - DNA, 49 bp, Homo sapiens
  chr10:18430247-18430296
  hyper
gatggggtgcaggtgggcaggaggggagcgaatatgggggtgccctgcc

SEQ ID NO: 5899 - DNA, 217 bp, Homo sapiens
  chr10:44185124-44185341
  hyper
cggcgaggtccactgggccagaccctggcccgaggtggccccggagctgtgagcgggaggaagagggaagggcggagtctggagccctcacgccttccgccttgtgcgcggtgcaggctgccgagagcccggccgggcaagcctttccgccgtggtcagtgactcgtttgcacaaggactttttagggaagagagaagccaggccttcgctgtgggc

SEQ ID NO: 5900 - DNA, 78 bp, Homo sapiens
  chr10:44186043-44186121
  hyper
accggtgaggaccctgcacccagagtcgggggtccaggctgttgctggaacaggaggcagctcggtgtccacggttcc

SEQ ID NO: 5901 - DNA, 107 bp, Homo sapiens
  chr10:44806674-44806781
  hyper
tccaccacaggagggggagcacgcgccctgctgaccgcacgcccacgtgatatcgccttctgccatcgcagaaagcagcggttcagcctctctgcctgcacacttgc

SEQ ID NO: 5902 - DNA, 198 bp, Homo sapiens
  chr10:44882100-44882298
  hyper
cgtcgggcgtccccaggcctttgctgggctgggccggggagcctggccgctcaccggccgcagcgctggggctccggcgccctctggtggcggcgcctccctccccgctcccagagctctggccagctccattcctgcgcagctgatgaaacccgggagggcgaaggggtccgcgggaaatctacacccgggtggagg

SEQ ID NO: 5903 - DNA, 194 bp, Homo sapiens
  chr10:60272362-60272556
  hyper
cgtggatactccatgtgcgttcaggagtgtgtgtgtttgaggagctatgaaagtgcatgtatggaaaggatttatacgtgtaagtgcagaaagtggcagtgtgtacgtggtgtgtgtgtgcgcgcgcgagtgtgtgagcgccaggggccgcccgcccgccgcggctccccgtgggctggccgggccaatgagcg

SEQ ID NO: 5904 - DNA, 212 bp, Homo sapiens
  chr10:60273346-60273558
  hyper
cgagtttgtactggcgcgcccaagttgcgttctggactttggagatgccaactttagcccggacacctgggctgtgccatccggaccactcgggccgcacagagtatgcgtgaccctccccattccctggcagcctcgagttctgtctctctccgtctgtttcactctctccccttgtcagtatccacttcctccagctgaggggccttgtc

SEQ ID NO: 5905 - DNA, 42 bp, Homo sapiens
  chr10:68685841-68685883
  hyper
cgtgtgcgcggtacggggctctcctgccttctgggctccaac

SEQ ID NO: 5906 - DNA, 103 bp, Homo sapiens
  chr10:83634159-83634262
  hyper
ccgggacccccgacgcagtctcccgcttccgtcccccacgctcaaccgggcagggcgccggggcgtgatttccgatcctctgcctgcttgttgggtccctcgg

SEQ ID NO: 5907 - DNA, 47 bp, Homo sapiens
  chr10:83634499-83634546
  hyper
tgcacctcaccgcccgggctcgcggagcagccgccgaagatcgcggc

SEQ ID NO: 5908 - DNA, 231 bp, Homo sapiens
  chr10:94831380-94831611
  hyper
cgaaagcttggcgagattcctagatcaaagttcctattggcctggtaatttattgaccccccaccccccgccctgcccccctacaagatgttctttaatgatcgttcactctcacatttaatcctttcctgccggacgcccccgccggcctcgatgtacagatagattaaaacgtttttttccctgcggcaatttccagcgtgcaggccccgctcatcttgtgacccggct

SEQ ID NO: 5909 - DNA, 852 bp, Homo sapiens
  chr10:97802911-97803763
  hyper
cgtgaagacttttaaacgccaaactgaggcgtcggaactttgctccgcgggcatcgaggagccatcgaaggttctcagcaggtgagtggcctaactggattggtcactgcagtgatccaccttacaatttctccggcgctctctgccgacctcagccggcgatcaggccggcttcgcagtaggtggcggctgagcgccccggcaaccgaagcgccaggccagcccaggccacgccgcgccgtgcgggatgctgaccgtacccaggcgggagccgccgcgccgccgcctggcgctgcacctgggcccggcccggccgccaattggacggctcggggcgaccccgctgtatcgcgagacgagattggcagcggcggggcctcaagtgcccccgcgctggctttgtatgcggagccgcctgccggtcctttaacaatgggcggcgcgagcgtccaggcgctgggctctagctgaggccggcgcttagcggcccactgtccgcagcatgagcggggccggcgtccgccgcacgacggcggggctggggctgtgagggccgcggttccgggtaagggagccagcgtggggccgggcggcccggcaggcctggggtaggcgtggggcagcggaccctcccggggtgaggcgcagagcctggctggcccggccttttgttcccctttctgaggccgcgcggaacgtgcgtttctcggggctcccggggaggagcaggctcccgacgtccatgcggagacccgcggccaggcagacgctcacccccgggctttgccatgggagcgtttcccctcagcggggctatgagcgtgtcacctctccccgctcctcagggagggc

SEQ ID NO: 5910 - DNA, 117 bp, Homo sapiens
  chr11:101452974-101453091
  hyper
cgaaagggcaccgcagcagggcttgaggctgggcagccctgacacagcacccatctatcaggagggtctgccaggcgcctatggggtggaatcctccctccaactaaagctgtttat

SEQ ID NO: 5911 - DNA, 133 bp, Homo sapiens
  chr11:101453715-101453848
  hyper
cgtagcgatcctgtctcttgtagagcgcaggatgaaggggtctggagaaatcgaccacccatctaatcacctgcaatggtggtgttactatgcggtctcactctcgtgggcaaacatatccatgcgtacctac

SEQ ID NO: 5912 - DNA, 301 bp, Homo sapiens
  chr11:115375894-115376195
  hyper
tggttttaatatataggtgtgtgttgaatatatgtgtgaaatatttgtaatattagatatttaagattacacaacaacggaaaaaattagtcaaggcttcaggtgaagagcgggggtggtgggagttggggagagggagtgtggtgaaggcagggtctgccgtgttcctccttcggggctcaaaccctctcactcctcctctgcgcccccagcccttcctaaggaagctggggaccaacaggtgctccgagcttcccctgtctctgggagagcctctcctgctaaagcgacttgcatctcc

SEQ ID NO: 5913 - DNA, 255 bp, Homo sapiens
  chr11:16635541-16635796
  hyper
cgggctgacaggagtgagagctaaaacttccaactagctgaaaccaatagccgggaatcgagcgaaggcgaactctcccagcaaagtataaagcttcgggccaaagagtctgcagctccaagtcaggggctgcggctccgaaactccaaacactaactcccagggcagtggcagagggtgggggcagcttcgaagaggcataccaactgctccggtcctggccgaagaccgagctcccttctgcggtgacctcgg

SEQ ID NO: 5914 - DNA, 71 bp, Homo sapiens
  chr11:16635927-16635998
  hyper
gtgcaagagaaggacgttcaggcagcccggccgcctgctgcgagagctgaacatttcccagctctatagtc

SEQ ID NO: 5915 - DNA, 100 bp, Homo sapiens
  chr11:22647396-22647496
  hyper
cggcgactctctgcgtactgattggaacatccgcgaaatgatacgcctctctgcaatgctattggtcgaaatgcatgtcaatctcccagcgtctttatcc

SEQ ID NO: 5916 - DNA, 56 bp, Homo sapiens
  chr11:43599961-43600017
  hyper
cgtccctctctcggaaggttccctgactgagactgaatattcaactcataatagta

SEQ ID NO: 5917 - DNA, 239 bp, Homo sapiens
  chr11:43600215-43600454
  hyper
aaattctgccacaattgcaaaggaaataggggtggggggagcggtcggggcgggagtggtggtagcgccaataaagcacttgcaacacgtggagcggtggttggggggaggtgtccaagagtcaagaagggggcggagggacaccccatggcctcatttccacctccccattcttccccaccccttctcattgcttggcacaatgcacaagtttaccccccgaactggatcctattaaa

SEQ ID NO: 5918 - DNA, 190 bp, Homo sapiens
  chr11:59333673-59333863
  hyper
aaaaggtaagacatatgtccccagtatcctccctcccaggggaaaatgacgataaggtttcccttaactgccccagcccgcgtgagaacccacagggtgttgaccctgttaactgcagaaagaccctgttaactgcagaaatcacatgtagtgatgactaacgcctaaaacggaagcgctgccgaaaccc

SEQ ID NO: 5919 - DNA, 38 bp, Homo sapiens
  chr11:84431917-84431955
  hyper
cgatttggtaaaaagccagtggcttgctgcaatccaga

SEQ ID NO: 5920 - DNA, 55 bp, Homo sapiens
  chr11:84432270-84432325
  hyper
agcaaagaaatctggggtagaaaacaggctcaaaatgatttcgctggtgccctac

SEQ ID NO: 5921 - DNA, 172 bp, Homo sapiens
  chr11:94501274-94501446
  hyper
cggcaggggacaaaggaagggatgctgtcgccctcctaagtctcagggagacacgtcagcttgagctctgggcaatttcagcctggcagtctcgcggcccggggaggggcggcgggtgtctgcagacgggctctagggcccagcggccgggcgccacggcgggggtggagtg

SEQ ID NO: 5922 - DNA, 163 bp, Homo sapiens
  chr11:94502100-94502263
  hyper
cggaagggggtgtccggtgcagctttccccggcgcgagacaaaggcgcgcgcaccggcccgcccgacgggctctggcgctgtggactggaccctttctgcccgccggccagacccggctctggcgggtgggggcgacgaaagggtcgcaccccagccccagac

SEQ ID NO: 5923 - DNA, 268 bp, Homo sapiens
  chr12:103351149-103351417
  hyper
cgccccgagcgcgccgcctgtttattcagccgggagtccggcacgcgccaggcgcacgcactgcaacaacaaacccagctgaatggagagtttgcaaggagcgggagaaaggaacgggagggggggagaggagaggaggagggggagtttagggagtgggtgggaggaagaggtaagaggaggggggggagtgggggctgcagccgctcgctgcagcagcggggagtggggggcgaggcggggccagggctgcgcgtggggctgggtg

SEQ ID NO: 5924 - DNA, 752 bp, Homo sapiens
  chr12:117536636-117537388
  hyper
cgctctcgcgctcacgaatgcaaacgactctcaggtgtggggcgcgcgcgccagcgggggtgcctgagggacttgcccgcccggcctgaggcacctgccctgcgcttgggaagcctgggccccgctccctccccggtccgcagtcccccggccagggagttcccgggccagtccgaagctgagcggctgcggcactgagcatcgccgcggagctcctcgccgcagcccgcgaggtggccagcggggacccatttgaaagaggaggagactgaggcgcagagagggcccgccactggcccaaggtcacacagcgcggcggcgggccggggtccccaacagtggccgttcggaggtcccgccccggtccccgcgccgccccccgcgggtactcacagccggtcttgccctcgagctcccgcacctcctcagacgcggagtgggcagcgcccatggtgcccgcggcgggggccccggggcgcgcgtccctctcaggccccgcactggcttcggctgcgcagcggcgggactggcctcgggtccggcctcgggtcgggacgccggcgaaggctcggagccgcgggttccgcgtggggccggagcggggcctcatataacggcggagggcggcgcgccgcggtcctagcgcacgccggtttcgcgcactgcgcggctaggggagcgccccgccccgccccggcccggaaaccgccgggaaggggaccccggagcccaccgctctggagtccccgttc

SEQ ID NO: 5925 - DNA, 81 bp, Homo sapiens
  chr12:127865862-127865943
  hyper
tgccaatcaaaacgccatctctactccttgtcaaagtcaagtcatttagcgaaaggcctaatgagctctgcaatcagctac

SEQ ID NO: 5926 - DNA, 152 bp, Homo sapiens
  chr12:130498574-130498726
  hyper
cggaaagagggcaaggagagtggcggggtgcgagcggggcgctgcggaggaggctgcagcggcagcggtgcgggcaggagctctgatgcgatgcgatgcgatgcgatgctgcccccctgtgtccttcgacgatattgctgcgggaagctttc

SEQ ID NO: 5927 - DNA, 107 bp, Homo sapiens
  chr12:130498755-130498862
  hyper
cagctcagaccttctctgcgaatagctctccgggtggtaaagagatgcatcacatttaaaacttcgagacgtcctggattcacttagaaagatgggaagaggctcac

SEQ ID NO: 5928 - DNA, 31 bp, Homo sapiens
  chr12:131400786-131400817
  hyper
cgcctgactgtctaatgcacctccgcatccc

SEQ ID NO: 5929 - DNA, 54 bp, Homo sapiens
  chr12:131400919-131400973
  hyper
ctcacgctccacgctgtggccacactcttacgcgcctttgttcaaatggtccgc

SEQ ID NO: 5930 - DNA, 107 bp, Homo sapiens
  chr12:14928211-14928318
  hyper
ttccctttcacagagccttcgctctcctgccagtttgtgagcactcaggaccaagttctgggaagataccgtcggatcgagctgagctcggggcaggaagtgtctgc

SEQ ID NO: 5931 - DNA, 41 bp, Homo sapiens
  chr12:3602961-3603002
  hyper
caaacaaacaaaaaaccacgtcgcgtgcggggcaccaaggc

SEQ ID NO: 5932 - DNA, 293 bp, Homo sapiens
  chr12:45270086-45270379
  hyper
ggcagagacaatggagaaagctccgggagacgcgcggagagactgctcctccggggagggaggggcgggccgggggaggcggggtaaggaggagggaggggccgccgagggcgaggccggcgctcagcgtcggtctcccgcacggtctcctggatgccaaacccggtctagggagcccaggagccgttgcagcctcagctcttctccctccctctctcgatgacccgggcaatgccaacctcctttcgggattgaaagctctaaatccaaggtgctaagttgatgggcggtct

SEQ ID NO: 5933 - DNA, 184 bp, Homo sapiens
  chr12:63026256-63026440
  hyper
gctgtcccctccgtctaaaaccctaagtaaatacccagtcctcccccagactcttctccacctgtggttcaggtgtctgggaagaaggccctgcacgcccgtccgcgcctcccctgcccgggggagccccgggtaggcagtggccaaagactctgtagaacaactcccgggagggcaggctcgc

SEQ ID NO: 5934 - DNA, 118 bp, Homo sapiens
  chr12:63545150-63545268
  hyper
cgagtcatgccttttctgggctcgtagccgtttccacaagcttccctcactagccttcctcgctagcctccttaaccatgcatttgacttcaacaggcacgctaagcgcggtacctgg

SEQ ID NO: 5935 - DNA, 435 bp, Homo sapiens
  chr12:63545586-63546021
  hyper
gtgtctcctggttttctctatggagactagggacttaaggagttttctctagattcctggggttttctgcgggaaaagcctgattcccacagcggggatggcggaaatttggccgcagtggtccgtggggaccgtctggttactactgagtcgtggggacatctttttgggtggacaaagagcagctgccggacagcggccatccaggcagtgctgtccagggcaagggacagaaaacccgcccggctcctgtgctcaggagtaagaaagaggcaatctcaaagagaggaaagaggccctgggaaggaggggaaacaaccacctacctagtaatccgttactctgaacagctggagcccctctgcagggcgggagggaggcagaaatgcgatctccctcagctctgttttaacgttggtgaagatatgcctcgac

SEQ ID NO: 5936 - DNA, 306 bp, Homo sapiens
  chr13:28491488-28491794
  hyper
cgggaaggtgctcgcctaatggctcggtatcgctgccgggcctgttgtgggcgaggcggcttggagggggcgcaggcgtcagcggggattcagagcggaaacgcatttcgcctgtaatggactcggcgattttacgataccaggagctagatccacggggaagtacaacacacgaccttactaagcggagggttccgcttgatgcgttttttatacggctgtacgtgataaaattccagataactttgtttcatctaataataataataacaataataaatggttgtttgacctttgctccctggg

SEQ ID NO: 5937 - DNA, 37 bp, Homo sapiens
  chr13:29069851-29069888
  hyper
caaggcactgaacctggagcgcctgaggggaactgac

SEQ ID NO: 5938 - DNA, 98 bp, Homo sapiens
  chr13:29393559-29393657
  hyper
cgcctgccttttgcgcaaatcttttcagagactggctttgggctcctatgaatcaggcaccctagcgtcctccaaagttcttcccgatgctgaacccc

SEQ ID NO: 5939 - DNA, 133 bp, Homo sapiens
  chr13:46960952-46961085
  hyper
cgccctgcgtaaaagtgtcctgaggtcccgcttctgcgcccttcccggcccaagccgaacacagggtcaacctcactctacaaagtcaaccggatagaaatccgccaccccgcgaggagccccttcctactgt

SEQ ID NO: 5940 - DNA, 135 bp, Homo sapiens
  chr13:46961683-46961818
  hyper
aagacctggcagaaatgacttcccaaccccagatgcccccagcagcagtatttagcagtcatacaattgcctgaaatgaagaatgagtaatctggatgagtcggccctgaaatcgacctgcaacttacccggaac

SEQ ID NO: 5941 - DNA, 155 bp, Homo sapiens
  chr13:67804074-67804229
  hyper
gcaactccagagaacaaattcacggatttgtcgttagtcattctctccacatttcgtctctcttacccactgggtctgggttcttctgggcatttagcacacacaacacatagttgcacttcttcagctcagggatattttccacagcagcatgc

SEQ ID NO: 5942 - DNA, 196 bp, Homo sapiens
  chr13:67805438-67805634
  hyper
tcactgcgaactttgcttccgaggggctggaaggagtcccaggcagctgtttcccaagctgtggaacacttcctttcccctaggcactttctgctgattccaactttctttcctgtgattttcgtcttttcccgtgcatttcatttctccgactccagctctgtactaaatcctcacaagtttctcgttttcatac

SEQ ID NO: 5943 - DNA, 139 bp, Homo sapiens
  chr13:74707123-74707262
  hyper
cggctctgcgggttcccggcccgggtggacgtacaaagttgccccttgtcaactccggccaggtcccccgtaattgaaaataacagccaccggccagcccctggctacttgcatggaccaggcactgtagcaagtgaca

SEQ ID NO: 5944 - DNA, 212 bp, Homo sapiens
  chr13:74707414-74707626
  hyper
accccgctcgaggccggggggccaactacttccacgagccccccctcccccccaagttcagccctggggttttatttcacatccttggcaactgtcaggcaaacactgcaaccaacaattccactaggggtagaaaaacacttgcttaattcacgttacttgataacttcttctggaaaaaaaaaattaggggaggtggggaagaaacctcc

SEQ ID NO: 5945 - DNA, 410 bp, Homo sapiens
  chr13:74707668-74708078
  hyper
aacagcatcgcccttccccggccccctcccgcttcccagcactttccccctttaagaacacagaccaaccaaaatgatttaacttgagcagatgacagaaggaaaataaaacacgttaagagaatacggtctgatttgggatggcaaaaaaaaaaaaaaaagaggagggggttgtttattttgataagaaacggaatcggcacagacctgaacagaagctgcagagcaggagaaattgttttctttccctcacacagagtccccctctctctctccctttctctctctcacacgcgcgcgcgcacacacacacacacactcgcacacacacggcgtcacccgcgcacacgcacacgcagagcctctcagcggctctctgcagttctcaggaaatgaatggggggcaaccc

SEQ ID NO: 5946 - DNA, 162 bp, Homo sapiens
  chr13:92050814-92050976
  hyper
gcctgtccgcggggcggggagtgcggggcggggcttccgcggagcgcagcgagcgggcacatcccaggttagctgctgcgagccgagccgggcggcggaggcggcggcggcggcggcagtggcggcagtggcggcagtggcggcagcggcagcagttgcagc

SEQ ID NO: 5947 - DNA, 247 bp, Homo sapiens
  chr14:21098618-21098865
  hyper
cgtagttggaaattcttagagtcctccgctctaccaggtgagctatcggaaagtgtctgtgacattcgttagcgtagatttttgtgcattgagtagcggctggtgagactcctgacttctttgcatttgggctcagattactgttcaagaagttccagagagccaggtctatagttaactgagtcccgggagcagccttgaggcagtaggaagtgagatctgagtcggaggtagtgagaatggaaac

SEQ ID NO: 5948 - DNA, 196 bp, Homo sapiens
  chr14:21099147-21099343
  hyper
tttcccagtatcgttcataggatcccgacgctgtactttttcgtctcaaatccaggatctggctttcatggaaagatcataaaatgcttcctttcttcactagtttgtttcagcgttgaaaaggctaaaaagctcctgctcttttgcttgggaaaagtattcctacagccgaggccccagcgagatttgaactcgc

SEQ ID NO: 5949 - DNA, 686 bp, Homo sapiens
  chr14:21099793-21100479
  hyper
cgaacaaacaaaccataaaagacatttaatatatattgttatcttaaaaacgcatgctccacgatacatgctccccagcttcaggcttgacaagtcccaagtgccgagcaacatcagggtcagggtgcgtttcattacagaagagaatgcagtagtgatcagagaggttccccccaacccgcttggattcttagtccaactctcttagtctgagattggggttgtttttaaaagggaggcggctgtcttcaagcacaggacgtacccctcggaccttcagagtttgggggtggacgcagtgagggcgccaaggcttccagatctcccccagcctttcagcggagtccggcttggtcacagattcctctaagttacctgaagcagaggtggctagaaggggtccagcccttttcttggtcctttaacactcctcttcctagcatctcggagtcggaaggcagctccttctctttgggcctccaggcttttctaagcgccaacttgaagtccagaaagaataaaagtggcgtcgtcgcatgggaaggttggggcggaagagtttctcttcttttctctcctttggtgtcagcctgaccaggaggctcagtcattcactggacagctcccactggccgggagccagcttggcgcagggcaagcaatgtgatcaaggcagacactgatgc

SEQ ID NO: 5950 - DNA, 113 bp, Homo sapiens
  chr14:21101056-21101169
  hyper
agtctggagaaaatcactagattctaaaggaatcaaaactgttcaagtgttgtgctacaactaaaaaaataaatgaacactcttaaagaatagaatctctccagttctggctc

SEQ ID NO: 5951 - DNA, 79 bp, Homo sapiens
  chr14:27067019-27067098
  hyper
cgcgagggctggcggggcgcggggagaagccgaggaggaggggagagtgagggaaagagtgaatgagcaggaggagggg

SEQ ID NO: 5952 - DNA, 219 bp, Homo sapiens
  chr14:27067386-27067605
  hyper
acttcgcgctcgggtccctgcctctcagcagcgccgccgcctcccagcgccgatgcttcagccggcggggcggctgaggggtgagggggaactccgcgggcgggggcgagggagcgtgtgtgcgcgagcgtgtgcgcgcgcgaggggagcgcgtgcgcggtgaggacgcgcgccggcggttggggcgggggcgggggccggggcgctcctgtgggaagg

SEQ ID NO: 5953 - DNA, 205 bp, Homo sapiens
  chr14:27067699-27067904
  hyper
tagaaggcgggaaggagagattactgacagccgtgccagccaataaaatagaaatgtgagaaaggttcttcgggccccttcccaatcaggaaacttgggtgatgaggggcagcgaaggggtggggtgggatcttggtccagctggtactggagcggcgacaattttggctagtctaagaagggcattcgagtgaccgttgacaac

SEQ ID NO: 5954 - DNA, 88 bp, Homo sapiens
  chr14:30739859-30739947
  hyper
cggaacacaagcgttttgcttggtcactaagcctagacaaatgtaagtttccccgccccagctcccctcagcctgtcacacaaaagcg

SEQ ID NO: 5955 - DNA, 69 bp, Homo sapiens
  chr14:30740003-30740072
  hyper
tgggaaagctttagcttctcaagccaattgcactgcattgtcagtaggggtgtccgtgagctccccctc

SEQ ID NO: 5956 - DNA, 97 bp, Homo sapiens
  chr14:32671357-32671454
  hyper
cgcggttcaacgaaggtcgttgggcaagatacggtggtgttcctagaggttgttcaagatctctcggggcctgcattttcctgctcgcgagcttggc

SEQ ID NO: 5957 - DNA, 138 bp, Homo sapiens
  chr14:42076491-42076629
  hyper
cggtccgttatatcagaaaaaaaaagcgcaactggacgggggtggggcagaccaacgaaacctagacagacacacacacactcagaggagagaggaagaattgaaagacttgagaagactttgataacctccctgctg

SEQ ID NO: 5958 - DNA, 315 bp, Homo sapiens
  chr14:52781114-52781429
  hyper
cgccgtcggcgcgctgggtgcgggaagggggctctggatttcggtccctcccctttttcctctgagtctcggaacgctccggctctcagaccctcttcctcccaggtaaaggccgggagaggagggcgcatctcttttccaggcaccccaccatgggcaatgcctccaatgactcccagtctgaggactgcgagacgcgacagtggcttcccccaggcgaaagcccagccatcagctccgtcatgttctcggccggggtgctggggaacctcatagcactggcgctgctggcgcgccgctggcggggggacgtgg

SEQ ID NO: 5959 - DNA, 80 bp, Homo sapiens
  chr14:52782046-52782126
  hyper
gaccacctcattctcctggctatcatgaccatcaccttcgccgtctgctccttgcctttcacggtaagtcactccctacg

SEQ ID NO: 5960 - DNA, 45 bp, Homo sapiens
  chr14:60798413-60798458
  hyper
cgctttgtcacccgtgccggaagctcacaggccccggagatcccg

SEQ ID NO: 5961 - DNA, 536 bp, Homo sapiens
  chr14:65006776-65007312
  hyper
cgccggttcagactttttcttttctttaatccccgtccaagggatccgccctcaccccccaccccagccaccccaattccctattccctccccttggacggcgccggggaaaacaagctgctcgagctttatttcttcggtgcaaccaactcagaatgaattcctccgcccctgcgtgctcagtgagtcggcaccctagcagtgaactgcatttaaaacctcaggaattgagcgaactctcccagtggctctcctcaccgggatccccttccacgcctcctccccgtgccgcgcctcagtccgcactgctcattggccgcgtgccctgccaatccgatgcacgtcggctagggcaaagaccgcgaaaaagcgcgtacacctggctctgggagcgcgcgcctaacgccagccagcagcaggaggcgcgcgaggcaccacggcctggcggccgagagtcagggaggaacctcatttacataacggccgcccctctgtctcctggcgggggccggagtcccgcccctcgtccaacttga

SEQ ID NO: 5962 - DNA, 38 bp, Homo sapiens
  chr14:76819100-76819138
  hyper
cggccccggttgctctgagctagctgattggaaagccc

SEQ ID NO: 5963 - DNA, 67 bp, Homo sapiens
  chr14:89818034-89818101
  hyper
tgtttgataaggtcatttgtaaatatttactgatttgcagagaaaagaagttaaattacataaaccc

SEQ ID NO: 5964 - DNA, 102 bp, Homo sapiens
  chr14:94889915-94890017
  hyper
cggaccttaccctcacaatgggccacaggaatttatatgtcccttgaaagacctgaaatgacacggcagtgtctgaacacacgggggcgcgctaatcacctc

SEQ ID NO: 5965 - DNA, 578 bp, Homo sapiens
  chr15:26095523-26096101
  hyper
cgtggatgcgttttgtacggggaacaaaactgatttccaacttggcaaaaagcaacaggagaggccccggctgtgtctggtaccgcctcagccgagccctgaagggaaaggcccagaaaaagggatgtggccacaccctgggggccagcccacaggcgaggcgagtccccaggcgccattctacgcggccagttttggagaactggaactgtgtagagcgtccggcggcagcggacccagcgctgctccattctccctccctccctccccccccagccccggtgactcactccgcggcccgggcagggcgagaccacgcccaccaccccccaagacctggccgcgctcacctcccctcctgcacagagcacctaagggcccaaagatcacatctgaacaaaggatggaacttggaacttacatttacctttcctgcccctgactttttaaactgttattagaagtatacaaaaacaaaaggcaggacataaaagtagtgaaatgctttaaactctacaaatgactcagttcaaatgtgcggtgacagcctgggtttcctgccatttcgttaacccctc

SEQ ID NO: 5966 - DNA, 409 bp, Homo sapiens
  chr15:26178877-26179286
  hyper
cgccccctgccccatctcaggccctagccctctgccaggagcgtctcctgaggctgaaagtgccccctcccgctctcagactctgcgctgccatctgccttgcttctctcggtaccacttcccctgctctcttttgaatcggattctctccttcaaactccagctgatccagcccgcacatgccaggcccgtatgtagattcgtctgttgccaccgtcctccaagccctagggaggggttgagctccgtggaaggcctctgatgggagggacacgactcggaggctgagcagcacaggacaccgtggtaaactgggattcttctttgcctttctcagggaggcaaaaggtgcagaggcctgcagtgtgctgtgagcgacagtgccagctagtggcgcacgacttacatc

SEQ ID NO: 5967 - DNA, 145 bp, Homo sapiens
  chr15:29432142-29432287
  hyper
cgcttcccaggctgccgtgcctgggctgccggcaggctctgcctgtagggggtgccagagggcacctggccggcctgcggggcgaggagggagctgcgggtttcctgcgccttcccacctcctcccttctgttccccggctttgc

SEQ ID NO: 5968 - DNA, 61 bp, Homo sapiens
  chr15:29561185-29561246
  hyper
cggtgtggggtatccgccggtattccaggtaacgctgtcgcacaaagtcctcagtaatgag

SEQ ID NO: 5969 - DNA, 700 bp, Homo sapiens
  chr15:29561316-29562016
  hyper
gcttcagtttccttgatggtgttgcccttcataaagatgagccctaagacgatcatcaggaggcccgtagtgggcgtgccttggtcacccctcatctcggcatcctcctccacaggctccagggtgttgatgaggatgtaagtgttgctcttgggttcaagttccaccagcttatacccgaagacgtactggaggcgctcggcggcccgtttgaagaggtcggggaagatgtccttgtagtccccgatgacgtgcttcagtatgtcggcccgcttgatcggaatcttcttctggtctttaatcagcaagaactgcaccagctcggacactttcagctccagctgcttctggctcctgggccccacggcgggggcggcctgggcccggcgggcgccctgaggcgaggggccctgcgacccctgcgagccgcccggcccgcgggacgtgctcggggcctcctcggcaaagccgtctctgagaacccgggcgtcttccccggcccgcgaagccccggggtttccgctatggctccagtctctgtccctctcggcctggccgccagagcggccccggttcctcggtttttgcaacatgtctccggcggcaggtgccggcgcacactccggtaggcaagcagccgcggcggggattgcgggtcggcgacccgctaacgccggtgcctggaggcgcgcgcagtgtc

SEQ ID NO: 5970 - DNA, 119 bp, Homo sapiens
  chr15:48469946-48470065
  hyper
cgtggcggtcgctgagctttgctcaaagattctttaaccaaagtcagggaagaggggtgttcgctgtctcgggctagaaatcagggaagagcgctggtccccgggcccccagccccggc

SEQ ID NO: 5971 - DNA, 53 bp, Homo sapiens
  chr15:48470094-48470147
  hyper
cgggcggggaagggcctgggagcggcccagctgcacctgctcctcaggaagcc

SEQ ID NO: 5972 - DNA, 159 bp, Homo sapiens
  chr15:48470215-48470374
  hyper
cgcccggtagactccccgccccccacctcgccccggttcccggaggaaaagacaatacattttaacgccattggagctgctgctgtgctgcggctgctgcttctccgcctccgcggggtgcggctctcgccgcggctcgcccggcggctctgcgggctg

SEQ ID NO: 5973 - DNA, 99 bp, Homo sapiens
  chr15:53080201-53080300
  hyper
cgaaaatcgcgaagaggaataataaaacaaaatgcaaagtcctcagggagtcggcagcggagtcggtcccaggacatggctattgctttgcagctctca

SEQ ID NO: 5974 - DNA, 72 bp, Homo sapiens
  chr15:63795400-63795472
  hyper
cggtgggtggataccattaggcagaggtctatgcggaagaggccgacttgtggcgtgggaggtagggaggag

SEQ ID NO: 5975 - DNA, 97 bp, Homo sapiens
  chr15:65714323-65714420
  hyper
cctgctgacctcgtccacgcttccctggtcggtccctggggggtggggccggggtgacacgcgtcccatcgtgagaacaagcgctggacatgtccac

SEQ ID NO: 5976 - DNA, 225 bp, Homo sapiens
  chr15:68126244-68126469
  hyper
cctgagcgaggaacaagccattcggacccgaccgatgtaaatacagccgcccgtccgcccgccttcctcccgggctccccggccttgcccgccccctcccgggcgtccctgtccagggccccggcttggtttccaagtgtaaataccgcctcgcgcctcaaatccccctaccccgtgtgaactctagggcatcggacctcaaggggttaactggacagacggggg

SEQ ID NO: 5977 - DNA, 773 bp, Homo sapiens
  chr15:72523255-72524028
  hyper
cggcgctggggacttctgaagagcaggccccaggcgtgaggagccgttctcctctctctgagctccactgcatcccagacgccctggatcctgcgccgccctgcctgcgtgcccggggccggccggcgcgccgggattccgcactagccgggcgactggcccttggtggggactgatggcgtagcctcctgcaccgctcacctccggcgctgaccgactcgggctacgctgcaaagacgaagagatccggagccacggcgcgtgcagctgctgtgcaaggagccactgcctcagcctcaaggttatcccgctgcgggccgccgcaatccctccgccgccccgccctctgcccaatcccggctccgggcgacccgggccccgccccctgcgtccccgcgggcgcagtcaccttcaggaggaagcgcggcggcggcggcggaacgcgcgggcaggttgccctttcggtgggactaaattctgcggcggaaggacacagattcagagtcacattttaagaaacctgatgaccaatggggacgcggcggggcaacggggcccgcccccggagcgactttcctcccagacccccgggcgccgggccacctgttgccgccaagttgggctgccagatggggtgtcttttcttggctctcggcccaggccaccccagctgtcccggcctacctgggcagggcccagatttatgggttccggggcagcattctcccggccccgccctgccactccccactcctccgggtgtctgctctggc

SEQ ID NO: 5978 - DNA, 40 bp, Homo sapiens
  chr15:90016187-90016227
  hyper
cgagcgccaccttgtgatcgccgtgcggatcacatgccac

SEQ ID NO: 5979 - DNA, 37 bp, Homo sapiens
  chr16:10274229-10274266
  hyper
cggcagcaccagcagggtccaatagcccactctgccc

SEQ ID NO: 5980 - DNA, 430 bp, Homo sapiens
  chr16:12897365-12897795
  hyper
cgctctctcggcctcgcctctcaactgcgcccctggaatccctaagagcaggctttgatgcagctatggcggctcccaggccccggtgcagccccggatggtgtccgactggcggagcgcacacctgaacaaaaggttcccccggcggaaggttccgcagccccagagtcccctccccgggtgaggggcgggcagtacctgcgggaaacgcggccagggtcctgcccctggctctgtggaaaacaccccccgcctctgcagccgacatggcgagcgagtttctggccttcacttagaacactgcgtgggtggaagccgcgcgacttcacacagaacaaccgctggacctgtcccgctttgggcgacgccctttgatctcggggcgggactggggcgggacggggaggggcccggtggctcggggcgccac

SEQ ID NO: 5981 - DNA, 305 bp, Homo sapiens
  chr16:3208795-3209100
  hyper
cgggacccgggcggggaggggtaggggtggagtgaaggcggggtctgggggggtgcgcgtggacggggagagtggaaccgcgggtgtggacctccaagtacagacgtcagagaacgtttgtcgtcctggctcgttggtctaggggtatgattctcgctttgggtgcgagaggtcccgggttcaaatcccggacgagcccgcttttttttttttttctgaacaccatcattttctcgcggtgaagattgaggagcttcacggagtctcggccgcagggaacttggtctctccgtggcagctgcagg

SEQ ID NO: 5982 - DNA, 212 bp, Homo sapiens
  chr16:3222239-3222451
  hyper
cctcagctacaagggacaaggatgctcctgaggctggcctggtcggcacttgcctcagcctcgagggagtcccgcgcccttctccttcccaaccccagaccagagaagctgtaccctctgcagcccgggtcgctcagctccacatgggctccgggtatggtggaggccggtggttgggttctgagtgatcgagtagtgtgcacggtctgggc

SEQ ID NO: 5983 - DNA, 50 bp, Homo sapiens
  chr16:3238043-3238093
  hyper
gaaaaaggaaaaaaaaaaaaaaaaaaagaaaaaagaaaaaaggaagcggc

SEQ ID NO: 5984 - DNA, 49 bp, Homo sapiens
  chr16:4363872-4363921
  hyper
cgtctcctgtaccttttttctacacacctcgaccccagggctgcagttc

SEQ ID NO: 5985 - DNA, 158 bp, Homo sapiens
  chr16:4364080-4364238
  hyper
ccctcctggaagcgctaggtcccgaaactggccttcccccggggcccatctcccggctaatgtttaacccggccacactccacattatccacactcaggagaccggggtgaggtgagggtggaggctgggggaggtcacctccaaatcgccaacttcc

SEQ ID NO: 5986 - DNA, 49 bp, Homo sapiens
  chr16:77822069-77822118
  hyper
cgacccaatttcccgactatcccgcccagcctcgaagatgggagggaga

SEQ ID NO: 5987 - DNA, 61 bp, Homo sapiens
  chr16:81779788-81779849
  hyper
cggcctgctggataaagggaggtagaaacgctttcagccctccccggtgcttcccggttta

SEQ ID NO: 5988 - DNA, 123 bp, Homo sapiens
  chr16:81780013-81780136
  hyper
gaaatgtagtcgaaacggccgctggggcagagtgagcacccacagtggtgccttctggggagggtcgttttcacgtagtccaagagccaggggtgggaaccgcggggctctcaccccagcgcc

SEQ ID NO: 5989 - DNA, 200 bp, Homo sapiens
  chr17:12568526-12568726
  hyper
cgccgtgtcacatttgtccccccaaaaagcatatcctagaaaatgaaagcctttccatttccccgtggaaatgcatctaagtccagtattggagctgcgagatacagaatcgtctctgccagtgccctgagcccctcaaaccgaggggaatgcgtgggcttcggtccgtcggaagcttttcttctcaggggtccagctta

SEQ ID NO: 5990 - DNA, 382 bp, Homo sapiens
  chr17:12568791-12569173
  hyper
cggctggcgggagatcccggccgcttccctttcgccggcagaagcccggccggggaagccccggctgcgcacgcccatccccaggacctcggagctcccagcggctgccgcagccccgcgaaccacctgcaagccccgcggcgtcgcagcccttccttctttcctccgggcatccgctctttagctcgcgcccctctcccagattcccgacccctggccctgctcccgccctctgtgcctcggcggctgcggggcccgccgcaaagagttaagagccggttcccgagacggcttcggcggctccgggtccccagaccccgctcgccgctcctgattggctgagcgcctgtcagtagtaaagggtatcagatggcaaagttgg

SEQ ID NO: 5991 - DNA, 35 bp, Homo sapiens
  chr17:12569402-12569437
  hyper
attctgggttgttagctgcggtcagctgggctccc

SEQ ID NO: 5992 - DNA, 532 bp, Homo sapiens
  chr17:12692672-12693204
  hyper
cgctgccttctcccacctccgcactccactgtccttgcaaactttggacagaggaaaggtgggcacggggcgcgaaactacaagtcccggcatgcacggcgttctccgcacaggcgcacggggaccgccgggccagccggccagccagcctgcggagactcccgggtccccgcgccggactgggactgggagcaggcagcccgggcggagcgggccggtgccgaggacggccccaggcattgctctgccccgggcattgcgcggcgcgcgtgagggggatgcggcaggaggcggcgcggcgggaggagtaggcggcggcgccctcgggagggagctgcgcgcgggccagacggcgcccggaggctccgcagtgccgccgccgtcgcccgggaggctccgcgcgggagccatgtaaccctgcggcgggctccgggctgctccgtccttccccagctcccgggctagcgcggcagcggggccacgatgaagaagcagttcaatcgcatgcgccagctggccaaccagacggtgg

SEQ ID NO: 5993 - DNA, 126 bp, Homo sapiens
  chr17:12693500-12693626
  hyper
tccccgggactcccttctccctctggccgcctgtcttcctggaaacaggtgtttgctctgattgtgctggaggcagccgaaccgcagtcggtctccggagatctcttccctcccctcccctgcgcc

SEQ ID NO: 5994 - DNA, 362 bp, Homo sapiens
  chr17:16290077-16290439
  hyper
cgcgcgattttttgagatgtgagagggaattgtgcttcacggtcaccaccaggtgtcgcgacatcaggtgccgcgccgtcccgcttctgaggcgcggtggcctgagaaactggttgcagagcccgctcttcctagcctactgcccgaaaacgcagaatttggggaattggaactttggaggcgggagcgaaagacctctccttctcccgccggaaatacccctcttttgggaagcgcgcccctgccttccggaaaggaagaaacgtgatcacgccgctgcactcaagcctctgggtgatagagcgagaagaccctgtctccaaaacacaaacacacaaacaaacaaaaaggtaatgggggcc

SEQ ID NO: 5995 - DNA, 93 bp, Homo sapiens
  chr17:46713841-46713934
  hyper
cggagaattcagaggtgccagaagccgagttcctagaccccagctggattttttttttttttttttttttttttccaatttctggcggcgggc

SEQ ID NO: 5996 - DNA, 528 bp, Homo sapiens
  chr17:49021815-49022343
  hyper
cccgcagagggcagggaagccctggacctggtctgaccttgcgcgctagccccagaggtcgccgtgctctgctgtcggcgttcaggtgcccgcggtcgggccggggagggcagtaatcaagccggcccggcggctggcgaggggcgcgggtccagcgcgctgccctcggccgccgccctgagcggttatttataaccgcgggtcgcgttacctcctgaccttaagctggggcgggcgatccgcagcgattagcatctatctcctccccgccgcccgctgcgaacaaacacccctctgtgcgccctcccccgcccgccccgcgggaggccctgcaggaagcaggatgttgacccggagcctccctgcgctcctgcggcggccccgccacatgtgagtggcgggcggtggagtgcgggtgggggggaagcggggagcaggagctactcgtgtttgatggcttcccgagttgccaatgtcctggtctattctgagtgaccgccttatttacaatatagggctccccagccc

SEQ ID NO: 5997 - DNA, 48 bp, Homo sapiens
  chr17:59539943-59539991
  hyper
ctggctggggcggacccagaggtagagcgcagagtgcccgggacaggc

SEQ ID NO: 5998 - DNA, 80 bp, Homo sapiens
  chr17:7554512-7554592
  hyper
cgttttgtttctagacggtttggtggggggtgaagctgcattcataccccttcctcttgttattctcccctgctctgaca

SEQ ID NO: 5999 - DNA, 34 bp, Homo sapiens
  chr17:7554793-7554827
  hyper
gcaaccccccgccccgcgcccggactcgccccgc

SEQ ID NO: 6000 - DNA, 107 bp, Homo sapiens
  chr17:8901441-8901548
  hyper
cgtttctccaagcccagcatttactgtgcgagccacctgggggccatttttgttgcccgaggtggtgcgcctgcgccacctggtggactacgggaaagtagcagatc

SEQ ID NO: 6001 - DNA, 378 bp, Homo sapiens
  chr18:25756118-25756496
  hyper
cgagggtatgaaaagtacggaaggctccaggcaaaggcgcccccggggcgcatatagggcacaggcagccggacagagaaaggagcagccgcgtaacggaacttctcgcccgggggagatactaggcgtgagaggccagactcgttctacaggcaggcgctgaccggcagagactcctccgggcaagagggccagattttctttccaggtgggacgaacacagaatattgtgagggcaagagaagaagaaaaggaggcaactccagactgggataaagacaataggacagtagagcccttgagcaccgggaggcgcacgggtgcagggtggggtaaggtggaggcaagtcccgtaactaagacaccagagtgagaatt

SEQ ID NO: 6002 - DNA, 160 bp, Homo sapiens
  chr18:3012406-3012566
  hyper
cgctggcgttagaagtggacagagaggctctcagtacaaactgtatctgaacgtgttcctcacaaattaagatctgcaccgggggctggggggctttgagaaaactaaccacatttgaatccggtccacacagcttgaaggcggaggtacggggcaaagc

SEQ ID NO: 6003 - DNA, 122 bp, Homo sapiens
  chr18:30351074-30351196
  hyper
aacttgtgcccgaagctttgcttttcgcagttggcccagtttgggggagggggtaggaacaggggcccgaccagcgtgcggggtgtgcgaatcttagctctccaaaagctgggacccccttc

SEQ ID NO: 6004 - DNA, 295 bp, Homo sapiens
  chr18:31802381-31802676
  hyper
atcgaggcattcgggctgccccgtgcctcccgggcagcgatctaacgataaaacctgacagtgtcctggggaaaaccccacatccaccgctagcgctacattcgggctttatgccaataaggagacactgtagactatcgatcagactcgtctgctctcagagcgtgcggccgggcttccagcctggcctttaggcgcggtggcggcggtgggacacgcgccaggcgcccagagaaggacatgggacaatggcccagcccgaggacgccagacgccgccgcccgacccggggaag

SEQ ID NO: 6005 - DNA, 288 bp, Homo sapiens
  chr18:31804522-31804810
  hyper
cgaggcccgcgcccgtcccggggagcggctctgccaggaaaacggcccgaccagtgcccggcgcctgggctgcgtccgagcccaccttcttccctcgtcgtcgtctcccagactaaatcccggaaagggaaagcgggatgtttgcgcccaccgcgctgtagctggtcctgacacttgcaaaatggtcagtggctcctgctcggccaggctgagtgtgtgcgtgtgtgtgagcaagggagcgagggtgtgcggtgtgcagggggtgcgctgtgtgtgcgcgcgtctccg

SEQ ID NO: 6006 - DNA, 445 bp, Homo sapiens
  chr18:32558003-32558448
  hyper
atcaggagaagcctttgtcttaacccccaagcccctcctgctagtcctcgctgggtcagtagcgctgggagtaattaatattacgaacattagcctttccttcacctccgcaccagccaacactgctgtcccctccctgattgtcttctctatcacttgttcacatctccttttccaaaaaaagaagaacaaaaggaaaatagtgtagacccgctaggcaggaagaggtcactaaaaatactatcgtgctgtcaatgtagaatgaagggttaagcgctcaaacccgcgcccgcgcgcaccgaaacggaagaacttccttgattagcatagtatcgaccctggggccgcgctgcgaggcggaggttcggtcccagctggggtgaagtgtgcagaccggttgcgattgtggtcagacgcagcacctacttctaatctgaggacccgc

SEQ ID NO: 6007 - DNA, 80 bp, Homo sapiens
  chr18:44335955-44336035
  hyper
cgatacgattttgagccctccgaccccggagtccaaacaaatggccatagaactgtgggtctggaggacaccgctccgat

SEQ ID NO: 6008 - DNA, 78 bp, Homo sapiens
  chr18:45275733-45275811
  hyper
gcgatgccgcactgacccgcggacggacgggaggcctacggatccaggatggctccttcgactctccccacgcccccc

SEQ ID NO: 6009 - DNA, 401 bp, Homo sapiens
  chr18:47339758-47340159
  hyper
gcggcggccggaagcggaggcctggcctggggagggcaggaccccgaggggcgaggagaggaggagggggctgcgctcacctcggagcagagccatggcggctgctgggtcgtcggcggcgcgggtctgtggtgtgggggacgctgagcggccgctcgcaatcacccagatttcaagagcgtgggtggcgccccgagagccacgcccctgccctttcacctacttcctggggctccttggcggggtcccagcgtaagatggtcctaccccacgcgtagcgctgcccgcctcaccccagcccgagggagcccaggggacggggctcggatagaccacaacgcgccttgagagcggactctttcctcacatcctcatttttagattttctccgtttccaaacc

SEQ ID NO: 6010 - DNA, 50 bp, Homo sapiens
  chr18:55104759-55104809
  hyper
cgcggggaaccggcggccaggatacaacagcgctcctggagcccatctct

SEQ ID NO: 6011 - DNA, 280 bp, Homo sapiens
  chr18:55105185-55105465
  hyper
gcccgcgggaggggacgggtagaggcgcgggttacattgttctggagccggctcggctctttgtgcctcctctagcggccaagctgcgaggtacagccctctattgttctaggagcacagaaacctcctgtgtgggcggcgggtgcgcgagctagagggaaagatgcagtagttactgcgactggcacgcagttgcgcgcttttgtgcgcacggaccccgcgcggtgtgcgtggcgactgcgctgcccctaggagcaagccacgggcccagaggggcaaa

SEQ ID NO: 6012 - DNA, 57 bp, Homo sapiens
  chr18:55106090-55106147
  hyper
cgggaaatgaactggagactggctgacagttcttaacattttgtcatagatcccccc

SEQ ID NO: 6013 - DNA, 138 bp, Homo sapiens
  chr18:70210281-70210419
  hyper
cgaaggaccgattccaacgacggaatcccaggcttgggttattctccagctctggtttccagaccacggggattctctctttctcagcggggcggcagcccctgcaggtttctgcgaacttacgcgcccgtctgcact

SEQ ID NO: 6014 - DNA, 53 bp, Homo sapiens
  chr18:70210508-70210561
  hyper
cacagcctcccattaactcttccagtattctttctaagaacagagaagttggc

SEQ ID NO: 6015 - DNA, 65 bp, Homo sapiens
  chr18:70211724-70211789
  hyper
cccgggcctccctgccgcaggctgcggaccggcggactccgacagaagacgggggagtcctggcc

SEQ ID NO: 6016 - DNA, 183 bp, Homo sapiens
  chr19:10443523-10443706
  hyper
cgcgtgatatggaggggcgtactctccgcagtcctgaaacttctggatgtgaggtcccgccaccctgtggtagagtgggtggagaaaagcatcatccaagcagggggcaactggtggtccaatgtaccagcccattcacaattccccaacaggaccaaagctgtccgcccccttccattcccc

SEQ ID NO: 6017 - DNA, 166 bp, Homo sapiens
  chr19:11805261-11805427
  hyper
cggaccgtagctccttccacgcatgaaccccgcacacgagtcgggattccccccatgaccctcccgtggcccccgcacaatctggagagacgcggggctgcgggcgcggagctgcccagagaggactcctgcccgggcccgcagtcgccgcgaagggacgggacag

SEQ ID NO: 6018 - DNA, 369 bp, Homo sapiens
  chr19:11805597-11805966
  hyper
ggcccctcacgctcaccattttccgaattcctccgtgtcccgggggcctctctgcggctcccacgaccagtgcaggtccctgtgtgacagaggctgccgcagactctccagagtgcctctcagcgacagagacaggagcccagcgaagtggcgtgtagaagacgccgcgggctttttcaatctcgcaccctcttagctgaagtgcgcctgattgacagttcccacgaccccgccccacggccctgattggatagtgcgacagatcccgccccctgacgactgagttacagaagcgatctcacgctggggagtggagactgatgaacgagttcttgacacagcccttggcagggcgggcttcttccctgc

SEQ ID NO: 6019 - DNA, 161 bp, Homo sapiens
  chr19:11909173-11909334
  hyper
cgaccagggcgcagggagtgagcttagccttagaaaggctgtagctaggattaatcagccgggctctgcagggctccgttacccagggcttaccctgtcactcagggctgaggggcggagcctggaaccccatccaatcaggggccctgggacggggccct

SEQ ID NO: 6020 - DNA, 61 bp, Homo sapiens
  chr19:11909732-11909793
  hyper
ggcgtcctgtcccgtccctacgcggcgactgcggccccggccccggagtcctctctgggca

SEQ ID NO: 6021 - DNA, 50 bp, Homo sapiens
  chr19:11959378-11959428
  hyper
cgagtgcaggaagcagctcgtgtaagcttagagaagctgttgctagaatc

SEQ ID NO: 6022 - DNA, 255 bp, Homo sapiens
  chr19:12075818-12076073
  hyper
cccattgtttatccaggcacagagtgggtcgcattcctgtcctcacctttgtccttgcgcagccggtggttgatatccgctgtatccatccccgagagggacctggtacctctacccaggtttctatcgctctgtctcctgcgctgtgcccttctgtagtcacaggagctgtagagaggaccccaggacatctgaaagccaggaaatggtgcgtgtgcatagccggttgtcccgagacggggtagaggctgcctg

SEQ ID NO: 6023 - DNA, 31 bp, Homo sapiens
  chr19:12163025-12163056
  hyper
cgggattgcttactccagacttcgcggggtt

SEQ ID NO: 6024 - DNA, 118 bp, Homo sapiens
  chr19:12163331-12163449
  hyper
aatctggggagacgcggggctgcgggcgcggagctgctcagagagggagccggggccggggccgcagtcgccgcgcagggaccggacaggacgcccggggtcccggctgccggcccag

SEQ ID NO: 6025 - DNA, 227 bp, Homo sapiens
  chr19:12551198-12551425
  hyper
cgccaaccaggttgaagaccccacgagggagccctctcagcagaatgcggtttcttcacctcctgtcccaggattcacccctcacttccccaccaaccaaggacgctacacccagccgcccccgtccagaccccaaatccctcagggaggcggatctggggtgtcctcccctctcctcctgttaaaccgtttctgctgcagccctcggcgtctcggtgcagtgagtc

SEQ ID NO: 6026 - DNA, 391 bp, Homo sapiens
  chr19:12551485-12551876
  hyper
cggagctgcccagagagggcgccggggccgcagtcgccgcgcaggaacgggacaggacgcccggggtcccggctgcatgcccagccccaccctgcggccgagggccgacctacgccagggggacccgggtccgtagatcccgaagtcgcccttggggaggcccgggtccagccacagccgattacggccggttccacctaacccctcccccgcctcgggacgccggcccagcacacgcaccatttcccgacttccgcggtgtcccaggtcctaccgacagctcccgctgccaatgcgtgttccagccagacaaaggctgcctcagaacttccaggtcgtctctcagctacagaacccagagccgagcgcaggtgggtggagcagacgccgc

SEQ ID NO: 6027 - DNA, 694 bp, Homo sapiens
  chr19:19976556-19977250
  hyper
cggctggggaggcggggccttaggcattatccaatgagggacgctgggccggaaaccgtccaatcaggcacgcagctggagcgaaccacatggtttctgggggcctttgtttctcgctgcagcgggagctccaggtttatcctcagtgttctgtgtcctgtgcttatagaggcccgtcctctgtggccgtgtgacctgcaagtattgggagagccacagctaaaccccgggacccctggaagcctagaaatggtgagtgccgggtccaacgtcccgagagaggggagaggctgtttggaacggtgggaagtggctctggcgggactctgcttcctcacagtcagctccacaatctgccgccggagttctccctgcccagctcggcctcagtccccttcagccataagatggcggctgcggtgacatccggggcccggcacagtgattgtgccctggcctggagccctctttcagcagctctgcacccgcagcaccgcgtctctcccagatcatgcaaggaccacgggagggtcgtcaggggagaatcctgactcggttccctgcgggttcatgaatgggaagagctttggtccgtgaggttgttagaaacaagcgcttggtgccgcaaaacaacacaaaacaaaaaactacccagcacttagaaaatttcacaggaaggcatatttacttctga

SEQ ID NO: 6028 - DNA, 35 bp, Homo sapiens
  chr19:19977294-19977329
  hyper
aagaaaggaaggaaggttttttttttttttgaggc

SEQ ID NO: 6029 - DNA, 118 bp, Homo sapiens
  chr19:20011652-20011770
  hyper
cgggaccttaagaattatccaatcagggacgctgggctggaaacgtccaatcaggcaagcagccggaccgaacagggcggcttctggtttggcgggtcctttgtctctcggtgcagcc

SEQ ID NO: 6030 - DNA, 61 bp, Homo sapiens
  chr19:22019028-22019089
  hyper
ccgtgcctgattggacggtttccagcccagcgtccctgattggataacttctaaggtcctg

SEQ ID NO: 6031 - DNA, 130 bp, Homo sapiens
  chr19:23432833-23432963
  hyper
cggggaagagacaagacgcccgggggccggctgtcagcgaagccgccatcttatggctgaaggggactgaggcccagctgggcaaggagaactcagggcgcagtttgtggagatgactgcggggaggccc

SEQ ID NO: 6032 - DNA, 121 bp, Homo sapiens
  chr19:23433023-23433144
  hyper
cggagccgccactctcaccatttctaggcttccaggggaggccctggcgtcttagctgtggatctcccaatgcttgcaggtcagagggccacagaggctgggcctctaagagcaggggaca

SEQ ID NO: 6033 - DNA, 118 bp, Homo sapiens
  chr19:23433296-23433414
  hyper
cccttcaggccttaagtgacagaagacctgaccaaacgctggactgaatgaagaaagagtgacagcctaagctgcagcgttttcaggcagggcttcctccctgagcttagcccacccc

SEQ ID NO: 6034 - DNA, 106 bp, Homo sapiens
  chr19:23456510-23456616
  hyper
cgtctcaaacaaacaaacatgtttaacaagagactgggagtctcacctgccacagctccttctacgcacacacgagtcggaattctgccctaatgacccgcctggc

SEQ ID NO: 6035 - DNA, 216 bp, Homo sapiens
  chr19:23456881-23457097
  hyper
tcccagcttccaggatgtcctggcatcttagctgtgcgtctcccagaacctgcagatcacagggcaagaggctgtgacagtcaccgggggctcccgaggtggaggacgtaaaacagcagagaccgatcccaagctgtggcgggagtgagatacaaaggccccaccaaatgccggaagccacgccctcctctccaactgggcggttcctgcgctagc

SEQ ID NO: 6036 - DNA, 39 bp, Homo sapiens
  chr19:23577711-23577750
  hyper
cgcggtgacgcccataaatttttaatagaaaaaaagagg

SEQ ID NO: 6037 - DNA, 68 bp, Homo sapiens
  chr19:23578240-23578308
  hyper
cgagacctggaaactccggcggcagcgagagacaaaggcccagccacatcccggaagccgccctgtcc

SEQ ID NO: 6038 - DNA, 702 bp, Homo sapiens
  chr19:24216103-24216805
  hyper
cgcactaatgctgaacggggcgggggcagggggtgggggtgggagtggtatggggagagtgccggtccttatccaatccttggcgctggagcggcaaccgcccaatcaagcgcgcagttgaagaggagtgcatggtttccggcatttggctgggcctttgtctctcgctcccaccagagcttggaatccgtctctgctcttctgcattctccacctcgggagcccctggggactctgtgacggcctctgttgccctgtgatctgcaggtccggagagacgcacagctaagatgtcaggacatcctggaagctgggaaagggtgagtgtgcggggttgggcatcccgaaaggagagagcgggctgtgaaaccggcgggactgccttcgtcaccgctcccgggtttccgacctgaggtccctgctggcgcagttcagccccaggcccctctggccgcaagatggcggctgggcccgcagccgggatccccgcgttcagccccgtccctgcggcgcccagtctggagctccctgggcagctctgcatgcagccccgagtatttcccagattgttcagggatgccaggcggatcatcagggcggaatcctgacttggtgtgtgcgtggcaggagctgcggcaggtggggctcccgagtctcttttcttaaacattttgtttgtttgagacggagtcttgccctgtc

SEQ ID NO: 6039 - DNA, 601 bp, Homo sapiens
  chr19:2461998-2462599
  hyper
cgtgctgttccatccgccaggagcgccgtttcctgcctgactgcgcggccctgggcctcagtcttgcgctctgcaaaccggggtctcgaatctaccccagccctcctgtctcggcgctggggaggggcttcgggtgcccagagccatccccgcgggacccccagggactggactccaagtcccagaaagccccgcgcttcccgtgggtggggcccggggctttccccctcccagcgcgcagtttgggaggcgctgggcaattttcaaattttggcgccgaacgggaggggcggtgacagctgagaccgtggtccccccgggggcacccacgcccaggctgctgctggcagctgcgcccagagcccgaggtctggggcatcccgcaaagctgccccgtccattccgaggggcctcccaaggcaccacacgcgccagggggctccgggcccatttccattatggaaaactgaggcacaggaaggttagggaccggtcggggaatccgcaccaggggcgtagcggaggcgggattcgaacgcgggaccctctttcccccgggagctagaaattagtgaccaattggctgggcgcggtggctcac

SEQ ID NO: 6040 - DNA, 73 bp, Homo sapiens
  chr19:2702445-2702518
  hyper
cgaccccctaagcgcagccccgtccccaattccaaccccagcctccagttgcagcccgggtccccagacccag

SEQ ID NO: 6041 - DNA, 770 bp, Homo sapiens
  chr19:28284358-28285128
  hyper
cggggagatcccagctactagaggacgcccgttccaatggcaactctgccaaggcgcctatgagagcctcttggcttttacctggtctgcgagaaatcaaactttgggcacaagtcatgaagccgacaagcccgggagacacagtgtcagaattacaaggtgagatcagccgcccggccaagctatcttctcgctagcaggtgaggcccgtgaacagccaagctccccttggcacggcggaaccgcagtggacgcgtggaggggctccgtagaggagggacctttgcttgggatgcggggagctgtagtctcttatctgcacccagcttgttagttgtacgcctgcaggactacaatctcagcacaaagcaggattgtagggcggtgcggatccctggagggagacagcgcggtgcgctcctgccggccatgctggctggggtggtgtcttaggcggttccagccgttagtcacagggcggccggactacaatcccagcatacaacgggagtggaggtggtgaccttgagagagggcctgtgctgtgcgcgcctcgcggggcatgctgggagcagtagcatcttagctgcttccggccgctggtcgcagggctgcgggactacaatcttcgcatgaaatggaagagagggtggtgcggatagcttgaggaaggtacggataccttgagggaggtatggatacgttgagggaggtacggatacgttgagggaggttacggatacgttaagggaggtacagcagcggtgcgc

SEQ ID NO: 6042 - DNA, 105 bp, Homo sapiens
  chr19:37096594-37096699
  hyper
taggggtggcctcctgcgcccaacctgctgcattttaggtgcttgcctctctttgggatgttgtggccgattgtgtgtgaaaagtgaacggagtagtgttgctgc

SEQ ID NO: 6043 - DNA, 156 bp, Homo sapiens
  chr19:37329462-37329618
  hyper
cacatctgctgccgagagcttccagaattccaggccgcgtttaggaagcttcagcggaggcatgcaggctgccctacctctgcaaaaggctcccagccctgggaacaggacagtaagcccaggccatcttaggctggaagtaaccttggtcccgac

SEQ ID NO: 6044 - DNA, 142 bp, Homo sapiens
  chr19:37342189-37342331
  hyper
atgccttaattttgaggtttgtggctgcttccgtgtgtgtgtgtgcgcgcgcgttggtgatattgttgatggagggtgcgtgtgaatttgttgtcattgtgaccccaaggtgtatgtcactgggaatttgagagatgcccac

SEQ ID NO: 6045 - DNA, 42 bp, Homo sapiens
  chr19:37463952-37463994
  hyper
cggcttcactggaggcggggaactggacatgactgtgagcgc

SEQ ID NO: 6046 - DNA, 101 bp, Homo sapiens
  chr19:37663394-37663495
  hyper
cgtcacaatcaacaacggacgccacagaaccccatcaccgaagcctgaaaccgcaatcactaactccacaggcaacctcgacaccccctattactggctcc

SEQ ID NO: 6047 - DNA, 52 bp, Homo sapiens
  chr19:37663804-37663856
  hyper
atatccattccgtagagcagaggaattggccgctggcagggtttcctagagc

SEQ ID NO: 6048 - DNA, 38 bp, Homo sapiens
  chr19:38182720-38182758
  hyper
cgagtaaactgacgtcctggaagaagcacccttatttt

SEQ ID NO: 6049 - DNA, 188 bp, Homo sapiens
  chr19:38210751-38210939
  hyper
taggaggcgagtctgagtagaaactgatccaggtagcctcggaagggatcacctgctggatgggtgtgagctcctcagggtggggcgccgaaaccctcatggctcctgaggtagagccggcctccttggtaacacatgggactgggacttttaataccacccgacaggcccagcttgtctcgtcaagc

SEQ ID NO: 6050 - DNA, 989 bp, Homo sapiens
  chr19:40561486-40562475
  hyper
cgtacgaaatgagaaggaaataaaaggaggaggaatcggtctgagttcgaagctggttcctggggacagatctctgagggacgctgggttctcaacatgtagctgccctcctgggggaccctcaagaggcacttccagctctcatattcccaccccgagtccagatctgcgccttcttgtgcaaagcttcattctcggttcaatatctaacctccctactggggacattttcattcctctgctgcagcctctgcagctttgaaggggaaagacggaggaagcagcaggagcctagtaccaccggcacagtgacactcacacagccccagcaaaacgcactgcgtccacacgccgtcccggtcctgtgcacagggcctcacgcacacactcacacagtcccctccgtcactcaagatcgcgcaatccccatcctttgatgcccgcgcacacgcacgcctaaggatctggcagattccgtctgcgccccgggttcctcctctgagcgcctcgctctcgcccacccgcactgccgggtcggtcaggttcgagtcccagtccacgaagacctcccgcagccaccgatttcttcctaggacgtgaagaccttacccagctaggtcgtcaaccccaggagacaggaagtggaaccgctaattccggtgcggtggcctctgggaaatacagtcctgagcagaaagaacctcagaagtcttggtctatggtctgttcaggttgatcccagcatacattgggggctcctaagggacccgagcctaatggatttgtgggagttccagaccgtggggtgcagaggttgcggccacgggcgagaatccccatctgagaggagcgttgctgttttcggtgcgtcagggtaaattaccttttctctctatgcaaaagaatgcaaatgagcagaacttttaaagaagaatttaaagtaaaattacgtcaaaatgtagctgctttgacctcttcgtctcagatcc

SEQ ID NO: 6051 - DNA, 270 bp, Homo sapiens
  chr19:44529438-44529708
  hyper
agtggagtccacacgctctgtggaggctcgagcacttccggtccccaactgtgacgttgctatttcatttaccacagtagtttgagtcatttccacatcttgcgagtccttccgaacgagtctcctttccttggggctcgcaaccacccaatgatcgattcaggagaaaagaagcctgggcggagagcagaggtttggaggggcgcgggcggggattgccgttccagtcagctgagccttctggcgtcggggggctctgctagggtctca

SEQ ID NO: 6052 - DNA, 48 bp, Homo sapiens
  chr19:44529774-44529822
  hyper
tacgtgtgcagcccctttcagtgtggtgtggagtgtcacttaatgtcc

SEQ ID NO: 6053 - DNA, 68 bp, Homo sapiens
  chr19:44711963-44712031
  hyper
tctcctggcgttccgcagccagcctctcccacctacttgccagctctgccacttactagtgttataac

SEQ ID NO: 6054 - DNA, 57 bp, Homo sapiens
  chr19:46929939-46929996
  hyper
cgttcctcctgggtctgcgtgagttttcttcaactccagtaagagatctgcaaaacc

SEQ ID NO: 6055 - DNA, 78 bp, Homo sapiens
  chr19:52531282-52531360
  hyper
cgtaaagggtgactcacaagggccccagacccagacagagtcggactcgtcgctgatttcctcagactcttcatccct

SEQ ID NO: 6056 - DNA, 316 bp, Homo sapiens
  chr19:52800378-52800694
  hyper
cgcccccgcccccgccccgctcggacccctccgctgcgcgcgcagtttcccacaaacccggaagcggatcgcgtggagtgaaggtcacgccgcggcgcgtgagtttccctttgtgtaaattaatctgcgcttcccaactcccccgcgcttctgtacccgggatctgaggggccacacagaccttgaaatcctcgcaccgctccctctaccccgaccaaattcaggcgtctccgtgagagtcaggcggtcgcttccctgtgtgtttaaatcgctcggcggcgggtcctgtcccccgtccttctgccacagggccatg

SEQ ID NO: 6057 - DNA, 89 bp, Homo sapiens
  chr19:52800915-52801004
  hyper
gatccagaccctacctttaccctccttgatacggggccccgctactccccaggcctcctcttcccagacaccgcttctcctaaccctgc

SEQ ID NO: 6058 - DNA, 264 bp, Homo sapiens
  chr19:53104083-53104347
  hyper
cgctcctccctggcctgagcactccgtcccgcatcccaggcggtggccctagggaagtctctgaagctgagcacagggtggactctgcccccaccgccgacccgccctccccgaccccgagtgaatggagaatagaaagggagaggatttctgttctgtcctgtgggccctcagtatgaaatcgtagttctgcccaggcaggactttgcatttcacattctagtttgcatccccgttccagacaattccagggcttttgactca

SEQ ID NO: 6059 - DNA, 62 bp, Homo sapiens
  chr19:53105086-53105148
  hyper
tgctccccaggtctcctctccgccgtcaccgcttcccctgagcccgcgttgggaaggtgtcc

SEQ ID NO: 6060 - DNA, 61 bp, Homo sapiens
  chr19:53141353-53141414
  hyper
gccctacagcagaaagaccggggacagcccagcctcagggcgactttaaacccaaaaggaa

SEQ ID NO: 6061 - DNA, 273 bp, Homo sapiens
  chr19:53400792-53401065
  hyper
tgggttgagaaagaggggccgcaatttccaggtctgtggggactcaacgtccccggtatagcagcaccacaggactgggaagcacacataaaacagagcgaaactcacgcgctgtggtgtgaccttcagtccctgccatccgcttccgggtctatgccaatcagcgcaggacagaggccaggcctgggcgggacccccgagaaggtaggcggggcctggactaggccgggatgagacgcgaagaggtgggcggggcctgaacaaggccggggc

SEQ ID NO: 6062 - DNA, 149 bp, Homo sapiens
  chr19:53465713-53465862
  hyper
cggccaccctggggctgcggggctgcaacgctgcgctccaggggccgactagagcgaggctgggaagcgctcttgcccagggcaagaatccagctccgggtgaggacttgaaacagcgcgaggcgggaggacgcgtcagaaagggtttt

SEQ ID NO: 6063 - DNA, 263 bp, Homo sapiens
  chr19:53466513-53466776
  hyper
ctagaatgcgaaatgcaaagccttgcctgagcgaaaggtacaatttcatgctgacggtccacagaacagaatagaaatcctctccctttcaattctccattcactggagtgggagagtccacactgtgctcagctcctgagacttccctagggccaccgtctggggtgcggagcagaggagtgtgcttaaacacagcagggatgcgggcggggtggcaggagtctggggtccccgctactcaggaagcaggggcgagaggatc

SEQ ID NO: 6064 - DNA, 428 bp, Homo sapiens
  chr19:53606605-53607033
  hyper
tgagtctacacagaggaacactcatacgccatggtgtgatgcttgctccgcacgatccacttccgggtctgtgggcaactgcgcgaaggaaagcgaccgagcggcccggggcggggtccgagatgggcggaaccggaaaagggcggggcgttgagagagccgggctgaagcaggggccgccaggcagggaccccagggaaggaacggggaggagccaccggggaggggtggggagtgaccaagtggagggacccgggggcgggccggggaggagccgccggggaagggcggggaggaaccgcgggaagggaccgcgggggaggaaggcgaagggaccgcgggggagggaggcagagggaccgccaggaagggacccgggggagaggcggggctggacgggacacgttagggtctgcgatttcgtgtga

SEQ ID NO: 6065 - DNA, 111 bp, Homo sapiens
  chr19:53607111-53607222
  hyper
agcacagttgtgtaggttattttggaaaccaaactgctttcctcttagaatggaggcggtttatgttgaaagcattttttgctagcgcgtttacccagtaatgttattgac

SEQ ID NO: 6066 - DNA, 93 bp, Homo sapiens
  chr19:53934941-53935034
  hyper
cgcccaggcagggccttgcattttacattctagtttgtatcccgttccagacaattccagggcttttgagtccatgcgtcagccttcctgggc

SEQ ID NO: 6067 - DNA, 134 bp, Homo sapiens
  chr19:56112791-56112925
  hyper
cgtagaactatgtgtcccattttgcaaaagtcttgattaaggcttagagaagcgaacaccttgcccaaggccacgcagagagtaaagatttgaacgaatgatgtcttgactccagggcccaggctcttaacatc

SEQ ID NO: 6068 - DNA, 57 bp, Homo sapiens
  chr19:57702696-57702753
  hyper
cgccgtgaagcgttcctcccgttgttgaacacatgaggaaaactacactacttagaa

SEQ ID NO: 6069 - DNA, 39 bp, Homo sapiens
  chr19:57703385-57703424
  hyper
cccaggtatcccctggatttgtcttcgcagtcgtcgttc

SEQ ID NO: 6070 - DNA, 71 bp, Homo sapiens
  chr19:57831543-57831614
  hyper
cggggcgaatatccccgcctcctgacctcaattttcctaagctagaaaggacctttcgaccctccgacttg

SEQ ID NO: 6071 - DNA, 461 bp, Homo sapiens
  chr19:57874412-57874873
  hyper
cggtgtagccgttgagaacttgctgtgcttcacaatccgatatcataggtccctcacatttctgtgagtatcctagaccttacttcaagaaaatctggttatgtcgcctttaagagcaacccaagccccgtcctgtccgtggagtccggcactctgtttaccagctcccctgacggtgccactgagcctctatccgccatataaggactgaccaacgctctaaggcaagtccagaagcggtgtcgaaacttcataacccagaagacactgcggttctcggcagcgcgactgacccaatgaatgtgcaggaaggaacctttgcgtgcgtgcgtgcgtgcgtgcgtccgtcctcgtgctcgcgcatcgtaggagggcgggacttccggcgtcctcttgccgtggttgatttgattttctctggtgttttcactagttccggcctttggcgctctatgacgtca

SEQ ID NO: 6072 - DNA, 218 bp, Homo sapiens
  chr19:57875005-57875223
  hyper
gcctttgtcgcccccgcccctctcttccctggctggacttgcggagtccccgccgaagaacccgaggtgggtgccccgtcccaggcccccccccacctccgcccgacccctccttccagtgctgaagcccatagaaggggccctgcaggtcaggccccttgtctcgaagagaggggcgttcctgtgtggggtccccgtatcagctggtttgatgcagc

SEQ ID NO: 6073 - DNA, 43 bp, Homo sapiens
  chr19:57875252-57875295
  hyper
cagagcatggaggtgctgccaagtgggccgcgtcggggagccc

SEQ ID NO: 6074 - DNA, 63 bp, Homo sapiens
  chr19:57998890-57998953
  hyper
cgttatctccatctccatcatcatctccatctccgtctccatctccatcatcatctatcatct

SEQ ID NO: 6075 - DNA, 170 bp, Homo sapiens
  chr19:58144201-58144371
  hyper
cggggagctggaagaggcaggaaaaggagcacactcgaagtaacgtttattggggaaaaaaaacgcctacgtgtaaatggacccgcacagctcaaacctgtgttgttcaagtgtcaacctacttaagacctcaaacaccgaagcccctcagtcgccctggaaggcagcag

SEQ ID NO: 6076 - DNA, 210 bp, Homo sapiens
  chr19:58144745-58144955
  hyper
tcccggtccagctccgcccacagactcggatggcgaccgcactgagggacccggcttcggtgagcgctgcgatctccgggcctcccccggccgagattcttaagtcccaagtgagaggcaccagctcacgtctctgtagcacagggtcggggacactgaggctcgtgggtggggcccctatttctgacatccgatgtggtgggcaggggg

SEQ ID NO: 6077 - DNA, 627 bp, Homo sapiens
  chr19:58258088-58258715
  hyper
cgtcgaatgacagcgcgtcagagccaatgagggctcaaaataaaggcgtttccgcggaaacagtataaaggtgggacttccggcgtcctctactagtggccattttgattggtgttgggtgtattttccagtgagagaccgcggagtgttgggtcgtgtagaagtgactgaacccagaaggtggagacgagacgttgtcccgactgcacagaggctgctctgcagctccttaaaggcgctaggcgtgacccgcaccaaggccgggatcgggaccaccgtgcccgggtacctgcactgctcgccccctcctttcgaccccgctttccccacccagtcggatggcggcggccgcgctgaggcccccggctcaggtaattgtggcgtcttccgtgccctcaggtcacctcatctttacctaagtccaaaagcagagaggaagcggcgcctgctcaaggttttacaccctgaacccggcgtcgggacactgaggcgctctctatgggcccccgtttttgacacccgcgggatgcgctcaggagagctacaggcacagggagcggtgcaggcaaaggcctggagatgaactgagccgagaggatcgtaacctagggtccacaggcacctgtc

SEQ ID NO: 6078 - DNA, 146 bp, Homo sapiens
  chr19:58280766-58280912
  hyper
cgtatggcctcttctaagatgggagaccctcctccgcatctggacctggagtcgccatttcctagcgcccctcgcagtggagcttgcccctttcttcggaaagtcggaagaaagccaccttaagcgctgcccatgtctgggaacta

SEQ ID NO: 6079 - DNA, 176 bp, Homo sapiens
  chr19:58281371-58281547
  hyper
gggtgggatccctgtttccgacacccagttgatgcggtcggcagagcgagactggcggagggcaaaggcctgcaggcgcgactgaggcaggaggatgcggaacacggggacatcgtgtgtctactgggaaagaagtgtgatacggagttatttctttttttttttttttttgagac

SEQ ID NO: 6080 - DNA, 338 bp, Homo sapiens
  chr2:105489278-105489616
  hyper
attaaggagaggactagggaatgggatcacctatcgtcaagtcacttattttagaggggtttggagaagaggtgaacttggtggtggagagaaagcgcgctccctaatcacctgttaaacagttattttaaaattagctgtcgcatctgacgccctagggtccccaagggccttttcataagggagtctgtttaacttcactggctttgggagcgagaaagtttgccctttgtttctggaaacacgcccacgcagtacgcttaggtaaccttacactgaacaatttccttggagcggctaaaaccgcaacaaccaaacttgcacctgcgccattctct

SEQ ID NO: 6081 - DNA, 112 bp, Homo sapiens
  chr2:105490035-105490147
  hyper
cgggccaggagcactttcacaagtggttagaaagtcttgggcgccatctaacgggagcagcaaaaagttgacgctgggtggaggttaggcccgacaggagcccaggatgggc

SEQ ID NO: 6082 - DNA, 205 bp, Homo sapiens
  chr2:111874987-111875192
  hyper
gctaggtgtcagagttgggaatgtctaaaacaaaaaaggcttccgagggttattcatggccaacagtttccacaggagaatccaaagggaaactagtttccggggccgctgtgtgtgcgggtgcttggtgggctgaaagctgctgtcactagatggctgtaagtgtgccaacatctgacctgtcccattgtgttgtgttttgcag

SEQ ID NO: 6083 - DNA, 138 bp, Homo sapiens
  chr2:111875611-111875749
  hyper
ccctttccctgaaacccagcctggcctgactgcaacctctcccaacttcagtgccggatcccctagacaatcagggtgggctccccgctgcgagcgcgccccacagccgggtgccgccaaaggtctcctgctgttagc

SEQ ID NO: 6084 - DNA, 31 bp, Homo sapiens
  chr2:118981062-118981093
  hyper
cgcctggcgtgaaaagaaccaagaacactga

SEQ ID NO: 6085 - DNA, 49 bp, Homo sapiens
  chr2:127782995-127783044
  hyper
cgaactccacgacatgggaggcaggggcgggccttttgcaggggaagga

SEQ ID NO: 6086 - DNA, 32 bp, Homo sapiens
  chr2:131484816-131484848
  hyper
cgagtttccctctcccagggaatctgcattct

SEQ ID NO: 6087 - DNA, 218 bp, Homo sapiens
  chr2:136876145-136876363
  hyper
tagggccaagcttccaacgccattccccgcgctttcagcagacgcagcccattcaggaggtaaaaggagtaaagatccttccttcggaggatgtagctatacttgcacattcacagcatcactagggtcaggtgcagataattaggagatactttcagaagaaggtaggatttggcataattctggagactgatcagatgtagatatgtattgctcag

SEQ ID NO: 6088 - DNA, 35 bp, Homo sapiens
  chr2:145275891-145275926
  hyper
gttgaaactgtcaaaacttggagaagggggacctc

SEQ ID NO: 6089 - DNA, 51 bp, Homo sapiens
  chr2:149632592-149632643
  hyper
cggttccggcttgggcagccagaccggacttgcaggctcttggaggtcgca

SEQ ID NO: 6090 - DNA, 115 bp, Homo sapiens
  chr2:149645382-149645497
  hyper
cgccctccccacgctagtagtacgcttcggttactttgcacttctccgtagctgctttacatgtttgcgttttgaatgttgttgaggaaagatgcgaaaaagaatgtgtgctgga

SEQ ID NO: 6091 - DNA, 64 bp, Homo sapiens
  chr2:149645987-149646051
  hyper
cctgtggtgggaggcggccactccgcttggcgccgtgagggaaaccaaggaaaccgtctttgtc

SEQ ID NO: 6092 - DNA, 109 bp, Homo sapiens
  chr2:154335663-154335772
  hyper
ctgcccccctgacctctgggcgaatggaaagtggcgatgaatcgcaggtgccagatggtgccggctgaggcacccgcccactgcctgtgcttgactccgactcgcctgc

SEQ ID NO: 6093 - DNA, 61 bp, Homo sapiens
  chr2:155553956-155554017
  hyper
cggaggtgcaattcaggctggtggagcagcgggggaaggcagggacaggcggggctagcgc

SEQ ID NO: 6094 - DNA, 631 bp, Homo sapiens
  chr2:155554076-155554707
  hyper
cgcctcgcatcttccacccggggccaccgaggcgctgacaaggagtgggggaccgaagaaggaagaggcagaggaaaagctagagcggcgctactgtttaacctgaaagtctgaccggcagcccaaggctcgaaccccgtccagcagcaccgctgtcgcctggaaggagggcacagcgccaaggaacccacgagcccccgctcgagtcattctgtgctctgtgcgccaaggatctttctggcagggacagcgcggtgccctcagggaggtgcggagcttgggggacctgcattggcgcccatcgtggtacaccaggaaaagtgggaacgaggaaaacagccgtgagcgcagagtgcgaggccaggctgccgctaccgcccgctgcgccgcctcctgccctctcccgctgggtgagtgcccaggcttcgcgcactgccgtgtctcagctgagcgcgggggcggcctgcgggcccttgagggtccgccggagggccccggtggcgcccgcggaaactcggcggtcgggggacgccaggcggacaggtctctggagtccggaacccgggaatctgagcccggagggcgtgggtagggggcgttgcaccagtgcccggcagacatgcctttgggc

SEQ ID NO: 6095 - DNA, 205 bp, Homo sapiens
  chr2:165873413-165873618
  hyper
cgccatctctcccttttcatagttctacgttgaggtcgtcctgagtttgtttttaaggtattttctgcgctgctacacactgtcatttcacgtgagggcagcagagaggcagcgtagaagcccctgaatagcaaatcagaagagcccgaagctcaaattttgggcgtagtgttttcagaacacctcttcaaaaattaaatcacac

SEQ ID NO: 6096 - DNA, 89 bp, Homo sapiens
  chr2:168150962-168151051
  hyper
ctttgcgctgctgcaaatggatggtgctactgggccagatccgaatctccgtagttcagtgcagtgggttctccatccctgctcaggac

SEQ ID NO: 6097 - DNA, 86 bp, Homo sapiens
  chr2:173099596-173099682
  hyper
cgggggacactggggggagcagcggcgggcatctggaggcatcgggggacagcgggggacattgaggggcagtgagggcggccgag

SEQ ID NO: 6098 - DNA, 85 bp, Homo sapiens
  chr2:176975945-176976030
  hyper
cggttaaaatgtcagtgccctaatagtgtgatcgttccatgagcttaaaactgttttttttctttctgtttccatctatttttta

SEQ ID NO: 6099 - DNA, 34 bp, Homo sapiens
  chr2:182323095-182323129
  hyper
accccaccatagggcaagtcctggaaagattcac

SEQ ID NO: 6100 - DNA, 72 bp, Homo sapiens
  chr2:182818959-182819031
  hyper
cgcgccccactacccgctaaccgcctcccgccacacacacacacacacacacacacacacacaccccgcgcg

SEQ ID NO: 6101 - DNA, 353 bp, Homo sapiens
  chr2:185462268-185462621
  hyper
cgggctgatggctgccttggacccttgaaaaccaaccagaaagtctgtctccagggaatgctgcagacccggttccctactttccgtgacaaacccattagttcgtgtgcagatttttccattcaggtcgcttctagggcgaacgcttttgttcgctaccactctgtagtgcgagaggaactagagaggcatgtaaagcaagcttgaggcagcagcgcctttgccgcaaagcatccctttcccctcagctttagcaatttaggaagaactgaggttctcaggggaggtggggtgagaggattgccaggaggagggacatataaatcaggagtccctgcttttaccctctactc

SEQ ID NO: 6102 - DNA, 138 bp, Homo sapiens
  chr2:19550409-19550547
  hyper
ctggagctggggggagccccgccttgccccaaggagaagagccccggcggcctggcttctaactgtgggaaaactagacaccccagggaaggttcagcttatggaaggcggactcgaatttttcctcctaagcgtccc

SEQ ID NO: 6103 - DNA, 274 bp, Homo sapiens
  chr2:19550611-19550885
  hyper
cgggtgcagagcctcgatcctaggaggggacaagtcccaagcagagaattgtgtctgagggaccctaagggagggagtgatgttggtttggggttccggggaggcagcggtcattgtgtatttgcacccgagtgttgagacccggggaacgggaaatattacagctctgaggctctgtgagggcgggtccttcccaccccaaagccagaggccaggagggaggccttcggttagggtggggaaagacattctcttctcttcttgcaccctaagc

SEQ ID NO: 6104 - DNA, 175 bp, Homo sapiens
  chr2:20865462-20865637
  hyper
cgccgcgtctccgcggtggccgagagggcaatggctgaggagttcgtttgggacgaagcagtggagcaggggaactggggagcctgggccgggcctctctgtgggtcccagcgcagcgcagccaggcaggcgtcgggacctaggcggctttggattcggcgggcgacctcgcttt

SEQ ID NO: 6105 - DNA, 450 bp, Homo sapiens
  chr2:20866660-20867110
  hyper
gatggagggggtgtcgcactgccgcggggaggcgtgtcgggaggctggggccagtggcagtcgcttggcgagggtgggggcgtagcgctgcggtgggaggaggcggctccggccctggtctccactctaggccggggtggggggcgcatagcggccgccggagctttcagcagggggcgctgctccgggcgttgggcgggggtggggtgggccaggagggggggccgcgggctggccgcgcacacttcccccattattaaacactatgttcaaaaggcgccgggggacttcccggagccacggagcccgcgccgcccgcccgcccggcccacggagcccatggacctgagcgccgccgccgcgctgtgcctttggctgctgagcgcctgccgcccccgcgacgggctggaagcggccgccgtgctgcgagcggcgggggctgggccggtc

SEQ ID NO: 6106 - DNA, 511 bp, Homo sapiens
  chr2:21022197-21022708
  hyper
cggccaggactatcaactcttgtgtttggtacacaggacacaaagcaggtgtccggtaactacttgcgagggaagatacgaattaaccaaggaataaagtgttccaatctgcattctgtcttgcgtggggaacaaaaccaaactaagacccaaggatgagggtttacggttaaggtcttcagcgtgaataaaaggcggcgtgagcactaaacgccgggggcaaagaacactcccggcccagagtttgacccctcctagcgagttcttcccggccagctgcccaactttttggcctctactcctccgcgggggcaccataagactccctacaggtgggctacacttaggggttcaaatgctgcattaccgcgctcgggtgagcgactgcccggcctgcaactcaagggactcccaggccaagtggctccgaactcgcgagctgtcggaacagtattatttttgctgctacgggccatctggcccagggcaacaggggctctgcgaggaacca

SEQ ID NO: 6107 - DNA, 145 bp, Homo sapiens
  chr2:232791140-232791285
  hyper
acctgccgctgatgtcatcctcccgcccaccgggccgcccgggccaatgacaccacgcacgcggccgcgccgagggccgggagggggccgcgggggctcccctcccttatcccaccccggagggatcccgcggctcggcgggctc

SEQ ID NO: 6108 - DNA, 360 bp, Homo sapiens
  chr2:234474820-234475180
  hyper
cggagggcggggaagactgccactaaaattatcaagcctaaaggccttccagtatgtatccactaatcccatcgttagccctgggggcctaggtgacttccccaaggtttcacatcgagtgtggcggagggtcacttggagatgagaaacgtaaagcgcctagcataggtaccaaatgacaggaagcgctgaaatgcaattatttttcttttcctcagaagaaaactaaaaaaacacaactcgagagtctagcctcgagctcgttgtctgcattcctgaattcccaactcctacggccggccgaggccctccaagccaccacaggcccaggggcgcaaaaaggcagaggtccccgtggcc

SEQ ID NO: 6109 - DNA, 102 bp, Homo sapiens
  chr2:234475503-234475605
  hyper
aatgtaactcttctgctccaagagtttgggaactggagcgggagcgggagcgggcaaggtgagctcgcttacaagtccgctggtgagttcgcgggtccactc

SEQ ID NO: 6110 - DNA, 462 bp, Homo sapiens
  chr2:47499350-47499812
  hyper
cgggttccgggcccacgtcctccagaccatgcccctcacccccggccaccaccctccccgactgaccacacctggaagggaaggaagggtgggggtggcctgcagagggtgtggcgagatctggacggcctgggggcgggggactaagttgaccggaaatggggctaggccgcggccagggacggcagcagatgatggttgaggagtggcctaggaaggcctccctgacggcgcccacacacgccccgcggcaccgcgaacacggctgacagggcagttgggcagcgaggtagtcgggaaagagcagggggagcccagcggctccgttgcgccctctgtcggccgccagcctccattgcacgcggcgccgcccacctgcgcactgggaccccggccctgggccgaccaggaaccccttgcgcccgcgccagctcgagccctgttgcacctgtcgtggtcacc

SEQ ID NO: 6111 - DNA, 542 bp, Homo sapiens
  chr2:60783811-60784353
  hyper
cgacgattccccgacatatatttaatttcaccatcataatatgcccagggtgaaatgggaagtgccctccgctcccgcccctcccccagccagatttcacccagtccagaaaaccacggctgtgtgtcggcatttgatccctcctggtcgtcgacccccctccccggcccctggtgccctcccctagggcgacaacccctccctcagcactgctggatgctcgctaaagagcccgaaagtgggggaggggagggtttgtatgtgtgtttaaagaaagatgtgtcgttttaagagattttaaaatattacgtaagtattgattaatgatgcaggtggttttgtagagggggtgaaaggtcactttaaatgcgcacacttggatacacaataagtatatttacctttccagaagtggcttttagaaagtaataaattatgacaacgttaaaattattttctggccgttcagttaacttcgtttggggctgtagagctgttgctgctcccattgaaagggtaattacgttccgtgggctctttcc

SEQ ID NO: 6112 - DNA, 123 bp, Homo sapiens
  chr2:74782349-74782472
  hyper
gaccataaggggtcgagctctgggggtggccgagggagctcgcgccgcctggactgcaaagtgatccgtctggctgagtgtgtgagtgtggcccccgtcaccgtggagaccccccctgagccc

SEQ ID NO: 6113 - DNA, 48 bp, Homo sapiens
  chr2:75147056-75147104
  hyper
gtggcgctcgccgctcggagaagcagggagtcggtgcgccgcagctcc

SEQ ID NO: 6114 - DNA, 206 bp, Homo sapiens
  chr20:21080357-21080563
  hyper
cgttgtcgtctgctgatgtttaaaagataagaagacatttgtcagggcgggtgcttgaggctctcagaggactccgggagacactgccaaaacgtttccaaactgaatagtcattgggctgccagataattcagaaactatctgtatgagctgtttatcaaattattaaccgcacagatgttgtttggctgaagagcagctgaatc

SEQ ID NO: 6115 - DNA, 259 bp, Homo sapiens
  chr20:22558283-22558542
  hyper
ggtcctacaaactcgcgtcctccggaattcccgagggcaagcccggcacgcgcgagcgtgctcctgcccgtggaaggggggaaatcggcgactgggttgcagggagaatgcgatgataaatggccctgcgtctgctttctgactttctctcctggacccagctcgtaaccccagaggctccccaacctgcctgccgccaagcacggctgtgcgcaaaaggccaccagccgcttcctgcagccagagctaaggttcactc

SEQ ID NO: 6116 - DNA, 227 bp, Homo sapiens
  chr20:22558696-22558923
  hyper
caaactcccatgcaccacgcacatcattttctgctgacccccacactagattctggggccaagggggttccccacaccccaccctccactgttctctggaaacatgctgctctcagatcgaatccccagacccgagccgctcgaggggcctgtgtggcttcctcggggccctaccaaactcctctaactgagctcagagcctaagcggtctgagtttgcaactctac

SEQ ID NO: 6117 - DNA, 67 bp, Homo sapiens
  chr20:22567768-22567835
  hyper
cgcctgcccatgggaatgcgagcggggtctacggttagctttaggtagctgggagcgggacaccaac

SEQ ID NO: 6118 - DNA, 121 bp, Homo sapiens
  chr20:2731109-2731230
  hyper
cgagcagtgaacacacgtggagaggcagtgtagaaccccccagcctggctctatttggccgctggccgagtcttctccatttccatcctcccgccccgccccagctgagccacccacttct

SEQ ID NO: 6119 - DNA, 226 bp, Homo sapiens
  chr20:2731391-2731617
  hyper
cgcggtcaaggggctgacaatcaaggaaaacctttggtagggagtgcctgctgagcccggctcaaccgaaacccgagggctgagtggggaggttgacctggggaaggaagggtggttgcagaaggaatgataaggaccgatccccagaagtgagtgctttctctttgccgggaaactaaaggaaatccactaagtcaggatcagaggtgaaggtagggctctgaga

SEQ ID NO: 6120 - DNA, 331 bp, Homo sapiens
  chr20:2731675-2732006
  hyper
ggggaaggaggaggagaagggcgtggggagctgggtcagacgcgcatacacacacacaccccttgcacaacgccagggtaagcagtgaacacaacacacgtggagatgcaatgtagaatctggccgctggccggatcttctctacttccatcctcccgccccagcccaagccacccacttctccagttgcttccctggggtgcatgcaaacctctagccttcagatgctgcagagagtccacttgagccgtgataaatggagattgttaagttttttcttttttataataaactcctgatttgaccagatgaaaagagaaaactctccatc

SEQ ID NO: 6121 - DNA, 62 bp, Homo sapiens
  chr20:30639044-30639106
  hyper
cgactcctcccctcccccgaccacctcccccagcttgggagtcctctgagctgccaggaagc

SEQ ID NO: 6122 - DNA, 139 bp, Homo sapiens
  chr20:30639494-30639633
  hyper
ggtattggaaccctggggtttgtgttctaaatcttagggcagggttagaatccactgaagtgagagttcggatccttccactgggcagattagaatctttgggggcaagttgagtttaaaaatccttcagaggtgggat

SEQ ID NO: 6123 - DNA, 54 bp, Homo sapiens
  chr20:9496982-9497036
  hyper
aacccacttcaaagacgcagtcagtggtgagtggaggctggcatggctggggag

SEQ ID NO: 6124 - DNA, 240 bp, Homo sapiens
  chr20:9497109-9497349
  hyper
ggtcccaggccaagtcttccctcggcttgctctttagggcggaagaggcgggagcgcccatgagtcttctgggtctcaggccttgtagatccgccaggaaccgcaggcgtggggacccaaacgtcacccgtggcctgatcctagataagaagtcccttgaaggcctgtcgttccctggtgcttcaaaacgacctcttatgatttggcctttgaaggaccacggagaagggcaaagctgca

SEQ ID NO: 6125 - DNA, 118 bp, Homo sapiens
  chr20:9497378-9497496
  hyper
tttcttatgcgctaaaactgcaagggggcagtgcgactttccttttcagtcaggatgtgatggccttcagtgtctttttgcgcatggcagcatggctcgcacgggatattcagtcatc

SEQ ID NO: 6126 - DNA, 88 bp, Homo sapiens
  chr20:9819102-9819190
  hyper
cggggttctcctccacgccctcccgcccagcaaaatggaaccatcctttatttggttggtagagagcccaggctggatagtagcgcat

SEQ ID NO: 6127 - DNA, 102 bp, Homo sapiens
  chr22:21399942-21400044
  hyper
cgatgctggaaccgcctaggggaggcagggggataaacgcagcaaggcgcccaatccggtgcatggtctgtggcgcatgcagtgtatcagcccgggcgagga

SEQ ID NO: 6128 - DNA, 126 bp, Homo sapiens
  chr22:21400283-21400409
  hyper
ttcctgtgagaggtctggggaggatgaagagcagaaagaagaggctatggtggcctgtgggcgtctttcaggggtccccgaggccgagcagggtcccgaggccaattgggactccgacctggagac

SEQ ID NO: 6129 - DNA, 124 bp, Homo sapiens
  chr22:28838056-28838180
  hyper
cgttatttctgggaccaatagcaatttattttgatagaaccgctggatttttttttttcttgagttctcaacaaaggagccatattaggaaataatctcgcaaaaagcaaagtgccccctcccc

SEQ ID NO: 6130 - DNA, 61 bp, Homo sapiens
  chr22:28838449-28838510
  hyper
taaccccttggggaaataggtgttataacaccacctgcggggcctgtgtcaggggtgcagc

SEQ ID NO: 6131 - DNA, 244 bp, Homo sapiens
  chr22:28838551-28838795
  hyper
cctagtaggtcttggctggctcctgcaaagctaatcgtgtcgctgtctgcacaggacttctaaagcaaacgggtgcttccgagctgtcacccctggggctccaggcatatcatgaaggaaaaacttaaagggcagtggatgcagaccagatttggtaactcgtccctaagggactgatgcaagtcccaaaggaaccagggctgtttggaccagctggcccagcaaactacggaaggggtggaga

SEQ ID NO: 6132 - DNA, 279 bp, Homo sapiens
  chr22:28838844-28839123
  hyper
ggccccattcccctctccaggacacttaccttcttccggggctgccatttcatcatatttgtaaagccgatacgtggaacatcaagatgttggctgggggctgggggcagatgcagggcagcgacgactgcaagtcatgctgcctccctcccaccccctaattctttcccatattcactgcgaagggaaaagccccaggagagtccagtcttttcgccttcagttcaatgaaaagtatccccaaaccacgaacacacttcccaccaggctaggaagtcc

SEQ ID NO: 6133 - DNA, 129 bp, Homo sapiens
  chr22:28839263-28839392
  hyper
aatcccagccgggcttctaccatccaaaccccttttggcgaattctcctcttctcaaaaaagattagacaagcaatcaaaccctcacgcgcagcctggagcaattcccacaattctgggtgtatttctc

SEQ ID NO: 6134 - DNA, 171 bp, Homo sapiens
  chr22:29550509-29550680
  hyper
cgcccgcccagctcccgctgcggcagagcccccagccgccgcctcctgccgccctcgcctttcctgcaggagccgtcccagcgcaggcttgctcaccagcgccgccccgtggtaagactgcagatctgcggaagaaggccagccctgaaccgcaactgctctcaagccctt

SEQ ID NO: 6135 - DNA, 104 bp, Homo sapiens
  chr22:37252563-37252667
  hyper
cgctgcggagcggggactcggctgctgatcgcggcgccccctggcggtctgttcccgtcaacatttagattaagcgcagagccggttccgccagggaagtgcgc

SEQ ID NO: 6136 - DNA, 49 bp, Homo sapiens
  chr3:115231437-115231486
  hyper
cgcagctcctctggaccgagccacacctctgcctgggaatcctgggctg

SEQ ID NO: 6137 - DNA, 302 bp, Homo sapiens
  chr3:116163989-116164291
  hyper
ctttgccagtttatggtcctttccactttgcctctctctttccctcgctcagtctcttttccctctaagacttaacaaagccctcataaaacccaagcagaagggtgaaaagtaaaagcaacacaatttcaaaagagagagtgcaaatagcaagccctctggaagagctgaagaggaagccaaaggaaagggttcttgtttggtctctctgtgactggatgctcctctgccagtgtctgagctgagctccttcgctctgtaacccactttcccaggctggcgggcgggcgggcgagggagcc

SEQ ID NO: 6138 - DNA, 49 bp, Homo sapiens
  chr3:129694299-129694348
  hyper
ggttgcactcccggcgaggcagtcccagcgttggcttccccagttccgc

SEQ ID NO: 6139 - DNA, 65 bp, Homo sapiens
  chr3:132757908-132757973
  hyper
ggaggaatccagagattggttcaggggctatttttttttttaagcagttgggcaccggtggagcc

SEQ ID NO: 6140 - DNA, 36 bp, Homo sapiens
  chr3:136751341-136751377
  hyper
cgtcctcttcccggatacttggagacagcagcgtca

SEQ ID NO: 6141 - DNA, 269 bp, Homo sapiens
  chr3:150481645-150481914
  hyper
cgtatagcaggccgaggagggagctcatgggcagcgttggctaagagttcgagatcatctagaaatgtcagaaacgtaggttgggtcgtgaggtctctgaagacagtgggtgaaactccagtgtaaggcgctgcgtccgcttggtagagagccggccgaagtccgagtctttgttgcgaggcgtagggccaccctgcgcgcccagcagaagcgctagagggcacggttgcccggggtgaaccgcatgtccaaatgtaactgtgtgctcc

SEQ ID NO: 6142 - DNA, 64 bp, Homo sapiens
  chr3:154797121-154797185
  hyper
cggtccacaggggagagatggagccccctcaggactagagaatcccgaagagcccgtgtattgt

SEQ ID NO: 6143 - DNA, 121 bp, Homo sapiens
  chr3:154797214-154797335
  hyper
ctaaaaatgtttagcaaagcccttttgggaatggtgagatggggggtggggaggatgggacattttcattgccaccgcccgccccccgtctccccggccccctcacatgaagtgactggat

SEQ ID NO: 6144 - DNA, 33 bp, Homo sapiens
  chr3:157824101-157824134
  hyper
cgggggctgccggagggaaatgggaactgatgc

SEQ ID NO: 6145 - DNA, 140 bp, Homo sapiens
  chr3:157825408-157825548
  hyper
ccctctaatttcatttattacggagagctaaaaaagagacgctcgccaggagtaaaggtctctctgcctaccccccccaccaccccgcttacgatttaaaattctatttctgggctattttcatcggaacggtttgttac

SEQ ID NO: 6146 - DNA, 96 bp, Homo sapiens
  chr3:164912568-164912664
  hyper
tgttatttcttgaactaaaaccccttacgttctggacctgggctgtgtcctaaaggctatctcacctttttccttttctttagctcaggatagcgc

SEQ ID NO: 6147 - DNA, 80 bp, Homo sapiens
  chr3:173115694-173115774
  hyper
gaagggagcgagcgactgtgcggcgctcacgctgccagagcccgggcggagtgcagtcgcctccaaagccttagagcggc

SEQ ID NO: 6148 - DNA, 87 bp, Homo sapiens
  chr3:179754092-179754179
  hyper
cgattccttgatcctgtttaaagaaacaggctcagggaatgcacagaaaacaaacttccccaatcgaagttctgaggtcttccctcc

SEQ ID NO: 6149 - DNA, 98 bp, Homo sapiens
  chr3:181421152-181421250
  hyper
cggaaatcggcttaatttttcataaaagaatggctttttaaaatattgaatactatggctatgcaaggtttatgatacctttatgtttattcttccca

SEQ ID NO: 6150 - DNA, 56 bp, Homo sapiens
  chr3:192128140-192128196
  hyper
gatgagaaattctcagaggcagagcgagggaactgcagcttgggtctgctccgtcc

SEQ ID NO: 6151 - DNA, 708 bp, Homo sapiens
  chr3:197807545-197808253
  hyper
ctcagcccgcgaagccgttaggcgcgcgcctgcagctcagcgcccgcgcggactccggaagccgctcccaagcccgcgctgccggcagggggcggctgcggctcgggcgcaggcgccgctggcttgcgggttctcctgggctcgcccgggacgtcccgtagtcgcaggcgcgcaacccgcccggcctgagggcccgcctggccgtgacccccgccccgctcctcctccgaagagagatcggggccgctggcaggggccctccgcagccaccagggatggggctgtggggcagttcccgccccggtgcagccgccgccgggcagaccgcctggcttggctgcagccgcggcatctggctccggttctgcgaggctgggagctccagcgagcttgggagctgccaggcggctgctgcgagcaggcagagggcgcctggagcttgggccctcaggcggcggagcatggcctgggcggcctctggatcgcgagtgcacctggcctgagagcctgccaggccctgcccccgctcggctcctcctctgccggagctccggaccgctagccaggggccctctgcagccaccgggaatggggctgagggcgggttcccgcccctgtgcagccgccccagggccgactgcctggctcggccgcagccactggtacatctggctccggttctgagatgttgggagtgcgggcgggctc

SEQ ID NO: 6152 - DNA, 151 bp, Homo sapiens
  chr3:29322332-29322483
  hyper
cggcagcagcgttgctgcaaaaatcgcttgctattcgagatagccagcagagggaatcggaactttgcttgcagcaggggttgaagcagcctttttttttttttttcttggaggaaatactgcagccttctggactgcgtacgctgctccc

SEQ ID NO: 6153 - DNA, 64 bp, Homo sapiens
  chr3:35681641-35681705
  hyper
cacagctgtgtgggatcccagccgacactgcagaaagctccttttactagcagttaaataaatc

SEQ ID NO: 6154 - DNA, 50 bp, Homo sapiens
  chr3:39250115-39250165
  hyper
cgacgacaactttaggccctcatcagcctgaaggtggcaccagaggagtc

SEQ ID NO: 6155 - DNA, 196 bp, Homo sapiens
  chr3:44038922-44039118
  hyper
tattacaaaggtcgtttgttgttgttgtttttttaaaacaccaagtaaccccccccccccccccccacggacttatactttgtttatgagatttctccaaccttggtggtttggagaaatgaggtgggggaggggaggaccaagggcagcaagacgtccactacgaaaataagatacttactaatttaatagggcc

SEQ ID NO: 6156 - DNA, 447 bp, Homo sapiens
  chr3:62859445-62859892
  hyper
cgagccagaaggtggcggcgaagtcaccttgggaagaggagaatagggtcaaagacaggacggcggaggggctgacccggacggaaggaccagagggcgtgcccctgctctggggtcagtgaggaagggtcagggggactggtgagaactccagccataaggaagcagtgcccgaggacactttggcgacgctagtcggtgatcagctgacccgggcagggagaggagggtgcccttcgcagagtcacgggaagcttcgccttctgggcttgctttctcccgcctgcccctgcggttgctctctgccccagcgagcggagcgctgctccaagacgctcttctccctccacctcggcgcccccacctgccgttgcccccgcccgccgaacgcacgcccaggagggcgggcccggagttgagcgcagccgcccgccgctggagagcgct

SEQ ID NO: 6157 - DNA, 206 bp, Homo sapiens
  chr3:62859964-62860170
  hyper
acaaagcgggacctgcctgcctcgctcaccaacgctcccgggctgggggggctcgagcaagcggcgctgcgctccgcggccctcgccggtcccagtcagctccaggagcgctccaggctgggttgggctgggcctgggcgagcccggccgctgggagggggcctcgtagccctttccccagggcgcggtctccacctctcctgctc

SEQ ID NO: 6158 - DNA, 311 bp, Homo sapiens
  chr3:73674224-73674535
  hyper
gctggaaggcagaagcgcgtgggaggacactgaggctcgccagaagggacgggccagcccaggacgccagcctgaatcttctcgggaaactcctttctgttctcttacagtctacgctataggagacaaaacgccagccgagaaaagctcgctgagtttggagctgaggctactgctttctcccaagggttctcttcgagccccttcccgaacggatcaaaacttttttactcccttctccctcccccttcctctagtggctgattgcagaggactaaaaatatcttggggcccgctatctcagcacttac

SEQ ID NO: 6159 - DNA, 174 bp, Homo sapiens
  chr3:85008817-85008991
  hyper
aggtaatccccgccccggcgcagggaacatcaacttctcgcccattccccatcttccccattccaccccatatttccactctcccctcccagtctccctgtccccagcgatttccaccccctccccctactctctggtgcggcagggggcagtggcagtttgcaccagcccctc

SEQ ID NO: 6160 - DNA, 92 bp, Homo sapiens
  chr4:102711787-102711879
  hyper
ggatgtaagagcaggcccctgagcagtttcacttcctctgggcgcccagcagagcggagccctggccttgcgggcatgagccccggggctgc

SEQ ID NO: 6161 - DNA, 157 bp, Homo sapiens
  chr4:113442552-113442709
  hyper
cctcttctttcccacgaaggaaagaaattaccgtaggagattttgccaatccatgccagctttctgattgttttcttcaggtaaggggaaaagaacagccagcgcgtgaatggagagctgagggcccactagggagagaacctcttccccacccttc

SEQ ID NO: 6162 - DNA, 235 bp, Homo sapiens
  chr4:121992978-121993213
  hyper
cggatagggcgcccttgagaagcttcttgggccttgaagatttgggggcgcgtgcctcgagcccccatctcggatgacccttcgggcgtgaacgctccttgtgctaggtctcagggtggcgggctaaggcgtcgggtctctggggcattgctttcctctccccacttaccttaaaaagatctgtttttcgtagggaaaatagaaaaaaatccctccccgtggtgtggtgtgcgaa

SEQ ID NO: 6163 - DNA, 114 bp, Homo sapiens
  chr4:121993736-121993850
  hyper
tcccagccctaacccctcccgcctcaccgctgcccgcccgccccctccctcctctgcccgttgcctccccctccgtccctccttctctccctcccgctgcgcgccagcgcgcac

SEQ ID NO: 6164 - DNA, 247 bp, Homo sapiens
  chr4:155665475-155665722
  hyper
aggatgaagaaccccatgctggaggtggtgtctttactactggagaagctgctcctcatctccaacttcacgctctttagttcgggcgccgcgggcgaagacaaagggaggaacagtttttatgaaaccagctctttccaccgaggcgacgtgctggaggtgccccggacccacctgacccactatggcatctacctaggagacaaccgtgttgcccacatgatgcccgacatcctgttggccctga

SEQ ID NO: 6165 - DNA, 54 bp, Homo sapiens
  chr4:155665778-155665832
  hyper
gttattgtcaaagtggccagcatccgcgtggacacagtggaggacttcgcctac

SEQ ID NO: 6166 - DNA, 353 bp, Homo sapiens
  chr4:15780742-15781095
  hyper
cttaagtggtttgcaaagcctgtggtaggggaggagggtgtagaagggccaaaccacggaacttagttttattcatttatataaagcagcactccgattctttttgcgcggcctgaaatgcatgtgaccagagaagtaattaacaaaacaatgtcaacttctaaaaccgagacattacttagatgataaggcgcagcaactcggtgaatctgtacaaaccttggaaaaaaaacacattagtctatgggaccttccagttttctcatgctcctttccagctactaacctctcctaaagggaacaaccactttttggatttgattcccaggcctcgctttcaccgggaaattatc

SEQ ID NO: 6167 - DNA, 54 bp, Homo sapiens
  chr4:158142705-158142759
  hyper
cggcctattcgcgtgaataagagactcttggatttttgggcgctagcgcgcgcc

SEQ ID NO: 6168 - DNA, 269 bp, Homo sapiens
  chr4:158143023-158143292
  hyper
gtgtgcgtttctggggtggtgtgtgtgcgtttctgtgtgtcagtgtgtgggtgtgagtgactgcacacacgcgtgcgtgtgaccgtgtagagagaaggtggctgtaatctcagggacccccgctggctggagagggctgaagagagagggaaaggacgtcaagagtgtgcgcattagggagccggggtgagggttggagccagggagggcggctttcttgggttcaaggggttttcgctcatcttgagtgcttcaggagaagccctccc

SEQ ID NO: 6169 - DNA, 169 bp, Homo sapiens
  chr4:163085074-163085243
  hyper
cgctcgcgtctcaggttcagcaccgacagcacagtggacagtaccagctcctttcacctccagtttgtctcagtcactgaaccaggctgattctcgctcctcctccctaggcaggagctgctgccactcaacccgggggtgccccgcccccaccatctgacgtaactat

SEQ ID NO: 6170 - DNA, 244 bp, Homo sapiens
  chr4:163085479-163085723
  hyper
tctggaaggaagacggggcggagagagggggcagtggagcacggagaggaccgagtgggaggcgggtggggaggagacggagaaatagaatgaatctattcaaccattcttgaaaacatctccaatccttttcatcttcctgcccaaactttgctgcctctccctgccatttggttatttgaacggatccgtatttggtgttcctactcccttccctcggttcacggagcctctggagggagtc

SEQ ID NO: 6171 - DNA, 359 bp, Homo sapiens
  chr4:164253781-164254140
  hyper
gaactccacctcatcccggatcacgtgacggcgtcccgcgagtagcgcctgaagctcccccaaccccacaaacacctcacaaaggtgcacacctcggggaagcattgcctaggaattttggaaagaaaagcaatccaacagaagccacacattattcgacacagacctcccgcgcaggggaaaggaagccctaatccccacagtcctcgactccggggaaggcagggcagtttcccgaggcttgaaaaagtcggtgccactgtgcttttctttgtttgcaggtcagtgccatcttgtggccgaagtcatacccggctggagagctcgagcgccagcccaaaccaggaatcaaagggctc

SEQ ID NO: 6172 - DNA, 537 bp, Homo sapiens
  chr4:166794038-166794575
  hyper
gggaggggaaatatggatttgcagctaagttatcacgatccttcgctccacccccggtctggcactctcaactgacacgtacatcatctattaattgctgtttgcgtacacagatacataatatattcatttttatctttggtaaaatataaatggaattgtcagcgcgctcctgtctgtttgtttgtctaaggctatcaaaagaagtcaagagaggaggctgtggtccggatcctgaccctgattgtatgaataagtaagcaggatgcaagtgattgggttagatggtgcgaatatttttttttttcaagttaggaagagggtaaaaagacaggctggcggggggaaggcaaacagtgcatccccaaatcctcacacttttgctctcttgcagtcagttgctttgctggcttctgcaggcttttaaggtctcgcggcgtagaaatgcctggcccccacccccttcctcggtctcccctttcaattcagatgtgctgatgtgcagaccggattcatcttctcggagctgcggcggcg

SEQ ID NO: 6173 - DNA, 69 bp, Homo sapiens
  chr4:176922585-176922654
  hyper
cgctcttcgaggtgactcgtgggaccctgcgtcctagtgctgggtgtgaatcggctatttcacacccag

SEQ ID NO: 6174 - DNA, 43 bp, Homo sapiens
  chr4:176986744-176986787
  hyper
cgctataaaatgtgttaggtggtgagaacgctgatggttcacc

SEQ ID NO: 6175 - DNA, 504 bp, Homo sapiens
  chr4:177116437-177116941
  hyper
cggcggaaagcaggcggggcgcccaccgggggggcctaggactggcttactcaagcacctgttgatgttcctggggaagaagctgagatccagaccctgaagccaacgcagaacggaacgagacaagcgggagctcttcggcgcatgcggatagaccagacacttcttaggcctccctcggatgggagctgctagctgtggcgaaagtgacggtgacttgtctagggctgccgcagtctgtgtcaaataccctttttcctggccggcggcagccatgacgctttctgggttgctgcggcaacagcagaaggcggggctgggccttattgctggcggcgcggtctcgtggggcggggcggagtcttatggggcgagacctcagcgcctgcgcaagcgccgcagcagccgcccgtacttccgctttactcagattttggaccgcggggccgggtatcgagggaggcaaagctggggtcccagtggtgtggctgcggtctggggagc

SEQ ID NO: 6176 - DNA, 356 bp, Homo sapiens
  chr4:180979649-180980005
  hyper
ccgggtcccggcgcgccgagccagccgcccctcgcgcagttcctcggccgcggcgcggggttcgccccgcttctccccggcagcagccggctgggtgcccccggcacagcacagtgcggcaggcggcagcgtcctcccctcgcctcccccacattccctcacctcagccaaggcggcagccccggcgtccccgcccgcccggccccgcgcccccgcccggagcgcccccacccgttgcgcccccgccgggtcccgccgcgcagccccgccacgctgcagctggagcgaccgccgcggccggccccgcagaccggggaggaggaggaggaggggaagccggagagggaggcgcgggg

SEQ ID NO: 6177 - DNA, 158 bp, Homo sapiens
  chr4:183727549-183727707
  hyper
cggcttctgcggacatggaaaagccgtcccaacatccggcggccccgtgggcaggggtcctgggacgccccctcctgcatccccgggcgggccctgcaggggatggcggcgatttcaggaagggctccggcgccccctagtgacgcgcggctgtggta

SEQ ID NO: 6178 - DNA, 708 bp, Homo sapiens
  chr4:46391710-46392418
  hyper
caggaaagtgtctctatcgggaccaacgtgtgcgaccctacctgaaacggcaagcagaattcggtgttttcttccttttgccctgatcttgacgagataggaaacttgggagagagagagagagagagagagagagagagagagagagagagagagagagagagagagaccgagactgcagcagccaagagagcgtggagcgatgggctggtggaagccggagaggagcgctaggagccgcggcggcggcgcgaggtgtagaaggaggcgaaggcgttcgtagtggcggtgatgggcggaggaggaggaagaggaggaggaggaagaggaggagggggaaaacgatgacaggagctggggccggggggggaaattggggggacgcgggcggaggcgcggtgcgcgccggcggtggcgggcacgagccccgcgcctggaggaggaggagtcaggccgggtaggagggctaaggaggttcccgggaaggcagggccccccctcccccccctcccccccccccacacacacacactcccctgcctcgatccctcgatccctggtaactgaccgtcgcccgcctggcactagcagcggcgcagacccgggcggcgtcgggcgcctgggtgcgctcggagcgccgctcccctcgcccacacctcgccggaggagcggagcccacgcgcagcctcgggctgctccccgaggccg

SEQ ID NO: 6179 - DNA, 142 bp, Homo sapiens
  chr4:46392515-46392657
  hyper
tccctggggccgcgccctgccgcccgtcccccaacatcaccctactgtggagcgacgtggctgctaagaggtaaagaggttccgctcctgctggagggcaaggggactaatcacgcctttacttagtcatcaacgcatccac

SEQ ID NO: 6180 - DNA, 194 bp, Homo sapiens
  chr4:55094321-55094515
  hyper
cgatgaaggtgaacgcgctcccctcccccgctgtcgctgggaagccccactctgcccaggtctggttcctggagcatcagcgccccctttccctcgccggcaggatcgtttcctcccgacactggcctctcgccttgggcgcagggtttggggctcagctgtcaattccaaggaattcgtagggttcgacccac

SEQ ID NO: 6181 - DNA, 70 bp, Homo sapiens
  chr4:55094684-55094754
  hyper
cttcaagggagtaaaggtcgttctatcggagaacgttccaaacctacacagaccctcttttctttgtacc

SEQ ID NO: 6182 - DNA, 80 bp, Homo sapiens
  chr4:6201800-6201880
  hyper
cgagagtggaagggggacccagagggggcgcgatggccggaggagggggagatggacgatggggcggggcggcaccggtc

SEQ ID NO: 6183 - DNA, 65 bp, Homo sapiens
  chr4:6202658-6202723
  hyper
gcttgcaggtaaagcggggctggggccgtcctggccgtcagtggtcaggaagacgcagcgacccc

SEQ ID NO: 6184 - DNA, 133 bp, Homo sapiens
  chr4:76555905-76556038
  hyper
ttctgccttccccagcgggaggaggcgattgtgatgcccacgcgaagggtaaaggtggcggttatgtaggactgcgaagactatgcaaaatgcgatacggtttccctcatagcatcgccgctggggcaggggc

SEQ ID NO: 6185 - DNA, 616 bp, Homo sapiens
  chr4:90228673-90229289
  hyper
cgaatcccttccgcatccctacagagcacaccaccaggctccggtcccccgcgctggccgccaggcggaggtgcgcagggggcgtctcctacctgctctgcccggctccgcggcgcggcggggccactgcctgcgctgtggcgggggcttcccgtcgcatatcccaagcaccgtctctcggcgccacaccgatggctccggcgggcccgcgagctgaggtccttctcagcccggtcccggagcgagctccgtgcgttcaggaactgaaattactatgccaagagcagaggcggcgcgcagcagtcgggcgtagaccgagggggctgcccccaccgcggggctgcagacgccgccgccgcccccgccgggcgcagagccagtttggaggtgagagttcacttgcccgactgttcatccgtcaggcccggggtgtacccatctgtccagcgctgcccagcctgagcatccgagagaggggcgacagctttgcaggcggcggcggcggcagcagcagcggcggcagcaggaggccgagctccgccccctccaaaccccctcccccgccttcccggtcctgggggaaagtgttgcagcccaggctgctgagcgccgggcc

SEQ ID NO: 6186 - DNA, 317 bp, Homo sapiens
  chr4:96470377-96470694
  hyper
cgcctgtgaggaacacacacagacaccgggggtgggggtgggggtgggggttgaagtggggggagttggaggaggagggaacggagggaggaagcttgggcaccgtcaggcgctctggtctccaatctcagtgttctcacgccggcggagagatgtcccggctgtcgctgctgggtggccaaggaggttcacatcctagagtagggcgcacgggtgcgcgaaggcgctcgccaaggaggcgtagagggcgcagcacaactcctctggggggtaaccgggggcgggagcacgcccgcccgccttatgtaagcaaggat

SEQ ID NO: 6187 - DNA, 115 bp, Homo sapiens
  chr5:100236036-100236151
  hyper
cgggatctggagccgaacctccattccagtttactcaaaactcaaaactggcctctccacgtggcttgggtagaaagacagtcaatgagatgatttgatggttttatgagtcaac

SEQ ID NO: 6188 - DNA, 87 bp, Homo sapiens
  chr5:100238197-100238284
  hyper
cgtttggtgaataaagacatttctcttgagttctgcccacagattaaaaggacaaggacacacgttctttgttgacacttctgcagt

SEQ ID NO: 6189 - DNA, 345 bp, Homo sapiens
  chr5:100239724-100240069
  hyper
ctgaaaaaaaagcagctaccatggacctctcttttaaacgcaagtacacccacacacattcggataccaaggaaggaaggaaagaaagaaaggaaagaaaagggaggggaggaaggaagagcaaagtcctctctaaaagtctcaattatatatatagcctctgattgtcacctctcctccgtcccaccatttttcgtacttgtattgggtggcagggacacttttcaagagttctgtgttcgattgttcactctgagtacctctccaccatcctccagtcgttgccctcattgggagagatgcttgctactctgctagtaccacgccttggttccggtctttact

SEQ ID NO: 6190 - DNA, 313 bp, Homo sapiens
  chr5:101631722-101632035
  hyper
cggacagcgacagtgaccggagcttctcttcggagacattgggaggggctgaaggcagagatggctctggtgacttctggggctcctggggcttctgaagctcctgtggctgagaattctctctttgggggtcagaggacaaggcagagacttcgatttgggagggcgacgcagacaagcggcgcaggatgtctgggctggaggggacaaaagccaagttctcaatacctttggcgctcttcatgtctggatgggttctcccgactccggtgcttcagagcagcagagccaggtccctctctggctcctccca

SEQ ID NO: 6191 - DNA, 222 bp, Homo sapiens
  chr5:101632074-101632296
  hyper
ctcctggccctccagcctccagcgcactctccgccaccgcctgaaccttcctactccagctcgcagctgtctggagcgcagagcgctgagcgggggcgttagcgccccagcctgtggctttggcgctcagctgtgcctcacccgtcgcctcaaggaccaaccggaaggcgcggcgtgggcgtgccacccggcggcggccgagtagagggggcgagagttctc

SEQ ID NO: 6192 - DNA, 219 bp, Homo sapiens
  chr5:113696733-113696952
  hyper
cggcaaggaagccctgggacctccggattcgggctgccggagggcctgagcgccagagcccaggacccggcggccgggggcgccatcccctcatgttctggagaaggcgcaaatgtgagctggcggtagcggggaaagccctccgcccccgccaggggggacccgggaagcccggccggctctgtcggcagactgcggggatcccctcctccggccccg

SEQ ID NO: 6193 - DNA, 58 bp, Homo sapiens
  chr5:114515671-114515729
  hyper
cttgcctttagctatcaattccatgatgtagccaaattcactcatctccccagactcc

SEQ ID NO: 6194 - DNA, 132 bp, Homo sapiens
  chr5:114515769-114515901
  hyper
cgggtgtatcgaatttgtcctttcttttctctttttctgtttttagtctgagttttgccgagctccccgcccataagctgttaaccaggaaaagaggggaagcgccggggaaagcaagaagcgggcttgggt

SEQ ID NO: 6195 - DNA, 44 bp, Homo sapiens
  chr5:114516274-114516318
  hyper
acgaatacagaggaggcgcaacaaaggggctggctgccagcgcc

SEQ ID NO: 6196 - DNA, 51 bp, Homo sapiens
  chr5:115911175-115911226
  hyper
tgaagtaagcaaataaactacagtgcagagaatggcgtttttaacgacggc

SEQ ID NO: 6197 - DNA, 105 bp, Homo sapiens
  chr5:115911590-115911695
  hyper
aagtaacatcgggcggcccagcagttctcggagagatatttactagtcatggagttggctgagaaaagcaagtgcggagatcggggtctcagtcccacttaggcc

SEQ ID NO: 6198 - DNA, 36 bp, Homo sapiens
  chr5:119799821-119799857
  hyper
cgaagggcaacgtcgaggggactgcaagcgtcaacc

SEQ ID NO: 6199 - DNA, 95 bp, Homo sapiens
  chr5:124082318-124082413
  hyper
cgtccgctagtaacgagacagaatgtgctaacatcgggataaattagtgaaagggaagaaagaataagaagaaaggactgaaaatctgggctgga

SEQ ID NO: 6200 - DNA, 925 bp, Homo sapiens
  chr5:124082442-124083367
  hyper
ttccgcccgtcctgacagatttgatttcttgaactaacttaagagaaaaggagggggggagtagagggaggaggaggagaagaaagggtgggatgagaaactgggcaagaggagaaaaagaaaggtgtggaggaggagacagcagatgattcagtgagctgataaaccagttataacagcattcgctcggggcggggggcggggggcttggggcggtggggtggggaaaataacggcgtttaaaatgggctcagtcttcgaaacctaaaggatgtgatgttttcctgtcttatgttgttttaagaaaaaggaactgagttcctagtatagctcccgaggggagtggaatcctctgtcgctcaggtcagccagtcatgtggtaattcgataattagagtcaaaataaggtttttgttttctttttttttttttttaaggcgacccttttcgggagtttttccctcttatactcgcagcaaacggtgtgtctcccttttatttattttttctctcctctcccttcgcccagcccctcctgtgtttagtcagatggccccggagcttggcttagtatttttaattagctggcgtttggaagctaaaagcagtaatgaattgttgatggattggaagtggagagtcgctttgctggaaatgtcggggctgggagagggggatgggcgagttagtaacaaccaaccatctaaaaggagcgattttgttacagtgcaagcctttcacatcacgtgaggatcaagggctcaattggttgtcgtgagaacaaaaatggtgacaagcgtatcaagaaaatactgatctggtctttaaaaaaaaaaaagctgaaagtctctcccctccccctgcacacactcccccaacctcctccccccgcccccccgcagtgggcgaagctacaagttatgaa

SEQ ID NO: 6201 - DNA, 95 bp, Homo sapiens
  chr5:125930492-125930587
  hyper
cgtcgattctgcatagcacacaaggacctaaaatctaagtttttgttttaaaggcaccctacacgagaaaacttttactgtggagcttcaaaatc

SEQ ID NO: 6202 - DNA, 170 bp, Homo sapiens
  chr5:125931062-125931232
  hyper
tggaacaatgggagtgctacagggaggagtgggctgctgccatctggtgaaagactccgggagccacagttccagctgggaattcttttcagcaaaatattggcgctgaagtacagtaggctatagcaggggttctgaaactgtaaaatgcgtgtaatgacctggtcgtc

SEQ ID NO: 6203 - DNA, 45 bp, Homo sapiens
  chr5:126626239-126626284
  hyper
cgcgaccaggcctttggcggggtcacccaccaggcggtggaagcc

SEQ ID NO: 6204 - DNA, 63 bp, Homo sapiens
  chr5:126626738-126626801
  hyper
ctggacctgggtaagagttgggcaaactcaactccggcggctcctggaccttggccggacgcc

SEQ ID NO: 6205 - DNA, 213 bp, Homo sapiens
  chr5:140855386-140855599
  hyper
cgctagcgcgtgtcctgctcagagagcccggcgctagctcattcttcgtgcagttattggctgggactctgtgtgccgctgtcggccaatgaagacgctggagatcgggcccctgcccgtcccctttctgcgccccgggatgaggcagagactgaacagccggcgagcaaatcaacggcatccagaaagccatgtcggactcggcgcccagcg

SEQ ID NO: 6206 - DNA, 42 bp, Homo sapiens
  chr5:14142657-14142699
  hyper
cgtagccggggcataggcgttttgaactagaatattcgtcca

SEQ ID NO: 6207 - DNA, 335 bp, Homo sapiens
  chr5:160973804-160974139
  hyper
gtttaaaaaaaaaaaaaaaaattaaaagggaaaaaggaaaaacatgtatatgtataatacatacatatttgaataatatagaaaagtcaccccacagcagcatccagaataaaatttttgttgttatcctttcgttaagacaaaataactacagcgtctggtaagtttcggtagttgcaagaggcagttttgcaccgagcgggttgtgggtttttggtgtgtgtgtgtgtccttttaaatatgcaaaaccagattagaaaattagaggagagcaggtgtggcgtgccagcggaagataggtgccggtaagcccacttctggtctcagccggacac

SEQ ID NO: 6208 - DNA, 188 bp, Homo sapiens
  chr5:22853256-22853444
  hyper
ttctcttctgtttcccctttccaaatcactgtgccaacacactgctttgcattttgtccgttttcattcaaagaaggttctccaggccgggcagccagtagacaccactttcttcctggaagaggctgcctctcttctcagaaaagcctggacccctctctgtggctccctccacatttacccttcag

SEQ ID NO: 6209 - DNA, 100 bp, Homo sapiens
  chr5:22853569-22853669
  hyper
tcattgagtagtgaaaagtaattgaatcctatatttgaaatgtattttgtttgttctttttcccccctagcgttcattgtagaatgctttgaatgaatcc

SEQ ID NO: 6210 - DNA, 99 bp, Homo sapiens
  chr5:42950747-42950846
  hyper
cgcattcgctggtacccagatttctacaggagttaaacgtctcctgagcagctaaagcagagcttactagtaagaaacttgcaatgactaaggaacttg

SEQ ID NO: 6211 - DNA, 38 bp, Homo sapiens
  chr5:57878673-57878711
  hyper
gggagactgggagaggtaacccaggagcgtttggaaag

SEQ ID NO: 6212 - DNA, 159 bp, Homo sapiens
  chr5:57878752-57878911
  hyper
gcctgtttaatggtttgcttgcttgccgggagttgtagttcaccgctcgcccgtttgccgggaacacccggagggcgagactacagctcccaggagtgcacggggctcctcggcagtacgcgtgtgcggcgccaggagaggacagctccagtgctgatg

SEQ ID NO: 6213 - DNA, 227 bp, Homo sapiens
  chr5:57879190-57879417
  hyper
accctgggaacagagttgggtttctttacgctctgtgtggctgtgattggggctgtcttgatgagggatcgggctattcgcaatctttctaggctctgtaaagaggataagagtgtctgtctaaaatgaaaacccaagcaaacaaaagtcagaggagcatgcaatctcgtgttggcattgatctcctctcttggcatccggggtttgagatcgcggtgaaaactcac

SEQ ID NO: 6214 - DNA, 292 bp, Homo sapiens
  chr5:75378714-75379006
  hyper
agtcccaggcccggaaatagaatacaaaccctctttttgtccggtgctaacagagtccagcagtcagaactccctcgcgtctcacgctggacctgacccggggcgccgccaagtgcgcaacgcacagtcacagttggtgactaattaaggactgccgcccctctccttcacctgctacaaactcagagccctgacttctccagaagtacctaccacttggaggtggctctccttccccgccccctgccccagtcccacaccgcagcagcgcctcagcaccgcgacttgccgg

SEQ ID NO: 6215 - DNA, 345 bp, Homo sapiens
  chr5:76926856-76927201
  hyper
gtgccccgaagagtttacgcactgtgcaaacacaccaaatgtgtgcagtcttcaccacgcccctgcacattctgtgcactgcacagattcacaggtctgcagtcaggcatgtgtcaaagttcgacccacaggtgtacaaatgaagataaacgtgtacccatgtagcttaatagcatgccttataacactgatgtgctatagaattttcagaaacgctggaaatttggaaattgatgacaggctgtggatgacatagtttcaaaatcgaaagacaaaggaaaacccctaacgctacggttgacagagcggagaggttaatacagtgatctgcgtgggaaagtgaac

SEQ ID NO: 6216 - DNA, 192 bp, Homo sapiens
  chr5:77148195-77148387
  hyper
gtttctgcaattatggcttaaacgggtgaatttgggactgtggaggaccctaattggcctaaatttgatattttgcatatttgcataatgaggaaattggtagaaaattgtgttcattcatttgtgaaaaatcctatgaattttatgaatttgaaagctctgtttgtgcagactgtgactttgcctgctgat

SEQ ID NO: 6217 - DNA, 46 bp, Homo sapiens
  chr5:87436549-87436595
  hyper
cggatcttgttttttcttttcttttcatgggtccccgtttgcgctc

SEQ ID NO: 6218 - DNA, 80 bp, Homo sapiens
  chr5:87957200-87957280
  hyper
aagtcaaaccatcaagcacagtgatgtgctgctttttgaacaaatatggctcaaaactccgtatttccctgaataaagtc

SEQ ID NO: 6219 - DNA, 157 bp, Homo sapiens
  chr5:87969885-87970042
  hyper
cgcgccataggggtcatctatttgaggaggaagaaaaagcgggtgtgtgtgtgtgtgtgtgtgtgtgtgtgtgtgcgcgcgcgcgcgcgcgtctgccttccacggaaagagagacggagagatgtgggagggtgggggtggaagtatgcagacagag

SEQ ID NO: 6220 - DNA, 600 bp, Homo sapiens
  chr5:87970918-87971518
  hyper
tcacacttcaagcctccttcctcaaacaatccgatgggaaggacctggctgttcaggggaagcctttgctggcctctctttttacatggggtgaagtcgaaccccaatctaggagccctggcctagatggctccgcagatgagtcccagacgtggccatggaaagactgatctctctctgctcagagcgcctgcctcggtgctcactagcgcaagcacctcccaacacacatacatacatacacacacacacacaacacagcactcccatcacattaaaacgcgcgctcatgatcctgccgttaatgaagccgaggcgcataatgagtgcacaggtaaataggtaccgaaaccagaagacttcaccagtcggctgggcgatttacctctccctacagggagcacttgtagttatcgtgttttaggagtgatttgctgttgtctgtggtctctcgctcctcttcttgtggagagaagccaaaaaatatatatgttccgtggtcagagtcttctttctgataagctacccgagcattggtctaaaacatctgttttatctgttgattttggtttgttgttttggggagtgttgcttttctga

SEQ ID NO: 6221 - DNA, 38 bp, Homo sapiens
  chr5:87975991-87976029
  hyper
cgaagctgggattttcaacctcttgtttattcgtaaag

SEQ ID NO: 6222 - DNA, 243 bp, Homo sapiens
  chr5:87976663-87976906
  hyper
atgcagttgcccaccgtcccttggttttatgagagagacccaagcagaggtcggagccttgacctcctcaggttcatgacccaggcctcttcaccgcctttcccagttcagcactgactaaagaagatatctttacaaattaggaaaagaaaagagttcattatcctccctgaagcggggaaatgagtgagtcaaagacacagactcacaggcagcggttggcgccgggcacacgaaccggcc

SEQ ID NO: 6223 - DNA, 263 bp, Homo sapiens
  chr5:87986873-87987136
  hyper
cgggtgttaattaacgcgctaatttgagcttcaggagcgggaggcggccggtagcaccgcgagccgcgaggggccagtgacctctagtggacatgaggagatatgcagcgcgagtgagcgtgtagcagagaaaactctttcctgagcagctgctcgcgtgtctcctctgaatccaatgcaagggagggacacaagtccccaatttaagggagaaagagccgtcagcaagtggtgtcgaccaaagaccttagctcttctgatgt

SEQ ID NO: 6224 - DNA, 139 bp, Homo sapiens
  chr5:87987165-87987304
  hyper
cgtgcacacacacattgttacttatcagtttttccagcgagagaagaacatatggaaagggtttgagaagtgagcgtgaataactttggtttctgaacctagagaaaagcagggctttcaaagctccggaggcaccagc

SEQ ID NO: 6225 - DNA, 423 bp, Homo sapiens
  chr5:88179429-88179852
  hyper
tgcctccttttttccccctttatttaattttgtccttgcctttgcttcgcgctgcctttttctctccgtctctctctcccccacaatcccaaaccgttgactctttcctcgcgagctggagaaatcatcagtttcactcttgcaaaaggggggcgggactagacctcggagcattttaataaaacaaacatacagcagctccctcctcacccctccagtctcaactagattgataaattactccactacactactttaattatgtatatggtatgcagaataaatcactgaacatcagtacctcaatcaagcacttttaaatgataattgcatcttggtgaatcaatctttccattcctgacattttgctaattttagttttacggtggggtaatagcacatgccatacgcaaacctaatgac

SEQ ID NO: 6226 - DNA, 42 bp, Homo sapiens
  chr5:88180346-88180388
  hyper
tctaatcagtttggaaatatttaccgaggaagcagcttcctc

SEQ ID NO: 6227 - DNA, 287 bp, Homo sapiens
  chr5:89854237-89854524
  hyper
cgaagggggcaactagaaagtttagccaaaggagacgattagaaagcactgaccgcgcacttacattgggacgcccaggcagaggcaagactcgcgcgctcctaagccgaggcaggtcagcctaggcgcctggctgctggaagagtccattagggatggccaaggcagggtgttcccgacgccagagcgcggacctggctgcccgctgcggagagcagagtgcgcagcccggggcggccacccccgctccgctggtcaggtgagcgctgccccgggagccatgggtc

SEQ ID NO: 6228 - DNA, 198 bp, Homo sapiens
  chr6:108478324-108478522
  hyper
cgccccatactgaccgcggtccctcacctgctgactgattgacttataaatctgccccccacccacttgtctgtccattgaaggcaaattcgccatcgggaacacagtagtttctcaataactatctaatgcatggccacccttcccaggatttagaatatcaaagggacgtgttctttcctcccaaatcacctgcct

SEQ ID NO: 6229 - DNA, 256 bp, Homo sapiens
  chr6:108478551-108478807
  hyper
tcacctcggtccggccaccacctcatcccgcttcttcgcggcttccaggcctcgggctgggatctcagcccctgcctgtaggtgcggcccagagggtgcgacacgcgtcggagcggggcagcggaggaggggacagggacgcggcagccacacccgcatctctttcccctctcgggcatccccgagggcccttctgcctccagttccttgagcccccgaagccccccatgcggcaagagcgagtcgcaggaacaag

SEQ ID NO: 6230 - DNA, 369 bp, Homo sapiens
  chr6:143247975-143248344
  hyper
cgccgggcgcggcgagccccactttctcccggcaggaaggggggaggccgagagcatttcctgttgtgcagctgagccctgcggagacgtcattgcattcatgctccctcgggtgtcagcggacggggggccaaagttcaagccgcgtccagggcaggcagcgcgcggcggcgcggcggcgcggggcgggcggccagggctcccctctcccgctggcgctcccggcgcctccgtccccggccggcccagcgctgctaccggaggccagccctggggctccgcggggaagagctgctcttcctcccggaggaaaccgagctcgcaagcccagcgctcccagccgcagactgcaggctgccctcctccacc

SEQ ID NO: 6231 - DNA, 140 bp, Homo sapiens
  chr6:166298522-166298662
  hyper
ttaccgccaggtggcagcgtagaccaagtaaggaagccggcccacccagagctgggaactacaggggtgtgctttgtggctttcagactcacaaagattccagatgaacatgatgtctctttttaaaatcgatttgaaac

SEQ ID NO: 6232 - DNA, 224 bp, Homo sapiens
  chr6:26216853-26217077
  hyper
cttagctggttcaggcatgctgtcagaaaacaataacagcagtgagaatgaacgcacttaaataaaagctcgtgtctagagtctctccttttataggcctttcatgcaaataaagaattcaaaatatccagctctgattgggcaatgtgttagtgacgcatacatgtaaaatagccttcaccttatttcctttctaattggttggctcgtcaaagaacaatttt

SEQ ID NO: 6233 - DNA, 210 bp, Homo sapiens
  chr6:26217156-26217366
  hyper
tctttattcagtggattgttagttcttctgctgttaggaagccactatgtctggacgtggaaagcaaggcggcaaagctcgggcaaaagctaaaacgcgttcttccagggccggtcttcagtttccagttggccgtgtgcaccgcctcctccgcaaaggcaactactccgaacgagtcggggccggcgctccagtgtacctggcagcggt

SEQ ID NO: 6234 - DNA, 312 bp, Homo sapiens
  chr6:26217578-26217890
  hyper
aggccaagggcaagtgaaatgattactagtcaaatccgtcagtgatcccgagtcccagaaaccaaaggctcttttcagagccacccaccttttctgtaaagtgctggaatacacatacgatgcctgaaatctcaatgttcactgtcctaatttttaacgaacgcttctgacgttactggtcagttctttattgaaatccttgctcacatttcatgcactaatttatcttactggtgtttctttgcagtaaaaatgcgtttataaaggtatacaagaatagaaaccgaggttgtgacaccaaggtttcactgc

SEQ ID NO: 6235 - DNA, 353 bp, Homo sapiens
  chr6:26313163-26313516
  hyper
cgaaactggctgaaagctctccacacctaattagtaggattacagatattgaagcctacaaatgcgcatttccaccaggataccttgtggattcttacacgggtcaggtccgctgacgtttagcacgcctactttaaaacctcttttctgtagggtcctagtcttcaagtaaaatatatgcggccatatagcagaggatggtttcgatccatcgacctctgggttatgggcccagcacgcttccgctgcgccactctgctgtctcgacagtccgctccgccactctgctgtttcaacattactcttgtcaagtatgtattagaggctacaattttcggcatcttcctaatttt

SEQ ID NO: 6236 - DNA, 345 bp, Homo sapiens
  chr6:26313545-26313890
  hyper
cctggagaatgagaagtgcacactggccatccatatggggctgcacgccacttccaaacaccagcggtttagaattcttcctcgataaattcgaatcagctgaggttgaagttctctaaaacggaagcatgtttcgagttatgggaaaacaaagtgcaggctaattggcataatttataaaggtgaaattataaatgcttgggcaaatttcagccattcctggataccggagggagtcgttattacttccaaacattttttacttgagattttcatcgaaaatgttcacaggaaaaaaaaaattacagttgcagcgaggaggcaacagaacctagaactccgcgc

SEQ ID NO: 6237 - DNA, 210 bp, Homo sapiens
  chr6:26322359-26322569
  hyper
cggagtgccacagtaccaggcctgtaacgatgaggtttcttcacccctccagtagtgggagcactcttgcgagaggcttttgtagccagttgcttcccgggtgctttgccaccggtcgatttgccggtcgatttgcgggcagtcggctttctacgagccgtggtatagagacctccttacttaccccgcttctcctttggctggagctcg

SEQ ID NO: 6238 - DNA, 71 bp, Homo sapiens
  chr6:26331633-26331704
  hyper
cgccatacagttatctgagccagcgagctaaaaactgttgaccccgacgtgatttgaacacgcaaccttct

SEQ ID NO: 6239 - DNA, 324 bp, Homo sapiens
  chr6:26331811-26332135
  hyper
ccaggcagctattaacagatacaaaatagtgcctagctgcttccctctcggtaaaattgctgtccgcccaatcactgattttctctgcctctgaattgcttcattttcacctgttcttgtttatatttcattccgtttcttacctagttttccctgtatattccaaatatagacgtcttgggagtttcgttgtttttatctttatagaaatacattctgttgaaggtcagtcgctttggaatggggttgtagagaggaggtagcgaagagggaataatgaggatccttcctctcccaactcctcattaaggaactctgatcaag

SEQ ID NO: 6240 - DNA, 243 bp, Homo sapiens
  chr6:26332283-26332526
  hyper
agagagttgatttcacaccccgataattcttcaaaatcagatcgctggacctgaaactgaccctaaaaagaacaagaaatcctgtcatcaggagtaagtgggttattctggcactgtgctttgtttggctggttaaagaacctgccttgggtaaccagagatcggagttttctaaagtcagcggggtttgtctggggaccccgaatttacatacagacgatctccgcaaatagtgcaggggcc

SEQ ID NO: 6241 - DNA, 248 bp, Homo sapiens
  chr6:26577475-26577723
  hyper
ataaggatccaggcaaaaaaaatgtattagatagctctttatgctcaaacatgcacaagtaaaccatttttggttacatgagtaaaaaattttaggaataaactagaaatgtggtagcttcaccgaagggcacctgcgtagatgaaaagcagcgtttccaggaagtctgaggcttcactttttccttgtgaaatttgtacctcgcaacactcttcacctccactccctccctgagtctcctgctggct

SEQ ID NO: 6242 - DNA, 140 bp, Homo sapiens
  chr6:27059547-27059687
  hyper
cgcttcgggtgtgagaggtcccgggttcaaatcccggacgagcccacttcattttcgcccaataaggtttaaggatatttaaagtatttccccaaatagtcatacccaaaaatatgtactttcaccacatcaacagtaga

SEQ ID NO: 6243 - DNA, 43 bp, Homo sapiens
  chr6:27059899-27059942
  hyper
tataggaaggaggattttaatttacacttttaactccagcttc

SEQ ID NO: 6244 - DNA, 141 bp, Homo sapiens
  chr6:27356293-27356434
  hyper
cgctatttaaaactctgtgaaccaccggtctaggctatactttgcagtgtattaaggtggtcttcggcacctctcgcagacccccttcctcttgcctctagcgccaacctctcagcctctcgcataccaggggaggggctt

SEQ ID NO: 6245 - DNA, 223 bp, Homo sapiens
  chr6:27356463-27356686
  hyper
gcacagccctgctgtagctggctctcaggcgcaagcgcagagctgcgaccgctgctgatacgttgctcagtctcagtgtggtctctgttttgcaactggtcgtccgcgtcaggagacttaggtccaggcgactgcccagacaatgactggtcccgcataccgagcagagcatgatcagcagcagtctgagtggaagagtgcctgtgatcttagggaacctgat

SEQ ID NO: 6246 - DNA, 541 bp, Homo sapiens
  chr6:27470822-27471363
  hyper
cgtggccgagtggttaaggcgatggactagaaatccattggggtctccccgcgcaggttcgaatcctgccgactacgagttcgaggttttagataattaacaacagaaaatttagaagaaagaaatttaagccaactcacgtgttgcgaactgaatttgtttggtacttccccgatcctgaaaccccacaacaatggagggtggaagttactgaatacctactattttcataagattatgggtaccttaattagcagatacctagtcattttcccgttagcggtacctttgtacggttcttggggacgcctctcgtttccctgccttccaaaccctcctgaagcctatacctgttacaagtcttgatagtgctttcctcttcatggaaatttagtcctagtcagaggtccaagtctttggtcaattatcagtttctgtggaatcaatggttcaactgctttggtcacccggtctcgctggttgcaaatgactagaaacactgtcagagatctcgacaccaccacaatcgaaagaccaggct

SEQ ID NO: 6247 - DNA, 205 bp, Homo sapiens
  chr6:27560506-27560711
  hyper
cggtcactgtaggtcttcagtcattcatgagaggtgttaaagcacctctaacaagtgcaagatgcagtgttttggaggaaaaaaacaggcacctagcagaggatggtttcgatccatcgacctctgggttatgggcccagcacgcttccgctgcgccactctgctgtccccttcagctgttgtgccttatctccaagtaacttaa

SEQ ID NO: 6248 - DNA, 93 bp, Homo sapiens
  chr6:27636531-27636624
  hyper
ctgaatccgaaattaagacgccctcttattcgtcaagcgagaaggctatttacgttcgtttccctttattgtgaaaaatgaaaagaacaggcc

SEQ ID NO: 6249 - DNA, 87 bp, Homo sapiens
  chr6:27640312-27640399
  hyper
cgaggacactttttgtttcagaggaagtcgtgttaggctctttgactctctcgctttttaatgttcccacggcaggttaatgcttcc

SEQ ID NO: 6250 - DNA, 305 bp, Homo sapiens
  chr6:28249105-28249410
  hyper
cgaagacagacatttaccactgtgttggttttcaatcgaaatgatgtacataaatttggggcgtgcttgcaccgtccgaatgggcctggggtccggcggcggagagtgacctgggcggggcaggaggtggcagcgggggtcctcccggctcaccagagagacgagcggccgtgctcctagagaggcagggaacccgccagactccgccactccgctgcgggcgcggcgcagggagaagcttttgtacccgcccagctgctggaggcgccggcagcgcccgccagacccgccagcccagcggcccg

SEQ ID NO: 6251 - DNA, 125 bp, Homo sapiens
  chr6:28249579-28249704
  hyper
tgggtgtaatctcagaaaaatacattcaggggcgcgcctgagggtgctggctgctggcatctcaggtgctttacgtgcattcgtgaagaagcccatcagtatttcttgaataccaggtacgtgcc

SEQ ID NO: 6252 - DNA, 315 bp, Homo sapiens
  chr6:28456978-28457293
  hyper
cgaatacacggggaaacgtattcggcagtctacagtgtcaaaggatttttctattaatccaagaaagagcattacagaaagctatacaatacgtgaagacgattaaaaggaatatatctatacataattttaaaaaacctttgaatcttgaaagtcactcacttagggtacgtgaagctgccaaatttatcagagaaggaacaggcatctctcgcatggagccgtgggcctcggcgttaaggcactcttcagctacaggtggcagcccgtttagctcttcttaaggtcttgtgatgtcattttcaagaggccagt

SEQ ID NO: 6253 - DNA, 209 bp, Homo sapiens
  chr6:28457345-28457554
  hyper
ggcggggagcaggactccactgctttggcctcaaggagtttggtcgacacttgaagactgaccaagaaaaagtaatttgtcccagttttctcccaccctttgttttcttctgctcctcttgggcttgttttttttttgggggggggggttctttcttttttcttttcttttttttttttttttcccgcagtaagttctgaaaatcgcct

SEQ ID NO: 6254 - DNA, 156 bp, Homo sapiens
  chr6:2903557-2903713
  hyper
aggcaccgcttttataccgcagggtcgggcgcctcccacgctttctgcgtttaggcggagcctggcgggaccagcgggggcgccgcgcgtggtggccgaggtcagagctgggagcagggtcaggtcagggtccccccagtccgccccgcccggggc

SEQ ID NO: 6255 - DNA, 61 bp, Homo sapiens
  chr6:391113-391174
  hyper
cgcagagacagtatttgaatcaagcttaatagctcaagggagctgggccatttcctatttt

SEQ ID NO: 6256 - DNA, 334 bp, Homo sapiens
  chr6:46138265-46138599
  hyper
cggggcaccgattaaacggaagagggaaagtgcagaaggagtaggtttgtgtagctcgggtagacgtcaagggcgggggtgtccatcttctccaccaggattccatcctagccacccagaatggtcgcggcgtaggttatgttcccaattcccagtcatcccgcccaccgaggcctgggcttcttagatgtgcagtggcaaggaggggacgttgctttagggacccagaggagcagtgtgggttcccgggagggaagccacccacgcccctggactcaccctcgcagcgatccgttcagtccgtattagtttggagcaacgggagggagggtct

SEQ ID NO: 6257 - DNA, 162 bp, Homo sapiens
  chr6:46138801-46138963
  hyper
caggagtagctgcacggcctgtcaatcagcgggggcaggggcgggcgctgcctgggtttggagggtggagggggaggggactcccgggggcagggacccatctggtagggcgaaggcgtgggatggccaattgcttggtcacacacaaaaccttccggcaac

SEQ ID NO: 6258 - DNA, 116 bp, Homo sapiens
  chr6:5997274-5997390
  hyper
aattcaatccgtggggggaatgcagattgggctgcgactcactgggtttgatttatgaactgttacactagcaattgtttacacattgcatttcagagcccgggcccaccctcccc

SEQ ID NO: 6259 - DNA, 113 bp, Homo sapiens
  chr6:5997401-5997514
  hyper
cgggcttcgtgcgggaacctgctgcagcccccttggtctctctccatcctcctcccttcccccgtcccccccccccggggcccccgcagcttcctcccacagccaccttctcc

SEQ ID NO: 6260 - DNA, 208 bp, Homo sapiens
  chr6:69344116-69344324
  hyper
cgtcagccaactgtccaggaggcaaaatgactatctatgatgatagatagacagacagatagatagttagattaaaaggtggggaaacatcccttttccctttttcctttctatataatctggttttttctcttcaccccttttctcgcttcttcccaccccgtccccaaacctgttactagggaaacttgaaaaagaatcagataca

SEQ ID NO: 6261 - DNA, 72 bp, Homo sapiens
  chr6:69346042-69346114
  hyper
acttaaacgccgcagttgaaaagttagagaagtctggttttcaagagatgtgctgggtcagaaggaataagc

SEQ ID NO: 6262 - DNA, 116 bp, Homo sapiens
  chr6:69942728-69942844
  hyper
cgcattttaaaagccagcatttatggtccaaaatatgggacgggaatcagagctggtagaaaaatatgaaaagcctctttacaccctgagtatttgaaacaatccgatgagcatag

SEQ ID NO: 6263 - DNA, 227 bp, Homo sapiens
  chr6:72596315-72596542
  hyper
cccagccccagccccagccccgcccccgccccgcgccccgccggagacgcccggatcggcggagcctggcgcgagccctcgccccctcgcctctcccgccgcgcctccgcctgcccgcccccgccggccgaggctgggctgcgggaggcggccgggcggccccgagcttcgctagggcgaccaaaacaaaggcagcatccggggctgggtggatgcaaacaaccatg

SEQ ID NO: 6264 - DNA, 124 bp, Homo sapiens
  chr6:87646737-87646861
  hyper
cgcgtagagaaagcgtgcaaacccgtcaactgctcccgccgttcctctccctcctcaacccaggctcgctacagaagaagggagtagggtctgcccccttgttgtatctattttccccttctcc

SEQ ID NO: 6265 - DNA, 171 bp, Homo sapiens
  chr6:87646944-87647115
  hyper
acagccctgccctctagtgtctgcaaccgggagccctaaggcgccatcagctccagaatttctcttttataacctaagcaagacctggagtacctcggagctgcgacctccagttcacaataccacctgcctcacacccgggctcatcttttcatcccacacccaccaccc

SEQ ID NO: 6266 - DNA, 75 bp, Homo sapiens
  chr6:87647143-87647218
  hyper
ctgcgacctgcgtagatgatttagcagactgcccctgcccatgctcctgctcctgctcctcctcctcctcttccc

SEQ ID NO: 6267 - DNA, 565 bp, Homo sapiens
  chr7:119912404-119912969
  hyper
cgccatccacgccatctagtggcttgtatgtgttacgtttggttttaaggatgattcctaatgactcgggggcggggtacgcgaaaaacaaaaaggttggtagcgacaattttcctgtgtctctctacctcagtaacccctcatacgaacacctttaactcttttaactattttaaatatgcgcagtgatgcgcagagaggatgaaggggacgcaaactttcagagacgcacgccccttgacgatgacatttagaaaagggctccacatccctgttattcgtaaaggacgggaaaaggagttgtgtcaagacctcgatcgaggagagtctctgattttttggcaagttggacagatggcatatcaatccctgcaacgttaacaatctggttttgaaaataaataaaaacagaaagaggaaatgcacttaaaaattccgcgtcggagctttgcgggtcttgccttccagtcgcccccagaagacaaccaattcctgcgcattccgctccgctcaccctccttcccagcttctctcgctctctttccccccattttcccacgctcgc

SEQ ID NO: 6268 - DNA, 107 bp, Homo sapiens
  chr7:145814199-145814306
  hyper
gcagccactgcagtagacaaactcgaaacccagcgtttctgttttggaagagacagggttgtgacgctggtgatgtttctggaaagttgttcctggtcttggtgatc

SEQ ID NO: 6269 - DNA, 154 bp, Homo sapiens
  chr7:152591569-152591723
  hyper
cgctcccccttcgccccggccctcggtgggcgcctctgacctgggccgtagtttccaggcccgcgcgtccccgaggcggacgccagagggcgcgcgccccccactcctgcccgcgtcggggccgcagccgcgctccgccctttgcctgcagagc

SEQ ID NO: 6270 - DNA, 151 bp, Homo sapiens
  chr7:15725486-15725637
  hyper
cgagggtgcctggcgcgcccttacctgagctgtcgcttttcctcttgccgccgcttcgcttctccgcctccgcaggtgacagtgcctggcggccgtagtcccccggcgcgcacgcggccccagtcggggtgctggagcccaagctggaaga

SEQ ID NO: 6271 - DNA, 48 bp, Homo sapiens
  chr7:15726410-15726458
  hyper
cgctcagcctgcgccacgcgctcccagttccacttcctatctcctgct

SEQ ID NO: 6272 - DNA, 89 bp, Homo sapiens
  chr7:15727077-15727166
  hyper
ccacttgtccaccaagaagaacttttcctgggtcaagaatatttccaagcgattgtgtcccggtcatatgagatgtgtagattgcacgc

SEQ ID NO: 6273 - DNA, 374 bp, Homo sapiens
  chr7:16460517-16460891
  hyper
aaggccagaacttcccatctctgaaatgcgggagggaacagagctcaagcttgaataactgagcgcggcccggcagtcccccaagtgaaggtgctagcgctagagcagcggcagggcggggagcgggaggccgggccccagggaaccgcggggcgcgcccggcgccgcattacctctccagggcctgtagggtgtagctgatgagcggcctctccaggatggggcagaattgcttcggggtggggacccccatcctctccccgcaccccccggcaggcaacacagctgccacggcttgcgggtggcgcccgggctcggtcccggccacgctctgcagggaggcggaagccgtgtggtccgcgccgcgctgacca

SEQ ID NO: 6274 - DNA, 61 bp, Homo sapiens
  chr7:20827463-20827524
  hyper
ttgtttctttgatgccgtggctttttttttttttttttttttttttttccctgaggtggaa

SEQ ID NO: 6275 - DNA, 79 bp, Homo sapiens
  chr7:20827557-20827636
  hyper
gaggaggtgtgtgtgtcccgtggtgttgagtaaatttcaatacaaaaggattagatagagaagagagtaagcgagggtc

SEQ ID NO: 6276 - DNA, 136 bp, Homo sapiens
  chr7:22589952-22590088
  hyper
ccgcagccccagggaaatggcagtgacacaggtggcagccaccttcagagcgccaggcccccgccagcacatctgcaggtagcagctttggccacaggaaggcgcatctgcactgccgggttcgcaaaagcggggc

SEQ ID NO: 6277 - DNA, 290 bp, Homo sapiens
  chr7:2517249-2517539
  hyper
cgctggggcctgtgcccggacgtcctggtaggagggtgggactgctgaggccgggaggggcctcaaggtggtcgtgactgtccgccagccccctgggtggtgcagagcagtgcggagcctgcggctgtggagcccgtctctcctgcctggctcgtagcagggctggccgtggccctgcagggggcagccctgggcagcagaggatgagcgtgcctgccctccccggccacatccgcgtccccatcctgcctggccgtcctggggcccagcaagccgcaggtccctcctac

SEQ ID NO: 6278 - DNA, 396 bp, Homo sapiens
  chr7:3082731-3083127
  hyper
cgcggggggctgtcctctcccatctcccagctccacacccacttttggtgcggctgcccttcctccctgagccaggccccaccttcccaggagcctctgagtcaggctgggctgtggtctgcaaacttccgggcctttcaggtgtcagaaaagtttctcttcctccctctggggcaggtgcaccaaggggctgcagcctcctgacccccgattttttcctgtccagtaggaggaggtgggggctttgctgggcggtgatactcagagacgctcaaagagacacggaggagaggcacacgaggtggaaagtgagggagaaaaagggttggaagggaaaaaggggagaggagagtgagagagagaaggggggcagggggacagagatggagagggaag

SEQ ID NO: 6279 - DNA, 52 bp, Homo sapiens
  chr7:42927739-42927791
  hyper
cgcttaaactttcacactgcggttgtgtcactgaagcagtgcctgaaatcta

SEQ ID NO: 6280 - DNA, 412 bp, Homo sapiens
  chr7:42928175-42928587
  hyper
agtggtaggaggatgtgttccctttgcagaatcagaccccctcctgggactgtggggaccctctgtcgccggcctccattggaggatgcgttgtccctggagctgggtgcgctgttgcgtgacctggggcctgggtggtgggcgggcctgtccatggcaaagggcacggctgcgcgctacttcccgagaacccgccagcaggctcttgggaagcagcgatttctccttagtcacagtcagagagggtgatgcgacacactgggcttcactgtgctcgtgaagcggagccagggtgaaaggatcatatggcctaaccctaaccctaatgggagtaacttcacctgcgtcccacaggccccgcaagagtgacgctgccaggcaggcgccgccctgttcggttcctgctgctgtc

SEQ ID NO: 6281 - DNA, 281 bp, Homo sapiens
  chr7:5603124-5603405
  hyper
cgctctctggcccctgcacctgggagaggtggggtgctggaccgagggcgaagtaacagcgtcctgagggcccatccccaaatcgccttccttagggaagccggaacaaacgatgcagcggggcggccctggatctgttccttcctaagagctggagcaggtacagccccatcctagaccccagcaacccgcgcgccctccctcgcaccatctcccctacctggttggttgggttgtggggttccaggcgaccgccaggtggcgcaaccgacgcgcctgcc

SEQ ID NO: 6282 - DNA, 65 bp, Homo sapiens
  chr7:63767198-63767263
  hyper
cgaccagagagccgggagccgttaagagactacaacgtccccgcacgcccggcgaggtgcgcagc

SEQ ID NO: 6283 - DNA, 57 bp, Homo sapiens
  chr7:64734140-64734197
  hyper
cgcactaatgctggggacggtgggtgtgggggagggtcctggagccttattcaatct

SEQ ID NO: 6284 - DNA, 116 bp, Homo sapiens
  chr7:79084011-79084127
  hyper
ggagacactcccttgcccaggaaagccgccagagtccggcttgtacctggggaagaatccttaagacggtctggcccaacactcctttgctcacagagaaaggggagaagactccc

SEQ ID NO: 6285 - DNA, 322 bp, Homo sapiens
  chr7:8476750-8477072
  hyper
ttggggtaaacaggtgaaagccagggcagccaatccaaaagaacagcctttctgactctgtcaccgaagtctgtgcctttacccgctggaacgcaggcggaatgcaaaaagtgtccttcccatttcccatcttcaatcattttcacccccacctgtgttcagtaagcccactgacattgagagaccatggatggagggcagaaagtttggccagaagaaatatagaatttttttattgagagatggggggagggaatgcaaagtgaaagcgacgggggcgggggggaggtaattttaaggattcccttgaccatcgtaaccc

SEQ ID NO: 6286 - DNA, 139 bp, Homo sapiens
  chr7:94285147-94285286
  hyper
cagggtgtactgaaggaggggtacggtggggtccgggacagaaagagaggctggtgcccaaagggcgcgctcaggcgcccggaacccgagcgggggagggggaggcggcggcctgttggccccgggacctccacgtcgc

SEQ ID NO: 6287 - DNA, 48 bp, Homo sapiens
  chr8:105236123-105236171
  hyper
gcccctctgctctccgggactgtgccgggggcgacagccctagagcac

SEQ ID NO: 6288 - DNA, 100 bp, Homo sapiens
  chr8:110986113-110986213
  hyper
cgcgcccgcctccccgcccagccgccgcgtgcctccggggtacctgtccctgcagcaggaatcgatgctgagctcatcgatgccccagtactggatctcc

SEQ ID NO: 6289 - DNA, 174 bp, Homo sapiens
  chr8:110987222-110987396
  hyper
ttgagaatttatattcctcccttttcttttactgctgcttcataggcctcccccggggtgttcgctgggggtgtgagcaggtgggggagggttctctgggtgagggggccgcaccattttctcccaattcactctcattctagtctgatgatcactgacgctccattttcttcc

SEQ ID NO: 6290 - DNA, 66 bp, Homo sapiens
  chr8:110987616-110987682
  hyper
cggagctctcattttagaaggaaaggcaaaaagacaaggaatagaacaagcgtgggctggggcagg

SEQ ID NO: 6291 - DNA, 300 bp, Homo sapiens
  chr8:110987956-110988256
  hyper
ggaaactgtgttccagctgagctctacccagcgcctgctgccttgccttgccccgcctccacctccctccgggctcctggcccctgcgcttacgctaagcgtgtccgccccgcccgctctagctctgagagccactcgcccagtgcttccagcaccagcagaggggagtggcaggatctaagggagggaggtgagacggcgggggtggaggcggggggtagtgaggtgcccggtgacactcaatattacattcatcctgaatacacttgcagaattactgcatttgattcccgtttcccc

SEQ ID NO: 6292 - DNA, 342 bp, Homo sapiens
  chr8:114447448-114447790
  hyper
ctgaggccccagagagaaaagaaaaatcaagcttcaaggagcaggttgggattacaaggcagttgctgccacagagaccggggcgactgacttcctggcattttgggatgtaaattaaaattctagacatgccacccatcattggttatagtagagggaaaggtaacctctccagctccctcctcccaaaacatgaattatcatttccactgaatgcaaatgagctgccttccgtggggggacagccagctgcaagctggacaataaactgtttcatagagacgcggcccgattgcagttcagagaggcactcctttacaaaggaagaagcgtccagtttgt

SEQ ID NO: 6293 - DNA, 818 bp, Homo sapiens
  chr8:114449602-114450420
  hyper
tgtgttactactgtagttgcagtatatttcaggcaggcttctcccatttattatcctgtgatttaattgaaaaaggaaatcacagagaattttctcaataaattctgccttcacacggaaaagaatgtatttgaacacatgtatttacatactcaaataactacgtgtaaacccttcaccgggtttttatgattcgggaaacggatttcatccgtggcctgggcgggggtggggtggggagggaagtcaatgtcgtttcctcaaatagttctccctttcatcctcccaacccccttttcagtttgtgtgtgccgcagttaaactactttatctgtggtagttatctagaacaaacccatttgtcttaattctgaatcggtaccaaatatgtaaataggaggtttctttcaaaacgaaaaatgtatgtatctatacatctggatctgcttcccccatgcaccacgcaagggttaagattgcacaagggaagagttcttgcgccatctactggccgtctccgagccgcccgttcttccttcgcatgtataagggaccctgtttttgccatcccttggtgtcaggggagctgtgtccccgggaccagtatgtcgtgctccttgatttttttcgaccacggtcctggcccaaatctttcaatgaacaagttccttagattaggcaactgattggtgatctgaccttttcgggaatctggtcccctctcagcagtggggagtgccacagcgctagttctgaaacaggatattgctgttgcgtgtggctccatttaactgcctcaggctatcatgggcgtgagc

SEQ ID NO: 6294 - DNA, 110 bp, Homo sapiens
  chr8:11561282-11561392
  hyper
cgggcaccccgggtgacccagtgccccacacaagatcgagagttgagcccaagaggtcaccttcttctctactggccccgcccctcgcccgccgctgcgggatgaggacc

SEQ ID NO: 6295 - DNA, 151 bp, Homo sapiens
  chr8:140643192-140643343
  hyper
cgaatggtccgctaggacggagagcctgtgcctcaggggctccgctccctgcaagaggggctctgcgcagcgccggccaccggagaggcaacggcgccctctggcgggcactcgggcgactgcagggacacggccccgggtgcggggtcgg

SEQ ID NO: 6296 - DNA, 210 bp, Homo sapiens
  chr8:145747534-145747744
  hyper
cgtcggcactgccggccagtccttgctcttcccacctttcggaggcccaagatcctactgtggccggccagggccagcgagggaccccccccatgcagagctggaggttggggtgatgtcttttcggaagagcttcaagggaggtgttggggcctccccggccaccttccattgctaccccaggattcccgagtgcaacgttcccggctc

SEQ ID NO: 6297 - DNA, 336 bp, Homo sapiens
  chr8:4851007-4851343
  hyper
cgcagcctgtaggctacttagaagaaaacattccccaactcattcagggagaaaaccaagctcacagagccccaagcccaggagccacccagagaaactccttcccctgaccagcgtagaaggaggatacccgtgcgcccacagtgaatgtatctgacttggaagccggtccagaactcctagcctgtttcacgcaccttgccaacaccttacaacttgcaaggagcgaagtccgggggagaggaaagcgggggcgaccttctagaggcagctactcctcgccggctgaggacgttggagagggaaggaggagaggaggaatggggtgtatgggtg

SEQ ID NO: 6298 - DNA, 118 bp, Homo sapiens
  chr8:4851375-4851493
  hyper
attggtaccaaaacccccgtagagagcccgaactttccaggccggcttcacccgggacgctttcccaggcgcgtcgggtccggggagaaagtcctgggaactgcccctcagccacccc

SEQ ID NO: 6299 - DNA, 74 bp, Homo sapiens
  chr8:4851508-4851582
  hyper
cgtctcggaggaggcaacaccgccccggcggagcacagttccagcccaactcgtattgggttcctttctccttg

SEQ ID NO: 6300 - DNA, 126 bp, Homo sapiens
  chr8:4851611-4851737
  hyper
tctcctgtgagcccaagagagggggaaggaatggcggggtggggcgggggcccaggagggctggggagagcgcgatggaagctccctcccgtgcatcgcgttccccgagcttcggcgatggagcag

SEQ ID NO: 6301 - DNA, 35 bp, Homo sapiens
  chr8:4851780-4851815
  hyper
cgcacactcgcgtccgcacacggggcctccgaggg

SEQ ID NO: 6302 - DNA, 66 bp, Homo sapiens
  chr8:4852588-4852654
  hyper
ggagacttgttgggcgctcgggtgggggaagctcacgccgcacaccggggaggaacaatgtaatcc

SEQ ID NO: 6303 - DNA, 203 bp, Homo sapiens
  chr8:60032288-60032491
  hyper
tgccgagccagagccaccagcggcctcagggcaccgtggggagcgcgcagctagggggcgctgtggcgcaccccgccccgcagccccgcccccggccctccccggccccaccccactcccaccgccctctccgcggccgtccccacccctatctccgcgacccccactcctcctcggctgttccccaaccctgtcactgtgct

SEQ ID NO: 6304 - DNA, 281 bp, Homo sapiens
  chr8:67025640-67025921
  hyper
acttcctcagcaggagacatccttaggtcgctggttcgattccggctcgaaggagacaagtgcggtttttttctccagctcccgatgacttatggcactttccttgggtgccttcagtgacacattgcattccaacgagcagtttgaaagtctagcgctttctccccattttgggcctcccagcctgcacggtaattctttttagccattcgccctgcgggaacgtgtccgggcaggttcccagcgcagctgtgggtctgcgcttggccgagcgactgccg

SEQ ID NO: 6305 - DNA, 235 bp, Homo sapiens
  chr8:67026578-67026813
  hyper
agtagggcgagctccagcttaccactctaaaacttcccagacaatgagtggtgggcgctagcagtttatccttctagctttaaatttttagacccatttaattggggggaaattcacgaaactggttatttttgcttcaaaaatggcgacagattgccgtcacatgtattatcactcagaatcctttatgatttgtgataagatgtctgcatttccagggactcatctgaggcta

SEQ ID NO: 6306 - DNA, 43 bp, Homo sapiens
  chr8:69242761-69242804
  hyper
cgctagagtaggcagggcagaaggtgctgaggagaggctcaga

SEQ ID NO: 6307 - DNA, 57 bp, Homo sapiens
  chr8:69243011-69243068
  hyper
acagtcgcgcgcgcacggacacacacacacacgcacgcacgcacacacaccggtggc

SEQ ID NO: 6308 - DNA, 959 bp, Homo sapiens
  chr8:70745324-70746283
  hyper
agcatcccacctcgctgcgccaggggtaccgggtgttcgccgcctgggctcgcggcaccctcgggagtgaagctgccgacctgcaaagcagaaagagggcggtcagcgaagagcggctgcggcttggggctagcgtcccagcgccccggggaccagggttaggtgaccccgaaccgtccctagagggacggaggagctagtcaggagcggagccccggaggactaggcagcagccggctgcagtctccagtcccggaacaataagcagcaggcggtcggcggagactctccctcattgtctgccgcggacctgcccccgtcccgccccttctgccttaaacattgcgtttgcttttatatgttaataattatcaacctggcagctctgactcagaggcagtgtcttttaatcgagtgaactaactgcagcctttccgtactcctactccattactcaaaatagaaaatgcccaaaagaacaaaggaaactttttcacagacacacaatgtattccctgtcccaatttttctaaaaggaaaaaagaaggtgggggtaaactacgtgtgtagaaatgtgtgtgcacactggtgtgcgttggcacgtgtgcgcgactagatttgaatctgtctgctccaccagagacacacattcaaagccgaaggcagcagcaaaaaggtcaacatgcttgcctctttattcccaacaccaaaaataaccccctgaccgaaagaactcttcaattacaaataccaggggcattcgaggctgtggcccgcactaagtcccagagcgcggtatcaaacgaaaccgaaaatccgtctgctttgccgagagctagggaagccacaaccaaacaaagagatcccggcacgctgtcagagagcgcgcgaggagcccacggagccggctgggcgcacgcgggccggcggggaggtgtgctattgactgagcgcacccc

SEQ ID NO: 6309 - DNA, 77 bp, Homo sapiens
  chr8:75897394-75897471
  hyper
ttcagagaaagaacagtgtgtgccttcacacttgagaggaaaagctctcaagttgccggggagctgctggcttcttc

SEQ ID NO: 6310 - DNA, 113 bp, Homo sapiens
  chr8:80695946-80696059
  hyper
tgtcgccgctctttggcgcccccgcaacagctccctctcagcaggacgcggaaaggtcagggtccctctctctcgtatataccacaaagaaagcgcgttccccgcggcgcccc

SEQ ID NO: 6311 - DNA, 133 bp, Homo sapiens
  chr8:80696101-80696234
  hyper
cggtgggcccgcgggctcctgatctgtccaggcccctaaactatcacaaggaggatatttgatgaccgtctttcttccctcgctctctcccaacaaagggtaactgacctctcgcgtgacctggccagcgctg

SEQ ID NO: 6312 - DNA, 307 bp, Homo sapiens
  chr8:80696263-80696570
  hyper
gtgtgcagacccccacagggcggaggcgagcggcgcgacccactggacggacgcggcccggagctccaggcgcccggacctggcgggccctccctgggcgggcgggtggcgcgtcgcccgccgccgatccgggcggggtgaggggggcgctgtaattgcagcgcagctcgggttcccacgctcctattgttggcgactttgtttccaattcccatcacgtgtgctaattagttagcgctgctggctggctgggaggcgtgtggctggcctaaaagcagaaagatcacttcctgtagggagccgggcc

SEQ ID NO: 6313 - DNA, 261 bp, Homo sapiens
  chr8:95003763-95004024
  hyper
cgtctgcacagagctcccggctccccgcggcgggggcaggagtcaacgccgtcagttacatgctcgtcagatgtgcacgggcgccacacacgatcctgctaacgtggtcggagaaatatgacctcagcgcaggtgaagcgtgggcagctgacgccacggtgatgtgtgcagatccggtggggactctgacgcagccccagggcaaaaccaacctgctttctaccttcaatccagcaggatgcccgtcatggagaaaaaggc

SEQ ID NO: 6314 - DNA, 202 bp, Homo sapiens
  chr9:100610480-100610682
  hyper
acagagactggcctgggtaaggggaaaaaatcactgcctcttcctgtgcctctagtggttgaactagaatcctggctagctcatctcgcttttgaagggggaaggggagtaatcatcggctcttttgagattgtcttgcaaaccatggactctctccccagaaatgaacacccacaatctagtgtgtaaatttcaggtttcc

SEQ ID NO: 6315 - DNA, 274 bp, Homo sapiens
  chr9:103790689-103790963
  hyper
gggagaggacagccccacgttaccgaggactcgaggcagaagcggtctccaaggatgggtggggatcccaccactggcttccagctctgcatgcgccgcggagtccccgcgcagggcgcacctttgcggcggggtttccccgctgccttctgggaaccccgcggagcgactgccgctggacgcaatctggctggcttgcctctaccccgagctcactctctctgctctgtctgggctctggagccagagctgagtctctcttgagcatgcgcag

SEQ ID NO: 6316 - DNA, 204 bp, Homo sapiens
  chr9:103791017-103791221
  hyper
ctctttcctttcattaaacaaacaggagatcctgaaacctggaccctgtgcaagctgcagcgccaggaggaggcagcggaggaagcagagcgcgggatgggcgcccagcggcatctgtgatcccgcgcacctccgccccacgggcgcgcgcacaaacacggacacacacatacacacactcgcgcacacactcgcacaaacaca

SEQ ID NO: 6317 - DNA, 50 bp, Homo sapiens
  chr9:10612635-10612685
  hyper
cgcgctcggaaagccggcttgggtcctgctaattattctgaaggcaaagt

SEQ ID NO: 6318 - DNA, 143 bp, Homo sapiens
  chr9:10613299-10613442
  hyper
gattccagggatccagggtaaagcggttcgcgcgggaacaggaggatatgtcaggcacaggctattccccatcactatagccacagaggactggtccagatgcggatcccgatctgtgcttcttcaggtgttcgcgtgctttc

SEQ ID NO: 6319 - DNA, 392 bp, Homo sapiens
  chr9:122318421-122318813
  hyper
cggctgtggccaacacgcgtctccaggcccacaggctctgaggcggaaaccacagttccaggtccccaggctccagccgccaatgcggctaccgaccagcagagggcagctgcgggaagccgtccaaaggcggcctccacccccattagtgccaattaagccgcgagatgcaagaggcgagcgcgtggtgaaagaaaacacatctacttctgggttgagctaggctgggtgatctgctgggagggacgttgacctgcttccaaaaagccggctggatggtgccgtggtggctgcctgcaaaggaacaccggcctatgggaaccagaccctggggcttcccgcgagcttctcttcctccagccagcaaaacaggaaaagcctggcccagggac

SEQ ID NO: 6320 - DNA, 224 bp, Homo sapiens
  chr9:16133902-16134126
  hyper
cgcgtgccaagcaccgggatcccagctgacccgagctcagagccctccaagagagcgccatctagtggagaaaacacataacataaataactgtgataagccttgcaggaggaaggaccgcaggcactaagtgagcacggaagagggaggagtaaattccgcacagattacggggcaggttcaccgggctcagtcagcctgaaaaggactttaatactctaacc

SEQ ID NO: 6321 - DNA, 97 bp, Homo sapiens
  chr9:19127135-19127232
  hyper
cgatagcaatcgccctaaatctgttggcaggaaagaagcctcaacgcacaaaggcaagggtcgaaagcgcgggttcagcagaccgcccctacccagc

SEQ ID NO: 6322 - DNA, 72 bp, Homo sapiens
  chr9:21395928-21396000
  hyper
cgcttcctgattgttcatgattttcccctttctccgaattcgggtctttctccgcagaaatggccctgaatc

SEQ ID NO: 6323 - DNA, 36 bp, Homo sapiens
  chr9:21396327-21396363
  hyper
gcaaaggcagctttgtgcgctgttagcagtggtcgc

SEQ ID NO: 6324 - DNA, 543 bp, Homo sapiens
  chr9:34701753-34702296
  hyper
cacccaggcccccgagcctcgggggtcctctgcggggccggcccagcccggtggccgggggaaggcccgtgtttgtcggcgaatatgaagcatttatctttccctcccacgccccaaatagtcccgatttacccagagcccaaggtgcccaatgttgaagtcttgaaataattactgtttggcttaaaggctgaaggagggttcacatcacctctggcacttcgctcgcacccgatagatatcttacaccactcattacggggccaacgctaagaaaggtttccttattccaaggaaatatattaggcgcgaggctggggctggaggatgaagggctatagcctgacatgggcggaaaaggaacttgtcttgcccataagtggacacagggaaacgcgcaacctttggcctagaatgagacacatgtgagaacaaatcgtgaaaataattgaaaacaaattggtcctagaaagatgaaggaaatgagaatggaaaattcaacccccactcctgttttcctgtagcagacagaggactgctgcc

SEQ ID NO: 6325 - DNA, 894 bp, Homo sapiens
  chr9:35756575-35757469
  hyper
cgaaggcctgtctagcacgagggcccaaaggtcttgtcagtggccagtagctctgccgcctttcccagagagggggtccaggggacatcctggaaggctgggccctgggccaccttctgctcttgcaagctagagccagcccaatagggggcggatgtgagtggggagctggggcgcatgaaggtgggggtgatgccgaaggggaagggatcgccagtggggattggtgcgtgtgcggaaacggggacagaagtgaaggttcatcgcctataacgaagatgaggtaggcatataggggcttctggaaagctagaggctgggctgagccaggagtcctctcccagaagttggggggcggtgcagaggtgtgggtcgagcccgcatgcgtgcctgctggggagggggtgagtggtgaggaccaggcccgctgggtcctgggggcgcggtggctggcgcgcaggtcccggagggggcggctggcgcgcactacacgcttgggaacaaggaaaacatccgccggaggcccggccgggcggcgctccagcctcggggcaggtgcgcggagaggaagtgagagcattccggcccccccaccccaaccccggccgctggccctctggtgagtcacagccgacccccgccgccggagggagaggggagctgcgggccagagccccggagggtctggaggagccaggagggtttctgggagcagagggtcacttagtgggcttctgtcgtggtgtcgctacgggcgcgaaacggacactgaacacagtctgactgtatggaggcaggtggggagggatcccctgggagaacttggcgggccgagagcagaccccagggcaaggaggggcccccgagggggaaaccgggagtcgggcaggtggc

SEQ ID NO: 6326 - DNA, 316 bp, Homo sapiens
  chr9:6644554-6644870
  hyper
cacaaaagacaaataggccagaataatctaagtccaagggagccctcccggccacttacaaacagggtcttccattttcaagggtcttttcaaacggatgttggcagggaccgtcttctcgatcaattcatcaatgctctaaaattaaaacgcaaggcagaggaaagtgcctctgagttaaaagagtcacctctgtgttttgcgactacaaagccttgtgggaacctcattgaaatcgcctaattagggttctttttaaaagaaaaggaaaactctgagcaagccagaatgatttggaggaaagaaaatcgtgaag

SEQ ID NO: 6327 - DNA, 45 bp, Homo sapiens
  chr9:71789757-71789802
  hyper
aaactcatcacagagcagaatcccttttccctttcaatcagctgc

SEQ ID NO: 6328 - DNA, 386 bp, Homo sapiens
  chr9:90113280-90113666
  hyper
cgcctcggtgggccgctcccttccctcccttgctcccccgggcggccgcacgccgggtcggccgggtaacggagagggagtcgccaggaatgtggctctggggactgcctcgctcggggaaggggagagggtggccacggtgttaggagaggcgcgggagccgagaggtggcgcgggggtgccaccgttgccgcaggctggagagagattgctcccagtgaggcgcgtaccgtctgggcgagggcttcattcttccgcggcgtccctggaggtgggaaagctgggtgggcatgtgtgcagagaaaggggaggcggggaggccagtcacttccggagccggttctgatcccaacagaccgcccagcgtttggggacgccgacctcgg

SEQ ID NO: 6329 - DNA, 305 bp, Homo sapiens
  chrX:13706949-13707254
  hyper
cgtttgactagtcgtttttatcattgtaatcacgacatcctgtgactgtgctcatgaggtctgtttatttccactttacgtaaacttttcaaaatgacagttatttcgtactcgctgtcgcccgaacgcagacgggaggacacttcaggagcaatcgacccgaaggaaaagcacgatccaggccccgcctgcctcggctccaccttccccgcgcccgtcccccagggtctcggccgcgggaccccgccttccaggccccgccccgctttttccctggccccgccccggcccgtcgccatgttgtt

SEQ ID NO: 6330 - DNA, 562 bp, Homo sapiens
  chrX:13707434-13707996
  hyper
accgggcggagtgcgcgggtgtcggggtctgagggggcggctcgggcctcgggcagctggggcggggtgcggtgcgcgcggggctagcgcgggtcacaaggccgccccgggagagaggacggctggttgtctccctgcctcctctctgacgcaggaggaaagacggtccccacacccttggggagagggactcacagaaacacacacaaacactggagaaagggagatacaaaagcccggacacccgtgcacatacacacggagaaatacacccggtcacctgggaacacacgtacacgccagcctttcccccaaccactccgggacacacatccacagaccccaaaccaaatcctacacccgaatgattaatgtagggaaaacaaaggcgctcccatgacttgattttggcgacctctgaagttccacctagcagaacgtgtttgctcgatgtcttacgaccactcgggtgaggaattcggaaagtaaagccaatcttagaggctgcaggcgttttgggggcattatctgattcagacgctggctaacgtttcacaatcgc

SEQ ID NO: 6331 - DNA, 132 bp, Homo sapiens
  chrX:15511311-15511443
  hyper
cgctgcggtagcggcacctggagccttagcggcgggggtgacgcgaagagccgccgggagcgagtgcagggagggcaggttaagagagtgtgggtccagtagcctcaccgtgactcagcgcttcgcggccgg

SEQ ID NO: 6332 - DNA, 140 bp, Homo sapiens
  chrX:15511544-15511684
  hyper
ccaggccagcttggcggccctttggcctccctgcctctcgtgccgggaagagatgctcactcgggtaatttaggcggcacttgctgtgctccaggaggaaatgtgtggcccgggcaggtgctctgatcggcgctccggtc

SEQ ID NO: 6333 - DNA, 219 bp, Homo sapiens
  chrX:16805209-16805428
  hyper
cgcagtaagataaccgcgcgggagccggggtgtgcttggccccccttcccccgcccccctgcgctccccgccactgcgcgggcgggcaggcgagcgggtgagtgtcgcagggccggtgcgagcgggacgctcggcccccgggacctagaccccggggctccgagggcttggctgcacgtggggccggggatggatggggaggcgatgctggaggacctc

SEQ ID NO: 6334 - DNA, 328 bp, Homo sapiens
  chrX:16888225-16888553
  hyper
agccaagagcagcccgaccgctggcgctcctgcctttcccaagcgcgtcacactccccactgtcgaaagcccgggccccgtcttgctgcctgggtgctccccagacgccgcgtccttctttcctgcctcctccccgctcgcgggtaccgaggtctgaggcgctcttctctctctctccaaacttggaacgagacttttcaacccgcgcctcccagcccgcccaggcagctgagcgcaggcgcatccgccctgggaaaagtgagaggaggcggagaggcgggtctgggagccaacggctccggcgccgagaccaatgacgcgcggcggg

SEQ ID NO: 6335 - DNA, 811 bp, Homo sapiens
  chrX:40012149-40012960
  hyper
cgagagggcgggaggagacagggagacttccgcgggaggccgatggtcaaagtggggggtgaaaccgctcagggtgaccgggctggagacccaggaacccgattcggcgcgaaggtgccgcgcgagttccagcgagcagcctgcccggccaagtggcgcctgcccagccgtcggccgtgccagcttcctgccctgcccaggaccgcggagcagtcggggacgccgccgcaggctggcccggaatcgcaggacagcggcggggggagggggtagccaggccgcaagtaaactcgcactagagctttctgcacacctccgccctagagagggggcccggacccccggtctgtgaggcgtcggctttggccttccaaccttggggtgcgcgaggaagcaaagacccagggggcacccccaccctcgcccaaggcccgagggtgggggacagctgaaatgtctttggtcttgtttgatgaccgcttggcggatctgctcccatccgggttctgccgttccgagagtgccgggtcagtgatacccaggccggtctgagcaggcatgtggatgagcaaaagcaaatctgtcgctcctccgaccgccacccctcacttaacctttcctgcatccaaggaaggggagggcacccagactctgccccaccccccgcggggcgctccctctgcctcggaagctgagactaagagcgagggttttccccctttcccctgggctcgctgggtttctaacttcctctaaacctccctcctcgctccgaaaagccccgaggagaggagctgagaggaagcacgcc

SEQ ID NO: 6336 - DNA, 61 bp, Homo sapiens
  chrX:40126403-40126464
  hyper
cgggacgcgcagccgcccggcgcagaggaagcccgggacgctggggacaccgcctggagcc

SEQ ID NO: 6337 - DNA, 205 bp, Homo sapiens
  chrX:40506434-40506639
  hyper
cgtcgcggtgggccccgcatcgcggagggaacaggacacttgcgctctgggtctgggacaggaacggggatgaggaggggtggggtgggggcggtggtcaaggccccgagccaggtgctcacctggcgggcgcgagggctgcaccgtgagccgccgcggcagacggcgcggggccccaggccgggggctgcggcgagtaggccgc

SEQ ID NO: 6338 - DNA, 203 bp, Homo sapiens
  chrX:40595088-40595291
  hyper
cgcgtgggagtgaggcggtacctgtgagcgcgcgggagagcggaaaagggagccgcgcgccgccggaaaccagggtgagggctgagccggagtcgtcaccgggaacgtcagcagttgccccgcccttaccctcgccgctctccctcccgcctccgccccctggcgttgtaaaggcgacaatttgcccagagaaatccaccatc

SEQ ID NO: 6339 - DNA, 563 bp, Homo sapiens
  chrX:71525281-71525844
  hyper
cgttgtttgcggacagctcggctgccctcctcgccgcatcccagatggagccgcggaaccgggggcggccgggagcatcccttgcacggcgggcgcgtgcacccaggccaccggggccctgagcgtccgttcccgcaagtgctgtatcaggaactgatcttagagacaggatggacaggcaggaaggggcacggggtgtcggcctccgcggcgagtccgcactccggcgccggctgctgccactctcgcgcctgatcaacacttactgagcgcccgctgagcatccgacgcggcagcaggctgagcctaccccctagccaagccgcctgcggtcagtgctaaaaccccgctaggagaagagtgagagaggctcggagaggtgcggtaacttgcccaaggtcacagcgctagaaagtggcggagccgggattcgcagccaggtctctctgactccaagtccggtgctctgcgaagcagggactcggcgcgcggctcgccagcccgcgtttatagggagaggggtgtgcgcgtgggtgtgtgtgtgtgggcgtgtgtcgggggag

SEQ ID NO: 6340 - DNA, 181 bp, Homo sapiens
  chrX:71525998-71526179
  hyper
cagatgcggtccgggagattagcaaagtcggtggaagccaagctggagaaagcgcgggcgcagggagaaaaggtgctgccgtctccccgggagaagcgggcacccggccccgctggccggcaggggggcgcgctggcaagcgaacccgagcgctggcgggcgggcgggcgggcggcccctc

SEQ ID NO: 6341 - DNA, 583 bp, Homo sapiens
  chrX:9433838-9434421
  hyper
tgccgattcaggggcttgctgggcaaacctgcgccaccgcgggctccggggaccggggtggagggcggtggcgggatttccccgctgttggggagaagagccccattcatacccgggacgcgggccggccctcccggacccgggtggaagcgcagcctcgcggagtggggcaagcggcgggcgaggtggcgcgggccccgtgtctgctcagtttctgacgcgcagaaactgtcaaggaagtcgggagccccagtcctccgcccatctccccggcctgagcgcacggctgggctgggggcacccttggcccgtcgagggtctgcagagcgccgcccggggagagcgcagacctgttgctgctcctgggctctgacggggcgggtggggtgggtctcgcagatcctgggccccggccttgctatccagggggaccttccctaacgatgggaccggtgctcggagtggagtatggggagtgcgccttcgggagtcggcgctggccggatatgtgacaactgtgggtcgctggaggcccgcctgcgctgggatagggcctggacttcacgtgcgtcgcctgtgttcc

SEQ ID NO: 6342 - DNA, 79 bp, Homo sapiens
  chr1:100928315-100928394
  hypo
cgctggcttcgagcactatgacctcttcttcatagatggcagcacacccagtgacaacatcgtgcgaaggttcctgaac

SEQ ID NO: 6343 - DNA, 60 bp, Homo sapiens
  chr1:100928423-100928483
  hypo
cgttcactgcaaaggtgtgtgcaaggcctcggtggtggtggctgtgcttatcgaaggggc

SEQ ID NO: 6344 - DNA, 76 bp, Homo sapiens
  chr1:1168275-1168351
  hypo
cgactactacctgccctacgcgctgggcggcggctacgtgctctcggccgacctggtgcactacctgcgcctcagc

SEQ ID NO: 6345 - DNA, 462 bp, Homo sapiens
  chr1:1168984-1169446
  hypo
gtggtttcacatcaatccgctttcatgggattttggtctctgtccagtgacttcgtggtaaatgtaactcagtgtttgcttgcgacttatttataaatattgtaagtttgtgtcgatgagtgtaagttggcagtgcgcacgtctcggtttttttacatgatttaaggaaagacttttatgtcagaacttggtgcctgtaccgtcaaccccgctgctgcccgtgtttaaacgcaggagaactttaaaactggccatctatcttttcagtgtacaagtcactgaacccattgtttctttctgaagagactttcctttcaaggcttcccatgggtccgcgccacacagggccggtgctgctttatttcagactctgccccaggttccaggaatccgaaccccggagtgctgacgcggttccccaacttccgccttaagaaaacaggaccagccggcaccaggccc

SEQ ID NO: 6346 - DNA, 367 bp, Homo sapiens
  chr1:1194390-1194757
  hypo
cgcgtgtgtgcgtgtctgagtgtgtgcatgccatcaggacgcacgtgtgtgcatgtgtgtgtgcatgccatcaggacgcacgtgtgtgcatgtgtgtgcatgccatcaggacgcacgtgtgtgcatgccatcaggacgcgtgtgtgcgtgtctgagtgtgtgcatgccatcaggacgcacttgtgtgcatgtgtgtgtgtatgccatcaggacgcatgtatgtgcgtgtctgcatgccatcaggacacgtgtgtgtgcatgtgtatgtgcatgccatcaggacgcgtgtgcacgtgcgtgccatcaggacgcatgggcgtgggcatgtgtgtgcgtgccatcaggacacgtgcatgcgtgtgtatgc

SEQ ID NO: 6347 - DNA, 145 bp, Homo sapiens
  chr1:12030713-12030858
  hypo
cggtcacctccaggacaaccgcatccagggtggctacgagaacgtgccgactattgacatccacatgaaccagatcggctttgagcgggagtggcacaaattcctgctggagtacattgcgcccatgacggagaagctctacccc

SEQ ID NO: 6348 - DNA, 241 bp, Homo sapiens
  chr1:12304451-12304692
  hypo
cgtaagaaagcactacttcaagccctggaggagaaatggaaggcaaggcagagatcttctgggccataagagcagttgtggtgacacgtgtaagatgagcaagaacactagattgagctaatgctgactcttgtctttgtagaatgaccgccagcagaaaggggagtcctattggtattcagttaccgcctccgtagttacaaggattgtggagaatattgaagtaagtcctgctgacttt

SEQ ID NO: 6349 - DNA, 575 bp, Homo sapiens
  chr1:1562211-1562786
  hypo
cgcaggccctgggccgcgtcgggaaggtggtgaaagtgtttggagacgggaacctgcgtgtagcagtcgctggtcagcggtggaccttcagcccctcctgcctggtggcctaccggcccgaggaggatgccaacctggacgtggccgagcgcgcccgggagaacaaaagtgcggcacagctcaggcggccagtgggaggtggggctgcccctggccaccactaacctcagccctgcccccaggctcactgagcgtggccctggacaagcttcgggcccagaagagtgacccagagcacccgggaaggctggtggtggaggtggcgctgggtaacgcagcccgggctctggacctgctgcggaggcgcccagagcaggcaagctcctgaccccgtcctcccatactggccagtctgagagtgaggggcagagggccagggactcacctgctggcactcttggcaggtggacaccaagaaccaaggcaggaccgctctgcaagtggctgcctacctgggccaggtggagttgatacggctgctgctacaagccagggcgggcgtggacctgccggac

SEQ ID NO: 6350 - DNA, 59 bp, Homo sapiens
  chr1:159931971-159932030
  hypo
cggcaaggggaacagaggatgggaggcaaagggaaaacatggggtagagggataatttt

SEQ ID NO: 6351 - DNA, 59 bp, Homo sapiens
  chr1:159932101-159932160
  hypo
atatagacctactgagtttataagttatgcactcaagaagtttacctttggcccggggc

SEQ ID NO: 6352 - DNA, 295 bp, Homo sapiens
  chr1:164761703-164761998
  hypo
cgctcccttccctgtctttttctgtagttttgagtatccgaggagcccaggaggaggaacccacagacccccagctgatgcggctggacaacatgctgttagcggaaggcgtggcggggcctgagaagggcggagggtcggcggcagcggcggcagcggcggcggcttctggaggggcaggttcagacaactcagtggagcattcagattacagagccaaactctcacagatcagacaaatctaccatacggagctggagaaatacgagcaggtaaccagaaccacctggggctc

SEQ ID NO: 6353 - DNA, 32 bp, Homo sapiens
  chr1:167393552-167393584
  hypo
cggggaaagaaagacttccagcttcttacctc

SEQ ID NO: 6354 - DNA, 187 bp, Homo sapiens
  chr1:167393613-167393800
  hypo
gtccgcaggaggtctcactccgcaggaaacgctctcctcccgcataagtctgtacttccatcccctcatctgtggtagtagtgaaggctaggtgagtaagcgtgggctgttctacccaccagaagtccaggagctgttgtatacctcatttctaactcgtgaccgagtgacttgctttaactttctc

SEQ ID NO: 6355 - DNA, 70 bp, Homo sapiens
  chr1:171554936-171555006
  hypo
cggttgagggttgagtgtctcttaccgaaatgcttgggaccagaaatgtctcggatttcagattggtttt

SEQ ID NO: 6356 - DNA, 122 bp, Homo sapiens
  chr1:171555061-171555183
  hypo
aacatgaaattcctttgtttcatacatactttatacatataacctgaaggtaattttaagcaacattttaaataactttgtgcatgaaacagaagttctgacctcacttcgactgatccgtc

SEQ ID NO: 6357 - DNA, 334 bp, Homo sapiens
  chr1:19676386-19676720
  hypo
cggctcggtggcaataccaacccaccaaaaacagaaccatttgtgcactgcatatattattacatccttataaaagtggctgccggaaggaaaacattttcatgtgttgtggctgcagatgttccacgaggtggttccaatggcgtctgaagccggagcctggcccgtgtgtccccagcaggcgcctctcctcctccccatggccctaacacaggcaagtgtttggaagctggcagcctttcccccagaggggatgtattacacctcccactgccacgtggcatcttctagcgcgacccgcagggcgtggccctaaggcatgggccccactcac

SEQ ID NO: 6358 - DNA, 51 bp, Homo sapiens
  chr1:19676822-19676873
  hypo
aatgtacacaaaaggcctagagcgggacttgccagaatggcagctctcacc

SEQ ID NO: 6359 - DNA, 179 bp, Homo sapiens
  chr1:21610561-21610740
  hypo
cgtgagtcagggcaccgatctgcttccaatggccgctggcctcggctgagtctcttctttgcatccctgtcgcacctgcccagcctccttcatgggactgtggaggggatccgtgagatgaggtcacagcatggggagatgtgactggtttcttacgtttcttttggaaatgaggtccc

SEQ ID NO: 6360 - DNA, 216 bp, Homo sapiens
  chr1:234724591-234724807
  hypo
cggttatgaggattaaatgacccgacagaggcaaaacagctttgtaaaccataaatcattttgttcggagtcaacaggatgactttttcccctcacacaatttagaattatgtacctgttgaggtagcaacgccctcgtttaatcccagccatgtttggtccccaaatgcctctctcactcgcccagagtgatactgaggccacaaaaagctctgc

SEQ ID NO: 6361 - DNA, 209 bp, Homo sapiens
  chr1:234724836-234725045
  hypo
ttccaacgtggtacacaggtacctggcgtgtgtctgctcagacagtggatggcccttgttcaaagactgatgggaacacctagtgtacgaggtggcgccggggccgcccacaccaacaggccgtgtgctcccatctcactgtgcacgaggaaccggtgtgcttttcggccaggctgcatcaccctccctcccttggctttctgtgtgac

SEQ ID NO: 6362 - DNA, 158 bp, Homo sapiens
  chr1:23693515-23693673
  hypo
aggtagaatccttacttacctagtgagacaacatttccataattctcctgcataacatcccggtaaaggtccctctgtgcagcgtccagaggtctccattcttcccgggtgagatacatggccatatcttcaaacgtcacaggtgcctgaaatcacac

SEQ ID NO: 6363 - DNA, 186 bp, Homo sapiens
  chr1:246324319-246324505
  hypo
cgccatcagacaagcgagacgatgccatcagacaagacaggtgttccagcgattgctctaggtaagcctcattctctttgttcactggcagcaccaccccgctccaccctgcgcctcatttgcagagtcctctacaaatgaacatgcagcctgcctggcacacctggcacagctcacctgcatgcc

SEQ ID NO: 6364 - DNA, 95 bp, Homo sapiens
  chr1:246324810-246324905
  hypo
cgatggtctccttcatgttccccagcccccgtctatgcctccaccttggtatatcatgctctattgtaattattaatttacttttctttctccgc

SEQ ID NO: 6365 - DNA, 97 bp, Homo sapiens
  chr1:246330213-246330310
  hypo
cgatacccactgaaggcagctgctctcgggtgccccttcccacaagccctagcgaccatcaatctgcactccgtctctatggattcatctactttga

SEQ ID NO: 6366 - DNA, 247 bp, Homo sapiens
  chr1:27183370-27183617
  hypo
cgctgctctctgcctctccaggaatggcctggggggagccaggcacccggcacctccacctgcctaacctgtggcccatctgccaccatctgtgcctacagggtctgccccccagcctgcccggcctgtgtgctctctaggacccccatagggggcaggggctggcctctttgccccattcccgctccatgccggccagagtgtagaaagccataacgcagccatcagcacaataatgtgactctac

SEQ ID NO: 6367 - DNA, 317 bp, Homo sapiens
  chr1:32826720-32827037
  hypo
cgagaggagtgaagtggcgtaggttgaaaggcggaagggcgggcccctaaggctgggtccaaacgaggaggctgcggaagggaaagtgttattggactgggcagagcagctggtgggcccgacggatagacatacactgccagcccggagtggaaagaacagtttgtgctgtgctttattaaaatgtgcatcattcttttattttaaaatgtgcatcattgtctcgtgctcggcgcatgcgacctcagcgtggtggcccgctgggggcctcgttcccgcccagctcccgcggagccgcagggagcaggcgcactcac

SEQ ID NO: 6368 - DNA, 148 bp, Homo sapiens
  chr1:44132677-44132825
  hypo
cggctttaaccatggttttaactgtgcggagtctaccaattttgctacccgtcggtggattgagtacggcaagcaagctgtgctggtaagtctgcttgatttctttctataacaccatgacaaaaatgagcaaattctggttagatac

SEQ ID NO: 6369 - DNA, 60 bp, Homo sapiens
  chr1:44351032-44351092
  hypo
cgtctcctccttccccgggtccttctcacgcactcacacacaccctgctgaaacctgatc

SEQ ID NO: 6370 - DNA, 71 bp, Homo sapiens
  chr1:47033326-47033397
  hypo
cgcggcttcatccagaccacaatatatatgctcttgaatacacacatgtatatacacgcagagctgtgaac

SEQ ID NO: 6371 - DNA, 211 bp, Homo sapiens
  chr1:61601555-61601766
  hypo
cgcattttaaatctgaaagaatatatgtagtctcccctaccccagctttttttaagtagcaagggctattgaaaaaaatcagaaccctccgcttacgctcgcatacatgtagcttaaaatatatgttgcttattgaaagcattgtttaagttgaactcacgagatatactacatcatgtaatatgtctgcatttgtccatgcattcttttc

SEQ ID NO: 6372 - DNA, 410 bp, Homo sapiens
  chr1:898245-898655
  hypo
cgcacacgtccccggcgctgcgagggggccgggcctgtgctttttgctgtgggtatggccccccgcccgtttccctcttgccctgtgccttctactccccaccagcacaagcccaccccacctgtgccggtcaggtcctgacctgcccctccgcccctccattcaggggcctctccaggagcctggggtgtggcccagcagtgggatccactcacgagtcccgtctccacctgccctccccaggcggcgggagcctgtttgccatccacggagactgtgaggcctacgacacgcgcaccgaccgctggcacgtggtggcctccatgtccacgcgccgggcccgggtgggagtggctgcggtggggaaccggctctatgctgtgggcgggtaagcctggaggctggacttg

SEQ ID NO: 6373 - DNA, 39 bp, Homo sapiens
  chr1:898690-898729
  hypo
gacctgcagtggcttaattccgctagctatgatgggacc

SEQ ID NO: 6374 - DNA, 88 bp, Homo sapiens
  chr1:898776-898864
  hypo
gcagccggaggtgtccatgggcacaaggcgaagctgcctgggtgtggccgccttgcatggactcctgtactcggccggcggctatgac

SEQ ID NO: 6375 - DNA, 39 bp, Homo sapiens
  chr1:9654089-9654128
  hypo
cggcgcccggtggcgctgtcctaatgccgagcactgagc

SEQ ID NO: 6376 - DNA, 203 bp, Homo sapiens
  chr10:134794144-134794347
  hypo
cgagtgcccggcgaatgcccagtgagtgcccagtgagtgcccagcaagtgcccggcgaatgcccagcgagtgcccagcgagtgcccggtgaatgcccagcgagtgcccagcgagtgcccggtgagtgcctgcaagtgcccagcgagtgcctggtgaatgcccagtgagtgcccagcgagtgcccggtgaatgcccagcgagtg

SEQ ID NO: 6377 - DNA, 45 bp, Homo sapiens
  chr10:46009889-46009934
  hypo
agctgccaccctacagctgccagcagcagcacatggctggctgtc

SEQ ID NO: 6378 - DNA, 102 bp, Homo sapiens
  chr10:524407-524509
  hypo
cgggcatgccgggggtgcagatgcacccaaattcccatcttattctcactcatccagtgtccaggcatgctgggggtgtagacacatccaaattcctgtctt

SEQ ID NO: 6379 - DNA, 84 bp, Homo sapiens
  chr10:524671-524755
  hypo
gacacatccaaattcccgtcttattctcactcatcgcgtgtccaggcgtgcagatacatccaaattcccatcttattctcactc

SEQ ID NO: 6380 - DNA, 55 bp, Homo sapiens
  chr10:5523206-5523261
  hypo
cgggaggagacctgggcagcggcggactcattgcaggtcgctctgcggtgaggac

SEQ ID NO: 6381 - DNA, 70 bp, Homo sapiens
  chr10:5538706-5538776
  hypo
cgggcaagaaggaacaggtcgcaatgagtgaccgcaagagatcatggtgactcctgaaaacgcccaggcc

SEQ ID NO: 6382 - DNA, 192 bp, Homo sapiens
  chr10:5538938-5539130
  hypo
aggccagggccgccacctccccaaagcccgatttcacccaatgctaccataagttggcctgggctgctcctgtacccacctggggcttcagtttccacatctgccaagcaaggtgcctgggtccgaccatctgagacccaggacaaagggagccctgggaacgccaggctgtgatgagcgagcctgggtctc

SEQ ID NO: 6383 - DNA, 381 bp, Homo sapiens
  chr10:5540271-5540652
  hypo
cgcatacagacacacagacacacacacagatgcacacacagacgtacacgtatattatttgcagccgaagagaggcaggctgcgtgcagaggctggcagctgggctccgtctgtccatgcgaggcgcccgctcctgtttgtgcgggacacgtgcccaggtcctcaccagcagctcaggcagaacctggagccacagacaccgcccagcaccatcctcacacatcctctgcccacctgccctctgctccgcgtcaggggaggcaggagctgcccctggggcctgctccaggcagttctgccaccgcaggtgagaggggtgggctggaaggaaccctggaagcaggtgggggccctcggaggcagccgccccacaaacaccaa

SEQ ID NO: 6384 - DNA, 198 bp, Homo sapiens
  chr10:5541528-5541726
  hypo
gttctgccttggcatgggaaccccctccttttctgcaatcggaacaaagggaggagggaggctccccaccctccaaatgccctggggtgagagcctcctcccagggagggccagatcagctgcagacaggaaatgcaggaatgggagttgggagagctgtcaggtgccaggtgggaactgccatggggtcggggtatc

SEQ ID NO: 6385 - DNA, 634 bp, Homo sapiens
  chr10:71133924-71134558
  hypo
cggcagctccggtcctggtttgcttggccatgggcctctgtctcttttctttccttgggcttctacctgaagcagacccagggtgctgagggctcctctttggtgtgcaggtccttgcccatgacttctcgtggttgatgatgctcccctcccccatctcagcccttcctgggcccaccagcaggcagattggttggaacgctgccacgccgcctctcactgcctgtctgtggtcgtaggtgtctgactgccgagacacctgggcattacctgttcagttatcacaaggaaaagggcccgggcgttacccgttcagttatcacaggtggcatgccctgagaggcagatcatgacttgctcgatttcattaatttcacttgagcagatgggaagcacgctgttggaacaggagccggtctccatgagccttggtttgaacagagagaagctcgtgagaggtgctatttgcttgttctgctgctctaacagggcctttagggactgggaaaggacagaccctggccgtgggcctctatctggaaaagggggtatcactatccatgtgtgtaataggccatgtagaaaagggagcagattgttctgggcgtctttagaaggcagagtgaaaagcagc

SEQ ID NO: 6386 - DNA, 142 bp, Homo sapiens
  chr10:851108-851250
  hypo
cggctggaggtcgagggcgcgtggggggcctggagggtgcaggggacgccgagggcgcggggcccaacctccggccagccgcctggattctggtctctgctctgagcgaggtgcgtgggtgcctccctgcttttgagcgggg

SEQ ID NO: 6387 - DNA, 175 bp, Homo sapiens
  chr10:851504-851679
  hypo
cgaggaatggacccggaagcgtcccctgcccagggggtgctgcaggtacccaggggaagagcattcacgggtgccaggcccaaggggctcacgccagaagtagaccaattagacgactacaaacggtgctcagtgctgcagaagcagccggggacaggcggctgtcggagagggc

SEQ ID NO: 6388 - DNA, 51 bp, Homo sapiens
  chr10:98292796-98292847
  hypo
attctctttaccattttttctccggtataggacgaggcacagcattgacac

SEQ ID NO: 6389 - DNA, 227 bp, Homo sapiens
  chr11:1521171-1521398
  hypo
cgcacacgaatgttcacggcagctgcaagtgtgctggtcagaaaggagagaacctgcacacccaccatggggaggtgacacagtgcggcctcagcatccacggaccgcgcctcagccacagacaggagtggcctgggagacacgcggaacacggaagactcctacagcaagtgtgctgagtgacggaggccaggtgaacatcaggttcacactgtgattccgttcac

SEQ ID NO: 6390 - DNA, 106 bp, Homo sapiens
  chr11:47359237-47359343
  hypo
cacccaggatgggctgcccgccatcgtaggcaggcggctcccactgtactgtgcaggagtcctctcccacgttgctgatcttgggggccgcaggtgcgtctggcac

SEQ ID NO: 6391 - DNA, 390 bp, Homo sapiens
  chr11:64951346-64951736
  hypo
cggaggtcggtctcagttgccccatctgagaaaggagtgttcgctggggaaaacagatcagcacgtgtggccttctccacgtgtcaagcctcctatcccccaactcctcctgcgctttggcaaggtctgactgagcccagcagaaaagaaagactcgggattaagtctacgtaaaccagcttttcctgacggtgtgcccagggcccatttttcaagtcacaccaatcaattctcaatgagctgcctttgggagggacatgcccagcaaccctggatgagactctccagccttggaggccccagccctgcccgaaggactcttgggtgttccctccttctgcctggttagagagccccttaccctactctgtccttgcccgccttgcgcgg

SEQ ID NO: 6392 - DNA, 190 bp, Homo sapiens
  chr11:64951894-64952084
  hypo
gtacccgccacccacactctccgcaacctgggctcctagggccgcctccaccccgccccgccccccgttgtcctggccccgacccctcagatggtacctcgagtccttggtcgcttctgaccccagacgccttcggccccgaccctgccctgggaaacgtggcctttgtggcatctcagaaacaaagccc

SEQ ID NO: 6393 - DNA, 192 bp, Homo sapiens
  chr11:71507748-71507940
  hypo
cgacaaagacactaggacacacagaggacaagcaacccccgagctcccacagactgctgcccggccacctggctcttgtgcctccactctacacccaagccccccattgccaccagcctttgccccagctccccctgagcacagcccctcctggcagccatgtgcacagatgtacccgcagcagcctctgcc

SEQ ID NO: 6394 - DNA, 513 bp, Homo sapiens
  chr11:993208-993721
  hypo
cgcgccaggacgtgcccgcctcgccttaactctggcacctggctgccaccccggctcattgtttgtgcttcgcaggctcttcaggctcccgcgtgccacgagaacctggtcaaagtgggcggctacatcctgggggagtttggaaacttgatagctggagacccgagatccaggtgagaggccctttgcgagtcggggctgtgtgcgctccggcgggcctctcggtggtcggtggcaagaggcgaggcaccagctggccctgccgtgaggcctcgcagagccgcttctgctccccatcggcgtctttttgttttccttcagttgatagaaaaagcagggattctagtagaaaatggagacgtggggttgatggctgacttagtgaaaggggcgtctttgcggtgggatctggagctggaagagggtcccgaccagcggcctctggtgcaggccagggggtctcgccgccgtcccccccccgcgggggcgtgctgcagcctgcgaggggacgac

SEQ ID NO: 6395 - DNA, 635 bp, Homo sapiens
  chr12:110352780-110353415
  hypo
cgaggtacacgccacgcatatgtatagcctctccagctttccatgaggtacacgccacgcatacagcctctccagctttctacgaggtacatgccatgcatacagcctctccagctttctaccaggtacacacaatgcatacagcctctccagctttccacgaggtacacgccacgcatacagcctctccagctttccacgaggtaagcgccacgcatacagcctctccagctttctatgaggtacacaccatgcatacagcctttcaagtcccgcatgctcccttccgttccttggcacgtgcattgctgttgctcagctggattctccagtctgggtagggccgcaggcttaccttcctcatcagaggcagggctctgccctgtgggccttgtcttggggtggtgactttgctcttggcactcaggttgcagagcgccggctgcaggcatgggaagcagaccagcaggaggaggaggaagaggaggaggcccggcgggtcgagcagctctcagatgccctgctgcagcaggaggcggagactatggctgagcagggctaccggcctaaggtaggaagtctgccaggatataggccaacaccggcaagacagactctgcccggcccctgctccc

SEQ ID NO: 6396 - DNA, 61 bp, Homo sapiens
  chr12:110983646-110983707
  hypo
cgtcctgctcacacttaatggctgagaggggagattacctgtcgctcaagacgactccctc

SEQ ID NO: 6397 - DNA, 136 bp, Homo sapiens
  chr12:110983736-110983872
  hypo
atggagtgttgaagtaatgctgctgctcatctgatcggtgcacgacttcaccacccctgacaaccaggaagcctgaatcgcccaggtttgctgtgtgtaagcggtggctggttctgtccagcaccacaatgcaggc

SEQ ID NO: 6398 - DNA, 292 bp, Homo sapiens
  chr12:113725566-113725858
  hypo
cgcctccgtcccgccccctgccacccttcttcactggtgagctccattgcccccgctccccggggcacatgggcttctccccgctctttcccaggagcaaggccttgctcctgtctgagcctgcagctctactgcaaggagatgtggcctggccctgctcctcttcgtggaaggaccccgcccagccggtgtcctggggctgccaccatcccttccctcatgcatgaatcacctgagcccagctcagggttggtggcgcccaagggagtggacgcaggtggaggagaggccc

SEQ ID NO: 6399 - DNA, 397 bp, Homo sapiens
  chr12:120147746-120148143
  hypo
cggtggtttcgttgcaatcaggacaaagggtttggctttagatagtcttcgaggcttagcactcttcacttggcctaacagtgggatgttctttgggaatgtcagactgtgctaaactggatactggaagggaactgaatctggacagagggggtccattagctgaggcttgggcatctatggggacacagagataagagctacaacggctcctctctactattttgtgttttacgagcatgaaacgtggcttcaacatattggctcccttgaaagtaaagaaaaaacaccatgtccttggcctcacacctgctatcatgagtagcttctccaggtccttgataatataaatttggaagactgctccaattcctgggacatgggttagggagttttt

SEQ ID NO: 6400 - DNA, 208 bp, Homo sapiens
  chr12:120148396-120148604
  hypo
agtttcagcagggagtttccaagcagtttcttttcataggtgaaagaaaagaaaaacagaagacatcgtgaggctgatctgtttatgaccaaaccatccagagaaaccaagagaaggttaaggccaagttattcctggaaatgctcagaaacgcacatatgctcttagctcagcccgtattttgatctgagctccaaatgcaaaatgc

SEQ ID NO: 6401 - DNA, 704 bp, Homo sapiens
  chr12:121687598-121688302
  hypo
cggcaccacgatcctcgactcggggttcttgtccagcatacgggtgatcaggtccttcaagtcctcagctatgtcgggcctggggatggagaggcgtcagggtggcagacacgggaccgccaagaactcggacaggagagatgcgggacggcgggagatactcactggtctggaaattccagggcctgactcttgatcttactgtgtaaacacatgatccgctcgtccatgaatgggcactgcaaagaggccagggacagagtggcagtcaatggcggccacatctgcccttcgagggccacctgtgctgtgccactccacataggatacagcagagaaatcaacaattgcggcccaggctagggggcaagcagttcccattctccccgagaatggccaagacacaggggtgtggggcctggccgacgcagggcagagccaggaatggccctctcgaagggctagagcctttcccaagcacactgcaggctccctctgtagctgggcctcagtttacctacttacaccaaagcaaacactgctcgtcacctacttgccaggtgaacaacaggaacaacaagaataacacaaaagactttgtgttatttgtggcagcagcagtgattttcaagggcttagcctggatcgcgccacgccctgccctgaggttttcattcactgttccccgtccctggaatgttctt

SEQ ID NO: 6402 - DNA, 239 bp, Homo sapiens
  chr12:121688331-121688570
  hypo
cccaccatgcaggtgtctgactaaagctcaccttctcagggaggacttcctgaagccctgtctaaaacagacaacccccaatgccgccaccgcccacatcactcctcatcgtagcacttatccctgacgttatcgtacagatttgtttattgtttaacccctcccacgggaacgttagctccaagaaggcagggatttctggctgtcttgctcactgcggactctccgtgcctaggagc

SEQ ID NO: 6403 - DNA, 210 bp, Homo sapiens
  chr12:122622385-122622595
  hypo
ctgctcaggctgcccgcatcagttgcaggaggggtgtggccaccaccagagctgtgctgtggggaggaggcagggctgggtggggaaggcggagcttgcagcacctgggatgcaccggttcagccctgccgttcccagccccagctgtgcaccattctgcagagcgggttttctgtggttcccagtcttgtccctccggctcctcattgg

SEQ ID NO: 6404 - DNA, 261 bp, Homo sapiens
  chr12:122622642-122622903
  hypo
ctggcccttgggcacccaggatcagcgtagggggtgaggaagggtggacagtgtgcctgcaatgtgcctgtcttagtgaccagcgggttctccagcagaaccggcagatgaagcacatctcagctgagcagaaaaggcgcttcaacatcaagatgtgcttcgacatgctcaacagcctcatctccaacaattccaagctggtgagttgccaagagcgtgggctgtggcagggcaggggagctggcaggacgtgctccctgc

SEQ ID NO: 6405 - DNA, 623 bp, Homo sapiens
  chr12:132218722-132219345
  hypo
cgctggctcctgccgccctcgaggacttgaaggctgacgttgggctgggtgtggctcgtacataggacagggcccacacactggattcacgtttttcctcacaacttagaatagcaaagttacagactttggattcttacgaagacaagaatgaatgtcttggctaaccatgatcttacccaagaggacttaaaatgaatgtgcaggagaaatgagaagaggacttaagatcaaaaagagagtgactaggaggtcagagaggcagccgcccaccccacgcactccctgcttgtaagccggggccgcattgttgtgttaccacacttctgttttagagcctgttacggttttgagttacacagacatgtgtgggcttgtgcatgtttgaatgccctgtggacccggagctctgtgaggcaaaggctgggactgtcttactagccagcgtgctccttgcacctcgatccaaggggccacggggctcccaggaacattcaccgagtaacttcagaaaagtgaagagcagaagttccaaaagcacctggtgcttcctgggagaagtcacctgcacaggtaccttggatccaactgacaggtgagatgaacgagctctccctgcgtgc

SEQ ID NO: 6406 - DNA, 97 bp, Homo sapiens
  chr12:49065604-49065701
  hypo
cgattatgtaagtatcggcgcttcttctccttgagcagatgctgaagtcgtttaaactgatcaatatacaacgactgcaaacgaattagcttttcac

SEQ ID NO: 6407 - DNA, 92 bp, Homo sapiens
  chr13:114807847-114807939
  hypo
agtcgcacacacatgtgaagtctgagcccatcacagagcacacacgagagcaggagtgaggaaggaaatgttggcagactcctcacgtcttc

SEQ ID NO: 6408 - DNA, 506 bp, Homo sapiens
  chr13:20979799-20980305
  hypo
cgctccccacgctcctgctgctccccagccttggagagccatgatttctcagattctaaggagagggccctgggactttggtgaagagatgcaggaagaggcttatcctggagggagagggagggagccgcacgggctaggctgactgtgcgagaatggggtgcgcccaggggaaagcgcaggccagtcacggcccccacccagcactggcctgccccgacccgctgggccccgcagacttactctccctcacattcctcccctccctgctgccgggaggcgaacgggctggtgccggcctgtgcttagcaagtcaagtcagaagccagggccgggatcctggaagaggaggaggaggcgtttctagtcctgggcgccatggaggacataggctgggctactgctgcgaccctgactcatttcccacatctttcaaacccttaaaggctcagcagctggtcagtccgcctacaaaggtaacatggggacaaacgaagctgcagaac

SEQ ID NO: 6409 - DNA, 599 bp, Homo sapiens
  chr14:104048314-104048913
  hypo
cggagcatcagcattagctgtgccacagggtggtatgcgctctgctgaaggtggcaccttcagggaaaggcagtctgccggggaggctagcgagcaccctgggtaggagctgagcgtggcctccgcgcctcctcatgggaagtgctggagatgcaggagcccctgagccagagcccagcgctcttacaagagacctcacttcctgttcggggactggggctgctaagtcagagtgcgcctcctgcacccgccaccctggatgtggttccattccctggtccctgagccatagctggggggcatgagactgtcccctgggctgctttggggaccctacttcagggcagccctgccactccctgtaacgggctgtgggtcctgccctgtggccttcctacctctcttgcgtgtgggtgagcctgagcgtggccaccgccctgggagtgccacagaggcaagcggcactggtcctcatgtgtaaacagccccaccagcacgcggggctggagtagtcaggccgggacctgtcccaggaatgggcaggctgttaacctaggatgcattcaagttaggacacatttcattcccgtgtagcggtg

SEQ ID NO: 6410 - DNA, 127 bp, Homo sapiens
  chr14:104048982-104049109
  hypo
acatacctgcctgggtcgtaatcacttgtgaagaaaatgaattatgctgtgacctttagatacgattcacataccataaaattcaccctgccttttttttttttttttgagatggagtctccttgtc

SEQ ID NO: 6411 - DNA, 351 bp, Homo sapiens
  chr14:104395215-104395566
  hypo
cgacgcgcggcccagagcggtgcctgtaaggaagctgagctagaggtttttttttttttttttttttcagttcttaatgtttaacagactagtttttgaggcactcaggttttcaggataacggagcggagggcagaggtcccataggccccttccctcccagagtttcccctgtgagcatctgcgtaaggtgtgggtatttgtgacagtcggcgaacctgcatcgctgcgtcttcgtcacccggaggccatcgttacaggagggttcacgcctcgtactggacgttctgtgggtttggacaaacgcctaacgtcacgcattacagagttcactgacctacagatcttctc

SEQ ID NO: 6412 - DNA, 176 bp, Homo sapiens
  chr14:69470456-69470632
  hypo
cgtcccagtgactcggccctgcctgcccctcactctgttcaccacggcactctgttgtccctccactcaacccctttggcctccttgccacacctcgtgtgtgtcaaggtccttctggcctcagaacctctgtacttgctgttctttctgcctgaaacacccttccccgcagatcc

SEQ ID NO: 6413 - DNA, 111 bp, Homo sapiens
  chr14:89875711-89875822
  hypo
cgggagaacagctcctcccagtgtgcctcaacacagggcatccaacacccacttgtcactcccaaggctgactgatgaataatgttcccaagtctcgctgcacgccttggc

SEQ ID NO: 6414 - DNA, 90 bp, Homo sapiens
  chr15:40532821-40532911
  hypo
agacaagcaccagcctgcagtggagaacgcaggaccccgctgcccagaaggagcagccacggtaaggtccccactgccgctgcgtgctcc

SEQ ID NO: 6415 - DNA, 107 bp, Homo sapiens
  chr15:90378787-90378894
  hypo
cgccaatgttgatgttccgaggaatctctggcaggttgatgtttttcacagcagacacagcccgcgcaggggctgctgaaaggccaccctaagaagaaatgagaggc

SEQ ID NO: 6416 - DNA, 184 bp, Homo sapiens
  chr15:90755573-90755757
  hypo
cggggtggagggagagggttcaccctgaatgggaaaaccggccgcagcctcggcgtgccctgctttcttcatactggactaacccactggatagatggatttagaggatgtccgagcagcacaggcagcccaggagagcgagcgagacactctttgacacaagggagagcataaaagcttaaga

SEQ ID NO: 6417 - DNA, 42 bp, Homo sapiens
  chr15:90756079-90756121
  hypo
atgagaccctcgtgtgaccaggtgcgtgcctaagttagaatc

SEQ ID NO: 6418 - DNA, 86 bp, Homo sapiens
  chr15:91423329-91423415
  hypo
cgggaaacggctcgaggtgcggaagaccgtgaccgcgtgcctgggcgagcccaaccacatcactcggctggagcacgctcaggcgc

SEQ ID NO: 6419 - DNA, 321 bp, Homo sapiens
  chr16:11151051-11151372
  hypo
cggccctcttttaagaatgactgactttcacagctacatggcctcagtgggcttctaacttgagtgactgtcgcctaaactaggcagcttgcacatgcagcaaggaagcaggagggtgaaaaccgagcctttgttccaggccagctcgtgggctcagcacatcaccggtgccatcccgttgtacctgcacggtgggtgccccatttccagaacacaagcctgggcttgggcacgtcacgtgattaccaagccccagcttgagccacagtgtgtctgactacagagccacccaccttcccctgctcattggactgattcccc

SEQ ID NO: 6420 - DNA, 145 bp, Homo sapiens
  chr16:11770890-11771035
  hypo
cggacctgcctgggagccagtgaagggcgagtcagggcacgcgtcctggaggctgccagcgtccttgtagcagagcagtttcttgccgcttgggtcttcagcacgccaagccccccaccaaccctccaccccgagtgaaggcttc

SEQ ID NO: 6421 - DNA, 430 bp, Homo sapiens; identical to SEQ ID NO: 5980
  chr16:12897365-12897795
  hypo

SEQ ID NO: 6422 - DNA, 133 bp, Homo sapiens
  chr16:1424307-1424440
  hypo
cgtccctgctggctgcaagttcttggaccctcactgatgcctggtactggacagtgtgctgctgaggcctgctctgagacaggcaaagccacccctgcctgtccctgaagggccctagacccccttcctcctg

SEQ ID NO: 6423 - DNA, 177 bp, Homo sapiens
  chr16:1424469-1424646
  hypo
ggccccaggcaaccgcaccccggggaaacctgtcagacccgaccgtgggggtcggcgcgccgggaacctccacagcctggccagcccctgcctggtgctcggttcagacaagctggggcccagcagaagcaaagaggcggtcactgccccacctacccgacatcgagtcccgccctc

SEQ ID NO: 6424 - DNA, 473 bp, Homo sapiens
  chr16:1424928-1425401
  hypo
cgctgccctagccgcacatgagatttgtcgggaacacagctgtggggcacgtggcctgcacctcacccctctgcccaggcctccgcttctcctccctggaagcagctggcaccagtcagcgccacggggaccatgggagcaaccacagggtggcgggtggcccctcgcccgaggcctggcgctcggcggtcacaccccccgagccccccagggcagccggagtatcctcgtgccgcggtggtggccccagcggagcacaggcagaggctggcgtggacgtggcgcagctggcaggtccgggcctctgaacttcaccccgaatctggccgcgctcagcagccacactgtgtggagaccgtgctccaccacccagagcggcaggcgggagagaagcctggctcgggagtggacggtggactccagaggccgcaaggcagaggccacccccaccccactccaccgcacagcacgac

SEQ ID NO: 6425 - DNA, 407 bp, Homo sapiens
  chr16:1425684-1426091
  hypo
aagaccccctggggaccaggaacccacagtagcatccgaaaatgcctcagccctcaaggatgctcatcggcggagccaaaggcaggccttgggccagccgcacccagagccattcactcctctccttcccattcacaggacggtggcgtccctgagcggacatccaccctggcctgcagggtgggccagccctcccggtcgctgtcatccacttgacgttctcaggccatggctgaagagggcaagacctcaaagcctgactgaagtcgtgctgagcagcagagccgagacactgcaggcagtggcagaggaccacgcactgagcggccttggacaggtggctccaaggctgaaagtgagatctgtggcgggcagggcctcttccctcctccctccagggctggggc

SEQ ID NO: 6426 - DNA, 131 bp, Homo sapiens
  chr16:1753650-1753781
  hypo
cgtaacctttatcgcacgttatttgctggagatggcgccatgctcctttcatggattagctgacattcctaataggctggatattttaggctgttttgcaggcttagaaacagagatttggggccaggcac

SEQ ID NO: 6427 - DNA, 228 bp, Homo sapiens
  chr16:2042997-2043225
  hypo
cgagacctaccagagcccgcccttcaccgagaccctggacaccagccccaaagggtaccaggtgcccgcctactagcggctggcaggcacagaccagggctccaaggccaccccaccaacgcaggccccagggtctccgggacctcccttgggtccttccagctcagtgccgcggacagagtaggtggccgctttgcgccatccggggccaagagggggtggacccgc

SEQ ID NO: 6428 - DNA, 183 bp, Homo sapiens
  chr16:2129581-2129764
  hypo
acagaccaaggaggcgccggccaagctggagtcccaggctgggcagcaggtgtcccgtggggcccgggatcgggtccgttccatgtcgggtgagccttggccccagccacctccacacaggcaccggggctccctcagttgctgctggtcccagtgttcaggaaggccccgagcccaggggcc

SEQ ID NO: 6429 - DNA, 303 bp, Homo sapiens
  chr16:2213343-2213646
  hypo
caggttctttctctggggtgtggctggtgtctccccgctgcagcctggtgctggctgggtcctgaccgcacctgtcgtggcaggaaacacattcgtcgtgccttggctggtccctgtgtgactgcgtcccgccacgtgggccacaccctgggcctacccaccaaggcccagccttggccccagggacattcagcctggaggtgactggctgtgactcaggacccagaggagtagagggagccaggcaggggtccctccacctcggggaagagctggatgggctcttcgggagctcagaaaggc

SEQ ID NO: 6430 - DNA, 267 bp, Homo sapiens
  chr16:2213723-2213990
  hypo
ttgcctcctagaggcctgcctgagccggggctggtggtggaaggctgctgcggcggccccacggtgccccacagcaggtctgcacacttgcagcagcccgtctgactcacaggggcctgggctccatctctcaagcccctcatttgtgctccacccacaggaggtgcttcccaaggaccgtagatgcctctctagagcatgagctcaggcaagagtgcccgctacaaccgcttctccggggggcccagcaatcttcccaccccagac

SEQ ID NO: 6431 - DNA, 266 bp, Homo sapiens
  chr16:2230223-2230489
  hypo
gtttcactgaggccagcacggtggccacccggcccggctctgggctggcagggcggggagtggggtggccctcaggaggcctgcgggcagcccggcccccacccccaatggaggacagctccagcatggccgcgatgctcttcacactgccggcactacccgtgtccacgctgccggccaggtcactggcccgccggcactgtgcccggacccccagcaggccatcctcaggctcggcgtcaggcaccggctcatccgccaggttg

SEQ ID NO: 6432 - DNA, 182 bp, Homo sapiens
  chr16:2231183-2231365
  hypo
ggaggtactcctggcttcgagacatggggctgctgggcccagggggcccatctcccagcagctcctgcgagctgctcatgtgccgtgcccgaccacccaggctggagtcctgccgcgtggtggccctcggggtgggtggcaggtggctggagggcttctcagtggtgggccccacctcagcc

SEQ ID NO: 6433 - DNA, 395 bp, Homo sapiens
  chr16:22326003-22326398
  hypo
cggggaacacgggcgtaatggacatggaggtggcgcagggagctcatcctgttctctccgtagcttattaggaccttagaaactcccttccgctctggggaacttagaaaaggcatcctgggcctgtctgctttaaggactctgctggctctggcgcctgggactctaatccccctcaagcctctgggctgggcaggcacgagcaagtataagccgttccctggcgtgtgcaggcagctctgggagggacacggttggaacggaatttaaacgacctgtgctaggaaaggaagggagagtggaaaacccctatacggagttctctggtcttctggcaggggctgagacggcagtccagcaagggtcacaggcctgacggtatgacctcttcccct

SEQ ID NO: 6434 - DNA, 304 bp, Homo sapiens
  chr16:22326427-22326731
  hypo
gagtcagagcaggcccgccagcgccgtgtgcagtcctatgagttcctgcagaagaagcacgcagaggagccctgggtccacctgcattactatggcctgagggtgagcggggcttcgtggggtcctgggggaaacacctcggtgcccggaagggtcatggtgtggcctccgtgtctcaccttgaacttaagtcaaattcatgagtcatagccacagatagaggatcgagtcctgtgggcagtttacacttcactccagccgagccacttagcgtgggccccaggagagcaagaggaaaagatgc

SEQ ID NO: 6435 - DNA, 389 bp, Homo sapiens
  chr16:2280815-2281204
  hypo
cgggctctggccttgacctggcgtttggtttctgggatggtggcgtcacctgggagcatgaactccttaggttctggcggggtctctgggctgggtctctggccagccaggcccctttccacccacctaaactctagcagcctccagccctaggctcagcacccctccctgtgcttcagcagcccctcttggcacccctgccactctggcacccctgggattttcccctttgcgggcatcctgggtactctgtgtgtgcccttggccagtcagcaggcccggtgggcttagtccagggctgctagctctcctgttggcctctagtggagatggcagagggtcctgcctgctggtggccaagggctggggcgtgccaggtcctgtctttg

SEQ ID NO: 6436 - DNA, 238 bp, Homo sapiens
  chr16:2281402-2281640
  hypo
cttaattgtttctgagtcaccacgcttttgtcgtgtttcaagagaacagcttgtcaaaacaagacgccagccggactgaggtggtttctaagcagtggcttcacagctgtttcccacttgtcatctttatgagcagaaaacctgaactgtgtttacaacctagctttgcacattgtcagatttttcccagcatcctccagaagtgcaaaagcccagcttcctcgcctcaggctgtccc

SEQ ID NO: 6437 - DNA, 61 bp, Homo sapiens
  chr16:2281702-2281763
  hypo
gcctgcctgccctgctgcagtggcccagcccatctcctccgatggaagagtggccccggac

SEQ ID NO: 6438 - DNA, 713 bp, Homo sapiens
  chr16:24837143-24837856
  hypo
cgagaaacgccacacccggactggccttttcttcccccttcacggccctcgcttctccctgcaggagctcgggggcgaaacctgtgtatggatttcagtgtatgacttcagatcatgctccaacttgccaggtgtgagctaatgttgtcggacaccttactataagcaaatgttattcagtgcgttcaatgtatattgacttccatactggtttttccaaaaaccaaaggtagctttgaaaaaccatgtctggaaatgtttggagcgttaagctgattgaccttctgaccttggggctttgagtagtatataattcataactgcgttaattgtattgttaaagtgtttgggagttttttgcgcttgttatgtggaaataaagtgtttgatttaaaattttttaaagtggtttggatctttgcctagtccttaaataaatacagctctattccctaagccacccttacttctcggtcttaatcccgactgccagtgcctggatgctgccctttgtctggcacagacctgcagctgaccatgctgggcccatggctcggggctttctagtcacgcagagccaccaagagtcagggtaaactttttaacacaggcacttaacacgttttttctttgttttcttttttccttttctctttctactttcttcctttttcttttttctttctttttctttctttttttttttttctttc

SEQ ID NO: 6439 - DNA, 482 bp, Homo sapiens
  chr16:2485948-2486430
  hypo
cgtgttagcagttcagttgctgtccttgctctatccgatggcctgcctccccattccctctcaggagctcgtgcccagatgtaccctgctgagggacctgctaatgatactctgactttgcaggttacgaaagtcgcctcttgttttagcaaaccctttaatttcagttggcaaagagtgactgagccagagcctcagcacgggggctgtttgggctccctgccctgtgcgccatgagcacgcagacctgcctgtggatgctggccctctccttggccatcctcttagaactctcgagacagagttcagcgtgccctgtaacacagagccaggcttctaaacgggaagcaggtacaggcaggttagaactggcctggtgcctggatcccttcatccccagaggccaggtgctccttgaaagaaacttgcgcagccttttcttctaccagttaactgcttatctgctcagcaccccaaggaac

SEQ ID NO: 6440 - DNA, 267 bp, Homo sapiens
  chr16:31500256-31500523
  hypo
cggcacagggcgggcagctcttcgattacatccaggcagtctctagctacctggcaccgcccgtgtccgccgtcttcgtgctggcgctcttcgtgccgcgcgttaatgagcaggtgagcggcacgcgcgtggtgacggcagggctgggcttgcacatcctcagcaggctgacctgtttccttcgcagggcgccttctggggactcatcgggggcctgctgatgggcctggcacgcctgattcccgagttctccttcggctcgggcag

SEQ ID NO: 6441 - DNA, 78 bp, Homo sapiens
  chr16:31500673-31500751
  hypo
gccccaggcaagcactgtgggacacagcacctaccctctgcttcctggagtgcccagctgggaggacctgaatttctc

SEQ ID NO: 6442 - DNA, 305 bp, Homo sapiens; identical to SEQ ID NO: 5981
  chr16:3208795-3209100
  hypo

SEQ ID NO: 6443 - DNA, 164 bp, Homo sapiens
  chr16:3772855-3773019
  hypo
cggcaaagcactgtcatctactcatcaaagctcctcagaatctactttgctagtctgggcattacactcacttaaatttcttcagtatcttataagggacctatgttttcccacctctgcctatttattatgaagtgtatacaagtaattcatgtggaattaac

SEQ ID NO: 6444 - DNA, 49 bp, Homo sapiens
  chr16:468053-468102
  hypo
cgcactcttttttgtccggcttctctcactgaacctgattgctcccaga

SEQ ID NO: 6445 - DNA, 36 bp, Homo sapiens
  chr16:468131-468167
  hypo
tgaaatcctcttcagggttgagccgggctccgcgcc

SEQ ID NO: 6446 - DNA, 41 bp, Homo sapiens
  chr16:56368405-56368446
  hypo
cgggagctgcatgcgtagcccttttggctgtgaatgagtgc

SEQ ID NO: 6447 - DNA, 125 bp, Homo sapiens
  chr16:571590-571715
  hypo
cgggcaggagcctctggggcctccactccgacatcaggacctgagatgaccgctgtgtggcgctctctccctgggcagggtggatgccacaggcccctctggctcccaggtgctgcttctccaca

SEQ ID NO: 6448 - DNA, 133 bp, Homo sapiens
  chr16:571959-572092
  hypo
ctgccccaacccccagcattcccgggtgggcccagaccccatcaccaagactggccacccgctgcgtgtgtgtgcgcgcgcgtgtacgtgtggccccacatccgccgccttccacgctaggatgtaagaggtc

SEQ ID NO: 6449 - DNA, 94 bp, Homo sapiens
  chr16:67313759-67313853
  hypo
cgttattccctcttcccaggcctgaattgcagttcctgtgccctggcactaagactggcacctcctgcggcccatgcccttcgcctgcattgcc

SEQ ID NO: 6450 - DNA, 115 bp, Homo sapiens
  chr16:67313958-67314073
  hypo
cctggagaatggggatgagtccccagactctcagggccatgccaccgactggagatttgctgtgtgcagtttcagggatgcctgggaagaggaggaacctgcttcccagatgcac

SEQ ID NO: 6451 - DNA, 94 bp, Homo sapiens
  chr16:67578540-67578634
  hypo
cgatcctcccgagccctaccctgaggcctgagctacttggccacccatgttctccagaaactgggcacatttgggcccctgcgctgccaggagg

SEQ ID NO: 6452 - DNA, 61 bp, Homo sapiens
  chr16:75148493-75148554
  hypo
cgttgtcccgcatggtgccgtagcggaccgcgttggtccccgacgccccggtggccgccat

SEQ ID NO: 6453 - DNA, 136 bp, Homo sapiens
  chr16:75149151-75149287
  hypo
gcacaccttggcgatagcacagggctgccagccggctgacctgctccacgttctggggccacaccacagcatcaggaggttcgcacctagaaccagaccctcagcgatttagcggggcgtgacaccctctggtccc

SEQ ID NO: 6454 - DNA, 49 bp, Homo sapiens; identical to SEQ ID NO: 5986
  chr16:77822069-77822118
  hypo

SEQ ID NO: 6455 - DNA, 261 bp, Homo sapiens
  chr16:81563939-81564200
  hypo
cggatccctcagggacctaggtgcagttcctgttcctcccgtctcgcctctgttgcgctgcaaggtggggtgtgtagtgagtatcactgtaacctgtacttttctaaagtcaaacagatttctcttggtgggaggacgtgtcttttgtgggatcggtgtagcccgtctgagtcagtgactcacctggcacccctggcagctgactttcctggcagttcactcgagtctcttgcctctgctcacaaaagcctgcgcctttat

SEQ ID NO: 6456 - DNA, 163 bp, Homo sapiens
  chr16:81564229-81564392
  hypo
agcagagcctctcccgcccgcctcccacatctctcccttagctgggtgcccgcgtggctgctacctccgaggcttctgtgtcaccgggtagtggaaatgtcaccgagtgtcagagcttcgagcctcctccagatccatccaaggtggcatcactaagtggcat

SEQ ID NO: 6457 - DNA, 240 bp, Homo sapiens
  chr16:81564541-81564781
  hypo
gaactgtcgaacgtagccaccagctagcctgagcttgttctgatgtcttctgggatcgtcattgttatgggttgaactgtagccttcaaaaggcacgtttacgctgtagtctctgtacctgtgagcatgaccttctttggaaatagggactttgcagatgcgaccaagttaagatcatgctggaggtcatgcgggaggtcatgctggaggagagtgggcccaaatccagtgactgtgtcc

SEQ ID NO: 6458 - DNA, 232 bp, Homo sapiens
  chr16:87356538-87356770
  hypo
cggggcagccccaagagcacgtatcccgggacatgatgtgttgtggtctgtgtggggtcagagccgtcagtgttcactgccgcgtgcccagtgcttagcactgtttgccgcatgggagatgcaggtcacaacccggtagcgcctagtggcccgggggacacctggcttgtctgggcctgttggctgacaggtaggagggactgccatccattgttggggcaaaggatgctgc

SEQ ID NO: 6459 - DNA, 76 bp, Homo sapiens
  chr16:89216581-89216657
  hypo
cgcaccctcctgcctccaccctgacttgccgtctcctgagcactgaagatatttttggcttgtccgatgtgactcc

SEQ ID NO: 6460 - DNA, 354 bp, Homo sapiens
  chr16:89216686-89217040
  hypo
ggcagcatcagggcaccacacatgcctgggcttgcacaacacagcgggagcactgccactcagcagcagctgctgctttcattaaacagttaccttgagaagaaaagataggtgtcgagggctgagagctgtgctagagtttcagggtccgagttggcaggaactgaagtcccgatgctcctcagcccttggctgtcctcagggctgccctctgcgtggggacaccaggccgcccctgcccagggacaccaggccgcctgctcctgctctgtgcatctctcacatcaggctcctcacccagcattgtttgggctatgacagtggctgtgacaagaccctaagacgggaagctgc

SEQ ID NO: 6461 - DNA, 179 bp, Homo sapiens
  chr16:89947451-89947630
  hypo
cgtctatactgccatggattttctcaacgggcgtaagttgctcctgacttgtctcagcgggcgtttaagatgctcctgaatcgtatccttgtcatgtgggagcctccattggagagaaagccgactgaccggcaagcacagacctgccctgtgctttcttctcttcagcaaccgcagcc

SEQ ID NO: 6462 - DNA, 65 bp, Homo sapiens
  chr16:90066554-90066619
  hypo
cgacttttcccgacacggcaagaccctggtggagaagctgtacggcgaggcaagcgcccagctcc

SEQ ID NO: 6463 - DNA, 43 bp, Homo sapiens
  chr16:90066981-90067024
  hypo
ggaggacacatcccttcccgaggggctgaagggttggaaccgc

SEQ ID NO: 6464 - DNA, 299 bp, Homo sapiens
  chr17:1454071-1454370
  hypo
cggacttcgtcctgaaggcaaagggaagccgtcagcagttttggcgctgggagtgacagaccatccagactgaacacttgaagcggtgcggagaactgaaaggcagggagactcgttagaagctgctgtagtaatccaggcaagaggtggcaaggaagggacatgttggagacgctgaggagatggagtcagcaggacctgatgggacacgaagggcaagtgagagtgttgcggggcggagtcagcgggacctgatgggacacgaagggcgagtgagagtattgcggggcggagtcagc

SEQ ID NO: 6465 - DNA, 232 bp, Homo sapiens
  chr17:21104115-21104347
  hypo
ggcaggcacacctggctgcggtgcagaggagagtcatggggagctgagccacctggccattggccgtaatatgggagtgacgagtgaagacattcataacaagccaccccagaacctcagcccagcatgaaggtaactccctccagcctccttcaaagatgggagcaattccaagtgaaggatggtggaaatcggactgtcgggaaacttcaaggaaaaagaacaggcaatc

SEQ ID NO: 6466 - DNA, 115 bp, Homo sapiens
  chr17:2326357-2326472
  hypo
cgactgctactgatcattccagtcgtacctggccacactgacagcgcacacgcacacatgcagacaccacaggttctgattactgggggacgtcttctaataagaactaaccagc

SEQ ID NO: 6467 - DNA, 126 bp, Homo sapiens
  chr17:27909050-27909176
  hypo
cgtgcagaggtgtggtgcccttctctgggtggaagaagttggcctgggcacccagggagagcaggcgcagacatgtctccaggttgcctgtccgcacgctcgagtgtagttgctaagaggagcaga

SEQ ID NO: 6468 - DNA, 157 bp, Homo sapiens
  chr17:27909205-27909362
  hypo
cgcacctccccacccacaagctgcaccctggctgcccctgggacacctagcagctccaaggaggcctgcccaaaccagactatgtcgggaggacagaggcttcccgctaggggttaatgccaattaataaacgctgccgtcagtcaccatctaccac

SEQ ID NO: 6469 - DNA, 170 bp, Homo sapiens
  chr17:2805383-2805553
  hypo
cgcctcttctagcctctggcggggtcggcaagcctcagcatgcgttggcttgcagccgcatcactcctgtgtctgcctgagaacacggggcattctcactgtgtgtttcttcacattgttgccttcccttcttttttttttttttgagatggagtcttgctctgtcaccc

SEQ ID NO: 6470 - DNA, 38 bp, Homo sapiens
  chr17:33351154-33351192
  hypo
cgtggcgcctcaggccgacaccacccttcaaggatgcc

SEQ ID NO: 6471 - DNA, 125 bp, Homo sapiens
  chr17:38179119-38179244
  hypo
cgggatctggggctcctacaccctgccaccccagcatggctgtccagtaaggcccgcagagggggccccagatgttgctccgcccctcaggctgaatcccagtctctggccagagctccccaagg

SEQ ID NO: 6472 - DNA, 125 bp, Homo sapiens
  chr17:38179273-38179398
  hypo
aggccacctggctcacggcagcctctcagggaagcctggcagaccaggccaggtgtggggagccaggggacaggacccatgtcggcccacagccactccagcccaagtaccttaatcaggttgtt

SEQ ID NO: 6473 - DNA, 133 bp, Homo sapiens
  chr17:38179430-38179563
  hypo
gggtgtcaaagatgtggatggagcggctgtccacccagcccttctccagcaccttggcaaaaatgtccgtcagcacctctttgatgggccgcttggggggcagcaggttccagtagggcattgtgtccacccc

SEQ ID NO: 6474 - DNA, 213 bp, Homo sapiens
  chr17:5269074-5269287
  hypo
cgttctgtgttcttttgcgtctgtgttcctccgttcaacagtgtactattcctactcgtgatgcacggagtgtttgttcattttcattgttgaatagtcatatcattatacggatataccgcaatttatccagactaatgttgatggatatttcagttgtttccagttctgggatattatgaataatgttcctttgaaatttttgtatagggc

SEQ ID NO: 6475 - DNA, 132 bp, Homo sapiens
  chr17:55664904-55665036
  hypo
cgccccccacccaactccccccagccccaaaggtggctgcagaggcgcaggtgtgagctggctcactaagtcgctttccccctcctgattaagcgtgtgggggaataaagaagacccgtgtcgactcacgcc

SEQ ID NO: 6476 - DNA, 348 bp, Homo sapiens
  chr17:55753412-55753760
  hypo
cgtctgcagtcccaggccacgttcctgtcagactccgcttctgagtgacagctggcaagccctgacttgggggccacgctgcggagaacaaaacatgtgcagacagtctagggcaccaaggtggcctcattcatgccccctggcattgggagctcctccctcatacacacactcacacgcacgcatgcatgcacacacgcacacagacatgcacgcacacgcacgcacacacgcacacacaggcgcacacacgcctgccagccctacttgtgcaggatgggtccttgttcagctccgctcccaagccagtatcacttaagtcagtagtctgatgaatctaatcccttc

SEQ ID NO: 6477 - DNA, 425 bp, Homo sapiens
  chr17:66440125-66440550
  hypo
cgagaattcagtaaggtttaatatcctagcatatcgtcgaagtagagagatttctttgtcatgtaataaaacatattctttatggttcagattgtctttttgctggccatgcagacacgccaagttgaaacctgcttctaattatcacgcctactctgtactgaacgaaccacaaaaaacaattaggggtaaacacttttcaacagcagatgcttgaaatcttttacatgtctaccttacgtgccttgacacatttgctgatatgggtcccagacaaagggtgttgttattcttggactgcaatgaagggcacacagcccccctgcaggacacacagcctgacataatttgaatctgccgccattaagacaaagcttcgagataaacctcactaagactcaaaaagcaaacactgcttcacgttc

SEQ ID NO: 6478 - DNA, 65 bp, Homo sapiens
  chr17:692558-692623
  hypo
cgtcagcagctctgaatcctaatgtcattgtgatccgtttcccttagattcccttagcctcagcg

SEQ ID NO: 6479 - DNA, 306 bp, Homo sapiens
  chr17:692652-692958
  hypo
ctcattacatttctgtctcttctcatcagaaatagggattaataggcttggctctaaacagactttcctcacagttggagcacgcctaaaatgtctcttacaccttgggaggtggaggggacagagagtaccattcatcagaaacaccccagccaccattaaaagtaaactaatagtggcacccgttgttgagacttgcctaaattgctgctcgcagctctttctcagtcacgccttgctagaatacgtttctgtgccagtgtgagagctacgtgctggggttctgtgatcagtacccgcttactc

SEQ ID NO: 6480 - DNA, 60 bp, Homo sapiens
  chr17:73124823-73124883
  hypo
cgcaggaggtgtcccactcatcatcaactgcctatccagccccaatgaggagacggtgct

SEQ ID NO: 6481 - DNA, 166 bp, Homo sapiens
  chr17:73124912-73125078
  hypo
gcccgccgggccgcagctttctcccagagctgaccgccacgcccgtggtgcagtgcatgcttcgcttctccctctcggccagcgccaggctccggaacctggcacagatcttcctggaggacttctgctccccccgccaggtggccgaggcccgcagccggcaggc

SEQ ID NO: 6482 - DNA, 153 bp, Homo sapiens
  chr17:73808671-73808824
  hypo
ggcatccacacctcggccgcgccctccctataatcctgctcatagctgccctggggatttggctcaccaccacctactgcctgctctagccgaggccccgacctggcccgcatcccaccctacacccaccattcaaaaggcgcctctaggggc

SEQ ID NO: 6483 - DNA, 185 bp, Homo sapiens
  chr17:74042063-74042248
  hypo
cgacacaggcaaaggaaaaccacaggcccttgccttcccggtcctcaagggtcacctgtaagatgatgtcatagagtcggatcaggtcctggggccggggtgagcgcttgctgtcatcctctggctgctgctgcagcagagccctctgcagacctttggccatgttctcattacgcttgattgcc

SEQ ID NO: 6484 - DNA, 73 bp, Homo sapiens
  chr17:7493149-7493222
  hypo
cggagcctttgcttccaacctgttcggcacactttggggagagtcgaatgcaaaatccgctgtctggtgcccc

SEQ ID NO: 6485 - DNA, 124 bp, Homo sapiens
  chr17:75132773-75132897
  hypo
cgtcgttcggggagcaggtttgctcttcttcaccctttcctccgacttgctggctggagggggaagacacactgtggtaatggcaaagtagcaacacagaaggggcccgtgttaggccattctc

SEQ ID NO: 6486 - DNA, 106 bp, Homo sapiens
  chr17:80491467-80491573
  hypo
cggctgttcgcgtagtaggttcgttgacaccagcatcaccccagactcatgagtaattcattgcactatgacatcacaatggctaggaataggaatttttcagctc

SEQ ID NO: 6487 - DNA, 86 bp, Homo sapiens
  chr17:80491602-80491688
  hypo
tgcggcccatcattgacttgaaacgacgtgaattttgttagccgggcatggtggtgcccagctgtaggttagccgggcgtggtgac

SEQ ID NO: 6488 - DNA, 58 bp, Homo sapiens
  chr17:80747254-80747312
  hypo
cgtgtgctcacaggcagcccgtcgcggggtcatgtgctagacggggagggggcttggc

SEQ ID NO: 6489 - DNA, 63 bp, Homo sapiens
  chr17:80747754-80747817
  hypo
cgggagcccagcaacaaatgggagcttctgtgctgctgtccgtgcatacggcccaggagccgg

SEQ ID NO: 6490 - DNA, 95 bp, Homo sapiens
  chr17:80747890-80747985
  hypo
tctccttcctggttcattgctcatctgttctcatgtggctgcgccgccaccctgtcctgggggtccttgtcccagcacgtggctctgtgcttcac

SEQ ID NO: 6491 - DNA, 138 bp, Homo sapiens
  chr17:80772735-80772873
  hypo
cgtggcatgggggatgtctggcgctggcagagctgggcaggagaggcctgttgctgccgtctcgactcgtggatggtgagtagctgaggcacggtcaggggggatgtctggcgctggcggagctgggcaggagaggcc

SEQ ID NO: 6492 - DNA, 513 bp, Homo sapiens
  chr17:80772941-80773454
  hypo
cgtggcaggctgcagcccttcgtctgaacccatctccgcggtgtggccctgccgcgggcacgcccagaagagcttgagaacaaggtctgtctacctttttctcgcattggcctttgtaatttcctaattgcctcttttgtctgctgtggaattttaatgccacagattaccctgtgtagctggttttggagggccacgaatccttgtaatgtctgattttcttactccccaaaaccggttttcattcttgagggacattgtcgccccttaaggacacatgcagtggcacctgcttcagttgtagaaccaggtacccctggcagcatcctgggtcacctggagtgacgtggtgctccctggagatgaggctcacgccagcgtgaaaccagggtgggaactggggtggagggccaggggagctctgcagtggccagcagtggggtggggacagagggcacagcatggcagatgcaggggcactgccccagaccagctcttgtgccgtggccacac

SEQ ID NO: 6493 - DNA, 33 bp, Homo sapiens
  chr17:80797632-80797665
  hypo
cgtggtctgcatcccagccatgcacctgctggg

SEQ ID NO: 6494 - DNA, 498 bp, Homo sapiens
  chr18:10725385-10725883
  hypo
cggcccacattggcggtcaacctgaccagagcccgccagtactggttggagggcatgctgtggcatgaaataggtcagggtgtgggtatccgggtggatgggtaggcatgaaaggggcctgggagctgggagtcgtgggaaggaggggccccactaactcccccttttgtttctcccctgtccctcctgaggtcggggctttcccttcctgagcagccgcctccgccctctggctcacagaggtaggccagaacatgcctgcccacgctctgggctcgccttcatctcttggtcctttcgggtatatttttctctctccacttcctctccgacttctctccacagtggcggcagggctggtgaggccctgacaggccagagggagaacgctcagggtcccaccaggccaaccaccacgcgggccctccagggtggatggaaggccagatcctgggaatggacttggcttgaggacacacggcgcctggtttaggaggc

SEQ ID NO: 6495 - DNA, 166 bp, Homo sapiens
  chr18:3986877-3987043
  hypo
cggatactggacccttcaatggtgacaccctgcctcccacaaaaatgtcctatgatttagcaactgaaaagttaatgctcgacacaggacgaggctctgactacgcagagccattttgattggacactggtttaataacttgactatcaccctgcaaatagcgctc

SEQ ID NO: 6496 - DNA, 710 bp, Homo sapiens
  chr18:77474501-77475211
  hypo
cgaggcactgaggtctcagagccatctccgcccgtgagagaccctgagggggtaacgcaggcccctggagtggagcccagcaatggcctggagaagcctgcacgggagctgaacggcagcgaggccgccaccccgcgggactcaccccgccccgggaagccagacgagagggacatctggccccctgcccaggcccccaccagcagccaagagctggcaggcgctcctgagccccagggatcctgtgcgcagggtggccgggtggcaccgggacagcggcctgcccagggtgccacgggcactgacctggactttgacttatccagcgacagcgagagcagcagtgagtccgagggcacgaagtcctcctcctccgcctctgatggcgaaagcgaggggaaaagaggccggcagaagccgaaggctgccccagagggagccggggcgctggcacagggcagttccctggagccggggcggcctgcagcaccgagtctccccggagaggccgagcctggcgcgcatgccccggacaaggagcctgagctgggtgggcaggaggagggcgagcgggatggcctctgcggcctgggcaacggctgtgccgacaggaaggaggcggagaccgagtcacagaacagcgagctgtcgggggtcactgcgggtgagtccctggaccagagcatggaggaggaggaggaggaggacac

SEQ ID NO: 6497 - DNA, 266 bp, Homo sapiens
  chr18:77542640-77542906
  hypo
cgccgactctgcagcccggcgactgcttcccaggtgactgtttccagagtcaggtgttggccgtggtcaggttgacctgcctgtttgttttctataagctgtgtgtgttgtgcccgggtgtagatgccctgaggtttcacggccccccagcaagcagccccaggcccggcaccggatgggcccttcatacccattcactgtaacagacaagcagacggatgaggccatcgtggtccctctgaataaacgatgcttcacagaagtct

SEQ ID NO: 6498 - DNA, 271 bp, Homo sapiens
  chr18:77542951-77543222
  hypo
ccctggggtgccgtcggctggtgggtgatggagcggctctgcctggctcctctcggctctggcgcggcaggtcttcctgctttccaagcccgtgtccctggtgccagcacagaactgaactccgcccttgagtcgtgcgggacgagaccccgtgctgcgggcgcagtgccctctgtgggcggcgcgtggtggctgtcctccgtttcccacccggcgtctactgggccttgtccagtatcactgggagctgcaggctcggctagcaggtggc

SEQ ID NO: 6499 - DNA, 131 bp, Homo sapiens
  chr18:9688396-9688527
  hypo
cgcatgcgccatcgctcatgcgggatgtgggtgtggtcatcacagaccttcccacctctatgaaatggggaaatggaagcgacactgagctctcctggattgacttggatatatcaattctttctctcctc

SEQ ID NO: 6500 - DNA, 140 bp, Homo sapiens
  chr19:1048876-1049016
  hypo
cgcgcccctccccgcaggccagtacgggatccctgaaccatggaattttccttttcggaggagctactggtgcggacctcggccccccaagagtccagccccttgccccaccccgctggacccaaagggtgaggcactac

SEQ ID NO: 6501 - DNA, 144 bp, Homo sapiens
  chr19:10665634-10665778
  hypo
cgaacccaggtctcagagcggggggcgctgcattcccaaagtcatgcaacaagaggttgacggagccaagactcaagcctgggcctgacaggctccccacccacgcttccccagccagcactgcttactcttctcggcagagtg

SEQ ID NO: 6502 - DNA, 143 bp, Homo sapiens
  chr19:10665807-10665950
  hypo
ttctgggccttctggctgtacgcccgcttgtcccgcagctcctcctgctctgacctgcagacagatgcccctgtgttgggtgctctgggaagtgcccgaggctgcccgccctgccccctgcgcatgtggccccgccgcgcccc

SEQ ID NO: 6503 - DNA, 177 bp, Homo sapiens
  chr19:11003087-11003264
  hypo
gctgcgccagaggagcccagggtgacctcatggtcctcagatacccggggctgggcagcacagtggaacagctgctccagagcttctccgaggacgacatcggaggatccgactcaggttacggcaggagagggaggccaggccgggttagggttctggggtttgggattctcttcc

SEQ ID NO: 6504 - DNA, 198 bp, Homo sapiens
  chr19:1226490-1226688
  hypo
cgccggggcctccccaaggccgtgtgtatgaacggcacagaggcggcgcagctgagcaccaaatccagggcggagggccgggcccccaaccctgcccgcaaggcctgctccgccagcagcaagatccgccggctgtcggcctgcaagcagcagtgaggctggccgcctgcaggtggggcgcggcggggcccgggtggg

SEQ ID NO: 6505 - DNA, 317 bp, Homo sapiens
  chr19:1226828-1227145
  hypo
gtgccgtctcggggcctggtgtctggccagcgtgctggtcatggaggcctacgtgtggcggggctctgggggggcgtgccgtcctcacagccacctctcagagtgggtgcattccgaggaccctgccctgggcctggcgccccctccccatgcccgcgccgcttccaggaaaggcttatgctgggctcagcccagaggcttttgagcaccagtgggtggtgggtggtggggaggggccgcggcctccatggctctgccggggtgccgcaggctctgagccagctgccaagtatggctgaggctgagtcgtgccggac

SEQ ID NO: 6506 - DNA, 207 bp, Homo sapiens
  chr19:12977267-12977474
  hypo
cggggctagacggtgccactgagaatggggcaaggaccttgcctgggagcggagcctaaattaaatacactaatgaggcaggggcgtggcctgacctgaagacttgtaaacccgtcttgaaccaggactgggctcctgtggggatgtgatatgaggaggaaccccgtaccctcagtcacagcccatacccgctccccagcccgctca

SEQ ID NO: 6507 - DNA, 263 bp, Homo sapiens
  chr19:14000130-14000393
  hypo
cgctgccctgccagctctgaggtggtgtctggaatgccctgctgagccccgggctcctggagagggtcgtctgctatttctctgtgttccagcacaacagaggcttgcggggacacacggaacccctcgaggtctcgttcgaggttctggccacctaactcggcttcctcttgagcaggacctggctcctgcttctgattgacacatggacctgtgtccggggatgcatgaccggaatctccagcacccatcatggactctcc

SEQ ID NO: 6508 - DNA, 131 bp, Homo sapiens
  chr19:15421594-15421725
  hypo
cgtgcctggccttaaacagtcctttaggcagtcctgaaagacacctggctgcaccactgtttgaaccatctcccgtacctttgtgcctactcttcaccgatgcccaatatccatccccaaaatcagtttcc

SEQ ID NO: 6509 - DNA, 846 bp, Homo sapiens
  chr19:16232495-16233341
  hypo
tgtctcctactgaggacagttattttcctttaatgttgctaatatcccttctcttcatgtttagggacacagccggtcaggaacggtttcggacgatcacaacggcctactacaggggtgcaatggtagggactttttgtttggttgtttttatctgctttttaagtcaacatgggagcgtcactgtgcattggttaccgaagcctagatgtttctgtggagcccgtgccccaactcctcagggctccttggtcccaagttagtcttaggaacaggctttgtgccccggcctacccccatgtacatacctccccttctggctgcagagacaatgcaaggtttaaataaagtggaaacataattctttgggaatgaagaaagacacaggaagccggttcttccaggtgagctcagtgcagttaaagccggcatgccccgacttttaggagctgtcacatgacctgcatctgtctctgaaatttgctaccaaaagcttgaagatcttccaggagctgacctgccctgggctgtcggccgttatatccgtcacccaggcctgaggcgggatgacgtgatgggaagactcagtcatcatccctcaaaacatttctcaagcaccttctctgggccaggccttaactagatgcagaaggcggccagggatgggacgaggtcctgtgtcaggggccctgtgtgtacatggcagggcattcaggggtagagggagcaggaggtggagcccctggacctgacctgagaccctggcttgcccactgagctccatctcctgacttggaaaagggaacggagcacagcactgtgtctcgggctgtgctgaggataaac

SEQ ID NO: 6510 - DNA, 577 bp, Homo sapiens
  chr19:16238432-16239009
  hypo
cgagttggtcaccccagtggggcacgtgccatgggatgacagaagcacacacccagccggggcttcttgggtgcactctgcgggcatctcatcaaaacctaccatggccccgctccagactttcaagaccacaggagcggggaacagagccatagtttgatcccagcaggtccccgccaccctcccatctcagctgccatccccagcaactccatgccctgtgaggccctgtggaggggcattcactatagaattgagggagtgatccaggaagtcacgcccacagccccagccctgttgctgctccctcttggcgccggccctgccttcagctcctgttttaggcaagctcagatgcgcccggcggctggtgtgctcatgcgtgtgcctccctctctcacagctggccctcgactatggaatcaagttcatggagaccagcgcgaaggccaacatcaatgtggaaaatgtgagtcccgggccctgctgggagacatggggcctgcaggatcggccccttcaggctaaagggggagctggcgtcctccgaggaggtcctgccagacggaccagcctc

SEQ ID NO: 6511 - DNA, 165 bp, Homo sapiens
  chr19:18963604-18963769
  hypo
cggggactcctaatggcttctctttcagatgtgcccttggtggcatttggggctgcaggtgccactcacggcgcctgctctcacggcagaggcttgctgtagggcccgcctcatggggcctcgggcatgtggaggccaggcccgggcctgtgctggaggctaacc

SEQ ID NO: 6512 - DNA, 243 bp, Homo sapiens
  chr19:1911845-1912088
  hypo
cgtttttaaaaaccaatggctgtttaaactctgtgcacaccaggggttagcaggacatgagggagtgtagctctgatgcggtgacctgggccggagccctcggactagcctcagctttggtggcagcacgccctgccttgtggagccacggcctcccgggacggactccccggctctcccccagccgcccgcagccgccggatgatcctctgctcccgtctctgtctcccacagtcggcctcg

SEQ ID NO: 6513 - DNA, 659 bp, Homo sapiens
  chr19:1912446-1913105
  hypo
gcggcctggggcaacccttcctggtgcccgtgcccgcccggccgcctctgaccaggggccagttcgaggaggcccgggcccactggcccacgtccttccacgaggacaagcaggtgaccagcgccctggctgggcggctcttctccacgcaggagcgcgccgccatgcagagccacatggagcgggcggtgtgggcggcccggcgggcagcagcgcggggcttgcgggccgtgggggccgtggtagtggacccggcctcggaccgcgtgctggccaccggccacgactgcagctgcgcggacaaccccctcctgcacgccgtcatggtgtgcgtggacctcgtggcgcgcggccagggccgcggcacctacgacttcagacccttccccgcctgctccttcgccccggccgctgccccccaggccgtccgcgcaggcgccgtgcgtaaactggacgcagacgaggacggcctcccctacctgtgcactggctacgacctgtacgtgacccgcgagccctgcgccatgtgcgccatggccctggtgcacgcacgcatcctgcgcgtcttctacggtgcgccctcgcccgacggcgccctgggcacccgcttccgcatccacgcacggcccgacctcaaccaccgcttccaggtgttccgc

SEQ ID NO: 6514 - DNA, 118 bp, Homo sapiens
  chr19:19612766-19612884
  hypo
cgtttgtgtaggtcataaaaccccggcgtaagttggcgttccgctcaggagaggcccgcgactggagtaacggggctgtgctacaggtcagaaccgcactgggcgccgggagcctcgc

SEQ ID NO: 6515 - DNA, 306 bp, Homo sapiens
  chr19:1977026-1977332
  hypo
cgtgcccggccacagaggcctcattctgcagcgtatgctactcgggcaaaggcagctgactgcagacccaacacggtgacccagctggatggtgcctgagagacggggctgccccacatggtgccctgtcatgccgcgggacaggtcgcccagcagatggtagctatggccccagtgccatcctgggctggagacacatgggtgccagacacgttcatgcctgtcgtctggcccagctgccgtggggagccctccagggccgtgtgcctgcagggaccggcctgttcacctctaggctcacccctc

SEQ ID NO: 6516 - DNA, 233 bp, Homo sapiens
  chr19:1978023-1978256
  hypo
cgcttctgtcctgggctagggaggtgggggggcgggggaggaggagtggcagacactgaggcggtgaccacacgggcagggtgcaggtgtcgggatgacttggcaggccatggtgcagtgctctggcaggctgggcccaggccctgctgctgggcagtggtgtcatttggagggtggtccttcagggaccccctcctgcctcctgcctcgggggtgggctggggaggtcgggg

SEQ ID NO: 6517 - DNA, 89 bp, Homo sapiens
  chr19:2204172-2204261
  hypo
cgtgtctctgtgtgcgtgcctgtgcgtgcctgtgtctgcatgtctgtgcctgtgtgcatgcctgtgtgtgtgcgtgcccgtgtgcctcc

SEQ ID NO: 6518 - DNA, 95 bp, Homo sapiens
  chr19:2224728-2224823
  hypo
cgtgcgccatcacagccggccctaagtgtgcttttggtggtgttctgtgttagttcgttctgctccttgcccacgtgtgcgtgcacgtgttacac

SEQ ID NO: 6519 - DNA, 751 bp, Homo sapiens
  chr19:3491120-3491871
  hypo
cgcgatcctcccctggcttccctcgcgatcctcccctggcttccctcgcgatcctcccctggcttccctcgcaatcctcccctgtcctgagccgggcatcccagagcctcccgcagagtcccaccccaagcctggaaacttccacgctacagccctgcgccaggccccgaggagcagtcaggggactcagggagtcacagcacaacggcagctcctcggtcccagacggaggagggggacagcaaccatgcgcccagcaagacacaagcgatgacaccgatttacacacacccggtttagacgccaaagctctgcgggggaggagcggccctcaagagtcctccgggagctccgggtgagggtggggccctaggagggggccccgcgcagctgctccaggccgtccgcgtactggaaggcccgcccggtctcgtgctcatacatgtccagagccacctcgcagctctcacgcaccacgcgctctgggtcgtccgcgtgagcctgcagcgcggccaggcaggcgggccgggcaatggcgcccagggcctccgcgcactcgtgccgcaccatggggttctcggtgcatcgggccagggcggccgccagctggggcaccgccgcctcgtgctgcagctgtcccaggacgtagccgacctcgtggcggaagagggcgctcccacagtgcagacctgcaggggagagggacactcgctggggccaggaggggtgggaaggggagctctgtcttttc

SEQ ID NO: 6520 - DNA, 246 bp, Homo sapiens
  chr19:39277459-39277705
  hypo
cgatcactaaaaagttgagttcctgggaaacacggtacacagcatgaggcgtcagtaatgtgaggagtgtgttctttagaatggtcaataatgttagaatgatggagttcaccattcaagggaacattctcgggaactaactgagctgcgctggtggtgtgatcaccggacaccctgctgtcctctctgtccgtgcccatgacatgtccttggcacagacacccctgtggagcccagggcctggcc

SEQ ID NO: 6521 - DNA, 57 bp, Homo sapiens
  chr19:39329516-39329573
  hypo
cgagcctgagcacctaccagacattcagcttctgcccaaacatgaagttgttgttga

SEQ ID NO: 6522 - DNA, 168 bp, Homo sapiens
  chr19:47482472-47482640
  hypo
cggagtcacactgccatcactccagtgccactgggcctgcgtgggcatgccagcaaagtcacacttcagagcatgaagacgtctcacgttcttggcaggacggctctcccagctgctcctggctttgaatgttcactcccgttttgcagagcgcagtcggctcacctc

SEQ ID NO: 6523 - DNA, 41 bp, Homo sapiens
  chr19:47592724-47592765
  hypo
cgccggcagagatgtgttctaagaggccagtcagggctacc

SEQ ID NO: 6524 - DNA, 457 bp, Homo sapiens
  chr19:49971410-49971867
  hypo
cgtctcaaaaaaaaaaaaaaagaaaggcggttatgcaggatgtttctcaccgcccgaacccccgtggaatgattcactttgaccagcgtctgcgaaatggcaggggcttccacaatggtgcggtttgggccaacaccaagtgttggggagaatgtagaggaactggatctctcatttactgcgggcggggctcccctgccccacacgtgacccacctgtccctgcaggtagccgggctgagaggccctgtgctgcgcctgcgggagccgctgggtgtgctggctgtggtgtgtccggacgagtggcccctgcttgccttcgtgtccctgctggctcccgccctggcctacggcaacactgtggtcatggtgcccagtgcggcctgtcctctgctggccctggaggtctgccaggtatagccccctgccttcctgcctctcctccccgtagcctcagg

SEQ ID NO: 6525 - DNA, 171 bp, Homo sapiens
  chr19:56807013-56807184
  hypo
cgtggcggcttccttcccagcctaaccttgctgcggtgcaaatcctgcaagtcactgcacgtccctccaacccacacgaagcagcctctgactgttctgcgctgttcactgtggcatgtcctgactactcagcacgacccacccagggctccgctctcctgtgctcccatc

SEQ ID NO: 6526 - DNA, 125 bp, Homo sapiens
  chr19:6425753-6425878
  hypo
cgtccagttctcttgcaggactcaaggaaccagccccactcacgagtccagaaccgttccaacaaccgggatcgagggatcacagcctcgatcacacccctcacttcacacccctcactcccttc

SEQ ID NO: 6527 - DNA, 252 bp, Homo sapiens
  chr19:8554998-8555250
  hypo
cgcgccgggatccagggctcctgggtgagcgggcgctgggctggctggctgtcctggccccacgcctaccggtcttaccgtcccagggggagtggttggttttccaggggatctgccgaggaagcgtgacttccatggacccctctccccagaagcccaatagtgagcagcgcccccggggaatcgccagggtccctccagccctcccagagtgtccacgtaccgcagaagtcgacatcatcgtacacctcc

SEQ ID NO: 6528 - DNA, 159 bp, Homo sapiens
  chr19:883424-883583
  hypo
cgtggggcggtgcgtgaagagctgggcatggcggggaccaaagcctggcatggtgggcacgtggggcggtagggggagagatgggggagagatgggtgcggtggggactgtcccagtgacccccagctgccagggatgtgagacctgagaaaggctgtg

SEQ ID NO: 6529 - DNA, 45 bp, Homo sapiens
  chr19:884311-884356
  hypo
attttgtgccggaggtggggatgacgggcttggctccgtgggtgc

SEQ ID NO: 6530 - DNA, 35 bp, Homo sapiens
  chr2:106742088-106742123
  hypo
cgatgtggaggccaggagcagacgggcaccgactc

SEQ ID NO: 6531 - DNA, 144 bp, Homo sapiens
  chr2:120005222-120005366
  hypo
cgccgtctgactgccccacttttctcccgcaggtgcccatctgcggtgaccagccagaagccaagcgtgctgtctcggagatggcgctcgccatgggcttcatgcccgtggacatgggatccctggcgtcagcctgggaggtgg

SEQ ID NO: 6532 - DNA, 51 bp, Homo sapiens; identical to SEQ ID NO: 6089
  chr2:149632592-149632643
  hypo

SEQ ID NO: 6533 - DNA, 61 bp, Homo sapiens; identical to SEQ ID NO: 6093
  chr2:155553956-155554017
  hypo

SEQ ID NO: 6534 - DNA, 631 bp, Homo sapiens; identical to SEQ ID NO: 6094
  chr2:155554076-155554707
  hypo

SEQ ID NO: 6535 - DNA, 98 bp, Homo sapiens
  chr2:171815760-171815858
  hypo
cgtgcccggccccagatgcgcttctgattttaggcgatagttgacatgtctcttcaagccccagtttctcttcgacattttaaatctttcctcattac

SEQ ID NO: 6536 - DNA, 178 bp, Homo sapiens
  chr2:220150664-220150842
  hypo
cgctgacgctctctcctgtcaccccgcccctgctctctccccagatgtgttctgagctggatgccgggttccagaatcgctgcacagttccaacaggacagcgccttcccccatgcgctgggaggggaccctccatttctccccctcacccatgctgagtgtagagccggggcctggg

SEQ ID NO: 6537 - DNA, 336 bp, Homo sapiens
  chr2:220150871-220151207
  hypo
agtagtcttagcctgtgcactctcttccttgggtgtttggtgctggctcctggggactacaaatcccagagtgcggtgtgcccggcctcatttctgatagatcccgcttgggggaggtggtgtatggttacggagctgtgcatcttgggacatgtagtagcccaggtcggcttgtcactcgctgtgagatggggagattttgtcttttgatttatccctgtagggctggcagggttgtagatgaagggggaatgatctgagccttggttcccctgacacgtcttgctagccccagggttagagtgggcagggcagagccgcgcagcacctgggagc

SEQ ID NO: 6538 - DNA, 360 bp, Homo sapiens
  chr2:241542357-241542717
  hypo
agccacagcagttgtggcatctctaccctgcccagcaaaagtggaagtgttgcctgtgccgctaggaacctccaggtttgctccacctccaggggccttgccagggtgtcaaacctgtgtctcgggacactgctgttaggtctccagcttccctatcaggcgcctcagcacccagtcctaccagtgctcccgcctcccgtccccagctggctgggcctgcagccccctcctgtgccccgagctggccgggcccgcagcccactccctggtcactggatgttgctgacacttcactcggtcagagccctagcacccaaggggggccagggcctgacgggggtggagcgaggggtgggccgc

SEQ ID NO: 6539 - DNA, 131 bp, Homo sapiens
  chr2:242277184-242277315
  hypo
cgggagcggctgaagaaaagggtgagtgaggctggcgtcctgccctccctctgggtgcgactcgggggcatggggatgaagaaaggagtgtgttcccacgctcagtctgctcaggtgtcgggaggcagggc

SEQ ID NO: 6540 - DNA, 99 bp, Homo sapiens
  chr2:65251127-65251226
  hypo
cgagcccctaagtcagggcaggcatgctcagggggcagtgctaccgccggagctgctgtcgctgatccttttgcggccacctgcttgcaactgggaagc

SEQ ID NO: 6541 - DNA, 46 bp, Homo sapiens
  chr2:8868792-8868838
  hypo
cgcactgcacagcgctgctgggcgctagcatgctgtgggcacaaac

SEQ ID NO: 6542 - DNA, 58 bp, Homo sapiens
  chr2:95941852-95941910
  hypo
tcctgctgctgaccaccctcttgctgctgtaaggcgctgcccagggcccgggtagggc

SEQ ID NO: 6543 - DNA, 226 bp, Homo sapiens
  chr20:20376606-20376832
  hypo
cgccttccgcctgtgagcctgggaggtggtgcagcccaggccacacgggacagggttttcagacagccttgccaaggcggctgccatccatcagagcgctctgggcagggcctggaccccagacccaggacagaaaggcaggctggggaggtcacacctgccatggccagcctatcctctgggtcctagaccgcagcccattcctaggtctccaccctctgcgctc

SEQ ID NO: 6544 - DNA, 219 bp, Homo sapiens
  chr20:20376973-20377192
  hypo
cggcccatctcaagaccctgctccttcaggcctgggcaacaaaaaagggggcggccccagcgcccgctggctccctgcagccccacacacaaaagggcaggcgacaaagacattttccgggatggcaggtgttggtgtcggattcctccccgagtgcacgggcagaagaaaggcaaggctgggcttccccgggcagcgcagacatgcaggggcaggagt

SEQ ID NO: 6545 - DNA, 140 bp, Homo sapiens
  chr20:2820587-2820727
  hypo
agaggccactaagcagcgcgatggtggggactctgggcaggtcagcctcagggctagcccctccggggctgctcaatgctaaagggaggaggtgacggcagcagagccatggtggcgccagccttggtcacacttggtac

SEQ ID NO: 6546 - DNA, 78 bp, Homo sapiens
  chr20:30153987-30154065
  hypo
ttcaccagcctgtgtcctctcatagcctgccctcctatacctggtccccgcctgcatcggttttcctgtcctggtggc

SEQ ID NO: 6547 - DNA, 110 bp, Homo sapiens
  chr20:37657005-37657115
  hypo
cggagcctagggcaggcaagggtttcacccgcctctctgttggctgcctatgtaggtgacccggatctggttctgaggtgcattgtctccggcttcttcgccaatgcagc

SEQ ID NO: 6548 - DNA, 164 bp, Homo sapiens
  chr20:57268976-57269140
  hypo
tggtgagtgcttcgagaggaggcagccacggtgctcctagtcgggcagcggtgagctcgggcctggggagctcacagccctgctcagactgcagcgcacgcccagagggctgtggacgttatcatccctgctctgtagacagggaaacaggtccagagagacgc

SEQ ID NO: 6549 - DNA, 57 bp, Homo sapiens
  chr20:58514041-58514098
  hypo
cgcagcttaggtgtggaggctccaggtggccggtccccgcgcggctcagatgaagtg

SEQ ID NO: 6550 - DNA, 409 bp, Homo sapiens
  chr20:60725146-60725555
  hypo
cgtcaagcatacagcggtggggccgtgaggcagcagccagctcctctcaaggagactgcacatgtgtaaattgagacgctcttctgaaacctacacaccgacttcacggattccacagttgggtgaatgttcagaggggtcccactggcttccatcagtggagtctgtagtatcggcttgctgacctcgggggcagggacggagcagctcaggctgggctcagagggaaggactgctgatgggtcagcgatgtctgccccgagaacaggagtggcaggcgctagcgcaggtgccatcgctggcttagccacctgctgatgctcgaccagctctccggttagccaggctggtccccctcacaccttgatgactcctaggaattgattctgcgtctgtgtccacgccatgc

SEQ ID NO: 6551 - DNA, 716 bp, Homo sapiens
  chr20:62326157-62326873
  hypo
cgccgtgagcgcctacctggctgatgcccgcagggccctggggtccgcgggctgtagccaactcttggcagcgctgacagcctataagcaagacgacgacctcgacaaggtgctggctgtgttggccgccctgaccactgcaaagccagaggacttccccctgctgcacagcaagtggccctggcgtggggaacagccggtggggtggggggcaggggacaaaatgggggctgtgccgggtctgattgaagctccccgcagggttcagcatgtttgtgcgtccacaccacaagcagcgcttctcacagacgtgcacagacctgaccggccggccctacccgggcatggagccaccgggaccccaggaggagaggcttgccgtgcctcctgtgcttacccacagggctccccaaccaggtagggcacctgcctggctgctcctggcagcgccccaaccgcacgcagccctgggagtgagcagcaaagccccaggcccccctcagactcaagtctctgtctccaggcccctcacggtccgagaagaccgggaagacccagagcaagatctcgtccttccttagacagaggccagcagggactgtgggggcgggcggtgaggatgcaggtcccagccagtcctcaggacctccccacgggcctgcagcatctgagtggggtgagcctcatgggagagacatcgctgggcagcaggccac

SEQ ID NO: 6552 - DNA, 307 bp, Homo sapiens
  chr21:44830965-44831272
  hypo
cggaataagcaggcggtcaggtcgccaacaatccggtcaaccacggtgcttcttccctggtgggtgtctggccccgttcttgctggggatggcgctcggggatgccaccgtgtttccccagggcccactgtgcaccctgcatgtcgcgcccttgtcacgggagcggcctgctgacccggagcacgcgtggccgtcacaaagggctgcaaagctgcagcaccagaacgcaaactcaggcgtgcggcaacggaggccacgttctcagccaccgtgccactctgcatgtcagctggctgggcgtgcctcc

SEQ ID NO: 6553 - DNA, 57 bp, Homo sapiens
  chr21:45289958-45290015
  hypo
cggcacgggcgggcgggattttggattagttttaggaagcgaaccacagccgtcctc

SEQ ID NO: 6554 - DNA, 69 bp, Homo sapiens
  chr21:45290044-45290113
  hypo
gctggtgcagggaggcgaagtgctggtgttctgggaattttcaaatgcactacagcgatcaggacacac

SEQ ID NO: 6555 - DNA, 294 bp, Homo sapiens
  chr21:46912528-46912822
  hypo
aaggctgggtggggtccgggcaggcgcgagggtgcgtgatgaccccagctgacgccgtccctctttccccagggccggccgggtttcgcaggctttcccgtgagtaacctggtgccagagctgcatgctgcccggctggggaggggtctccacctggtagcacagagcagcccggtcgagctggggtgggccttgtcaggcccgagggatagcgacagtcactgcccccaaggaaatgatgggagtgggatgtgggcgagagccgctggcaggccctgtgctgggtgggcaccc

SEQ ID NO: 6556 - DNA, 731 bp, Homo sapiens
  chr21:47832850-47833581
  hypo
cggagctgctcttggtgaaaaatgaaatgcgcctgagtctggaggacggcggcaaggtgtggggaggggggaaggcgcgaggtccccccgggagaggctggacacgcggcagcaaggtgtggggagcggggaaggcacgaggcccacccgggagaggctggacacgcggcagcaaggtgtggggagcggggaaggcacgaggcccacccgggagaggctggacacgcggcagcaaggtgtggggagcggggaaggcacgaggcccacccgggagaggctggacacgcagcagcaaggtgtggggagggggaaggcgtgaggcccccctgggagaggctggacacgcggcagcaaggtgtggggaacggggaaggcacgaggcccacccgggagaggctggacacgcggcagcaaggtgtggggaggggggaaggcgtgaggcccccctgggagaggctgggtgcagaacatgtgggtcttgccctgggcagaggcgggtattctgctgaggtgaggagcacagtccgtgcctgcagtgacatgttctctgaatcctttctgttctgtaacgagctgtccataactgttgtgaaatttcgtacgtgcttcatttaagccactctgtagaaacaatcagttgggtttttttcttgtaattgatccaaatggatttaactgtgctcgagggttagtcctggtttgtcttttcatgggaggaccacatcgccccc

SEQ ID NO: 6557 - DNA, 145 bp, Homo sapiens
  chr22:18287371-18287516
  hypo
cgctatgtaatttccacgcctgagatgcagactgggcactgccgagaggctgggcttgagcaggcggtcctcatctccccagaatcataaagacacacagagcacagcactcggccgccatggtgttgccctctctccaaacccc

SEQ ID NO: 6558 - DNA, 537 bp, Homo sapiens
  chr22:18340868-18341405
  hypo
gagagtcccatccacctggaggcccgcatcccctcccgggcaatgaaacgtgtttctgcgtacaagcctaccaccccctcccgccaaggtaagcggtgaggagacaaggagcaattataaagaaagaggtgttggcagccaacagggtgctgagaattccgggcggtggtgagaggagcccacagtgccatgacctgacctgggcaggagtgccaatgggcctcaccaccccttgtttcattatgactaatctacttgctggcacttgtgaggcgcttggctgggtgagctgcaaggtaagggctggtttttgagtctaaaggaggtttcagggcttcgtgaaaggggctggaattcggaaagacttctcctgaaatctctgcctggctgctgccgttcagagctccacatgggtgtttttatctcggggagcacttgtgggaccgggtcctatacggcatcatcctgccctattttttagcatgaaaataagagtggcccattttcacagccgctctccttccatgtgtgtgccac

SEQ ID NO: 6559 - DNA, 192 bp, Homo sapiens
  chr22:22324565-22324757
  hypo
cgggtgtggccagcacctggtgaatgcacagccgattcgcaggtccagctcctggcgagcatccactgagagcgcctcgttgtggtcaggctcgcctaggcaggccatggcattacagatgtctgtgtccgtgatggagctaaacctggcccggaacacggtcttctcgccaccatgggccttgttcatgac

SEQ ID NO: 6560 - DNA, 86 bp, Homo sapiens
  chr22:29587127-29587213
  hypo
cgcttcattccttccaaacaatattccattgcgtggatggaccacatgttgtctgttcaattcatctgtcgacgcgcatttgggtc

SEQ ID NO: 6561 - DNA, 96 bp, Homo sapiens
  chr22:36902565-36902661
  hypo
caatctgggtcacggccaggcccagaagccgtcctcagagctcatttgcccggactccaccgtttcaagctgggacttggggctccccggaatccc

SEQ ID NO: 6562 - DNA, 112 bp, Homo sapiens
  chr22:36907702-36907814
  hypo
cgcagcgtaaaatgccccaggcattctccacgctcaggttgatctggctggcaaactcattaggcttgaactgctgggtgcctaggatgacgtggcgtgaggagtctttcac

SEQ ID NO: 6563 - DNA, 55 bp, Homo sapiens
  chr22:39144766-39144821
  hypo
cgtcttcagggacgagaagcgcctggaccacgcgggagggcaggacgggggaggc

SEQ ID NO: 6564 - DNA, 208 bp, Homo sapiens
  chr22:42095795-42096003
  hypo
cgctccggtgaacccgacgcgaaaccgggcccccgcgctgtgttcactctcctccctgtcagcccgtcccggacccggccgcagcggcctctcgggcccctcagccccaggccggcctgcgggcctccgtggagcccggtccactggctctgcgcctgaaaggacggaaatccggatcccccgggacctcacccagtctcagggacac

SEQ ID NO: 6565 - DNA, 70 bp, Homo sapiens
  chr22:42096253-42096323
  hypo
gtgaacgggaagactgttccttgggcagagctggccaaagcgggctgcctgggtcctcattgcctaccgc

SEQ ID NO: 6566 - DNA, 50 bp, Homo sapiens
  chr22:42395290-42395340
  hypo
aggacaggtactgggtgtgtatctcctcctacttccacgaacaaggtgtc

SEQ ID NO: 6567 - DNA, 33 bp, Homo sapiens
  chr22:42667137-42667170
  hypo
cgccaagagccctctgggccgggggcagcccaa

SEQ ID NO: 6568 - DNA, 187 bp, Homo sapiens
  chr22:43570061-43570248
  hypo
cggtccgtgaagacggccgtgacgttcggggcccacagctcggctcctgcaccacggtttccacagtgggtgctcatggaggagcaggcggacacagacgctgggccggggaaaagggccatggagcacaccgatgccgtgtctgggacttaccacctttcccgctgctggaagtagctgacaaact

SEQ ID NO: 6569 - DNA, 298 bp, Homo sapiens
  chr22:43570314-43570612
  hypo
ggcgcgcgatggaggccaggcagtccttgacagtcagcaggttctcgcaggggaactggttcagcagcacgcctggcctctcctggctgagtttcctgcagggcggaggcaggtgcgccagctcaaggggaggccggcagtgcctagaagccctgactgggagggcccctgcggccagaggtgccctcacctgtagtccttgaagtgtgagaagttgaagaggatgtcggcgtccgcctcactctgggtgagggtgaagcgcgggtgggtgaggctgctggccacctgctgcacgtcc

SEQ ID NO: 6570 - DNA, 404 bp, Homo sapiens
  chr22:45593240-45593644
  hypo
cgtgtctccaccatcctcaccctgcagactgggaaatgggctcgcagcaacggcacaccctgcagggcctcaggtgcaagctggtgtgggggccagagccactgcctgtcacagctgctgcaggcctgggtcagcgaggtggcctgagagcctcccctcgcccgtgagtaacacacacctgggcatctgtggccactcaagaggggacagcaggtgcgccagaaaggtgaacaaagggaggacttcagctctgggaaagctacggctccacccaaagtctgagacaaagaggccaagagccctgcaaagaaacccaaccaaccgacaggacagggcgggatgactccgggtggctcacaagtaccaaggccctggaggcagagctggctgtgagaaggtgcggc

SEQ ID NO: 6571 - DNA, 258 bp, Homo sapiens
  chr22:45593715-45593973
  hypo
catagagaaggaagtttccatctgctctgttcagcttcagccaggacccgaccagggaccgtcctgtgcccgacagggaccgagaccgcaggttggttgcattgtgcagatcggctggaggaaagaaggccaggtcaaggcccccacagcatgggacgcggcgggagcagcaggaggccagctcccagtccaggctgaggccaaactctgctgaggccaggacgctccttaccaacacccccacaccagcacccacac

SEQ ID NO: 6572 - DNA, 567 bp, Homo sapiens
  chr22:45808579-45809146
  hypo
cgcaggtcctctggcctctccagacctcagtttccccaactataaaatggggagagcagccatgcgccatggctaaccaaagacggtgtcgccaggaacttaggaaaagctcagtaaactgggtcatcatcactacattcctgggtcaaagctcccttggatccaaatggtggttctggctgcttggaacccattacctcctcgacagctccctctcacttcaacttcggatgagaagggaaaagggacgcgagtgaccagggccaagggccagagcagtccccgaagcaggagtgagggcagagaacagggcccatggcgggaccggggcggagaggaagcgtcaggacccccagggtggggggcgagggttgggagcccctgagatgaagggcgagggccggagctgaggtggggtggggtccctcagggtgtcggaggagggtcgggagccaggaggtggagggcgagagcggggcccgaggcggggccgagtggaagggtcaggacctccgaggtggggcggagggacaagggtcgggacccctgaggtggacggcgaggacc

SEQ ID NO: 6573 - DNA, 359 bp, Homo sapiens
  chr22:46979972-46980331
  hypo
cgttccagtgctggccgtcgggttccctggatgcaccccttcacggtgggtggtgtgagtccttcctcactttctggccctgtgagatgctccaggctcagcttgtccattccctgcccaggcctagagtcagccccttctgcagggagcccgggttccttttgttggagggcagaatcggaaaccaagatccaggtggcgggtacgctcatcactaccggggtgtcattgcttctgggccctcttagctgacagcaaggaaatgcacgtgtgagctgacgcgcacatatgtacgtgtctctgcctgtgtccgcgtgtagcctcctgtacctgtattgagcaaagtgtgagttcgcgcc

SEQ ID NO: 6574 - DNA, 135 bp, Homo sapiens
  chr22:47022417-47022552
  hypo
cgggggtctctgggtcggggttttctttggaaagctggaccggccgtgccctgcgtgtgggagctggctcgtggggcttggaggtgtgtgtgggagggacggtggcagggcggggtctctgggtcggggttttct

SEQ ID NO: 6575 - DNA, 413 bp, Homo sapiens
  chr22:47022632-47023045
  hypo
gcccctctcttgcagggaacccgagcgtcatgttagggtgaagcagaggacctcagtgctgaacatgctaaggaggttggacaaaatcaggttcagaggtcacaagagagatgacttcctcgatctagcggagtctccaaatgcctcggacaccgaatgcagcgacgaaatccccctgaaggtaccgcggacctcgccccgggacagcgaggagctgagggaccctgtgagtacctgtcctcgtcccccggtgtgggctggggtgtcgtccccgtcctctgtggccgggccaagcgtggactcaggcagattcgtgtcctgcccatgctggtcagagatggactgggcctgactctctgtctcacctgctcccgacccctgcagaccttgtggggccggggtgctgccacgcc

SEQ ID NO: 6576 - DNA, 160 bp, Homo sapiens
  chr22:50170790-50170950
  hypo
acatttgggcgcattaaagcttcgggaggaagagcagagggagtcaggcgccccgcccctgccttcagcctcactcgggcttcgtcccgtgagctgtccgccaccaagctggccacgcatcctgcctgacacccccgcggccagacgggcctgtgggtgc

SEQ ID NO: 6577 - DNA, 110 bp, Homo sapiens
  chr22:50177139-50177249
  hypo
cgcgcctgggcatggccgtcacacccaaaccaccagtcactatgggacggctccgcacatgctcaggacagcctcagaatgctgtccactgtgtcgtcagctgcagcagg

SEQ ID NO: 6578 - DNA, 50 bp, Homo sapiens
  chr22:50177299-50177349
  hypo
ggaaggctgaggtgccacgacatcccgccagctccaggcgtgcaccgggc

SEQ ID NO: 6579 - DNA, 495 bp, Homo sapiens
  chr22:50899708-50900203
  hypo
tccccaacttaggacaggccaggcagagtcagaagcaaggaaggtaagggggggggggtcccagaatctcagggtaccacagttatggggaatcccaagtgggtggggaaggagcagacaaaggcccgtttcccacgggcacccagaacccccgagaaaagggagagggaggcagggaaagcccatccatcccaaagacctgggggagagggggcgacagggccagagagtctgcaggctcacccagggggtccgtgggcatccccgtgaagatgacccggtacgtggtgaggaagacggcgccctcagctgggagcaatgctggtcccccagcactgccccccgcgccctcctcacgcccatccggcagcaggtagacgcgcaggccgtccagcacacactcctcacccggcagcaggcgcggccgcagcagcttgggctgctcgaaaacaagagcaggagctcaggatgcagcccgggccttgggcccccgca

SEQ ID NO: 6580 - DNA, 46 bp, Homo sapiens
  chr22:50900232-50900278
  hypo
tgggcggcagcctccggctctcccgctgcacggcctccagggtctc

SEQ ID NO: 6581 - DNA, 379 bp, Homo sapiens
  chr22:50942715-50943094
  hypo
cggccttacccctgcaccccgggctccacaccccacccggtgcccagccttacccctgctccccaggctgggagaaccagtacttgtagcgctgggctcggacgtaggtgggcggctgcttgtggaagggatacctggccacttggctctggacaaggcggatcactgcagcgagaggcatcagcgtggcccccacagtacccgccctgcccctcccctccccaccccgctccaccccagcccactccacaccccccaagcccgctccgcacctggctccttgccctgcagcaggcgcaagaccaggcttgtgaaccacgggctgtgcgtgtgtgggcccagggctgcaaaccacatctgccagtccaggcgtggctgg

SEQ ID NO: 6582 - DNA, 308 bp, Homo sapiens
  chr22:50943412-50943720
  hypo
cctggagacaggtgggaggttctcagggctgccctgcccccagcccatcccccagccctgcagcgctacccaccaggctaatcaggaacaaggccacggtcgcagtgcccacaagggacagttggactacagcactgagcttccgtagccagccccgcacctgggtccacctgtgggcaaggacccaaggtcgtcaggccggccctgcacacctgtgccccctccctgcttcctgggccatgtacctccacagggcactcagcagctcccagaccagggaggccacacccagccacacagtgggcagc

SEQ ID NO: 6583 - DNA, 216 bp, Homo sapiens
  chr3:148804777-148804993
  hypo
cgtggggactttcgctccaaattttcatgttaagcctcagcgtatgcatgagacacaacgagtttggaaaatcttaaatggaacttagagtcccctccccacctctttttgttatttttaaggaaaattttcctttcttggtgcaggaaacccatcacatgtttattacagctatgggggcgtttgcctgaaatggtggacgggaccattttcccc

SEQ ID NO: 6584 - DNA, 191 bp, Homo sapiens
  chr3:171362739-171362930
  hypo
cgccggttgaaatgtctccttcgaaccctggcagaagtggtatcacgacatatacccggtatttctggttttccctgcaaaggtcagatgcagagaaattcacccaaaaaataaaaggtagtatcaattttagatgacagccaagcagttcacatggtttttgagattgagtgaatggcttcctacaacac

SEQ ID NO: 6585 - DNA, 334 bp, Homo sapiens
  chr3:187443068-187443402
  hypo
cgctctgctcacctgcccgctctgctcacctgcccgctctgctcacctgcacacggggactgagtgggactttctcctgcccgctctgctcacctgcccgctccgcttgcctgcccgctccacttgcctgcccactcctccgcttgcctgcccactcctccgctcgcctgcccgctccgctcgcctgcccgctccgctcgcctgcccactctgctcacctgtacaaatctggctccgcaggtttcgcatttgtagggcttctctccagagtgaattcgagtgtgggttttcaggttggctggccggttgaactgggccccacagatgttgcaac

SEQ ID NO: 6586 - DNA, 76 bp, Homo sapiens
  chr3:195855364-195855440
  hypo
cgcggtggctcacgcctgccattgcctgttgtccccgtcctctgtggccctcttggcttctgtatcactgtcacgc

SEQ ID NO: 6587 - DNA, 284 bp, Homo sapiens
  chr3:196728448-196728732
  hypo
agccagagaaccagtccaggtcgaagaagggcgcggggggcctcactgactagaggatgagagtggtccctgactggctcttggagaatggaatctgcccttctcggtggagcaggtaggcctttgagtgcctaacaaaacgaaagaaatcggcagcagaagtttctatcagggtccaagcctctgcatgtgctggcttgtttggctttattttagaaaccaaccaacatgtttcattagcactgacacagcaggggtcccctgctgccacctgacaatccagc

SEQ ID NO: 6588 - DNA, 38 bp, Homo sapiens
  chr3:49755498-49755536
  hypo
cggccattgaggcccctccggcctggctccagaaagac

SEQ ID NO: 6589 - DNA, 233 bp, Homo sapiens
  chr3:49755593-49755826
  hypo
tactgaggactgtgcgctcagctcttggagcgggctgggtgtttggggccagcggcggcagcggcaggcacggcggcagcagcggcagggtggggcgaacaggtagagcagcacgagcacaaggcccacggcacagcccagcagtgtggtgaagcctgtgttgaaagcctcgggctctgggcgcggaaagtgcacgctcacgttgtactcgtgcgtctggttgtggtgcaggc

SEQ ID NO: 6590 - DNA, 464 bp, Homo sapiens
  chr4:1225310-1225774
  hypo
cgctcctggtggcagctggctcttgggggtcaggaaggggcccgccaagcccacctcctgccatgcagttctgccacctgcttctgtgctcaggactcgacgtcgcacttacctttccagacctcgtgcacaggggtggcttactctgtgaaactgctgctcacatcaggtcaccatcagggcagatgtttctctacgacacgcagccacatgcaggcccagggtggggctgggctgaagaccgcaggtttcagatttccagagaaactgccaaagcaccatcgagaccggcacggccgtttctatcccacatgaagggccaggcccaggctccctcagcacggctggtgcagggctcagcgcaggccaggccaggggttaccggcggtgcctgctgcacctgtgagaacccaggaggcgcaccccggttctcatacaccgctctgtctgtaccaaacgccacc

SEQ ID NO: 6591 - DNA, 373 bp, Homo sapiens
  chr4:1331896-1332269
  hypo
gctcttgtcctgcctggagaggttgcgtggccggggagagggcggcgggcgacggagccactctgtgcctgtggtcctggtgctggaggccggggtgagaaggcgcaggcttcttgtctccaccgaggcctcagtggggctgtttagctgtcgagtgcagcacttcctgtgcctcgaaagacagccccgtgtagtcagcatggcgcccacatagccagaagggcacgcagcccagggcagagtggccacagggggctgggctcaccccggctgccctgagtggcccccaacccttccttgacccgatgctcagacagtgctacaaggaggacggcagctccaagagccctgactgccctgtgtgcagccgctc

SEQ ID NO: 6592 - DNA, 116 bp, Homo sapiens
  chr4:152591291-152591407
  hypo
cgacgtgagtcagaggtaacaaaggcatatatataccgaacaaaggtgctccggtgcagtggagagaacagtattagtgtcgcaagcacaggagtgcagacagccccgccttcatc

SEQ ID NO: 6593 - DNA, 41 bp, Homo sapiens
  chr4:1791229-1791270
  hypo
cgcctgccctgggttccaggtctccaagcctcggcctccct

SEQ ID NO: 6594 - DNA, 107 bp, Homo sapiens
  chr4:1791344-1791451
  hypo
actgtgctgggaatgtcctctctgccgaaggcgcctctgccattttccgagtacctgcaagggagacgcaggagacgcgggtgtgagcggggccatgggcaacctgc

SEQ ID NO: 6595 - DNA, 50 bp, Homo sapiens
  chr4:2622600-2622650
  hypo
cgacaggtcagccacccagatccgtgaagtgaatgctaaagaatatggcc

SEQ ID NO: 6596 - DNA, 635 bp, Homo sapiens
  chr4:513070-513705
  hypo
cgccatgctgtgtctcccctggcacagcgcctggcacagtgcctggcacgtcgtccacgctccatggatatttgtttcgatgcatgcacaggtgcacccccatagctttgtgactctctgataggcggtggggtgtggacacaggcgtccccccatccagggtggtaggtgtagcaatgaaggatgccagccctggaaccagactgcctgagtttcatttgcagcttttacccactggcactgtggcccaggtgcgtgactcaccctctgtgtctcagttgcctcctctggataacagttctgatgctcatccctgcctcatagggtcattagggaggtgaaacgagcgagccgcctagtgttgctggctactggcacttagtgcagagcacctggtgccggcagcagtggggtgggcctgcaggcgtgtgggttcatgcttagggacttggtgcctgcagcagtggggtgggcctgcaggcgtgtgggttcacgctcagggacctggtgccggcagcagtggggtgggcctgcaggcgtgtgggttcatgcttagggacttggtgcctgcagcagtggggtgggcctgcaggcgtgtgggttcacgctcagggacctggtgccggcagcagtgg

SEQ ID NO: 6597 - DNA, 221 bp, Homo sapiens
  chr4:513734-513955
  hypo
ttagggacttggtgcctgcagcagtcgggtgtgcttgcaggcgtgtgggttcacgctcagggacctggtgccggcagcagtggggcgggcctgcaggcgtatgagttcatgctcagggacttgtgccacagcaccctggacctcagtggcttgagcgcctgtggcagctctttcactgctgtgatagcaggcctggggcatgcagagccacagggtggggc

SEQ ID NO: 6598 - DNA, 308 bp, Homo sapiens
  chr4:955544-955852
  hypo
cggatctgcttgtgcaggctccgagagtgactgatcttctgcagccccacccgcacgtacacacccttgttgtgcagcctgcaggacggggcaggtcacccatcaccaggggaagccctaccccgccttaggcagcctccgggttccggcccctctgcctgttcctgctgggggacctgagggaggtatgccgttgacaggtggtagcccctgcggctccggtacctgcttgtgaacttgccaggctcctcttcccgtgcctggtggaagtccaggctcagctccgcgtcgatgccaatgccacagta

SEQ ID NO: 6599 - DNA, 236 bp, Homo sapiens
  chr5:1049758-1049994
  hypo
cggggaaggggcggctctgtctctcacactttcaggaaccacaggcccttcccgtgcagctacaaccctgcaagaggggtccgattccgcacgtcctccccgcgattctctggttttggctgtgaccatcacaggtgtgagttggcatctcacgagttagaacacgctgtccccactcatggcggactctctggtgcctccatccttatataaattaaattataaatcgaatggcc

SEQ ID NO: 6600 - DNA, 431 bp, Homo sapiens
  chr5:1074389-1074820
  hypo
cagaggcttcccaaagatggcctttgcttcagcaggagccaccctctcccaccccaagcccagggctgtgctggcagaggggccggctccccacacccccaccctgcagcagggacacccccggcccccagctgcgccatccgctctgcaccaggcagtgttcacaccccagaccttgcctgagcggctgaaggtgagaggcccctgagactcaaaggtccccactcaaaggccgacctcagaaacagctcttctgtgcgtctgaggaccacggggcatgggcggtgctcacctccagttcttggtgtgggggggaccgtgctccacgcgcagcagggcgtagcgggcggcgttcagggataggccacggatgccatcgccccactccttctcggccctgtgggaaaggaagtcggggtttgtccagccgc

SEQ ID NO: 6601 - DNA, 65 bp, Homo sapiens
  chr5:141355864-141355929
  hypo
cgcatgtgcgtgcatgcacgtgcatgcacacacacgcacaaaacagggacagattaactggatgc

SEQ ID NO: 6602 - DNA, 77 bp, Homo sapiens
  chr5:176795049-176795126
  hypo
ggcccctgcaggatggctccaaacaaggcccaccagtggggaacaggcttccgcagaggatgggtgagggcgggggg

SEQ ID NO: 6603 - DNA, 238 bp, Homo sapiens
  chr5:176795288-176795526
  hypo
acaagatgctctatgggctagagtcactactcaggcccatttacgtggtggccctcattccaagttgctgtccttactgcgtctcccagcttgctctgcgtagccaacccttcagcctccttacttgtctcactacattggtccccatatatgtcatgggtacacatcctcagttggcaaatgtgtgcacatgtgcagcacccaggtgtgtatacacagcacgtgtgtgggaatcagc

SEQ ID NO: 6604 - DNA, 331 bp, Homo sapiens
  chr5:453948-454279
  hypo
cgccacctggaaattataaggaagtacgtcctggatgacctcattgtcgccaaaaacctgatggttcagtgctttcctccccactatgagatctttaagaacctcctgaacatgtaccaccaagccctgagcacgcggatgcaggacctcgcatcggaagacctggaagccaatgagatcgtgagcctcttgacgtgggtcttaaacacctacacaaggtaaagctaacctggcgcctgtgttggctcttaggtagaagccgtgtgtgagaggggcctgcagctgcttgctggagagccgacctcagggtgttgctctgggcaggtgctcc

SEQ ID NO: 6605 - DNA, 432 bp, Homo sapiens
  chr5:883821-884253
  hypo
cgtggcctccacgatgcatgaaacaccagcggcagccctgccagaggcacctggaccccgactgaagagaccagccttatgtgtgtctgatccggacctcccgtcagggccccacgctgacctctggatcccggtggctgtgctagatcacacagcaccaacccagaaggagaggcacacagagagtctggggccacgtggcaccctctctcggtggccacagagcactaccttgccgcctgggaggaaccggttgatcctgtcccgagcttcgtcagctgcgtgctccaccagcgccagcacgtgctcctctgcggtactgtccgtcaagctgcaggcattcccttcaggctcaaacatgcagctgtgaggtggggacaaccaagtcacctggaggcagcgtccccaccgcacacctgctccccatgcgtc

SEQ ID NO: 6606 - DNA, 187 bp, Homo sapiens
  chr5:913200-913387
  hypo
cggagctctgtggagctttgcctggagaatgccagtgatctgaagactgattctacagcagttttgctgccaaggagccccacgtgatagcagatcctgcgaggaagtcgtgtgtgttggaggtcctcacgcaccttcagtgtgggttccagccctcgcagtgtgacgtttatacacttgtacactc

SEQ ID NO: 6607 - DNA, 223 bp, Homo sapiens
  chr6:36198250-36198473
  hypo
cgtggacaagctcaagatgctggaaggccgcaagaccagcatccgcaagtcagtgcaggtggcctatgaccgtgcgatgatccacctgagcagagtccgggggccccactccttcgtcacttccagctacctgtaagggcagggctgggcctgcatccgcttgccctgcctccatcccgcagggcacagagaagcctcttctgcccctgccagatgtatggcc

SEQ ID NO: 6608 - DNA, 49 bp, Homo sapiens
  chr6:36214794-36214843
  hypo
tcctcctgccccctgcctggtggtttcaccatccacttaccagcccgcc

SEQ ID NO: 6609 - DNA, 117 bp, Homo sapiens
  chr7:101475674-101475791
  hypo
cgacatggcacatccagcgagcccactgtgtccccagcacctgcggtgcagggggctggcaccttcaggggcgggcttcgtgcagacgtccacccagtcagtccccacaggtttatc

SEQ ID NO: 6610 - DNA, 236 bp, Homo sapiens
  chr7:101475858-101476094
  hypo
gagttcctttattcatccctatttgctttctgtctgtaatcctttgtaattccctggtttcatgatgtaattctaatggaaataaacccgaacctttcaaaattatgtaattaattgcattcagcttcaatgacaatgactaattatagtgatacctggtggcaaggcaggtacctactgctggggggctcctgtctgcttggtactaggactgccacttctgggcgcgtcggagc

SEQ ID NO: 6611 - DNA, 177 bp, Homo sapiens
  chr7:129483449-129483626
  hypo
taaatccatggatcagagatgatcaccctcctccccaaagaatccctcacaagtgcaaagaagcatgctaagcaaaggacgttcagatgtttctgtggctattcacagagacggtgtgcttgttttcatgcagctccaccgcaggaggtaacccgcagacacctgcacacagcgaac

SEQ ID NO: 6612 - DNA, 503 bp, Homo sapiens
  chr7:148480954-148481457
  hypo
cgctggctttgtggctgctcttgataaggtaggtgcgtgagggttgtgacttgcctgtagtatgtatggatggggcgtttgtctctaactatattccgtgtaacgcaggcttgtggtcgcttcataaacaacaacgcggttaccaagatggcccaatcatccagtaaatcccctgagttgctggctcgatactgtgactccttgttgaagaaaaggtattaaatgaccctatgttttcttagtatgcctgtttaaaatctcagcttttatatgaggaattaaaacctacattacattttacatacattaaattggaatttttgtaccttatgagaaaaatgcttaaacataatcgtccttgccgttgaaaatctgcattccctcccactggctgtttttcaaacagaaatgtctcaatgtattgtgggactttggttattctccatccaagcactaaccaggccccaccctgttcgcttctgagatcagacaagatcgggcac

SEQ ID NO: 6613 - DNA, 39 bp, Homo sapiens
  chr7:155581980-155582019
  hypo
tccaacaggcctttctggggcctgtcctgcttgccttgc

SEQ ID NO: 6614 - DNA, 426 bp, Homo sapiens
  chr7:157890859-157891285
  hypo
tcaagacccagcgtggggcagcctctgcctggccaggactggggacctcggagaagcgctggacgcagcaagaatcaggcttcagctccgcaatgtgggcaggggacccgcaaaggatcctgcgggtgaggccaccgggggggctccctggggaggaggtggagaggtccagattcccgaaggctccgagggacgggcggcgggactcaggtttgactctgtaggaaagagggggccgccagtgtcctaaggcgggagatgcccgagggtgacgcttacccaggactgagcctggcaaagcccagccctgctcccggaatgcggagaagccgtccgtgctcagaatccgtcttccgacagcgaaggcggtggccaggagggccaggggcagggagcaggcacgggcgaggcccagctgctctgtga

SEQ ID NO: 6615 - DNA, 98 bp, Homo sapiens
  chr7:157891519-157891617
  hypo
gcagtgggggacggggaacggggccgcggggagggccggagaagatggtagaaggtgacagtgcggggtgcagcgttcctgggtccttgaggggagcc

SEQ ID NO: 6616 - DNA, 548 bp, Homo sapiens
  chr7:2041390-2041938
  hypo
cgtaggctctcacacctgctttgccccgacaccgtggcctcatgcggcaaacatgtcactggccccctgccacaaacacggtggtggggcccgaggggctgtgctccccgccggcgcatgccacctgtcactagtagagatgggactcaggctcctcacacacccttccccgctcaacgcagcttccgacgacagaagaggcagccatgcactggcgcctgcagcctaaaggcttatggggacaggcgtccctgcccagacccagggtccaggtgccctgaatcccagccactcccgcgtctgactcaccatgtctgctctttgtttctggcctcccagctcctccagggcctgcgacagctgagcctgcaagacaagacaggattcggcctgagactgtggtgggccaggccccatttctaggactgcagggaacacaacccccaccaccccgcagcctccactctctggggagcaacgggacccaggagctgggaagtgggcagccagagggtgggcaggggccagtgtggctgccccgcgaggcc

SEQ ID NO: 6617 - DNA, 327 bp, Homo sapiens
  chr7:2208344-2208671
  hypo
cgcgtggagggcgccacgaggtcaaggtcctgaggccggaacaccaaggagctctgggagggtggaggaagaacacaagcctggagcagggggcagacacacggggcgtggggcccagaggccaccgggaggactcaggttttattccgagtgtgctaaggagccagggattgtggctgaagcgggaggaacacgctaaggagccagggatggcggctgaagcgggaggaacacgcgctcggacttgctgatgggctcttacgtgggcttttccccagctgaagaatgagttactaaatgtgttttaaaatgcaaaaatgtgtaccc

SEQ ID NO: 6618 - DNA, 91 bp, Homo sapiens
  chr7:2208844-2208935
  hypo
accttttaaagtccgcatgtagacagtgaaaatctacaaaggtaaaccggaatctcctaagagcgggtagggatgcgactggtgggattac

SEQ ID NO: 6619 - DNA, 468 bp, Homo sapiens
  chr7:4802085-4802553
  hypo
cggggagtgaggtcacctgcaacgcgggggagtgggactcacccagcggcgaccccgaagctggacccggcagctcaggcggccgcacccacagacggaggagaacagcccgcggcggcctgtgggcatcggcggcacctggacacacccagccctttccatttgatcgcctgccttcccgtggtttaagacaaaaacacataaacaagttcagacaactgattgtatgattctgggaattctttgctttcctttccttctccctcggcaccacctcctctccccaggcctccctgtcgggcatggggaggaggttggagctcagcatcttgaggaatgtgtcaagacagcccctccgctccgcgctgcacggccagccgcctttgtccgggaggacagacagaaacgcagcaaggcacacaccaaggctgccggggaggcccgggcaccggacagatgcctgttggg

SEQ ID NO: 6620 - DNA, 430 bp, Homo sapiens
  chr7:4802589-4803019
  hypo
cctctccgcccggaacgtgacatagagagtgttggcattaactcggggggtgtccgatttcacttcagaccccaagtttttctttgtttgtttaaacatggaattcagacttcattgtacacctgagacagacacaaaagggatcatgtatttttgaggattttacctgttgacgtctgatgaccggccgtaggtccagggttcccgctgggtttaatcccctcgaagagtaaacctgccgctctgtctgataacttcaagtaagagcagcggcttcctgggttggcgttcgcggtggaaggttcctaggatgaaaggtgagcctggatccgccggccgcagacatcgcgctgctggggacgattggggccgctgctctgcagaccagaccttcccgaattatccgtggctccgatgtcccggtgctgac

SEQ ID NO: 6621 - DNA, 190 bp, Homo sapiens
  chr7:5396687-5396877
  hypo
cgaggcccttggccagcgccttcctgttcttccccagcaggctgtcgtaaggagtcaagtacctgccgcagcccccgctagttttcgatttccccccagcactgtccgaaaacttgaagggcgacttcaacttgtcctgcttggtgagggagagggccttgtcgagcttgcttgccaactgctcctggtc

SEQ ID NO: 6622 - DNA, 247 bp, Homo sapiens
  chr7:57706651-57706898
  hypo
cgcaaagtctcagaaacccatccccgggcaacagtgtcaatcactacgaccaaagcggaggctcaggccttgcgcatgcgcactggcaaggccgactcccagcttgcttcggagagtcaggcctcagatcctttaaaaaatggcggcgatgcgcggccgggggtctggggcagcggtggcggtggcagcgcagtccgaggcggcgggtgggaagaggactacaagagggtactgcgggagacccaac

SEQ ID NO: 6623 - DNA, 316 bp, Homo sapiens
  chr7:667329-667645
  hypo
cgggcgctctccatccagagccccccgcccagctcacgcccgccctccccgggcactgggggaggaggtgagcacccgccactcaggctcaggcagcctggaagatccaggccacgactgccagcgctcaactccactcggccctcactggtattttccgagtgcccgctatgtacaggcaggtctgtgctgggcgccaggttgccgggaaatggggcacacacagcccctgtctcataaaggcaccagcaaaacaggggtgaacatcgaatgggtggggcccttctgactgtcactcacggaacaaacacaggcc

SEQ ID NO: 6624 - DNA, 44 bp, Homo sapiens
  chr8:126044399-126044443
  hypo
cgataagaggaatttggtaatgtgaggtttaagttaggttttgt

SEQ ID NO: 6625 - DNA, 327 bp, Homo sapiens
  chr8:142227279-142227606
  hypo
cgagggggcctgttccggaaatgagacgggggctgacgagggcatctgctgggccctccaggccaggagcgtatttcccatgggaactgctggccggctgctcattctaagagcggtgacaggaaagtcccatccaggaggagagcccagcccaagtcggttgctatctgtaaagcatttccatgcctcccagaccacgaatgttctgtgacgtgactctgccaccgcggcaagaggcggagggttctgtgtgtctcccggtccccagtctgggctggtctggacttgcagaagtgacgctcccgcagcctctgccgtggccctctc

SEQ ID NO: 6626 - DNA, 934 bp, Homo sapiens
  chr8:142235190-142236124
  hypo
cgcacacccatctgaccagtgcgacacgcgacatcatcgtgggtcagcctccactgctgccgtcctccagcaacggtcgccttttcttttttaaaaaaaacatgtctaataacattgagttgtatcctagacactgtgaatgatgtgtcatagactacactgctatattcctctgagagtgttcatggttttatttaacacgagggtttgaaattcccgccccatctcctaactccacccgaactctgcctgtgggttcttcaagaaaggcagagtggagttaactatccaagtttcagccaccctgtgttgcgtcaacgaaggccaacagtcgggttaaaagcggtgccaagagagaaacccaggcattccctcttccagccatcaccttcctacttggtttctgccccaagcgctggctgggtgtcaggagggtggggaggacctgcaggtgcgacccagcccacctaatctagaggaggcgctgcgtgcacaggcctgtcccgcctttgtgctgccaaccctgggagccgggaagacgctgggtccggagcagccctggaccaggcagccgtccccagcccagaagggaggcttctcaccccgggagacaagaaggcacagggcactggggggaaccgctaggcccgggccaggccctcggctcccagtcctcctgtggaggctgcttctccacccttgtcccacaggcccctccagagcctggtgggacccggccccaggcctccctgggcacctccacccgccagcctcctcccctttgccctcagctctgactcctatagtccccacagctgccccagcctccgtgcggccccggccctggtctctcctgtgttgccagcccccagccctaggtcaggcctccccacgcctctctctgactcccactaactcacccctacatctggcc

SEQ ID NO: 6627 - DNA, 231 bp, Homo sapiens
  chr8:144351704-144351935
  hypo
cgctgtgcgccctccaccctgcatcccctgccctcacgtcccctgccctgtctcctcctgacctgccacgctggctgacttgagaggcgcctccagacacctgtatgcagctccttcagcagctggggttcccacaccctcaggccaggggctcggcgcgggttgggttggggcagcggtggttgaggctggggccaagcctgagctctcgctccctagggacagctcccc

SEQ ID NO: 6628 - DNA, 207 bp, Homo sapiens
  chr8:144414283-144414490
  hypo
ctaactctccaggccagtcatcatctatccattgaggcaagcccaagcctgccctgaaccagcactgcgctgggtcctgcggatgcagatcaccaaaacccatacgaagggctcaactgaacctagattctgagatgggcctgggagaagaggagcgagatggggcgtggctggcaggcagtgggcaggctcggtcagcagggctgc

SEQ ID NO: 6629 - DNA, 229 bp, Homo sapiens
  chr8:21959610-21959839
  hypo
ggcaccttgctgggggagtgcaaaaatactcaccagccctgccagccctcggctctgtccaccatgttcctacagccatacagcctgaacctgcaggtgacctcggtcctgtcccggcttgccctcttcccccacccccatattcatgagtacctgctggatccgtacatcagcctggcccccggctgcaggagcctattctccgtgttggtgagggtgaggacgcctc

SEQ ID NO: 6630 - DNA, 197 bp, Homo sapiens
  chr8:23423722-23423919
  hypo
cgaggcgtcaacgtcatgatcatgggtgcagggccggcccatgccatgtattttgcctgctatgaaaacatgaaaaggactttaaatgacgttttccaccaccaaggaaacagccacctagccaacggtattttgaaagcgtttgtctggagttagaaagttctcttcttcaacacgtccctccccagggtgttcct

SEQ ID NO: 6631 - DNA, 188 bp, Homo sapiens
  chr8:49571728-49571916
  hypo
cgtcgtcctatcacagttaagaaagaattatttcgtgagttttacctagcagtttacataaatcagtttacagcagatttggagaaaaagaacattaaaagcagaccaggtgaacgagtttgaaacggcacacggaattggaagggagaaaaggttgtgatcactgctcaaacaagttcttccttccc

SEQ ID NO: 6632 - DNA, 43 bp, Homo sapiens; identical to SEQ ID NO: 6306
  chr8:69242761-69242804
  hypo

SEQ ID NO: 6633 - DNA, 57 bp, Homo sapiens; identical to SEQ ID NO: 6307
  chr8:69243011-69243068
  hypo

SEQ ID NO: 6634 - DNA, 959 bp, Homo sapiens; identical to SEQ ID NO: 6308
  chr8:70745324-70746283
  hypo

SEQ ID NO: 6635 - DNA, 146 bp, Homo sapiens
  chr8:71447942-71448088
  hypo
cgtggtacaagagcttgggaactgccgaacgcgggtacaagagcttgggaaccgccgaacgtgggtacaagagcttgggaaccgccgaacgcggatagaagctataacacaggcgagctggggcatgccagcgtggctgagcaggg

SEQ ID NO: 6636 - DNA, 50 bp, Homo sapiens
  chr8:71448124-71448174
  hypo
gcaaagtgaccgagaagaaaaatcctgcatcaaaagttacagttgctgcc

SEQ ID NO: 6637 - DNA, 126 bp, Homo sapiens
  chr9:123176142-123176268
  hypo
cgagatggagccattcggtttcccttgcaagctgcagcatgcacggtacttgggaaagatgtccctcccggctggtagctatgatggctagagaagaatgagacctggacaagggtccaaggactc

SEQ ID NO: 6638 - DNA, 138 bp, Homo sapiens
  chr9:126348901-126349039
  hypo
cgtggactcaagggccttcctgaagctcactgttcccaaggaaagaattggagcccagctcgctggacagtgcccggtcccccaaaggatcaaggcaactaggggaatgaagaaaggcaagaaaaactcaaactgggg

SEQ ID NO: 6639 - DNA, 41 bp, Homo sapiens
  chr9:126349104-126349145
  hypo
taaccatgccatcagtcagggacactagcatctctgcatgg

SEQ ID NO: 6640 - DNA, 203 bp, Homo sapiens
  chr9:135781263-135781466
  hypo
cgcagggctttcatcagcactgccgcagggcaggtctatgggagtaaaggcttgctttggtgtgtcaggcccaagcttgtccagggaggagtgtaaaggctcagggttcacgctggcgccctgagaactggaggctgccgagtgggtcttccgctgagaacctgggagactgtctcggtaaaagggagagtcaaagcctcctc

SEQ ID NO: 6641 - DNA, 99 bp, Homo sapiens
  chr9:138743599-138743698
  hypo
cggagagatttccgtcactcatcttgaccgctatatggtcctccacgatttctcacaattatgacaaatgctgccatcacaaagcttgcgtgtgctgtc

SEQ ID NO: 6642 - DNA, 265 bp, Homo sapiens
  chr9:139110897-139111162
  hypo
cgatttctgaattttcttctttgtgtggcttttcaggcaagggaagcgattttttcctcacatccggcaatgacttcaaataagacgaaaagaaggcccgcagaggcttcacgctgtgagagaggggagggcaaaggtgagaagagcctcctttataaaatcctaaagtaggagccgtggcattcaggacagctctgggccacccctttcatcctttgggcatttattggggcatgggagtcagtgggaacagctgacaccccgc

SEQ ID NO: 6643 - DNA, 81 bp, Homo sapiens
  chr9:139111384-139111465
  hypo
agccctgagtgaggcatctggaagtcggggcctggggtggacgtcagcccctccctgatgtcaggcccctgagctccctgc

SEQ ID NO: 6644 - DNA, 206 bp, Homo sapiens
  chr9:139698453-139698659
  hypo
cggggtggagaaggggtggccaggagcaacggagctgagaactcctcaagaggcaaccccactaagcgctggcaacgagagtggcgagggtgagagcagtgtctggggtgcgtgagcaggggttagcagatgacggttttagctgcccaagggcacgctggaagaggccaggttttggggaagaggatgaatctgtcttcaggcag

SEQ ID NO: 6645 - DNA, 154 bp, Homo sapiens
  chr9:139833922-139834076
  hypo
cgtccctctgggtggcgcagcctctctcggtggtgctgtccctgatcccgtcggtgctcgagctcagccccagggtctctacctgcggcccacgtggctcaggggaaccatcacctcgacactcactcgtctcctctgcgtcctttctctgtac

SEQ ID NO: 6646 - DNA, 42 bp, Homo sapiens
  chr9:140166945-140166987
  hypo
cggccttttccaggaaggagaacgtgcaccggcacgcgctgc

SEQ ID NO: 6647 - DNA, 293 bp, Homo sapiens
  chr9:140167091-140167384
  hypo
tgaaggcacctggtccctaccagcccgtgtgtgcttgccaagctgcccttgtggtgcttgtgtgtggtcggtgggcacccacccctgtgccccctgggcctgcccatgcgcctcgcctgccccatggtgtggttccccgcagagcggagaggcagtgaaggagctttactcccagctcggcgagaagctggaacagctggatcaccggaagcccagcccggcacaggctgcggagacgccggccctggagctgcccctccccagcgtgcccgcccctgccccgctctgagggc

SEQ ID NO: 6648 - DNA, 322 bp, Homo sapiens
  chr9:140167413-140167735
  hypo
tgccgagtcgcggccctgctcagccggaagaggctcccggacctggatgtacagggcagtctctcttcccggggctatggctgggcctgtcctgccgtcatggccccctgcttcctgctccttggagctggctcccggaccttgcccaccatccatgcagtggctcccagggcagagcctctccttgtactttggcagccatagaaagcgtgctcattttctgttttcctgtgttaggaaaaaaccacctgttttccaaggggagagggcggggcctgagggtgggggcggggcctcttcattggcccagcttggcgaaagc

SEQ ID NO: 6649 - DNA, 480 bp, Homo sapiens
  chr9:140708213-140708693
  hypo
cgacccaaagcagtggcaggcatctttgtgccttttttgtaacctcacactcaggggccccggtgtggcttcgtgctgggggcacaggcgagaggagcccttgcgaggcctgcaggacgacctggatccctgcacctcccagcccccggagagatgggtccagcacatgccagctttcccagcctccgagtgcatgcagcctggtgccctcactgcttgcgccttctcgagcactttccttgtggctctgcttgtgggcagctccctcctcttcccaggccgggcactgcccaggcccccccccccccccgccccccgccccacaaggtgtgtcaggctctgtgttcttgcctttcccatcgagcatctggccacaaatgcagccgccgcccagcccttcacccaccccacgtcacccactgccgcgtcgctgccctgcctgccccctgtccctctgtcagggtcctcagccagagctcc

SEQ ID NO: 6650 - DNA, 216 bp, Homo sapiens
  chr9:140708771-140708987
  hypo
aagcacttaccagaatcagggttaacagaactggaagacgtagttgtgactgggaggggaaatggaaggcctgtgcctgcacgtctgaccccccggcgcctctcttctcagtactgcgtgtgcatcgacgactgctcctccagcaactgcatgtgcggccagctcagcatgcgctgctggtacgacaaggtgagggcggcctcgtgtgcgtgggct

SEQ ID NO: 6651 - DNA, 665 bp, Homo sapiens
  chr9:34318282-34318947
  hypo
cgtgtcgcggctcgagagcgagactcccgtcttggagccagcccagcccaacccagcccaacccagcttgacctagccctgacaggtccatcgtggtgcacgcaaaccacctcccagccacgcgctccctcctgctcctcagcgccttctgcctcctggcggtggccttggcgaccgaggtgaagaaacctgcagccacagcagctcctggcaccgcagagaagctgagccccaaggcagccacgctggccgaacacagcgccggcctggccttcagcctgtaccaggccatggccaaggaccaggcggtggagaacatcctggtgtcgcccgtggtggtggcctcgtcgttggggctcgtgtcgctgggcggcaaggcgaccacggcgtcggaggccaaggcagtgctgagtgccaagcagctgagcgacgaggaggtgcacgccggcgtgggcgagccgctgcgttcactcagcaactccaccgcgcgcaacgtgacctggaagctgtgcagtcgcctgtagggacccagctcagtgagtttcgctgatgacttcgtgcgcagcagcaagcagcactacaactgcgagcactccaagatcaatttccatgacaagcgcagtgcgctgcagtccatccacgagtgggccgtgcagaccaccgac

SEQ ID NO: 6652 - DNA, 221 bp, Homo sapiens
  chr9:95417651-95417872
  hypo
caagcaagctctgcttcactttgtcggtatcttaaggcagaggaaatgcgctcacaggcggccttgtgggttgagccctgtttgctgtgggttcattactgtgacccttcccactgaggacaaacctggagccagactgctcattgctggaaatgctcccctatcctgtcccctcagagcagtccctaacgctcaccccaccaggttgccaatgggacctc

SEQ ID NO: 6653 - DNA, 47 bp, Homo sapiens
  chr9:95484997-95485044
  hypo
cgagtagtcctgcagcagacgagcttcccggaatttgtactccttga

SEQ ID NO: 6654 - DNA, 818 bp, Homo sapiens
  chr1:113498720-113499538
  binary
cggggcccagggtccggctcccgtccttcgctcgctgcctcgtttgcttgttccagtacccacgcagctagccagtcacgtcgcagctcaccactttgtctggccgggccagcgaggctgccttataacccgccggggccggagcatgcgcgcagggggcggagtcgtctctcccggccgccgccccctccccgccacacagacatccgaactgcagcccgcgcctccacacgctttcagccgcgcgcgccctctagctcgcccgcgcgcgccggcgccccctccccgccacgtgaccggcgtcccagtccgacccgcgcgctgcgcccctgctgagcggcgcggagctaccacgccctgccagactcgcccttgggtccctgtctgacgagctctaggcaatctgccctcgttcgggacacaaccatcggtctcacccctcagtttctgccagagaaaaaggaaaagtcaccgagaggcctgaccctgacgggtgggggagatgcgcgtgcggagtagcgggaagcgactgaggagcggggaatgggcagcatttgaatggatgcgggtgccgctggcacccgggaagacgctgggggccggcgctgtagagccgggcatgggctgggatgtgtttggattccaatccgggcctgacaccagttcagtgacctcgggaagttccccaaccctccgggcctgtttcctccctctgaagtggcgacagtagtagaaccgacctcgtaggctcatcgggaggtcctgatgggagaacccatgcaacttgccaccatagagccaggcccgcggcggttggc

SEQ ID NO: 6655 - DNA, 84 bp, Homo sapiens
  chr1:119548975-119549059
  hyper
cgtcctagctctgtctagtgaagtagagagcagaaaaaaacatctagctctatcaagttgaaaacattttcacattcaccttaa

SEQ ID NO: 6656 - DNA, 269 bp, Homo sapiens
  chr1:1246145-1246414
  hypo
cgtgggcggctctgggtcacaggtacggaggatgacggctgtgctggtgggtcacgggcggctctgggtcacaggtacggaggatgacggctgtgctggtgggtcacgggcggctctgggtcacaggtggctctgggtcacaggtacggaggatgacggctgtgctggtggccgtggggctgggggctttggcacctgcccaggtgaagacgattctggagagccaagatcccctgggcaagcaccagacacgtgtagccccagcccac

SEQ ID NO: 6657 - DNA, 77 bp, Homo sapiens
  chr1:14125492-14125569
  hypo
cgtggtgagtcagagctgctgggtaatgtgacttagtcagctggatcaaagggtaacaaacacaagcactccaggca

SEQ ID NO: 6658 - DNA, 54 bp, Homo sapiens
  chr1:14125622-14125676
  hypo
tgcctaaggaagaacagagaattaagaattgtgaggccgggcgcggtggctcac

SEQ ID NO: 6659 - DNA, 797 bp, Homo sapiens
  chr1:151020083-151020880
  hyper
cgactctttcaccaccccttgcatcccaaaccttcggttctggcagagttcttgccgcagaggttccttaggagcaccccgcgcggcccgcgcgagcgcgcctgcgcgtcgaaccccacccccttccccgcgggcctcggttcaaacgacccggtgggtctacagcggaagggagggagcgaaggtaggaggcagggcttgcctcactggccaccctcccaaccccaagagcccagccccatggtccccgccgccggcgcgctgctgtgggtcctgctgctgaatctgggtccccgggcggcgggggcccaaggcctgacccagactccgaccgaaatgcagcgggtcagtttacgctttgggggccccatgacccgcagctaccggagcaccgcccggactggtcttccccggaagacaaggataatcctagaggacgagaatgatgccatggccgacgccgaccgcctggctggaccagcggctgccgagctcttggccgccacggtgtccaccggctttagccggtcgtccgccattaacgaggaggatgggtcttcagaagagggggttgtgattaatgccggaaaggatagcaccagcagagagcttcccagtgcgactcccaatacagcggggagttccagcacgaggtttatagccaatagtcaggagcctgaaatcaggctgacttcaagcctgccgcgctcccccgggaggtctactgaggacctgccaggctcgcaggccaccctgagccagtggtccacacctgggtctaccccgagccggtggcc

SEQ ID NO: 6660 - DNA, 253 bp, Homo sapiens
  chr1:153540242-153540495
  hypo
cctgttctgtcctgtacaaagcgccccttttgcccttttcgtgtgtacttagagaattctgattttgactgaatcacctgtgtacttgttttctctcagcctcacccccacatggtgagctcaccggtcttactcatttctgcatgaggtaagggtctcgcccacaccaggtgccaaccagtgcttacggctaccacatggcaacaggggtcactggaggagtgcttaggagcaagggagtccttctcacccc

SEQ ID NO: 6661 - DNA, 97 bp, Homo sapiens
  chr1:1566979-1567076
  hyper
cacgcaccccctccccgcctccccctccaccgccccatactcactgccacgtccccatccggccatcccctcccagctctcggggacactgtcaggc

SEQ ID NO: 6662 - DNA, 63 bp, Homo sapiens
  chr1:159869545-159869608
  hypo
cgcgcccggcccaccagtgctttttcccacaccacatccacaatctttggtccacagaggccc

SEQ ID NO: 6663 - DNA, 158 bp, Homo sapiens
  chr1:161367435-161367593
  hypo
cgtgtatacacctgggaaattatcaccgcaattcgggtctgatttacacgttaggcacagttcatagggcctactttttttttttttttgagacagattctctctgttgcccagtctggatctccgctcactacaaccttcgcctctcaggctcaagc

SEQ ID NO: 6664 - DNA, 712 bp, Homo sapiens
  chr1:161409991-161410703
  binary
tgcttggaaggcaactatgctcaccactataccaccaacgccgcacggcgcgggcagccccgccgcgccggcccggggctcccaccagcgcgccgccgacgcccggggcaggccggccccgacgcccggtccgtccgcccgcccgcagctccgcgctgccgcggcctctccaaaggccgccccgcgccccaccggtgcaaggccagcgcggctgacccgttacgcccgcctgcctctgggggcgctctcgctcactcgccgcctcgggcccccagagcccttccccaacaggtgcccgggggggaaacggccggcgccggcagggtccccactcctacgcttcccaccgggcgcagggccccgtgtgtcgcagaaagcctcttccgacaaccactttgagccggcagctcgttgggcgccgtgcagggccagaggaggcctcccggctgccgctaccaagccgcggacgagaagaaaagacaggaggccaaggaggcccagaaggccaaagggccaggcaggccaggcccgagatggcaccctgcgactagctggagggcggaggaaggagaaggagggcccacaggctgggtccgaggcggcggcccaaaaagcacggctgcctccccgtcggggaatcgaaccccggtctcccgcgtgacaggcggggatactcaccactatactaacgaggacgacggcgacggtcgcc

SEQ ID NO: 6665 - DNA, 55 bp, Homo sapiens
  chr1:163378364-163378419
  binary
cgcacgcacacacgcacacacacgctttttaaaaaacagaaatggctcggaaagc

SEQ ID NO: 6666 - DNA, 81 bp, Homo sapiens
  chr1:167221039-167221120
  hypo
cgtaaaataattcagctcactgtattttttgtttcttcgttatatctttttttttttttttaaacagagcctcactgtgtc

SEQ ID NO: 6667 - DNA, 70 bp, Homo sapiens; identical to SEQ ID NO: 6355
  chr1:171554936-171555006
  hypo

SEQ ID NO: 6668 - DNA, 122 bp, Homo sapiens; identical to SEQ ID NO: 6356
  chr1:171555061-171555183
  hypo

SEQ ID NO: 6669 - DNA, 135 bp, Homo sapiens
  chr1:171811643-171811778
  hyper
acagcttcaggcaattgtgagagagcccgaggcacagacttggcagggggtggacgtggacttatgttgtccaggtgccatgtcattcctgcatcatctcggaactgaccagcatctttctcgcactctctctgc

SEQ ID NO: 6670 - DNA, 181 bp, Homo sapiens
  chr1:175372314-175372495
  hypo
cgcagagcccctcctcacattgtcctcgcccactgcaggcattcagacactgccgctggccgcagtcctcaccaacgtagccctcctcgcataaacaggtaccgttggcacatctccccttccccgaacagtccccagggcacctcagttccctgcagtcctcgccagtgtagggctcttc

SEQ ID NO: 6671 - DNA, 145 bp, Homo sapiens
  chr1:175372572-175372717
  hypo
cgctgtactcgctgtcacagatgcactggccatccacacacaccccccggctggagcaacccagcgggcagtagggctccgagcaattcttgccaaaccagccttcgttgcagatgcagccacaggactcaaagctaaagttgcc

SEQ ID NO: 6672 - DNA, 153 bp, Homo sapiens
  chr1:175375048-175375201
  hypo
cgatgaaccattacctgactcatccccccaaaatcaggttaatgtatttcaaactggctatgcagtgtagaaaatccctgaactgaatccctcggggaagaactgcatttagatcttagagacatattaaccggcagctacagactaggacac

SEQ ID NO: 6673 - DNA, 114 bp, Homo sapiens
  chr1:178531640-178531754
  hypo
cgtcagccaccgcacccgacctctactttttagctataatgatttgcaagggcaaaaatttcacggtacaaggagctttcttttgaaacaatgagtaagctcttcacaagtacc

SEQ ID NO: 6674 - DNA, 51 bp, Homo sapiens
  chr1:178531798-178531849
  hypo
tctaactgtatcctagaggctctaggttcaggctgaacggaagtacatgtc

SEQ ID NO: 6675 - DNA, 67 bp, Homo sapiens
  chr1:180478120-180478187
  hypo
cgcaggcacgcagcgctggactggttgaacagctccgcccgctgccctggcacgggatccaccaggc

SEQ ID NO: 6676 - DNA, 250 bp, Homo sapiens
  chr1:182583799-182584049
  binary
cgtctccaaaaaaaaaataaaataaaataaaaggaaagtgtttgaaaagtgcttaagtgctctgaaaagtctgagatgctgtgcaaatagtgcggcattatccttatttttgttattaaaatgagcgagacttgccctgaccagcgacgaattgactcactcagttttgggggagggggcggaggagtgggaggagcgggaggagaggggccacgcttgtcttctccgagggatgggaatttccacccag

SEQ ID NO: 6677 - DNA, 40 bp, Homo sapiens
  chr1:182584613-182584653
  binary
cttgaagactgggcccttggctctgtgacccagcagaccc

SEQ ID NO: 6678 - DNA, 215 bp, Homo sapiens
  chr1:19659439-19659654
  hypo
cgccttggcaggttctgttttacctgttgaacgagacactgtatggggaagtgacatgcgcagtgcctggcccagtgctgtgcacacacgctgcttcgcttcctcaggttccggggatgggatgggacagaaaagctggttgcttagctggtggcgttctccagcaaagcagaagggatggtcctggcagccctgtgccgagcactggaccccgc

SEQ ID NO: 6679 - DNA, 225 bp, Homo sapiens
  chr1:205245793-205246018
  hypo
cggggtggtgacagcagcgatgcccgccagacacagggcctcccaggagagcactcccgccttggtccccccataccccaaggctcgactgtccggatgaagcatcctgggcccagcggtgccacctcagccatgcgcctgcctccaggcagccatccactaagctggctctgattccaaaagccccagaggtgatcctgagaggtctgggtgcccagtctcggc

SEQ ID NO: 6680 - DNA, 112 bp, Homo sapiens
  chr1:207936524-207936636
  hypo
cgtccggcctcccacctccagctgcaattgcattctgacctgggcaagtaggaacacgtagtggagatcctgatggagacctgagccaggcgtcccggagtgctggccaggc

SEQ ID NO: 6681 - DNA, 102 bp, Homo sapiens
  chr1:2141684-2141786
  hypo
gtgagcctcgaaaccaccttctttctgtatcgtttctgggagtggcgatgtcggccagtgggacacctgctgagggtcctcttttcccatccgggtgctggc

SEQ ID NO: 6682 - DNA, 195 bp, Homo sapiens
  chr1:22003573-22003768
  hypo
cgaaacgagaatcgggctttaggtcataccctttacctgtttttccctgtaccaagtgagaagggtggcaatgcaaaaccattcaatacaagcatacgtttctttgcaactctgcctactatgggtgggagaggccccaagcccagggtttcaaagagtacaggagtggcctgtggatgcagattccgattcagc

SEQ ID NO: 6683 - DNA, 38 bp, Homo sapiens; identical to SEQ ID NO: 5876
  chr1:223936543-223936581
  hyper

SEQ ID NO: 6684 - DNA, 135 bp, Homo sapiens
  chr1:226163215-226163350
  hypo
acagaagtaataatgttatgggatattcagcaagactaaatgatttattcaccacctgtacagtgaaaactgaagctaaatctgagaattaaggaatcagaaagaacagggcgccgggcgcggtggctcacgtcc

SEQ ID NO: 6685 - DNA, 226 bp, Homo sapiens
  chr1:2267752-2267978
  hypo
cgggggggctctctggagcgaggcccgtgtaggctcactgtcttcccagaccaggcccttggctcccctgggccttccccgtcctcctggcccagctgatgaggaggccacagctgaccctccgaacacctgcaggtggggtgggctcatcctacctgctgcctccaggaggctcctgtgccgtgggtggtgtccccctggggtgcaggccgcctctggatctgcc

SEQ ID NO: 6686 - DNA, 35 bp, Homo sapiens
  chr1:226924738-226924773
  hyper
cgttctgcaactcgcgctgcaagatccgcagcttc

SEQ ID NO: 6687 - DNA, 452 bp, Homo sapiens
  chr1:226925659-226926111
  hyper
cgaggtccaagtccttggctcctaagtatgctgtgtgcggggcgcggctgactcagctctcccgggctgaggacaccccagccaccgtctccgggtctccccagcctgagcaaacattggctatccagggcaacccggcagccctcgccctgggcttcagggtctccctgctccaccctctcggggcatcagagaccgaccggctcggagggaacctaagcgggacctgccttgcccgagccgctgccagcgcccggatctgggagggcgcccgcgtgcccgccgtttaccttcctgaccctagccttggggctgtgtctctcggcctacgaaggcctgggcgggcagcggggccgcagccgaagcatttttcagggctagccttgtcgcctatccctagacaagtgttttgtgagtgtgggcgcaccgaggttctacacgttctctttacc

SEQ ID NO: 6688 - DNA, 331 bp, Homo sapiens
  chr1:228280981-228281312
  hypo
cgtaccaagaggccctggaattgagggtgggggttgctgtggactctttctccctcttaggaaactctattgggtctccatctgtcacagaagcagtaaatgatgtaggggctgccaggtatagggtcctgtggggatgctggaacatgccgaggcaggacgtgccagccaccctctgcccatatgtgcagcagggccacagatgtgcttgtcggtaggagagaccaagctgtctgtgtgccgatgtcttgacacctgagacttcaggttcacccatcctggttctgccattccattgcagggtggcttccctcctttggggactcttaac

SEQ ID NO: 6689 - DNA, 829 bp, Homo sapiens
  chr1:228461610-228462439
  hypo
cgccgcagcaagcggcatgagacagccagccagggggacacccacaccctgaccgtgcatggcgcccaggttctggacagcgccatctacagctgccgtgtgggcgcagaggggcaggacttcccagtgcaggtggaaggtgagccgggcatggggcgtggggcggggactcctccagacacctctgtcccagagctggacaggggcgaagctggggctcaagtctggtctgttaagagcccggctgatgtcccctttgtgcccacagaggtggccgccaagttctgccggctgctggagcctgtgtgcggcgagctgggtggcacggtgacactggcctgcgagctaagcccagcgtgtgcagaggtggtgtggcgctgcggcaacacgcagcttcgggtgggcaagcgcttccagatggtggccgaggggcccgtgcgctcactcactgtgttggggctgcgcgcagaggacgcaggggagtacgtgtgtgagagccgtgatgaccacaccagtgcgcagctcaccgtcagtggtatgtaaggggtcgagtgtccctatccagggcagcctcctggaggaggcggcctttggtactcctgcagcgtaagggctctgccagtcctgtgcgcccgcctcttaagcagtgctcctgtctgcagtgccccgagtggtgaagtttatgtctgggctgagcaccgtggtcgcagaggagggcggcgaggccaccttccagtgcgtggtgtcccccagtgatgtggcagtcgtgtggttccgggacggtgccctgcttcagcccagcgagaagtttgccatatcacagagtggc

SEQ ID NO: 6690 - DNA, 69 bp, Homo sapiens
  chr1:228504692-228504761
  hypo
gtgggcgagcttttccctcccctgcaggtcgggtctggggcgcgccccgcctccagagcttgcgagtgc

SEQ ID NO: 6691 - DNA, 359 bp, Homo sapiens
  chr1:228528433-228528792
  hypo
cgcaacaaggcgcggaacagacagaactgcgcgctgctggagcaggcctatgccgtggtgtctgccctgccacagcgcgctgagaacaagctgcacgtgtccctcatggagaactacccaggcaccctgcaggccctgggcgagcccatccgccaggttggggagggccaggggccggggccgggagatgcatgtgatgtgggtgggtattggggtgctgggggcttgtatctggggctgccaggaggtggcggtgtgtgcatgagttgggcagagcactgggtacctgggtggctgtggggcctgcaccgctgggcaatctggcccaccacaggctgaccgcagcccacaccctcccc

SEQ ID NO: 6692 - DNA, 50 bp, Homo sapiens
  chr1:228529382-228529432
  hypo
aggtccctgcctgggtgggtgtgaggggtgggctcgttcctgggacagac

SEQ ID NO: 6693 - DNA, 128 bp, Homo sapiens
  chr1:229038524-229038652
  hypo
cgatcggtcgatcgatcatttattttttatcttgattacaccagataagctgaggattttgcaggtaagcacgtggaagctaaaggccagcaagacttggttaggaatatcaatgcgtcctctctcac

SEQ ID NO: 6694 - DNA, 158 bp, Homo sapiens; identical to SEQ ID NO: 6362
  chr1:23693515-23693673
  hypo

SEQ ID NO: 6695 - DNA, 253 bp, Homo sapiens
  chr1:245254446-245254699
  hypo
gggcggagacggaggaggaaaggagtgtggtgatcctcggaacatcagcagacaggctgttgatgataggaacacattgcagcggggaaggaggatggctgagatatgaaatacccttcaaggtggacgcatacccaggggcatgtcattcggtggcaggggccagcacggacatgcagcactgaggcgtgtgctagcgcccagtgcgtcgacccaggcacggacttgtttggagcatacaggacagctctgc

SEQ ID NO: 6696 - DNA, 97 bp, Homo sapiens; identical to SEQ ID NO: 6365
  chr1:246330213-246330310
  hypo

SEQ ID NO: 6697 - DNA, 298 bp, Homo sapiens
  chr1:246930862-246931160
  hypo
cgaatgagctggcaggtctaatgggggaggcggcgtcccagtctgtgttgcagcagcattctcatcgggggtgcgcacaccatcgttactgtcgggcagtaactgccgcttgccttgccgcagtaggagggaaatctcaccttccttccacatactgtcttgagcctttgctaaattaaactgcactttttgctatttttgcctagtttttcgccaatctacactgattttggactgttacctaagttgaaaaataaaaggttgtcaatcgaatggtggtttaatgtttggacctgcc

SEQ ID NO: 6698 - DNA, 247 bp, Homo sapiens
  chr1:25070663-25070910
  hypo
cggggctgcgtgtagcacctaggtgattctgatgcacactcaaatttgacaggtgagccggggggaagaaatgggtgtgggcagtggggaacaagatggacaacgacttggaagtccttagtggcctgcaggcactgagattgcagttcaagatcttgagctttgggagttgttactctccaagggctagctcagagcctgaaacacagtaaggtttcataaatatttgtgaatatgcgcccggcgc

SEQ ID NO: 6699 - DNA, 33 bp, Homo sapiens
  chr1:25255579-25255612
  binary
cgatcccggcctagcgccgtccggtaaaatttc

SEQ ID NO: 6700 - DNA, 807 bp, Homo sapiens
  chr1:26662538-26663345
  binary
cgcctctgccccagcgcccccagccctccgcccctccacgttctcacctgccgccgtggacccggcaggactgaggtcggaaggaggcgggcagagcggcctggtcatcttcgaaagagaagtggtcgcccagaaagtcggggcgggagaaaagctgaatctggaggcagagaggggagatgaggggaaggaggacgatggagtggggccgagaacagcggggaggggaaaggtccgaaatgaggggagagacgtgagcccagcggctccctgcggagtccctgccttacctttgagacgaagtgcagatcgtgctccccgacctgaaggtagggaccgaatcgagaattagggagggtgccggcccctagccttgtcttctctaggtttcagtaccgtccaccccgcggccgcgccctcggccccgcccccttctaaggccccgccccaagcgcccaggcaggtcctccagcccgctacctctgcgtgggggcggggcgcacccgaactccaggtcccgccaccggggaggccccgccccccgcggccggcacgcacctgtaggaccggctgcagcgaggcgagggtgctgttgccagcgccccagtcctcgcagttacgatacacgcccttctccagcacgtactgttccccggagaagcccacctcctggtaggccacccacctgcaggaagggcggggcgcgagtcagctgggacggagcctgcacctctcctggaaccgcccccggctcgcccgggcccgccccgctcccggagcccgggtcacttacacgccgctgagcac

SEQ ID NO: 6701 - DNA, 134 bp, Homo sapiens
  chr1:28887889-28888023
  hypo
cgggaaacaaccagataacaggtaggtacaaagtcatgtctagacagacataagatgtgtcactgtgcctgtcactgccatataggaggaggggagccggtttggctgcacttggttccctcctgaaggacgac

SEQ ID NO: 6702 - DNA, 149 bp, Homo sapiens
  chr1:29585852-29586001
  hyper
cggtgagtcccagcccactgggggcgcaggggtaaggggtgtgggcggccgcggctcctgcctgcagggggtgcaggcccagctcacgatgcagctctaaccccgcagcaaaggccccacacttctcccgcctgggcgacgtggaggtc

SEQ ID NO: 6703 - DNA, 120 bp, Homo sapiens
  chr1:3111118-3111238
  hypo
cggcaactggccactgtctccccaccacacgccaccgtctccccaccacacgccaccgtctccccaccacacgccaccgtctccccgccacacgccaccgtctccccgccacatgccacc

SEQ ID NO: 6704 - DNA, 326 bp, Homo sapiens
  chr1:3111463-3111789
  hypo
gcctggctctgggcacctctgctgctccactctgcgtggagagttctgcgtgaggccaggaagctttgccgcgcttccccactcaggagcttctggatgtttctatggaggcctcacgtctaaaaccgtgagcgcaccggccagtggatgctctgaggagtgttcccgtggagccagcaccgggcagctcggcgaggcacacagcgtcgggatttggagagagacggggccctgtgggatggtgcggagcctgaggccaccgtggggacagggatgcagagaaacccatgggcctcggcgttgctccgggagaagccggcagtgcc

SEQ ID NO: 6705 - DNA, 86 bp, Homo sapiens
  chr1:31474705-31474791
  hypo
cgcgtatgatagcagtgcttatcaaactttaatgtgcatacaaatcatctgggtagtcttgtcaaaatgcagattttgattcattc

SEQ ID NO: 6706 - DNA, 80 bp, Homo sapiens
  chr1:31863055-31863135
  hypo
gcacgcagcgggcctcatttatgacttagttcaacattacaaaccttcgggagccccaccctccttctctgagagttgcc

SEQ ID NO: 6707 - DNA, 130 bp, Homo sapiens
  chr1:32410105-32410235
  hyper
cggagggggcagggcgctggctccagctgtttgcatgaatcccccgcccctggcctctctgcctgtgcaggaagccctggtgtcgtaccccgagccgctgcagttcgcactctgcggcctcctcaggcac

SEQ ID NO: 6708 - DNA, 489 bp, Homo sapiens
  chr1:3321510-3321999
  hypo
cgcccccgtgctccctacaccccctggtccaaatgtagatggagtgcggcagagtgggtaggaggcccctgcggtggctcgggcccttccgtgtgactaggaaggaaaggaagtctcagggaagaccgtgtcccccaggtcagaaggatcagggccgagaccagaacccaggcccctccagagcgcggctcctgtcctcccgccggtgtggaaggaagaggctggcggggctgagccgagcctccaccccgagcccgccagggtctcagcaccacagctgaaaacgctttctgcagccctgtctcacgcagcctcagttcaggaattgttcttgaggaaagcagccggggaggctctgcggctcacttaaggccctgcagcgggtccttgctacacagagacctgtcccggcctgcttggtgcagactgcaacgtggcaagagagacaggcagggccctgccccccacagccggttggtccgccagcca

SEQ ID NO: 6709 - DNA, 121 bp, Homo sapiens
  chr1:3322260-3322381
  hypo
cgtggcggtcgggccgaggtgggccatcccccaaggtctcccccgatccgaggggccccagtttgttcataaagcactcatggcaggttctgacatctctgccgcgtgcagcctggtcccc

SEQ ID NO: 6710 - DNA, 43 bp, Homo sapiens
  chr1:3325196-3325239
  binary
cgtgagctggtgcctgtgttggcatgtgtgagagtgtgtgagt

SEQ ID NO: 6711 - DNA, 215 bp, Homo sapiens
  chr1:3328319-3328534
  hypo
catccttgtacccccggccgcctctgctacctcccacatcgctgctcaagagccccctgaaccacacccaggacgccaagctccccagtcccctggggaacccagccctgcccctggtctccgccgtcagcaacagcagccagggcacgacggcagctgcggggcccgaggagaagttcgagagccgcctggaggactcctgtgtggagaagctg

SEQ ID NO: 6712 - DNA, 644 bp, Homo sapiens
  chr1:3328625-3329269
  hypo
gctcggacctggacagcgacgtggacagcgaccctgacaaggacaagggcaagggcaagtccgccgagggccagcccaagtttgggggcggcttggcgcccccgggggccccgaacagcgtggccgaggtgcctgtcttctattcccagcactcattcttcccgccacccgacgagcagctgctgactgcaacgggcgccgccggggactccatcaaggccatcgcatccattgccgagaagtactttggccccggcttcatggggatgcaggagaagaagctgggctcgctcccctaccactcggcgttccccttccagttcctgcccaacttcccccactccctttaccccttcacggaccgagccctcgcccacaacttgctggtcaaggccgagccaaagtcaccccgggacgccctcaaggtgggcggccccagtgccgagtgcccctttgatctcaccaccaagcccaaagacgtgaagcccatcctgcccatgcccaagggcccctcggcccccgcatccggcgaggagcagccgctggacctgagcatcggcagccgggcccgtgccagccaaaacggcggcgggcgggagccccgcaagaaccacgtctatggggaacgcaagctgggcgccggc

SEQ ID NO: 6713 - DNA, 68 bp, Homo sapiens
  chr1:3408704-3408772
  hypo
actgggtgccacacacatgtactggcacacatgcacacacaccctgctgtacgcactgttgcacgtgc

SEQ ID NO: 6714 - DNA, 39 bp, Homo sapiens
  chr1:3659512-3659551
  hypo
cgagggaagctactggcgagaagcattggagggttctgg

SEQ ID NO: 6715 - DNA, 179 bp, Homo sapiens
  chr1:3663338-3663517
  binary
cgacccccgaccgagggacccgtgggatctgcgctcaccgccctgcgagcagaggcgttcgtgtcggagcccccacacctggggagcggggagctgcggtccctggttgtcccacaggagaagggggagggaacggggcaggcggggaggatgagcgcttccgcgtgcagcgggggctg

SEQ ID NO: 6716 - DNA, 101 bp, Homo sapiens
  chr1:3663983-3664084
  binary
ggccttcggtgcagacccagggccaagtcgagggaggctccgggcgcggggcggggtcttgggcgtgggggcggagcctgcgcggggcgtagagatctgac

SEQ ID NO: 6717 - DNA, 130 bp, Homo sapiens
  chr1:40771005-40771135
  hypo
cgtgagccaccgcgcccggcgtgatcatttatttcatgtctatttcttccattaaactataccctccatatgaagaggagactcatagttgcaagtgtttagtgaatgtttatgcaatgaataaatgaac

SEQ ID NO: 6718 - DNA, 334 bp, Homo sapiens
  chr1:41281568-41281902
  hypo
cgagctgctgtccttaaggtcaccacgaaacatgaatataaataaagccacatagaaggtgacttgggccacacatagggaggcaagcatcgggagttggcagttctgaaggggggatagtggggtgcgggaatcagaggctccgtagagctttgtagcatttgtgttcctgtaggcgtggacgatgagcagagtctcgcaggcacagacatgaggtgttctgcgtagcatgcaccgtgccagcaacggtgcagaggtggggagactggggacatctgggaaggctggcgggtcagtacacagagatgtatttccagagaagcctgttccctcc

SEQ ID NO: 6719 - DNA, 462 bp, Homo sapiens
  chr1:41832027-41832489
  binary
cgcccggcagactcccacgaccacctgctcacacccacccacgagcgctggcgcgcttcgggcccttccggcttcccgggcctcccggcgcccctcccccgccgccgtgcccagcccccccaccccgctctgctccccgcggaccccctcgctcccttccggccccacggcggccgcccccgccacaccccccgcgcaacttagggagctgaggaggcggggctcagggaggcccctggggcagccacgcggcgggagaggagggggcctggaggcagacagaccgacagacagggtgagggccccgcctgccacctggcgccgctccagcgggacgatggcgggcagcgccgtgccaggcggtaattgcagacagactaatttaaagagatgagacggttatttttaactcgcgttaaggtaatgaacggcgcggggggtttgcgggttcgaaagttcagc

SEQ ID NO: 6720 - DNA, 296 bp, Homo sapiens
  chr1:41848318-41848614
  hyper
ccccgccccccaaccagagctgggtgccgggctgagggccgcctcccgcctccgggcgccccgtcccgtccccagggggcctctgtcttcccatcctgattcccgggtccctgcccccgactctagctccccaggaggcggccccagcccagctagggacccctctcggaggccggccgccggggaaggggagggaggggccggggcaccccactgctcctgcccacactcctgagatccacccccttctcctgggcaggaagcctgggagaggaggctgaattccaggctggctg

SEQ ID NO: 6721 - DNA, 111 bp, Homo sapiens
  chr1:41848643-41848754
  hyper
ggtgtggacggtggtcggggaagccaactaggagatgggccagggagcgtttacaaatcttcagtttcatttgcggaggcctagccgtgaccccgcgcccaccccaaacac

SEQ ID NO: 6722 - DNA, 133 bp, Homo sapiens
  chr1:42633144-42633277
  hypo
cgtgtgtgtatacactgaggtgcgtgtgtgctgaagtgtgtgtatacactgaggtgtgcgtgagtgctgacgtgtgtgtatacactgaggtgtgtgtgagtgctgacgtgtgtgtgtgcactgacgtgtgtgt

SEQ ID NO: 6723 - DNA, 60 bp, Homo sapiens; identical to SEQ ID NO: 6369
  chr1:44351032-44351092
  hypo

SEQ ID NO: 6724 - DNA, 108 bp, Homo sapiens
  chr1:52659468-52659576
  hypo
cgcacgcgcgcacacacacacatgtgtccaaggaggcatatacaagggtgttaatgggagcattcttggtaatcgttgaaaaataggggaaaatgtaaatgcttattc

SEQ ID NO: 6725 - DNA, 238 bp, Homo sapiens
  chr1:54408693-54408931
  hypo
cgactataatttttactctcagtggtgctcacaaatggaaaaaggatttaaatttctttttttttacacctcctggggcgtgaactggactcaacaaatgcacattttaagcaggaagactttggagagacaaggactttcgttcaaagtaaagattttaaatttctttcatccctgaaaacgtccaagaaaagtcggtaagagatcataatctatggaagaaggcaaagaaatctac

SEQ ID NO: 6726 - DNA, 116 bp, Homo sapiens
  chr1:6623403-6623519
  hypo
cggtgccggcggccacagggccgtgaatgggcttgtcattacttgtatattgggtaaggctggagatataggagcgtaaaagttgtactatgcgccgtgtcagagtgttttctgtc

SEQ ID NO: 6727 - DNA, 155 bp, Homo sapiens
  chr1:7842602-7842757
  hypo
cgtcaactccctgggtggcagggactttgggccactgttctatccgctgggattccaagcgtccctacccagatctgcacgcaataaatgcttgctgaacgaatgcagtttgacaaaacccagcttcggaggagagcaagccaacctagagtatc

SEQ ID NO: 6728 - DNA, 89 bp, Homo sapiens
  chr1:9725455-9725544
  hypo
cgcacgccgccatgcccggctaattttttgtattttggtagagatggggagcgctcacaagctcttgccgtagctctggtttacattcc

SEQ ID NO: 6729 - DNA, 99 bp, Homo sapiens
  chr10:116045880-116045979
  hypo
cggtgcctgtgggggagtaccaggatgtgcctgacctggtctggagcctcgatggcattcccttccgtggtggccccaccctgacgggcagtgccttgc

SEQ ID NO: 6730 - DNA, 180 bp, Homo sapiens
  chr10:116046022-116046202
  hypo
ccaggaccggccacgtagagtggtggttttgctcactgagtcacactccgaggatgaggttgcgggcccagcgcgtcacgcaagggcgcgagagctgctcctgctgggtgtaggcagtgaggccgtgcgggcagagctggaggagatcacaggcagcccaaagcatgtgatggtctactc

SEQ ID NO: 6731 - DNA, 240 bp, Homo sapiens
  chr10:118891774-118892014
  hyper
gctggctctttcttccttttcttcttttgtttttttatccttcaaatataagacaaaaatacacctcatttatcatcatagatatatatatttcactctcaccacataaatacaaaacatccaaatatccaaaacattcagaacaaagttagtagcctggattcagtgacacctacccgcgtttgaatcgttcattattttcttcactatttgcctagaaaaaaaaaaaagatgaaaaag

SEQ ID NO: 6732 - DNA, 1193 bp, Homo sapiens
  chr10:126106668-126107861
  binary
cgggaggttttcatgctgaaagtcctgttgcccccccatcccccaccatctaattaacctgcacgttactgtaaggaaggttctgcttccgtaattttctttatttcgacagaggctggagaaaaaaaatcataggctggaagaggggagcgatgggcaggccgatctgcagggcgcaggagcaggccgggaggacccagccctccaaggctgcatcagcgcccccgccgcgtgaccagggccaccggtttactgcacagctcccccgtccccagaacgcagcctccccgccaaccccaggaaccaagggtgcccaaaggcctcctacccggaaccccggggcgcctcggggtctctgggccgggtgggccgagtcctggcctccacaggccgcgagcgcagggggcggcggctccgcccggtctggcaggcggggctgccacatcctcagcctctccctgccgcccgcccgtcggccgctctgggctggaaccaggactccggcctgcaagccgtgggtcgccacgcccctgccccctgaagctgcgcgccggccggagactccagggcgcccgggtccgagccgcccgcagagtaaacgggccgctgaagcggggctcgttccccggccgaggcccagcgcgccccctcagccagcatcccccgaacccgggccgcggccaccccgcgcccgcccgcctcccccgccgctgtcagggaaccccggccagggcccgaaccagagccccaggacagcggcgcccagacggtacctgacagcgcctgaggacaaccgggtacacgcggcgtctatgaagcgcaacagtgacgccggagagtcactgcaacttaaaggctgattctgccccgcccccaagacaccctcgccgctcattggctggggcggagggcaggataccaatcgcgtgggtcccgtcctccgccccgccctccggccgcgcatcaaggatctttgctcctcccgcggattcgatccgcgctcgcgcctcctgagcccgccggcctgtacctgagctcaggcccctcggtcgcctcctctggcgggacgagaagagtccttgtccgcccttgctgacgagaagactgaggcccgaaaaggaaaagtctgttgggccccccactgcgcgggccgggtgtggctggaggccgagagacgtgaggctggaccgccc

SEQ ID NO: 6733 - DNA, 96 bp, Homo sapiens
  chr10:129534419-129534515
  hyper
cgcacaggtgcccgactcggagtccgggaggcgggccctctttccaggtacccagcccagcgtcagcctgggtccatcctccgccaccccacagcg

SEQ ID NO: 6734 - DNA, 46 bp, Homo sapiens
  chr10:129534541-129534587
  hyper
ggcagcttggggggccgggataacccgggctgcagcaaccccgggc

SEQ ID NO: 6735 - DNA, 231 bp, Homo sapiens
  chr10:134733835-134734066
  hypo
gagctcctcacagagctgcagagtggcattgcctgtgtctcctgccggcgatgaggccgagccagtgctcctctgagtgggggaggctccaggaactttggagcagagtctgccaagaccctcctgctgctctgctggctgcgctgtccagctgccctccaagcagaggcacccggcctcagactcccgagctcccacccagcccctgcgtagcaccccaagtcccagcag

SEQ ID NO: 6736 - DNA, 209 bp, Homo sapiens; identical to SEQ ID NO: 5728
  chr10:17270445-17270654
  binary

SEQ ID NO: 6737 - DNA, 369 bp, Homo sapiens
  chr10:17272233-17272602
  hyper
atttcttaaaactaccactttgtgtgcagttgaaggcccttgggcacaatgagagccagtcctccaaactttcagaaagtttcctgccccttctggcaggctgccaatcaccgggcgggagaaggaaggaggggaaggcggtggagggagcgagacaaagggatggtccctcgggggcggggatggcggggctgtcctgtaggtctgtgcggccaccgtgattgcccctctgcgcggtgcccgaagtcccgctgaaacctgccgagggcagcaggtctgaaagctgcaggcgctagttgcgcggaggtggcgcagctgctctggaggcgcagagcgaatacgtggtgtttgggtgtggccgccccgccc

SEQ ID NO: 6738 - DNA, 96 bp, Homo sapiens
  chr10:1780056-1780152
  hyper
aacagtttttaactagtcaattcattaccatgctccttgtgtcaagggggggaaatacctctttcagaaatgcagagaccgcacttcctcagaaac

SEQ ID NO: 6739 - DNA, 103 bp, Homo sapiens
  chr10:22517909-22518012
  hyper
cgcaaacggagatgtttacgctgacagggaacagacaaaagggcggccatgcttcaacaaaatgtaggagttttcagtttgcagcttgaacttgacactgttg

SEQ ID NO: 6740 - DNA, 61 bp, Homo sapiens
  chr10:22518450-22518511
  hyper
gctcgaaccaccaacctttcggttaacagccgaacgcgctaaccgattgcgccacagagac

SEQ ID NO: 6741 - DNA, 63 bp, Homo sapiens
  chr10:22540645-22540708
  binary
cgccacagcaacgaatcactgcaaaagcaaggttctaacttaaaacaaaaagagaaagtattc

SEQ ID NO: 6742 - DNA, 32 bp, Homo sapiens
  chr10:22626103-22626135
  hyper
ttttgcatgaaatccagaatgtaaccatttgc

SEQ ID NO: 6743 - DNA, 223 bp, Homo sapiens
  chr10:24863037-24863260
  hypo
cgtttagagattcctgcgtgtttcaaggggatgtggaagccgggctgtgtccagtctgtggtaagaggaaagcatatagaagcccatgccccctgcgtgtgcacgcagtggctagagtttgcgttaaaccacttcatctagtcccgtggccacacctagctgtgaaggaggctgagaagtgtggtctctaagaagcagtactgggaaataaccgggactctgc

SEQ ID NO: 6744 - DNA, 309 bp, Homo sapiens
  chr10:3329809-3330118
  hypo
cttctcaaaatcgctgcattcagggtttccgccgtcaccctgctggcagtgaactagaggacccgtcccaccggagctggtccatggagaggtgccacagcctgtgagccacggcagagcggagaagcctgggacccctgtcacctctcagagcagcgcctcacatggcagaaggagctgctttccgaagagctaaaggttgccataaatatttataagagacctggcattgctgcgctggagggcagtgtgttatgataaaagtcacaaatggagctgaaaaaacagtggcttctacatgacagctac

SEQ ID NO: 6745 - DNA, 398 bp, Homo sapiens
  chr10:43892377-43892775
  hyper
cgggcttccggggccctgagggcgagagcgagggcgacggcaaggtggggtgggggctgctccccggcccgccaagctagcgctgcctaggcgggagctcggggacccgcgggccgagcgcggctgaagggagggaagggaagaggcgctcgtaggtctgcgtccgtctccgagcgaccggggcggcggaaagggacctggggggggcggccgggactggagtggcggggccggggcgcccgcgcggcggctcaccacgccagggactggcccgtcggccccgaggaggcgcggggtccggagtccgggaagcggaggcctcgtgatccaagaccggcagccggacgtgggtcacggggtgcagaggaggaagtgccattgccgggcccgccaagatg

SEQ ID NO: 6746 - DNA, 171 bp, Homo sapiens
  chr10:43892970-43893141
  hyper
ggaagagaagccagcaagttagacacagcccctctctgggaggccgcctctaaaatggaactagcggacgtaccttggtttgtacatttgaccatggacacacgtaaagattttgaaaaaaaatctttgaaaaaaaatttttttaacgcaattcctaaacttttaactaac

SEQ ID NO: 6747 - DNA, 55 bp, Homo sapiens; identical to SEQ ID NO: 6380
  chr10:5523206-5523261
  hypo

SEQ ID NO: 6748 - DNA, 70 bp, Homo sapiens; identical to SEQ ID NO: 6381
  chr10:5538706-5538776
  hypo

SEQ ID NO: 6749 - DNA, 192 bp, Homo sapiens; identical to SEQ ID NO: 6382
  chr10:5538938-5539130
  hypo

SEQ ID NO: 6750 - DNA, 130 bp, Homo sapiens
  chr10:6023448-6023578
  hypo
cgttcattgaccgatgatgaacaatggcaaaacggttctgaaccaaggtgcttgtgctaacagtgatgacgaacataatgctgttatcacagcagaacacgcacctgcaggcgccatgatgaaagcatgc

SEQ ID NO: 6751 - DNA, 398 bp, Homo sapiens
  chr10:70184294-70184692
  hypo
cgccgctagccggagcatcaccatgaagttcaatcccttcgtgaacttggaccgcagcaaaaaccgcaaacgtcacttccatgcccccttgcacgtgcaccggaagatcatgtcatccccgctctccaaggagctgcggcagaagtacaatgtccgctccacacccatccgcaaggacgacgaggtccaggtagttcaaggacactacaaaggtcagcaaattggcaaggtagtccaggtgtacagaaagaaagatgtcatctacactgagcaggtgcagcgtgagtaggccaacagcacaaccgtccacgtgggtactcacccaaacaaggtggttatcaccaggctaaatctcaacaaggatcggaaaaaaattattgaacacaaagccaagtctc

SEQ ID NO: 6752 - DNA, 96 bp, Homo sapiens
  chr10:72784980-72785076
  hypo
cgaactgcatgcagcaacttgtatgaatcgcaaaggcttatgctgagcagaagccactatcacaaggttaccttctgcatgattttatctatacta

SEQ ID NO: 6753 - DNA, 39 bp, Homo sapiens
  chr10:74451119-74451158
  hypo
cgtgagccaccgcgcccggccttacatgattttttatta

SEQ ID NO: 6754 - DNA, 102 bp, Homo sapiens
  chr10:76287784-76287886
  hypo
cggcaataaaacccagagtaaactcttaagataaaatgacgacgtccttctggaagaggtgaaactggtatgtccatgatccttatcagaagtgtcatgatc

SEQ ID NO: 6755 - DNA, 85 bp, Homo sapiens
  chr10:79396547-79396632
  hyper
cgaactcatctccccaacaggttcctaaagtatgggcggatgtgctccctctcgcccaccgccaggagccgagccccggcaggtg

SEQ ID NO: 6756 - DNA, 184 bp, Homo sapiens
  chr10:8055498-8055682
  hypo
cgtttttctgtttcttgattctaaaacagtgatgacgctgatcatggcattaatgaagtgctgatctactatattttttagtttaatatgcctgtttattcggttaacagtataaagtaatcattctgatctggcctctttttgttttttttcccattccctccatttttgccgcttccgcttt

SEQ ID NO: 6757 - DNA, 86 bp, Homo sapiens
  chr10:8055764-8055850
  hypo
gattgggtgtgacgactgcgatgactggtaccactggtgagtgcccagggcgccctgccggccacactcattaggcagcatcagcc

SEQ ID NO: 6758 - DNA, 118 bp, Homo sapiens
  chr10:8075813-8075931
  binary
cgccggcttcctttccctcccaactcccctgctctaggccactgcctctggggtggggcgccgagaaggaggccctggggacctacccccggctcttctgagccaagtgagttcccag

SEQ ID NO: 6759 - DNA, 226 bp, Homo sapiens
  chr10:80855265-80855491
  hypo
cggcctttccgggtgtcaggcaggtctctccggttaggtaagggaggcctcatccttcttacctgactgctctgagtgcagatctatgctgcttcccatcttctccaggcgcctgatctattaccttgggcttggaacgcacctaacaaaggctaccgtgaggaggcccctcggtacctgttcatctggacacatcgtgcagacccccgcaccccgtgtggctccc

SEQ ID NO: 6760 - DNA, 142 bp, Homo sapiens; identical to SEQ ID NO: 6386
  chr10:851108-851250
  hypo

SEQ ID NO: 6761 - DNA, 175 bp, Homo sapiens; identical to SEQ ID NO: 6387
  chr10:851504-851679
  hypo

SEQ ID NO: 6762 - DNA, 79 bp, Homo sapiens; identical to SEQ ID NO: 5731
  chr10:94449318-94449397
  binary

SEQ ID NO: 6763 - DNA, 82 bp, Homo sapiens
  chr10:98364552-98364634
  hypo
cgccttgtaataaggggccggaccctttgacacaaaacaaaatgcaaagtacacactcaaaagtataattttttttttcccc

SEQ ID NO: 6764 - DNA, 457 bp, Homo sapiens
  chr11:111169516-111169973
  hyper
cgagttggccgctccggacgtccgcgtaccccaggcccccgcccgccctcccacgtatccactgttgtgtcctgagacacgcggtgcggaccctgcgcgcccagaagctgctacggggggagctagaggctcacagtgagcctgggacgggggcagagcgcaccgactgcactgagccgagctgtggcggtccctgcgcggaccccgaggggcgcccgctgcccgcggagtccggagccgatcggggaacggggtggtggggctgcggtaggctggagcgcggagagggcgcggcgcctgggccctgcgggcggggcacgggattccctgggtccgggctaggaagagcgcaatctcctttcctggggagaccctaactcctggaacccggcttgagggggatccctgctgtccagctgcggtccccgcagtgaccaggcgaggcgctggcatcctg

SEQ ID NO: 6765 - DNA, 341 bp, Homo sapiens
  chr11:114112625-114112966
  hypo
ctacccttgctgctgcgatgtatttgatcaatgtctatcctttagctttagcttccagagctcgggaacgacgtcgattttgcccatcactggggccacatactgggtgctcagtgttgcatagcctgggcccactctggatttgcccctgagcatggggatttggaggtgtgagtcccgacactggctctcactccagatgggtaaagaatgcaccttgtattcccacctttctgaggcaccccctctcctgtctcccacaggcactgacatggccgtcttctgtctgctgtgtgggaagcgcttccaggcgcagagcgcactgcagcagcacatggagg

SEQ ID NO: 6766 - DNA, 199 bp, Homo sapiens
  chr11:114113052-114113251
  hypo
catacaggtaggtcagtccagctgatgggtggatctgggtctctgggagccagcgtctatatttacctccaaggacgtaaagtggaggtggtgggctgagtcagccttcagtccttctgctcaaggcttggacgtgcagaggctgcccgtcgtgcaggtaaatgtggacagttctcccagtcccctcctgtggaccgtc

SEQ ID NO: 6767 - DNA, 59 bp, Homo sapiens
  chr11:117188555-117188614
  hypo
cgtgagccaccgcgcccggccgatcattatctctactcttatcctacacggttcagacc

SEQ ID NO: 6768 - DNA, 48 bp, Homo sapiens
  chr11:120008024-120008072
  hypo
cggtctggcagaagagctccatcgtcttgccatgcacgggacacttgc

SEQ ID NO: 6769 - DNA, 151 bp, Homo sapiens
  chr11:120338518-120338669
  hypo
cggggtatatcaaactatgaatcatagaccaagtcatgctcactgtctgtttttgtaaataaagttttattggagcacagccgtgctcgtctgtttatgtactgtccctgattgcttttacattataacagcagagtcgagtagttttatc

SEQ ID NO: 6770 - DNA, 152 bp, Homo sapiens
  chr11:121023460-121023612
  hypo
cggcagacctcctggctcctgcctctccccgtgcctttcatctccctgagtaggtgagcaatggccatgagaaaaccctcctcggtgccttgtgatcgtgcgagtcttgacttgtctctcttgttccagctgtcacctgccctccaaacagc

SEQ ID NO: 6771 - DNA, 172 bp, Homo sapiens
  chr11:124071504-124071676
  hypo
cgtctagaaaaaaaaaaaaaatcactaagaccgtaccaggcagacacacaggcggctggacgtcgagaggcgcacaccgacaggcaccagcatgccagcaggccaccgaccggcagaagcagaacgacacagtttggcgggggcagttggaggaaagcccaggccactgagc

SEQ ID NO: 6772 - DNA, 683 bp, Homo sapiens
  chr11:1262498-1263181
  hypo
cgaaaagaccaccctatgggtgaccccgagcatccggtcgacggcggccctcacctcgcagactgggtccagctcaggccccgtgacggtcaccccctcggccccaggtaccaccacctgccagccccggtgtcagtggacagagtggtttgatgaggactaccccaagtctgaacaacttggaggggacgttgagtcctacgataagatcagggccgctggagggcacttatgccagcagcctaaggacatagagtgccaggccgagagcttccccaactggaccctggcacaggtggggcagaaggtgcactgtgacgtccacttcggcctggtgtgcaggaactgggagcaggagggcgtcttcaagatgtgctacaactacaggatccgggtcctctgctgcagtgacgaccactgcaggggacgtgccacaaccccgccaccgaccacagagctggagacggccaccaccaccaccacccaggccctgttctcaacgccgcagcctacgagtagcccggggctgaccagggctcccccggccagcaccacagcagtccccaccctctcagaaggactgacatcccccagatacacaagcacccttggtacagccaccacgggaggccccacgacgcctgcaggctccacagaacccactgtcccaggggtggccacat

SEQ ID NO: 6773 - DNA, 123 bp, Homo sapiens
  chr11:1263764-1263887
  hypo
ccccagtaccccagccaccagctccacggccacgccctcctcaactccggggacgacctggatcctcacaaagccgaccacaacagccactacgactgcgtccactggatccacggccacccc

SEQ ID NO: 6774 - DNA, 99 bp, Homo sapiens
  chr11:1275538-1275637
  hypo
cgtcctcactgtcaccatggtgcatgggaaggaggagggcctggtgagtccaggctgcgggtggcacagtgttggcccagtcccaaccgcacctgggca

SEQ ID NO: 6775 - DNA, 526 bp, Homo sapiens
  chr11:1275755-1276281
  hypo
aaatgcagccagctggagactccaggcccccagggaagatctgggctttggggtgggggatacacaggggggtctctgcacatggaggcagagccccaaagagaagccctgctccccgagcccacctggcactgcctcccagctcagggttcccctggattcccccagatcctgtttgaccaaattccggtgagcagcggtttcagcaagaacggcgtgcttgtgtctgtgctggggaccaccaccatgcgtgtggacattcctgccctgggcgtgagcgtcaccttcaatggccaagtcttccaggcccggctgccctacagcctcttccacaacaacaccgagggccagtgcggtgagtgggcggcgggtcctgccccggccagggctgctgctgggcctgacaacccagtgagcataggggaagcctggggaggggaatgagtgggggaggggggtgggggctgtgaaaggctccccagattccagccccgcggtgacgcccccactcccaggcacctgcacc

SEQ ID NO: 6776 - DNA, 161 bp, Homo sapiens; identical to SEQ ID NO: 5733
  chr11:133939437-133939598
  binary

SEQ ID NO: 6777 - DNA, 48 bp, Homo sapiens
  chr11:34535248-34535296
  hypo
aagaggaggctttcaaggcaagagaaggcaggcgctcccagcaccagc

SEQ ID NO: 6778 - DNA, 87 bp, Homo sapiens
  chr11:47208495-47208582
  hyper
cgtgccctaccgttccacagctgccctgctaatctggggcgccttctaaggcctgagacgaacacgcggtgggggtgggacaaaaag

SEQ ID NO: 6779 - DNA, 106 bp, Homo sapiens; identical to SEQ ID NO: 6390
  chr11:47359237-47359343
  hypo

SEQ ID NO: 6780 - DNA, 190 bp, Homo sapiens; identical to SEQ ID NO: 5918
  chr11:59333673-59333863
  hyper

SEQ ID NO: 6781 - DNA, 99 bp, Homo sapiens
  chr11:64310467-64310566
  hypo
cgggcggacagcggaggccccgggcccggggaggcggcagcggccgctcaagtgaacccgggtctggaagctccttacagcacgatgatgcccaagccc

SEQ ID NO: 6782 - DNA, 262 bp, Homo sapiens
  chr11:65582723-65582985
  binary
cgctttgggcaggtgcatagggaggactcaggaaagaggtgttctgccatggaccagtccaggtccaaaaagtctcgagaagcgcccgggagccaggagaaaagccgagagatgaaaggagatgcctgaggtgccgcagcccaggtctgagccgggctagaaaccgcgtgacaaaacaaagatgcgttcttagccgtgatggaactcccagattagcttggctttcttccttttgttttgttttgttttattcatctctgtc

SEQ ID NO: 6783 - DNA, 329 bp, Homo sapiens
  chr11:67078663-67078992
  hypo
cggacgcacgcatccacccagcccagctcaggggctggtgccggcacgggtttcacctgccggctgcctacgcaaaggcagagaaagcataggaggggaggagggcagggaggcctgggtctccagggagctgaggagggcttctgggggccagaaggaagctacaagcaggtagggttcaaggagcggggcagcagggctggggtgttgtcctccctcccgaggaagcgtggctgtggacagcttggcttttggcgtgcgtgccacaaacattccggccctcgcctcctcctggctctgtgcttggcacccctgccccagatcttccc

SEQ ID NO: 6784 - DNA, 606 bp, Homo sapiens
  chr11:68606653-68607259
  binary
cgatcaaagtgcagaagcagcccttggcccgcgcaggctccggtttccgcctcccgccgccgctgccaccgcccctgcgcctttagatttcgggcagcaagtttaattgctcgcttggaaagcgtcctcggaagggcaccgccagcaactgcggcttcgcgccccgccccttcccccaagccccgggcggcgtcacgtgacggctgagaaaagtaggggaaaggtcagcagcagccccgcccccaggctggcgcgtcccaggcgctcggatcctgttccacccgccgtgcccacagagaccttccggagcgagttggcgcgcgtccctgtggccaccccagcgacagcgggagaaatgcaacgcacctctccgtgggaaggtcgagccctgcggtgcccagctgtggggacagctcggtgctcagtgcttctgatgacagatgctgcatccaacgagccagaaacgcaggcaccgcgctcaagagcccagggcgcgtctaaaaggggctcactgtgaagcctcagtgaaaactgacggtgtttttatgaatgagcactcggggccagggttgggtaagggcaggccctcgttccagggctccccgg

SEQ ID NO: 6785 - DNA, 302 bp, Homo sapiens
  chr11:71169280-71169582
  hypo
cgctttcagtacggcacatctggctgcggcagtgggtcttatgctggctgctcattggaatcacctggaaggctttgagaaaacacctgagccccggcccccagacacgttcagactggactggcccacaggccctgcccctccccgctcacctgagttgtttctggagctcaccttctcactgtctctgcagcggctacggatgttgggatcattattacgagtcggacaccctcttgcactcgtttcaagtcctagcggcccttgtggagtctcccgtcactcaggacatcatctgcgac

SEQ ID NO: 6786 - DNA, 522 bp, Homo sapiens
  chr11:71192127-71192649
  hypo
cgtgctgtgaccttgggccccaaggtgctgtccgtccattctgtggttcagtgtccccattttaaaatgaggacgatgataatacccacgtcctgggtctgtcttcagaatcacatgtgtcccttctcacgaggtgcctaaagcagagacgggcgtcctgagagcccagcgttgactctggcactgcagcctcctggggcctgcttgggtgggttgttgggtgctgtgggcaggggccaccgcctccgggctccatgttctgattgccctgcagccttggacctgcctgctggctctgggattttttaagacgaagtcaacaggtaagacttccagtttctagtgagcccactttgcttgttctgctggttggtctggttttattctggggcagggtagggatttttttttttttttttagtgcaaacaacaaaaagcatttcatcactctgcctccatggggagcttagtctgtgctagccagaggcaaggtgggcacagtggctggtgggtcagctccac

SEQ ID NO: 6787 - DNA, 169 bp, Homo sapiens
  chr11:71192889-71193058
  hypo
tatgggtggagcttggctgatccatgggcatgctgcttctccgaggctctgctcacgctgtctgattggtccattccaggcagggtttttgctgcccttgagtggcggggtggacagcgcagccaccgcctgcctcatctactccatgtgctgccaggtctgcgaggcc

SEQ ID NO: 6788 - DNA, 835 bp, Homo sapiens
  chr11:71229615-71230450
  hypo
cgcccttgcccgctttacctgcttggcggcgcctcctgcggccagttcctcggagcatccacctgtgcagggcccgcgtcctcccctccccgcgccagcctgaagcccccgggcagcctcggtttctccttttcttctggatctccagggactgcgcggcacctggggtcctctggtggggaatgaatgagtgagtgaatgaatgaatgaggaacagggtggccatctgggtctcagtgtctgtctgggggcggggtggggggcgtcccctgatgggtccggcttgtcagcgccactcctgggggcttcccgtgggggtggcacagggcagggcccccccatctcagggctgcttcctgtggggagggtccccgagaagcggagcgtgggctggtttttagggggtaacccacgaaggttccgccagcccccggtcggttctgggaacccccgggcttgaggaacctgcccggcaccgccctggaacccgggcctgcagcctcctcggggcctcgtctccttcctcccagggaagctgtggggcagggacctggtggacggcgggtgggacccgactccctcccatcccctcacggtggggtcgcggctctgggggctcctggggccgctgccggaccctcagctctgtcgccggggggccgcagtctcggggcggcacagatggggcggctccaaggcttcagccacagacattggtttcctctgttgggggcgcggaggcccaaggtcagggagtctcagggtttgcttccttcccaggcccctcctgggctgggggcgggtgtctcctgcgccccctcgggccgccctctgc

SEQ ID NO: 6789 - DNA, 63 bp, Homo sapiens
  chr11:73073669-73073732
  hypo
cccagagctggtgccctttgacagtgactctgacgatgagtcttcgcccagcccctcggggac

SEQ ID NO: 6790 - DNA, 88 bp, Homo sapiens
  chr11:73491526-73491614
  hypo
cgagcgaaacaccatttcaaaaataaataaataaataaaaataaaaaataaactttgagtggatagcctcttggagatggggcaggtc

SEQ ID NO: 6791 - DNA, 218 bp, Homo sapiens
  chr11:75152263-75152481
  hypo
cggatgggacccccgcacaccacagcagggagaagagccacggtgcgttgactgtgtagaggttcacactcaggttccaggacgcgtagtccctgtggggcaggggagaggcaggtcagcatgcggaccctggcagctccaggcccagtgtcggggctggtaaagcacgtcctgttcacgacctcacagccatgcccggggcaaggaacattggctcc

SEQ ID NO: 6792 - DNA, 359 bp, Homo sapiens
  chr11:75152536-75152895
  hypo
ctttgaaccatgtgtgcctgattcctctgtgtgcccatccctctgcccgaccgtgtgtgtgtgtgtgtgtgtgtgtgttggggggtggtggtggcaggactgggagagactcagtcccaccctctcctggaggagcccagggcagggcaggcacctgagctcctggcgggacacctgagtgtagcgcaggttcagccgctggatgtggcctctccgcaggctggcgactgcctccttggagcctgatgtctgttggaagccgggagccaccttccgcaccaggggcctctgcctgctaggcagccacatgacctgcaggcagaagagaggcagcctcagacttctcttctgcacgatgc

SEQ ID NO: 6793 - DNA, 136 bp, Homo sapiens
  chr11:76371492-76371628
  hypo
cgcccagttccagtgtctccagggcattgtggcttaagtcaaggagcatcaggcagggcagggagcctaagcgccgggcctcaaaggtccgcaagcagtttctgctgaggttcaggaagcacagggaggtcaggtg

SEQ ID NO: 6794 - DNA, 71 bp, Homo sapiens
  chr11:76372236-76372307
  hypo
tcccagacaggtccagggaggtcacgcgtggcagggggcccaggccaccagcactcagcgcagtggccatc

SEQ ID NO: 6795 - DNA, 94 bp, Homo sapiens
  chr11:829438-829532
  hyper
cgacgtgcagggcacggcgggctctctggatgaggaggaggaagaggaggagcgattccacactgtgctggagcagctgggggtggccccggtc

SEQ ID NO: 6796 - DNA, 250 bp, Homo sapiens
  chr11:85989397-85989647
  hypo
cgttatgtgtggtctttaacctgttgtcatgttttttccctagatgtacaacactgactcatcataaatgtggtgctgctattcgacaaaccagttttagcagggatagcagcattcttatagctgtttgtgatgatgccagtatttggcgctgggatcgacttcgataaaatacttttgcctaatcaaaattagagtgtgtttgttgtctgtgtaaaatagaattaatgtatcttgctagtaagggcac

SEQ ID NO: 6797 - DNA, 122 bp, Homo sapiens
  chr11:9405271-9405393
  hypo
cgcgcctggcaggaaggtgtattttaatagggattatgcttttactctgcattaagaggtgatttatatgaagtcccaactaaaatttggatactcaataaaaagccatgatttcagtattt

SEQ ID NO: 6798 - DNA, 117 bp, Homo sapiens
  chr11:9552484-9552601
  hypo
cgcccgcccggctgcggtcttgatgtctatctttgtgtgtgttttgtaaatgaagtctcatgcatcaacaaagcatgtgctgggggcttagcgcctgagcttacacacagctccacc

SEQ ID NO: 6799 - DNA, 311 bp, Homo sapiens
  chr11:9554670-9554981
  hypo
cgtgcccagccaccattctattttctgtctctataaatttgactgttgtaggcgcctcatattatatttgtctttttgtgtctggctttatgtgtacctttaaaagcaagtttttcctgtcttttgaccaagaggttgcgtattttcatttttgcacggagccgcacagattatgtagcctgtcctgctgaggcgtgcgcttctattagcccttctgtttttgctgcagatgtgtgacctgtgttttgggaatatattatctcttgttagattatgggctcctttaagacagctggggatttaaatttccc

SEQ ID NO: 6800 - DNA, 686 bp, Homo sapiens
  chr12:104682348-104683034
  hyper
cgtgtattaagcttcttttttgaagcttttctgaattcgggatttaccgggaaagtaggacgtttaattttagcggagtagtgcaatgatttaaccctgactagaactctgacgtttacagctagccttgaggccatgttttcagccagtgtgcggatttgccggggtcagactccaagcttgattgtgagttctagcctttgtcagaaatgcagcaagtcatgctaacttgcaagggagtcaacagagggcacgcggtgcctgcggggccgggacggaagccccgcccccggcgcagttcccgcctgttagcgggggagaagcaccttacacgctccgctctgcttttgtgccacacagaggacggtcgggccctggaaggaacgctctcggaattggccgcggaaaccgatctgcccgttgtgtttgtgaaacagagaaagataggcggccatggtccaaccttgaaggtaggagagagtaacgtatctttttaaacgggggatgagctcgttgagctcagcgtggtcacagcctgccttttaaagccagcgtggatgtgaccctccaaacgggacgcagcgctgggaaatgacgaaaaacgctcgtgggctagcgcatgtgttaatcgaagttgatgagacgttggacaaatttcacatctcgggaaacttgaaatttctaac

SEQ ID NO: 6801 - DNA, 149 bp, Homo sapiens
  chr12:110019861-110020010
  hypo
cggggccgtctccacggagggcgtgtcacctctctgcgttcctattgaccacgtgagtcagtgaggcctgtccagacaggcttgaccacagaccatttctatcattaggagaatgttccttgagaaaccacccagtgcgcagaggttac

SEQ ID NO: 6802 - DNA, 114 bp, Homo sapiens
  chr12:110915439-110915553
  hypo
cgtgagtcaacgcgcccagtcttgtcatccattcttgactaaatccattatgattaagatggctagaaatatgtgctttttctttttttttgagacagagtctccctctgtcgc

SEQ ID NO: 6803 - DNA, 61 bp, Homo sapiens; identical to SEQ ID NO: 6396
  chr12:110983646-110983707
  hypo

SEQ ID NO: 6804 - DNA, 136 bp, Homo sapiens; identical to SEQ ID NO: 6397
  chr12:110983736-110983872
  hypo

SEQ ID NO: 6805 - DNA, 508 bp, Homo sapiens
  chr12:112204412-112204920
  hyper
gagcatcagccgggaaggtcagggtcgccctggctcgggcctgttcacattggggtcaaaggcacacattgggggctcaaccaaggcgagctgcgttcgcggggccgggtctttccgcacaggcggagggcggtggcgggcgcggaggcgtcgcgcgagccagggggcagccacgggccgggggtacctagcgccacccgcttcgcttgcatcagctgcgcgccccatcccgaggaatggtagaggcagccccgcccccggcccgcccccgcctttccattggctgccgcgcggggcggggagcggggtcggctcagtggccctgagaccctagctctgctctcggtccgctcgctgtccgctagcccgctgcgatgttgcgcgctgccgcccgcttcgggccccgcctgggccgccgcctcttgtcagccgccgccacccaggccgtgcctgcccccaaccagcagcccgaggtcttctgcaaccaggtgagcccaccggccgggct

SEQ ID NO: 6806 - DNA, 186 bp, Homo sapiens
  chr12:112204992-112205178
  hyper
actcatctggggctcgaggggtttgcagaggctgacctggaagcacatctgccccctcctctcctgcaagcattttagccccttcgccgcctctgacagtccccgtcccatttccccgtgacttgggccccctctccgtcttcgcccagcctcggtctgttttccagggccaactctcggggttcc

SEQ ID NO: 6807 - DNA, 292 bp, Homo sapiens; identical to SEQ ID NO: 6398
  chr12:113725566-113725858
  hypo

SEQ ID NO: 6808 - DNA, 81 bp, Homo sapiens
  chr12:121328606-121328687
  hypo
cggagcgaaaagtcaacaggccttattatttgatgagaatcaagaatgtctccgaggtatctagctgtgaagccgaaaccc

SEQ ID NO: 6809 - DNA, 49 bp, Homo sapiens
  chr12:121622576-121622625
  hypo
agtacagtggcttcaagagtccttactgaagccaggcaccgtggctcac

SEQ ID NO: 6810 - DNA, 60 bp, Homo sapiens
  chr12:122285108-122285168
  hypo
tttttcaggtacctgtagggtgggcggtggaacacatatgctctgagcgcctccagggac

SEQ ID NO: 6811 - DNA, 303 bp, Homo sapiens
  chr12:123325625-123325928
  hypo
cggctaacctgagacgccttggctgctctgttggcaatgcccttacccgccccctccccgcccaacttggtaatctgcgatgctaacttgaatatcacctcctctgtgcagccacccgctgccgtcctcctgcccaagcctctctgtgctgcccagtcctcatgacattatttgcgctgcttccacatctgccctgacacgctgtggctggcccagcagagcgggaggaagcagacagacatggggtgggcgcatgtgtagaccaggctcgcctgagaagtgggagtgtgtcatctccttgcc

SEQ ID NO: 6812 - DNA, 124 bp, Homo sapiens
  chr12:125062713-125062837
  hypo
cggggccgagacaagcctgggcagggagaagggaagggagcccgtctgtgcctgtagcctgggcagggagaagggaagggagcccgtctgtgcctggaaaccaatttgctctggcagcgctgtg

SEQ ID NO: 6813 - DNA, 79 bp, Homo sapiens
  chr12:125062887-125062966
  hypo
aaaggcacacactgcagtcttggagtgcatcctgctcttagggcctctgggggccaagtcaagccgatgaagggtgtgc

SEQ ID NO: 6814 - DNA, 484 bp, Homo sapiens
  chr12:130184247-130184731
  hypo
cggctctacttcggtgagcgataacacagcttttctggtcaaacagcttctggaaaacaccacctgatcgacgggcgggtacagacagacattgggaaacgacttacctcaacgtgaagcgatcttcagtggaatttctggagatggaaacaggaaaagtcagcacgtctcctttcctcacggtctttggtatatagtggatggccacgctgttgtccagacgcagttctctcagggagggtttcctgtgtgtctgataaaggaagatgctcccgatcctctgcaaggggggcccggactcatcgatgtcactgtggcctgtccggatcccattgcttctcctcgcgtcttccctgacgcagtcccctctctcaccccctgggtgcacggtgtagtagagctccacgggggtcccctccggctggtccacggacttcctcctcccggcaaccaccgtgggggggctgaaccagctggacaggag

SEQ ID NO: 6815 - DNA, 91 bp, Homo sapiens
  chr12:130184760-130184851
  hypo
ccccctgcagccggcagctgccccgcacctctcgggtctctcggaaagcaaagaccctcaggcacggcagcttctccccggcgctgcggtc

SEQ ID NO: 6816 - DNA, 73 bp, Homo sapiens
  chr12:130663582-130663655
  hypo
cgaaagagcgaaactccacctcaaaaaaaaaaaatggtccagcgatgctgtcaagactggagtttttgtgtac

SEQ ID NO: 6817 - DNA, 394 bp, Homo sapiens
  chr12:131265535-131265929
  hypo
cggagcgtccaccgatccccaggacaggttgtggctcagggaggcggcacccacaacaggcttcccaggccgcacctccaggccccgatctctgctctcacctcctgggctcaccctcccgggggaaggaggggctggacatggagcctgtggctgctcggtgtgggtggtgacactcttggtgacgtccctcggtcgtcaggactcatttccccggtgttggatgcagctcgaggacagcagaggggcccagcccataaggatgggaaggtctaactgtagatgctgacaccgaatgccggagacgcggatgcttctaccccagtggcaccaaggctgctgtctgcggaatcccaaaggtgacagctttctctaccacgggccgccccagccc

SEQ ID NO: 6818 - DNA, 237 bp, Homo sapiens
  chr12:131271740-131271977
  hypo
cggccacccgcgcccagggcagggatctacacttgagtgtttccgcgtctgggtcctaattcctagtgggagcacggaaggacacagggaatgttgggagctgcatgggccatgtcttggtcccatgggacctggccctacttgacccgaggccacaccagcttgtagacatgagcttttgggggggctttgagtcctaagagacccagctgcccacgccacacagggggaaaggaa

SEQ ID NO: 6819 - DNA, 299 bp, Homo sapiens
  chr12:131272032-131272331
  hypo
gccgtcacagagctccagtctcccgccacttcagtgcaaccctcgctgtctgcccactcctccggacatgacgcttaggaccttaccttgctctccagctcagagcccggcccccatggccgggccagacctgccccggcctctcccctccgcctgagccacgccccggcttcctgctcaccaggcctgcgttagcatctgcagctgtgcttcttcaggccgccgcaacaccagccttcccgcactgctccaagacactgagcctggtgcatgctcaggaaattcaacaatttcaaaac

SEQ ID NO: 6820 - DNA, 212 bp, Homo sapiens
  chr12:131272367-131272579
  hypo
tctactcacagggcaacctgctttagcaaactcaacgacacattaaaaagtacaatttgcaaaggagagctaccacctggctgggtgttctgcgcctagagactgggccccgggagagcgctccacagtgaacttgcgaaggatggaatttacataaagaaggcaccgtctttagtcctggaaaggcaccctgggattctctacctccgtcc

SEQ ID NO: 6821 - DNA, 662 bp, Homo sapiens
  chr12:131272765-131273427
  hypo
cgccttgaatttctcttactgctcaaatggaaaacaatgaaacagggctgtccacatcacagcctgccacctgccagtcatttagagcctggcgcgcatttccatagctcctctgacgccaggacaatcagacccgtctccggagggctcctgcctctggatgtctaaatgttcttgccttaaacccggtgtgacgctccacccctcccacaccgcacacatacgaattttaacaaaatcttcaaagcagaacttaacaaaaggttgcgtggtaccaggtccatttggttccatgtgaaaccaactaggaagatccgcattaggctcttcctcagctgcgccgagggcctggtttctattcatttgagaagctgtgtgcgcccctgtatggtctgttctttcctttagggctcgcttttaacagtgagtgttgttgtggcaactaaaataaggagccggccagtgctcctagggaggaaaacctcggcaactccgcaggtgcaggcaccggccacagacccacgcctggggcactcgcgtttgcattagcagagcgcaggagtcagggagcgcgggcaggggcgggaggaggggtctgcgcactggccacggtgtgggggacccagccctaccccttcccggggctgagtgggactcgccac

SEQ ID NO: 6822 - DNA, 322 bp, Homo sapiens
  chr12:131288908-131289230
  hypo
cgtgatgaccgatgctcgactcgtgcatgccaagctgttctgcaatgaggtctgaagacgatgcctccggcacaggcaacctctcatcaagatgctcatccagcctgaccagtggtcccaagtgttgtcaagcaagtcagaagacagggccggctgcacacgttctaccctgaaagcctgctgtataaagaacactttctgagggcaggcggctgtggggtccaccgtctctgtctctcgggggcttctgttcgtacgtccctagccaatgtttccttcgagaaactggatttgttagcctctttctttggcgtctcagctc

SEQ ID NO: 6823 - DNA, 129 bp, Homo sapiens
  chr12:132222124-132222253
  hypo
taacatctttcccccgtagagacttgcatacccagtactgctgtgtctcgtgggaggctgctgggtcactaagcttttctggctttcatacgctgggtatttaataatcaccttaggatatactcagtc

SEQ ID NO: 6824 - DNA, 425 bp, Homo sapiens
  chr12:132665953-132666378
  hypo
cgcacagtacacacacccaacacaactcaaaccacacacacactcagtacacacacccaacacaactcacacagcacacacacacacactcggtacacacacccagcacgcacacatagtacacacacccagcacaactcacactcagtacacacacccagcacatgtacccacccagcacacgttcactcgcaccctgcacagcccagcgcgcacacacccagcagacagcacatgctctcacatgctggcatcagccgtcagcctcagctgctggagggtgtggtggaggcgggcggtgagcgctgggtgctggggtccacgtccttccaagcccctgcatagcggccgccttggctggcgatgactggagggggtgaggggtgaggccaccagcacaggtgtgtcccttcactgtttccacc

SEQ ID NO: 6825 - DNA, 86 bp, Homo sapiens
  chr12:132666502-132666588
  hypo
tgcaccctccaggcctgggggccccggggctgaccttgaccttcccacccgcccaggtgtggccgggacagcaccgcagttgtggc

SEQ ID NO: 6826 - DNA, 479 bp, Homo sapiens
  chr12:133286733-133287212
  binary
cgtccagcaatgggtaagcggtggggtcggtgcacgcaggcgtccagcaatgggtaagcggtggggtcggtccacccagggagcgctggtccccctggaaggaaacccaggctctaacgcggtccctctgaggaccctgctaggcgaaacgcgccggccatagaaagactgtcccgcaggagagggcggtgttcggcccggggtttgaggggtcgggaccaggaggagggacagcccggccgaacctgaacgcacttcaggccgcttgaacagcacacgcaggaactgcgccgacggaaaactttacttcgtgttccgccaccaaaaaaatatcgtttaaacaaacctgcggcagcttcccagctcccttaaaccaggatcccaagttctccgcgtctccgcccctgcacccagcctccggcctcggcaggcgcttccggtgcggaaccttctggaaagtaccgcgccgccctcccggc

SEQ ID NO: 6827 - DNA, 358 bp, Homo sapiens
  chr12:133435596-133435954
  hypo
cgggacgaagaacctgcagtgccatgttccgtgagccaagggtgaacacggtcgcacctcacgcagtcgtgcagcaggtcctggcagatgatgcatgtcagcgtctcctccatcttgtctggcttcccagccgctgctctgacgtcctcgtggacggtttgggcatttctacgcggttgtgcgaccaacaactgcccgttcaggtcaaggtccccatctacaggagaaagggatgtgttctgtcgtaaccaagaaggaaatacacgcaggttcaggtcaaggtccccgtccacaggagaaagggatgtgttctaactgtcgtaaccgagaaggaaatacatgcagtcttttttttttc

SEQ ID NO: 6828 - DNA, 542 bp, Homo sapiens
  chr12:1739048-1739590
  hyper
cgggctgggggccggctcacttccgagctggctctgcatgacaaaggggaaggagcaagtgtcttctttgatctgccccctgccggccccacacacctgcctgttggtgcccccgccccagccgaggcttcgagaaggaaaatcaaaagggggcttggggaagggctgtgtcccagctctcctggaccctgctcgggccactgtcctctcctggcggccccaggacaaaaatacttcccgggctgatgacccgaagcacccgccgccccctcccggggagcctggggacgccgacgcgcgagagtggcgcagtgagccggggcgcgcggggctgcgctcgtcaggtccggggccccggggaggccgctgggggcgcgggtcacgcccagacgggggccccggaggaccgcgggggagccgcaggggccgtgtgtcccgaggcgcaggctcgctctagcagcactgacctgctgcgggtcccagggcctggggacaggggctctcgggggcggatagaggaacaggcgtgggttacagcaggc

SEQ ID NO: 6829 - DNA, 57 bp, Homo sapiens
  chr12:1739775-1739832
  hyper
ccgcctagggaggcaccacctcagccgccagagctttccgggcgggcggttcgcggc

SEQ ID NO: 6830 - DNA, 454 bp, Homo sapiens
  chr12:1943616-1944070
  hypo
cggggctgagccggagccggagcccagcacagcctgcccacagaagcagaggcaccggccggcgagcgtgaggcgagccatgggcacggtgatcattgcaggggtcgtgtgcggcgtcgtctgcatcatgatggtggtggccgctgcctatggctgcatctacgcctccctcatggccaagtaccaccgggagctcaaaaagcgccagcccctgatgggggaccccgagggcgagcacgaggaccagaagcagatctcttctgtggcctgagcgcccatccccacccggccaggtaggaagggcggggagagcacacggcattgctcagccacagctcccaccttgacccggcgctggccactgcctccccgagtccaccctcctccccgccctccagcagacaagccacaccgggttctctccctgcactttcgaggctccctgaaagccacc

SEQ ID NO: 6831 - DNA, 62 bp, Homo sapiens
  chr12:27742262-27742324
  hypo
cgtgcatcctcttgagccgtgaattttctggtctcaaagtcccaggctcaagcgatccttgc

SEQ ID NO: 6832 - DNA, 84 bp, Homo sapiens
  chr12:29373882-29373966
  hypo
cgattcttcccttggggcaggctgtccttatccacattgggctgccagcgcttgggaggggctactggcgcagtgtgtttactg

SEQ ID NO: 6833 - DNA, 37 bp, Homo sapiens
  chr12:32831540-32831577
  hypo
actgctcacgcctgtaatcccaacactttgggaggcc

SEQ ID NO: 6834 - DNA, 235 bp, Homo sapiens
  chr12:417402-417637
  hypo
cggtacaaagatggcatgccttgaaatcaagcaacctgggtacaaagcctggctcttgtacttttagactgttaatatggggtacaagtttcagaacgtccgttttctgaaaaatgagaatactaccaaccgtattttgctgttttacggattaaataagataacatatgaaagtgcctaacctggtaccttgcacaaggtaaacactcttaaagtattagtttcctatcacctc

SEQ ID NO: 6835 - DNA, 86 bp, Homo sapiens; identical to SEQ ID NO: 5742
  chr12:4377809-4377895
  binary

SEQ ID NO: 6836 - DNA, 245 bp, Homo sapiens; identical to SEQ ID NO: 5743
  chr12:4378558-4378803
  binary

SEQ ID NO: 6837 - DNA, 202 bp, Homo sapiens
  chr12:4381232-4381434
  hyper
cggtaacaatcagcgcgcagtagcaggagccccagagctattggctatgcaaatagagggaggggagacggcgccccaaactcttcctcacccttttaaagcgatatcccctcctttcccccccaccaccccttccgccccaccctcgtttaaagaggctggctccggggcctgagttaatcgcttgcacctctagtttatt

SEQ ID NO: 6838 - DNA, 51 bp, Homo sapiens
  chr12:4382915-4382966
  hyper
cgtcaccgcttcagagcggagaagagcgagcaggggagagcgagaccagtt

SEQ ID NO: 6839 - DNA, 210 bp, Homo sapiens
  chr12:4382999-4383209
  hyper
cgaggctctgctcgcccaccacccaatcctcgcctcccttctgctccaccttctctctctgccctcacctctcccccgaaaaccccctatttagccaaaggaaggaggtcaggggaacgctctcccctccccttccaaaaaacaaaaacagaaaaacctttttccaggccggggaaagcaggagggagaggggccgccgggctggccatg

SEQ ID NO: 6840 - DNA, 155 bp, Homo sapiens
  chr12:4384059-4384214
  hyper
ttgctttgcaaactccctttggaaaggctgggaaacgtcgcccgcttaccctcgcaccccattatcccggccaccccacttctaatcgtgccctctcccccaccccccacctcacgaagattacttacagtttggttttccagcttcctcggtgc

SEQ ID NO: 6841 - DNA, 180 bp, Homo sapiens
  chr12:50037818-50037998
  hypo
cgctggtcaagcttccacggcccttagtgcaggctaagggtgaactgtgcctttgctccaacagacaggctgggacacgtcagaaagtgagctgagtgagggtgagctggagaggcggcggcggacactcctacagcagctggatgatcaccagtgacccaatgagctgttctctgcctc

SEQ ID NO: 6842 - DNA, 37 bp, Homo sapiens
  chr12:51421646-51421683
  hypo
gaaaaatccaaataaagtgcgaagtaaaaacaaactc

SEQ ID NO: 6843 - DNA, 54 bp, Homo sapiens
  chr12:52401605-52401659
  hyper
cgagggccactgctccctggacttctgtcggaaccggacgcagtgggaggggtc

SEQ ID NO: 6844 - DNA, 270 bp, Homo sapiens
  chr12:53085061-53085331
  hyper
agccgctgccataaccgcctccactcctgcctcgtgccccgcctccgcggtagcttcttccgccgccatagcccccaccgctgccgccgccgtagcctcctgagccgtagctgccgccgcctcccgcgccgccgttgacgctcacctggctgttctgcacggctgtgggtaggggacagtgcacacggggtcagagggaccgggcaaggcccccacctgcacccgcccctgcacctgcagcctcctccatcctcgatcacccgtggcatc

SEQ ID NO: 6845 - DNA, 725 bp, Homo sapiens
  chr12:53613775-53614500
  hyper
cggcgaaacaggagccgccggtggctctgcgcagcaagccggccccgggcccggccgccccgtacagccgtcgcggacccggggcaaacgtttccatacagtcgtacatcgcgacccggcttgaagggaaactgggtgctggaaacaccaaggacccgcagccgattccccctcctcccccggcggcgccccgctccagcagggggggagggggagggctagcatagggcgctgggctgcatgcgggtaaggggtgggcggggaagaggggggatccccagcaggggaaagggactgggcggggcgcgaagctggggctgccgctttagcctccgtccagctcttatctgggtgcttcggcagctagcactggggagaccttttttaaaagcgaagcctggaggggtggggggtggggcttggagagcgaagggggccgggcaccgagatgagcaaagctgagagtggagcgcacacatacacatacgtacactcgctccgcggcgcgcgcgcttgcttagacacacatccgtgcatgcatttatcttatcaggcaccaagaatttgcaaatatgcaagagtgaacatacatgtgagcacgcatataaaatcataggtgcacacacgtttgtgcaaacacaccttgctcgggagaatgcttgcaggcatactctccacagctcataggctttgcatgcatttgcactgaggcgcgtgcccaggtc

SEQ ID NO: 6846 - DNA, 156 bp, Homo sapiens
  chr12:54338511-54338667
  hyper
cgttttgcttttttaaacattgcattaaaatatcgtcttgattactgagtttttggcgccccctcccttaaacttcgagcccagtggcctcatcatagttgtggtcttgctaaaataacagaaatgaaaagcattagggagcttcactatgcagtg

SEQ ID NO: 6847 - DNA, 184 bp, Homo sapiens; identical to SEQ ID NO: 5933
  chr12:63026256-63026440
  hyper

SEQ ID NO: 6848 - DNA, 112 bp, Homo sapiens
  chr12:69999239-69999351
  hypo
cgaataatagaagtcaacaaaatactctgtacaaaaccctttataaaagtctgctgtgtgccgtattagcatattagatcaatagaagatattaagagaacctttttaaaaa

SEQ ID NO: 6849 - DNA, 255 bp, Homo sapiens
  chr12:79842637-79842892
  hypo
tatagtcgggccttatctctagagctagatgattcatattcatttcatggcttctttcagaaagtgcaggtggtggtaactgttttggactatgacaagattggcaagaacgatgccatcggcaaagtctttgtgggctacaacagcaccggcgcggagctgcgacactggtcagacatgctggccaaccccaggcgacctattgcccagtggcacaccctgcaggtagaggaggaagttgatgccatgctggcc

SEQ ID NO: 6850 - DNA, 40 bp, Homo sapiens
  chr12:90313473-90313513
  hypo
cggtgagaggtactgggcgatgaggaagtacagctccaac

SEQ ID NO: 6851 - DNA, 219 bp, Homo sapiens
  chr13:101194483-101194702
  hypo
cgggtgcacaggagaagcagagcagccgctgacccccccagcaagaagacgggtagggtttgtttcatgggacaagatcgtccttcatgacgctgtggaaacgttggggagagcacggtttgtgccctaggacgctggccttactcttaacagatccagtccacgaaagtaaatctaaaaagcgtgttccagcctgccacgctgtcatccctcgtgcac

SEQ ID NO: 6852 - DNA, 442 bp, Homo sapiens
  chr13:113098840-113099282
  hypo
cgggggtctgggaccgtgcctcaccacgggatctgtgtacacagcgatgcacccagcgtacgcgggcccttccctctgagccctcggcccctcatctgcaggatgggtgagccctggagaagcgggcagaagcagaggaggcagcgaacgcagagcatgtggcctgtgactgagcctagaaagtccgctcggcaacagaggctgcaatccagaaagccccctcggtgacagaggctacaatctagaaagctcgctcagcgacagaggctaccacctagaaagcctgctcggcgacagacactacaatctagacagcccatttggcgacagtggctacaacccagacagcccgctcagcaacagtgtctatgatctagaaagctccctcggcaacagcagctgtcatctagaaagcccgctcagcgacagaggccacaatcta

SEQ ID NO: 6853 - DNA, 110 bp, Homo sapiens
  chr13:113099323-113099433
  hypo
tctcagtgacagtggctatgatcgctcgcaactctggcccctggctctgttggtcaagcctgccacagcccggaagcctctgcagcctccctgttgctgctgaaaaggac

SEQ ID NO: 6854 - DNA, 191 bp, Homo sapiens
  chr13:113255726-113255917
  hypo
cgcccgggcttgagatgagtgtggattcattctctcggtagcgttaacagcgcttcacagttccccgcggctctggccagggctgctgtgaggactggatgaggtaacgagaagtgtgtgctgagacatctgtgttcgcccaggtggcctgtgacatctggaatgtcgggttctgaggtcagatcactctc

SEQ ID NO: 6855 - DNA, 258 bp, Homo sapiens
  chr13:113554079-113554337
  hypo
cggagggatcgctgcatcccttcctccaccatgtcagtgtgacgggccgcgcgtgccatctgcagccttcactgggtaaaagtgaaggtccctcacctggatcttttccaccgtatcttgagatcaagtggttaggaatgcttgcagggtcttgcctcatagtggagagaaacagcggaacagccccttgggttggtttctggatggggaggatgtagccctcatgcctggtgtctacagagtccagcttggggacgc

SEQ ID NO: 6856 - DNA, 52 bp, Homo sapiens
  chr13:113984308-113984360
  hypo
cgggtgcgtgcatgggagcccaggtgcgtacatggaaacccaggtgcctgca

SEQ ID NO: 6857 - DNA, 86 bp, Homo sapiens
  chr13:113984409-113984495
  hypo
gggtgtgtgcatggaaacccgggtgtgtgcatggaaacccaggagtgtgcatggaaactcaggtgcgtgcatgggagcccaggtgc

SEQ ID NO: 6858 - DNA, 45 bp, Homo sapiens
  chr13:113985425-113985470
  hypo
cgggtgtgtgcacgaaagcctaggtgtgtgcatgggaacccgggt

SEQ ID NO: 6859 - DNA, 39 bp, Homo sapiens
  chr13:114188365-114188404
  hypo
cgtggaagttctccgaatcctggttttgattggtcagat

SEQ ID NO: 6860 - DNA, 218 bp, Homo sapiens
  chr13:114537027-114537245
  hypo
cggtgtgacaggtcggtgtgacaggcaccagtgtgacaggtaggtcatgctgtgataggccccggtgtgacaggtcggtgtgacaggcaccagtgtgacaggccccggtgtgacaggtaggtcatgctgtgacaggcaccggtgtgacaggccccggtgtgacaggtcggtgtgacaggcaccggtgtgacaggtcggtcacgttggctccctggcac

SEQ ID NO: 6861 - DNA, 139 bp, Homo sapiens
  chr13:114748186-114748325
  hypo
cgaacctcgaaagtggaacagggaggccgcctcccatggctgcctggatggcaggcacagtgggagagtaatgctctgaacctcccaatgtgatgaagccgaaagccgaggcggggccagcaggcctcccgggcacaga

SEQ ID NO: 6862 - DNA, 46 bp, Homo sapiens
  chr13:114776257-114776303
  hypo
cgtggggaggagggggccgcgaggggagtagggggctgcgtgacga

SEQ ID NO: 6863 - DNA, 38 bp, Homo sapiens
  chr13:114776448-114776486
  binary
gttcactttaggaggggagaggtgagcgggacggggac

SEQ ID NO: 6864 - DNA, 223 bp, Homo sapiens
  chr13:114776788-114777011
  binary
cgaggggacgaaatgcaggagtcacctcagagctgctgtggcttgtgcatgagctacggagaaacaggggtagcgacgcagatgggactggagggggtgggcgtcccacagtctcaggagctgctgagaccatcccgcaggcaacatccgacggcaccgcggtgacccactctctcggcccagcgtgcagggtgcatctcaaagtcgaaagcatcaggtgggg

SEQ ID NO: 6865 - DNA, 261 bp, Homo sapiens
  chr13:20392445-20392706
  hypo
atcctgtagaccgtgacctcctcacacagcgccaggacgaggatcgcggtgagccagcaggtgactgcgatcctggagctggtcgcagcaggccatcctgcacgcggtggaggcgccccctgcaggccgcagcgcatccccagcttctggacgcactgtgagcggttatgcagcagcacgctcatatgagatgccccgcagggtgctatgcaggcccacgtccccacaaagcccatggcaggcgcccgggtgccggagcac

SEQ ID NO: 6866 - DNA, 506 bp, Homo sapiens; identical to SEQ ID NO: 6408
  chr13:20979799-20980305
  hypo

SEQ ID NO: 6867 - DNA, 142 bp, Homo sapiens
  chr13:22243864-22244006
  binary
gttgcacgccccgcagtgtggagctgcgctcaagtctcggcaactttcaccatcttgacccgagagtcgggccgtttctaagacaatgtgaacaaagaggagcagggggagggaaggggggccccgcgggagggctgtgggc

SEQ ID NO: 6868 - DNA, 306 bp, Homo sapiens; identical to SEQ ID NO: 5936
  chr13:28491488-28491794
  hyper

SEQ ID NO: 6869 - DNA, 38 bp, Homo sapiens
  chr13:28527202-28527240
  hyper
cgcggcttctgtgtggcagctactgagtgcacgctcga

SEQ ID NO: 6870 - DNA, 462 bp, Homo sapiens
  chr13:28527384-28527846
  hyper
gagtggagtgggtggaggtgagaggggaagatgaggtgttggagaagcccggcgcacggggcctctattaatattaacttttattaagagttggcctttccccggggcttcacaaagcaggaagtcaagggcagtggaacagggaagggaactggcaggaagagaagaccttgagtaaattatttagctgtgacacgagattaagagtgaccccaccctcctccctgccccacacaccataaagtgggcccaggttggggagcagcgctccagctgccactaatcatggaagcccagaggcgaaatcagcttcccggggacccagaaaattgctggagtctggcgaggggcaaatcaggaagtgtctttgtcggagatgggacggaacccggcttcggggcgcaaccgggctctgggggagaccgcgtttgtccaggtggcaggccgcgccttctgatggct

SEQ ID NO: 6871 - DNA, 52 bp, Homo sapiens
  chr13:30910073-30910125
  hypo
cgttatcatcatggtagttcgactgatgtactaagatatggatgttcaggtc

SEQ ID NO: 6872 - DNA, 146 bp, Homo sapiens
  chr13:45926346-45926492
  hypo
gggaaggtggagcagtcatgactcaggcttcgggagcctcaggctcgcagctacaggcttatacacactcacatcaaatgctaatggggcccgagtcagaaagaaattagccagactaagaaaaacaagactttggaaatataaac

SEQ ID NO: 6873 - DNA, 82 bp, Homo sapiens
  chr13:52493838-52493920
  hypo
cgtctcggctgtgtcccgagcaaacggtgccatggtgacctgcctttgcaggtctcctgctgcgcacctgcgtgagcatgtc

SEQ ID NO: 6874 - DNA, 216 bp, Homo sapiens
  chr13:74269514-74269730
  hypo
cgtgggatggtgatgcccttttgtgttaacactgtgaaggggattcagccctgctgaattgggtgccgctaagagatccagctcttacgctcagctggacaggtagcattcctcacaccaacatatgcctccggcggtgcagggccaaatgatctgaccgggaaaagctgcgatcacagtccgcgcacttgaatggcttcactcccgtatgtttgc

SEQ ID NO: 6875 - DNA, 148 bp, Homo sapiens
  chr13:95201113-95201261
  hyper
cgtctagacccgtggcttgtttaaacacccgctgctaggccccactgccagagctgcctatccagggccgagaatgtgcatttctaagtagttctcaggcggtgctgatgctgcggatctggggactgtactttgagaaccaccggtg

SEQ ID NO: 6876 - DNA, 288 bp, Homo sapiens
  chr13:95201339-95201627
  binary
ctggtggcgccaccccagggccagacccagggccggcctcggtgcgcctctagccagaaataaccagcactgggttccgctcaccggcaacgccaggtgggggccatctgaccactcaacagttttgctttttcttcaaattcggatacttagaaggaatgcgatgaaattgggatgaaggtgttttgctggccccgtggacagaccagacctcctcccatcggagcctcgggtctcacaccagccccccaggcggcgcgcggccccgtctcgccaccgcggcccggg

SEQ ID NO: 6877 - DNA, 230 bp, Homo sapiens
  chr13:95201662-95201892
  binary
gtcccagcaccaggctccgtggcgcgcacgcgcggcagcttcttctagccccgccaggagacggcccagaagggctatgcggcgcggcctcgctcctgggggtggttaggaacgactgtttcatttcctccttcacccttcaaatctcagtttttgcttgggcttgaaggaatgggccagggtatcgtggacggagagtcttacaaaatttgagtttttgaggtcagaat

SEQ ID NO: 6878 - DNA, 73 bp, Homo sapiens
  chr13:96409644-96409717
  hypo
ttgcttcccggtaagtttttgggacccaggtcttctgagtctagatctgttgttcatgctcatggaccatatc

SEQ ID NO: 6879 - DNA, 97 bp, Homo sapiens
  chr13:99851706-99851803
  hypo
gaagcaaataaaagtcatacttttgccttctataatcagtgttaacattttggcccactggaacctctctttgagggtagggactgtgttgatctac

SEQ ID NO: 6880 - DNA, 117 bp, Homo sapiens
  chr14:102493497-102493614
  hypo
cgtaatgtttcagaatattccgtcaacctcaaggccacttgcttctgattggtgttagtggagcaggaaaaactaccctgtctcgtttcgtcgcctggatgaacggtttgagtgtgt

SEQ ID NO: 6881 - DNA, 348 bp, Homo sapiens
  chr14:102493651-102493999
  hypo
cccagcaacagatgtgtgtgcagagctcagtgagtaggaatggacctaacttgcctctgcttctgtaggtccataggaagtacacaggggaagactttgatgaagatctacggacagtgttgagacgttctggctgtaaaaatgaaaagatagcatttataatggatgaatctaatgtgttagattctggattcctggagcgaatgaatacccttctggccaatggagaggtaattaggtgacgtgttgcgttgcattacgtgttaccgggggaccagtaagtcagcactgtgctgtttcccaggtgcctggtctctttgaaggagacgagtatgccaccttgatgac

SEQ ID NO: 6882 - DNA, 86 bp, Homo sapiens
  chr14:103745819-103745905
  hyper
ggccgccgagcaagcgcctgcgccggccgtgggaacccggggccgtcccgcgggtgctggtgggcacccaggccgacccggacgac

SEQ ID NO: 6883 - DNA, 269 bp, Homo sapiens
  chr14:103988427-103988696
  binary
cgatgatggggtcgaagagatccttgaacacttcgtaggactcctcgtcgcccgccacgcagcccacggtcatgatgtacgggtggcctgggggagggggcgcgggacggggacagtgacgtcactgccgggcccgagcgcgctgctgaggaccctgcggctgcgcggggggagggggggccgggaccccggccccgaggggtcgcgtacccgggttgtccacgcctgtctggatgacgtcgtccagcgtgaagccgctcggcgtgctc

SEQ ID NO: 6884 - DNA, 419 bp, Homo sapiens
  chr14:103988736-103989155
  binary
tggccatgtggttgttgtgggcgctcaggtcggggaactcgtcctcggccgggaagcgcagcttcagtgcgttgtggctgttggagaagggcatggcggcggcgggctgcggggagacgcggggtcagaggggaccggcacgccggggttcccgggctcccgcgtaccactcaggcccccgccgccgggccccccggcgccccccgggacgcggccaaggtcagcggggtccgcagcgcgcgcggggagcgccatcatcgccggggacccccggccggtccggcgcgcgctccaggcgacgcgccccctttgcacgcagcgcccctagcccgggcgcggacgcccccggcccccgggcccactcaccgggcggccgggcgggggcgggggcgctccgtccgtcggcagctcccggagcg

SEQ ID NO: 6885 - DNA, 124 bp, Homo sapiens
  chr14:103989597-103989721
  binary
ccccggccagtgcgagctggcccggagccgccgaccttcctcaaggtgcccgcaggcgtttcctgggcgatcctggtgcaaagcgaaggcgcgcgggaagcgcagtctggctgcggcccagccc

SEQ ID NO: 6886 - DNA, 138 bp, Homo sapiens
  chr14:104047694-104047832
  hypo
cgacgacagtggatctgatcaccgagacggctgctgagtaactaacgagtggggcgcgtctacactgtggaggtgctggacagagggaggagtcgcctcctgggctggtcggagtaggaccttgggaggtttcatcac

SEQ ID NO: 6887 - DNA, 994 bp, Homo sapiens
  chr14:104047919-104048913
  hypo
cgggtaactgaaaccatggaaagaaaaaccatggatggaggggacagctgtgctgccgccatctcccttacacagttgagtaaaccgaggcacagaagaaaatgaagtagccccagatgacgtaggaaatggcagaactgaagggaaaagcagagcagggggctgtagagttaaactgttcttcattccggtggcactagacctgcccgggcggccagaggacacgtggctcctgtcctgtctgccgtgtggctaggggacagccgtgcttgtgctgtgccgtctgagtgtttgtttctgtctgtgggaataaaggggttgccagacaccctccctgctctgtggagggagggtggaatcatgcctttggccactttgcccactcccccttgggccggagcatcagcattagctgtgccacagggtggtatgcgctctgctgaaggtggcaccttcagggaaaggcagtctgccggggaggctagcgagcaccctgggtaggagctgagcgtggcctccgcgcctcctcatgggaagtgctggagatgcaggagcccctgagccagagcccagcgctcttacaagagacctcacttcctgttcggggactggggctgctaagtcagagtgcgcctcctgcacccgccaccctggatgtggttccattccctggtccctgagccatagctggggggcatgagactgtcccctgggctgctttggggaccctacttcagggcagccctgccactccctgtaacgggctgtgggtcctgccctgtggccttcctacctctcttgcgtgtgggtgagcctgagcgtggccaccgccctgggagtgccacagaggcaagcggcactggtcctcatgtgtaaacagccccaccagcacgcggggctggagtagtcaggccgggacctgtcccaggaatgggcaggctgttaacctaggatgcattcaagttaggacacatttcattcccgtgtagcggtg

SEQ ID NO: 6888 - DNA, 127 bp, Homo sapiens; identical to SEQ ID NO: 6410
  chr14:104048982-104049109
  hypo

SEQ ID NO: 6889 - DNA, 336 bp, Homo sapiens
  chr14:104202370-104202706
  hypo
cggtctccaaggcgagcccaccaccactcagtctcgctttcgtccttgcgcctcaggatggtgagggcgtccccttcgtggaaggacagctcgtcactgttctgggcctcgtagtcccacagagcatacgccacacctttgttcatcacacccagcttttcctgcacccctggagccagagagcaatggtcaggcctcagcagagggtggcctgcagcaagggaccctgctcgaggaacaggacacagtcgtgctgctgccgaggctgctctcagcaggccccacagaggccagcgagggagatgagacactattgaagactagggcccccacccg

SEQ ID NO: 6890 - DNA, 237 bp, Homo sapiens
  chr14:104618440-104618677
  hypo
cgtctgcgccacacacctgcagcagctcacacgggaggccatgcacctgctgcaggcccctgccagccatgaggaccttgacgccccccatggaggccccagcctcgcaccccccagcaccacgaccagctcgagggacacgccaggaccagcgggtcctgcagggaggcagccaggacgagctgggccagacaggaccaaggggctggcctggtcccccgggcccagtgtccaggt

SEQ ID NO: 6891 - DNA, 138 bp, Homo sapiens
  chr14:104640046-104640184
  hypo
cggaggccgcagccgcctgcacctcatcgacctgggcagctgtgaggcggcggctggcagggccggggaggctgctgggggtcccctgtgtctgtccctgtcggccctgggcagcgtcatcttggccctggtcaacgg

SEQ ID NO: 6892 - DNA, 101 bp, Homo sapiens
  chr14:104640582-104640683
  hypo
cagagacactcagcaccgtgcagctcgccgcccgcatccaccgcctgcgcaggaagaaggccaaggtgctccccacctcctgcccgccccatctcggggcc

SEQ ID NO: 6893 - DNA, 140 bp, Homo sapiens
  chr14:104641166-104641306
  hypo
cgctcccagcgtttggtgggacatggttggtggtgcctgctgtagttttcatcacagtgaccgcagcattggccctgtgctctggggagggtcggggaagcgggggcgtgtaggggagactgggctcggcagctccactt

SEQ ID NO: 6894 - DNA, 244 bp, Homo sapiens
  chr14:105103508-105103752
  hypo
gcccgagacctgtgtcgccacccactgaggaacgggcaccacccgtcgcccgagacctgtgtcgccacccactgaggaacgggcaccacccgtcgcccgagacctgtgtcgccacccactgaggaacgggcaccacccgtcgtccgagacctgtgtcgccacccactgaggaacgggcaccacccgtcgtccgagacctgtgtcgccacccactgaggaacgggtacgacctgtcatccgagac

SEQ ID NO: 6895 - DNA, 39 bp, Homo sapiens
  chr14:105214099-105214138
  hypo
cgaagtgctgggattacaggtgggaggcaccgcgccagc

SEQ ID NO: 6896 - DNA, 85 bp, Homo sapiens
  chr14:105472075-105472160
  hypo
cgaggaggaaaatgcacggcccgtgctcctcgcagccgcacccagtgtgagcacggctgagcagctctgcgggagtggtggcccc

SEQ ID NO: 6897 - DNA, 78 bp, Homo sapiens
  chr14:105512395-105512473
  hyper
ggctcatcttaggtgtgggacgtgtactatctgaattaataccccaccaggcctgtgggacagtcactgtcaccattc

SEQ ID NO: 6898 - DNA, 319 bp, Homo sapiens
  chr14:105546630-105546949
  hypo
cgtgactgtgcgatgggatggcatcgtgctttcaatctgcactcgcctaatgagaaattatgttgagcgtcttctcatgtgcttatctgccatctgtataccttctgtggcgctctgtttgcgtggctgtgcaatgggatggcattgcgtttaatctacactcgcctaacgagaaattacgtggcgcgtcttttcatgttcgtatctgccgtctgtataccttctgtgactctgtttcttcagatctttagcctttttttttcctttccttttctcttcctctctttttcttttttgagacagtctcactctgtctccc

SEQ ID NO: 6899 - DNA, 113 bp, Homo sapiens; identical to SEQ ID NO: 5950
  chr14:21101056-21101169
  hyper

SEQ ID NO: 6900 - DNA, 39 bp, Homo sapiens
  chr14:31027396-31027435
  hypo
cgtgagccaccgcgcccggccctcaaactgtatttttga

SEQ ID NO: 6901 - DNA, 212 bp, Homo sapiens
  chr14:36789412-36789624
  hyper
cgggttttcacttaggccaacctcacccactcttggggaggacagctgcaaggtaaacgactctgcaaccggtaccgccgtcctcctcactccgaccgaggaggctgggcccgggctccttccacacctcggcttcgggaccgcatcccacacctctgcaggcctagctgcccccggcctctgctagagaaaaagaatggcgaggagggacc

SEQ ID NO: 6902 - DNA, 203 bp, Homo sapiens
  chr14:37135434-37135637
  hyper
cgtgggtcagagaatttggaaaggcctactctgaggggagtaaaacttcaccaggccctgggctggaagcacaggaggtcgcggctgggcccagcgccctcgggaggccaagggcagggagccgacccaaggtctaagccctccagctctccgtcgcgggtttgggtcccgtctcaagagtggggcgcgcgggctgggcctcc

SEQ ID NO: 6903 - DNA, 111 bp, Homo sapiens
  chr14:58599612-58599723
  hypo
cttttaaggctctgccacacctcttcaaacaggacagagctcacacccctttccaggtaaaggtgtgtgtgtgtgtgtacgtgcacgcacgcgcgcgctgatggcaatgtc

SEQ ID NO: 6904 - DNA, 167 bp, Homo sapiens
  chr14:61104864-61105031
  hyper
ttcctgaaatgtttgagggaacatccagggtttttatccccacatcaggccgggcgatgggctcgagtttcaggccttgtcactcagctgtcaccaaacaaacgaagctctcagagcccaggagagggagagctacctgctattcatgacccctggagcaggtgatc

SEQ ID NO: 6905 - DNA, 69 bp, Homo sapiens
  chr14:61109043-61109112
  hyper
cgggcaggaggcgcaacgcgctgccagggcggctttatcctgccgccacagggcggggaccagcccggc

SEQ ID NO: 6906 - DNA, 50 bp, Homo sapiens
  chr14:65239794-65239844
  hypo
cccagggcaggcctgcatcggctggtcccgcctcacactggggaggttac

SEQ ID NO: 6907 - DNA, 148 bp, Homo sapiens
  chr14:73238412-73238560
  hypo
cgcatgtcccaggagtggcgcagctcacctgggcctcggtgcctcttctccatccagatgtagcagttgttctgggccaccccagtctgtgagtccaggaagggaagacgcacgctgcgctctgcacacagccgtgagttgtaactcc

SEQ ID NO: 6908 - DNA, 62 bp, Homo sapiens
  chr14:73390972-73391034
  hypo
cgcgggtgcttaaccaatgggcgctgtgcaccaagtcctgggtgaggtactccatcatcagc

SEQ ID NO: 6909 - DNA, 420 bp, Homo sapiens
  chr14:73391900-73392320
  hypo
cgtgagccactgcacccggcctgactactctttccctggcaattgctgcgtcaccaagccccaacccaccctgctgagttttccttccaagactcccctcccatccagccggcttgaaccggcctccagtcacgttgtttgttcagctagaatttttctctgccttctcttcaaggccgctcaagcttcatgaagcggttctttattctgactatgcccacttctctcatttccctcatcacccggccccgctccacatactgcatttatctataaactcctgagagccaggagtttagcctgaaatcctagcttcctggttaagagctgaaatgccttcgcacggcgtgcaatgggtgaaccccaccgcctgctttctaacgggtccaagccgcgggcaggggcctgtgttacggagcc

SEQ ID NO: 6910 - DNA, 146 bp, Homo sapiens
  chr14:75749334-75749480
  hypo
cgtggagggttattctacttcaaagatgagcaaattgaagaatggttagaataaacaactttcttgatattccgttatcggcattagaatcttcctgctcgttatcgtatccagcaggctgaactgcctcttgatacttggttaaa

SEQ ID NO: 6911 - DNA, 137 bp, Homo sapiens
  chr14:77591037-77591174
  binary
cgggagctcaggaatggtcgctattgtgacaaatagaaaacccgccaggagacagagaggaggtgggtccctggaccgcggtggcacatgagggctaagaacctcccaggaggggctgggctcggagcgcgctctcg

SEQ ID NO: 6912 - DNA, 95 bp, Homo sapiens
  chr14:77591751-77591846
  binary
ctagtctgtttattaagtacccggcacctgcgagggaatttttgccctcggcggccggcgggtcaggtggaggggccgcgctgccccttagctgc

SEQ ID NO: 6913 - DNA, 111 bp, Homo sapiens; identical to SEQ ID NO: 6413
  chr14:89875711-89875822
  hypo

SEQ ID NO: 6914 - DNA, 40 bp, Homo sapiens
  chr14:90849401-90849441
  hyper
cgacccgccgtagaggaaaaggaaaccccaaacaaaactc

SEQ ID NO: 6915 - DNA, 383 bp, Homo sapiens
  chr14:90849476-90849859
  binary
cgccaagaccccttccgtccggggctgtccgcgctgccactagtaaagatggcggccataggcggagccgctcactccgaaggccgcaggctaccctgccggccacgaccattcacgcggagccctccacgcccttcgcggcttgacgcattgcaggtgcagcgcgaccaatcagacggcgcggctcttttcggccaaccactgcagggtcgcgccggcctatcagagcgtccttgtcaaactgaacgaggaaagaagcctcagcagcgccaactaagcaaccggctacagaccgcgttccggtgcgtgtgtgacgacaccgccgtgtgctcctccgctgggagatatagtgccctcgcccttgcctcgccccgcccgcgagc

SEQ ID NO: 6916 - DNA, 54 bp, Homo sapiens
  chr14:90849897-90849951
  binary
cgcttgacgggcggtggttcccccgagacagaaacttgactgaaaaataatacc

SEQ ID NO: 6917 - DNA, 67 bp, Homo sapiens
  chr14:90850476-90850543
  hyper
tcccatgggccacatccgctgccatggtctgtgtcgtgccagaaggtacctctcagccctcagtgcc

SEQ ID NO: 6918 - DNA, 259 bp, Homo sapiens
  chr14:91757493-91757752
  hypo
cggcccagcctggaacctggtgtacccggggctggtatttttccaggattgagatgagggtgctcaccaccgtcatggtcactgagtttggaatacgggaatggtggcatgcgccgtgggttcagggagctctatgaccctgagatttactgaagcccctgggacccagctgtgagcgagctcaaggcagcaaacttctaacaatctgaaaactcacgctcggaagacccaaggattctccttccaggttgttcaagac

SEQ ID NO: 6919 - DNA, 857 bp, Homo sapiens
  chr14:91805557-91806414
  hypo
cgacaccacaccagaaacatgtctgcaacacacacaaaggtaggagaagcagccggggactcacagctcctgcctgacgcgccgcagcctggccttggtgtcggccagctctacggccaggtgctgcttgtcttcgctagagaggctgctggtggggctgggagtggagtcggcgctggaggacttgatggggctgggtggatgctgtgcctgcaggtagtcccgttcctgagtgaggtccacgatcagctgcagccgggcagagagggggatggaggagaacaaacggggttaaccagcacaacgcctgagcttgaacagggtgaagaaaccgccaaaagacagatatttcagcggagactaagaaacgaggaggaaggtgggaaaaggctggcatgggttttgaaaagaggtgaaatatttagtgaaacaaaagggagtgtacgaaggaggagggccccaagctccgcgtcctgattccctgtatcctcccacaggcccgaggtgaccatgcactgcaggggccgtaaccagggaaagcacgcacgtcccacccccaccagaacctcagcagcaggaccgaggcgtctaggctgaagatgaagggagaggagatgaaggggcctaagccccttcccaggctgaccgggccaccgacccgcggacgcacctcggtgcactcgtcccgctggtcgatgagcctccgcaggtggagcaccatgctcctcgacagggcctccagctcctccggagccacgtcgggcagctccagccactgcaggtcaaacacgttctcttggttgtgagtcacctgtgggcacacatggcagggcactgcaggggcggcagagacgggc

SEQ ID NO: 6920 - DNA, 160 bp, Homo sapiens
  chr14:93154728-93154888
  hypo
caggacagttgtgaaaataacatgacgctcgtccaaggccacttcctgagggcaagtcctaatagccctgagacaccgagacggcatgttcttcattagacggaaagggaaactgaggctcaggagagaggcgctccaggccgctgcagccaacaaaccg

SEQ ID NO: 6921 - DNA, 237 bp, Homo sapiens
  chr14:93706483-93706720
  hypo
cgaatgcgatgcacagccgacctgcagattagtgttaactctgggagctcgggagcgtgcaccaccaccagtgtcaccgagcgcacccgcacagcagctaaccagtcaggcagcagaacgagtggcggcagtttgccggggcgtgcagacacacgacatgtttcccatcttggagactatctactgttcggcttttctaaaatgtcagattattcctgagtgtatatccacagggta

SEQ ID NO: 6922 - DNA, 247 bp, Homo sapiens
  chr15:101938625-101938872
  hypo
cgaaagcctgcttagccagtcggccgggcccgtccaccgtcttgccgtcgtcgtccggcccccagctggcactgtaaatgtcgatgtagttgggtctgatgcccagcgactttgcctcgaccacatctgtgacatcgccgtccagcatgcggatgcctgaaagcacagaggaggctcggtgtcggcgcccaggctccgggcacacagcgacgggaacccgggcccaggaggctcggatgaggacacc

SEQ ID NO: 6923 - DNA, 375 bp, Homo sapiens
  chr15:34635788-34636163
  hypo
cgtaaagcgaaagagcgtaaagttattttatgaaactggtgaagcatgtttcagcggtcgaaccaagatttaaagttaggtccctaccgcaaattcagcgctctttcttatggtggtgagtagctaataataacgtaataaagtgcaccttctaggagtttttacaatttttaaaagaatatagaagttctccttataagactctcgtttaaagaaatgaaaatgagaaccaaaatatcattacaaagatcatcgttacgccattatttacaatgacaaaagcattggaatatatattaactgtgtaaccagaaaaacctgcacttttttttttttttttttaagaatatggtttggcggggcgcggtggctcac

SEQ ID NO: 6924 - DNA, 90 bp, Homo sapiens; identical to SEQ ID NO: 6414
  chr15:40532821-40532911
  hypo

SEQ ID NO: 6925 - DNA, 205 bp, Homo sapiens
  chr15:45479833-45480038
  binary
cgaagtcgcgctcccgctgcagcctgtaggcggccaggatgtccgggggcggcgcggggggcgcggccggagagggcgcaggggggcggtagtcgggctcggggggcgccggcttgctgccccctccgccgccgccccccccgcggaagcccaggtgctcccggagccacttggctactccgccgctgccgccccctcctgggcc

SEQ ID NO: 6926 - DNA, 78 bp, Homo sapiens
  chr15:54191760-54191838
  hypo
cgcttagctgaaaaaccagtctctctactttttttttagacggagtttcactcttgttgcccaggatctcggctcacc

SEQ ID NO: 6927 - DNA, 85 bp, Homo sapiens
  chr15:56363533-56363618
  hypo
cgtccttgcccgcgccctcctggagcgagcagttctccaagcacccagcatccagccagacacgctgcacaccgacggaggggac

SEQ ID NO: 6928 - DNA, 76 bp, Homo sapiens; identical to SEQ ID NO: 5756
  chr15:60289235-60289311
  binary

SEQ ID NO: 6929 - DNA, 66 bp, Homo sapiens
  chr15:62832519-62832585
  hypo
cggagtgagacgccatcttaaaataaataaataaacttttttttttttttttttacatgagtaagc

SEQ ID NO: 6930 - DNA, 181 bp, Homo sapiens
  chr15:72992573-72992754
  hypo
cggcctgaacatttatttactggttttttttgtgtgtgcatgtgtgtgcaagttttcacttgaataagtgcctagggagtggaattgcttggtcatatgtgaactgtttgttttaactttataataaactgccgaagtattttccaaagtggttgtacagttttacccgaccgccagcaac

SEQ ID NO: 6931 - DNA, 368 bp, Homo sapiens
  chr15:76632803-76633171
  hyper
ggtcatccgcgtctggttccagaacaagcgctgcaaggacaagaagaaatccattctcatgaagcagctgcagcagcagcagcacagcgacaagacggtgagcagccgctgggccggaggctcgagtcgggtgggggctgcgcttccgccgcggtatctgcgtgcccttttctgggcgagccctgggagatccagggagaactgggcgctccagatggtgtatgtctgtaccttcacagcaaggcttcccttggatttgaggcttcctattttgtctgggatcggggtttctccttgtcccagtggcagccccgcgttgcgggttccgggcgctgcgcggagcccaaggctgcatggcagtgtgcagc

SEQ ID NO: 6932 - DNA, 158 bp, Homo sapiens
  chr15:76633206-76633364
  hyper
cggcagctgcagaaaggtgggagtgcaggtcttgcctttcctcaccgggcggttggcttccagcaccgaggctgacctatcgtggcaagtttgcggcccccgcagatccccagtggagaaagagggctcttccgatgcgatcgagtgtgcgcctcccc

SEQ ID NO: 6933 - DNA, 60 bp, Homo sapiens
  chr15:79208280-79208340
  hypo
cgctgagtatttccataaatcatctcaattctgtccacaaaatcgtgaaggcggccaagc

SEQ ID NO: 6934 - DNA, 1218 bp, Homo sapiens
  chr15:80215312-80216530
  binary
cgaacccccaactccaactgacctcccctctgccagagcaagaccacgagtacccgccgagagcggacctggctggctacacaaagccaggcgcccgaccagagggatcctccgggacgtcctccgccaccggggcgtccccgcccagccccgcccggcgcccggcgctcaccagctctcctccccctcctcctagcctgacagacgctccaggtcgtctagcaagccgccctcccccgccgccagcaagaaggtggcgtctcgcagctcctcgttattcgtccgcctcgggtccatccggccccgccgcccgactttgcgctgagacccaaggggaagccccgaggggaccccgcgccgtaggagggagtggaggagccggcgaaccgcgatggagccggggcccagcacagcgcgagcggctcctcggctgttcgtgctgcttccccagcttcttcaccggcacctgcagcttccgcacctcctggtccgcgttcacgttagagttaacgtcctccatcccggccccgctgcctccgccgcccgcggccctctcgctctcgcagcaacaagggaagagccggaggaaagaggcgtccacgccgctcactccagccgaggcccccgcatatagcagggccaggccccgtcgccagggttcccccagcgcgggtcccgaagcaccgctggccacagatgaaccgcctcctcagcgcaggtccgggattcggggaggcagcgccaatatccggtctctgcagccatcttccctccgtccctccgcccaccgagggtcggccctgtaggtgacctcagagcgtcggggatgggcgtggccccgtcgggcgctaagaagacctagcgcagagaggaccgccgagctcccgacggggcggggccaggtgtgtgaggggcggggattggacccggaggggcgtgtctggactgccggcggaagtggaacgcggcctgacctgcgacggaaagccactgcaagcccggaggcgaacagaaggcattccgcgagccgggctgagttggtgaacacggtcctcgttcaccccgcctattggtctgggcgtgtggggtattctccacccacttatacggcgtgtgggaccgacgggcccgtcctgcccggctccggtccggatctcgagtaggcgctcaatgggattcggggagacgtagtttactttgttcagcaaatatttaacc

SEQ ID NO: 6935 - DNA, 152 bp, Homo sapiens
  chr15:80295619-80295771
  hypo
cgtgcgattcgcaagggagggtgggggataggagtggtccctctgctacagcacaaggcgtgttcggacatgtctgggcaagtccgggcacaacaagagcgggagggctgctcacaggctagaaacaagaaagtacaaggaggtgaggctcc

SEQ ID NO: 6936 - DNA, 273 bp, Homo sapiens
  chr15:90319583-90319856
  hyper
cggccatggcccagtcgcctcctccgcagagcctcctcggccacgaccactggatcttcgcccagggctggggctgggccggccactgggactccacgtccccggcctcctcctccgattcgtcgggttcgtgcccctgcgacggcgcccgcggactcccgcagccacagcctccgagctgcagctcccgagccgcagaggcagccgcgacgacgcccagacgagcgcgcaccggaccagcgggcggacagcggcagagcgccagcgagcggg

SEQ ID NO: 6937 - DNA, 48 bp, Homo sapiens
  chr15:90501233-90501281
  hypo
cgactgagcgacgtgcagtaatttgaaggaacgcattactggtgcaca

SEQ ID NO: 6938 - DNA, 106 bp, Homo sapiens
  chr15:90501638-90501744
  hypo
cggaggggaggccgtgttagacatggccaggcctgcaagctcagactgcccacggcctcctgacccagaagaaaaatgaaaatgcatatactcattgtcgcagcgc

SEQ ID NO: 6939 - DNA, 184 bp, Homo sapiens; identical to SEQ ID NO: 6416
  chr15:90755573-90755757
  hypo

SEQ ID NO: 6940 - DNA, 42 bp, Homo sapiens; identical to SEQ ID NO: 6417
  chr15:90756079-90756121
  hypo

SEQ ID NO: 6941 - DNA, 148 bp, Homo sapiens
  chr15:93433730-93433878
  hypo
cggcctgctatatttcttgattatgatctgtccgaatgactaaaggaatttagatttgggaagataaacagggacttgctctataatttgaaaattagtcctaaagaagcatttgggtagcatagttttaactaaaatcctaaacttc

SEQ ID NO: 6942 - DNA, 598 bp, Homo sapiens
  chr15:96883828-96884426
  hyper
agctgctaaacatggcgactctttccctttaagtgtctctttttccttgctgggtttttttttttttttttttttcatctgatctgagctcgctttatttcttttcccaaccccgctccccctcctcctcgtggcgctcgggggtgtgagagaacccagttagacgcgaaatgcaacaatagtgcaaggagagagaggggcgctcgctgcttctcgccactttcaaacaaacctgggggaagattgagcccgggggggattccagcctgctcgctcggctcgcggtcgccctgcctcggcctttcaccattagctctccctgggccgcgaggagctggggctcaaagttagcgggcgacgtccgaggcttagcctctagccggctgcagggacgggggcctggagttggcagctgctacgggaaagtgcctgccccccagcccccgcccccacttacgtgcggcagaattccgccagcgccccgggaaagtccggggtgccgggcgcgcggagctgcactcctgggatgtgcattaagcggcgacaggcggggggggcgagggcgggggcggggggcggtcagggggagctcgagcgt

SEQ ID NO: 6943 - DNA, 157 bp, Homo sapiens
  chr15:96884499-96884656
  hyper
cgcgagcgccgggctgccaggctcggcagggccgggtaatagaaaacacattggttaccaaaaagaaaaaaaggagggcggggggcgctaaaggccattccgtctgcaggcagaaaacccttttttaaactcttgctggcaagtgagtccggtcctc

SEQ ID NO: 6944 - DNA, 189 bp, Homo sapiens
  chr16:1250534-1250723
  hypo
cgacaacatcggctacgcctggattgccatcttccaggtgggcggcaagatggtgggacggggaccctggggcacggcaggggagcgggtgcaggactcgccccccccagcccagaccccaggggcacggggaggaggaggaggggtcgtgcgggcccaagtcaagccactgcccccccaggtgatcac

SEQ ID NO: 6945 - DNA, 53 bp, Homo sapiens
  chr16:1472227-1472280
  hypo
cgtgcactggatggatcagctggtaccacccagaccggtcatctggcccaacc

SEQ ID NO: 6946 - DNA, 131 bp, Homo sapiens; identical to SEQ ID NO: 6426
  chr16:1753650-1753781
  hypo

SEQ ID NO: 6947 - DNA, 121 bp, Homo sapiens
  chr16:189550-189671
  hypo
cgacaggagatctttgagaccttgggcgaggcagtgacactaaaggcaggagcgactacagaagaataaattaaacttcatcagattaaaaactttactgcggccgggcgcggtggctcac

SEQ ID NO: 6948 - DNA, 64 bp, Homo sapiens
  chr16:21567027-21567091
  hypo
cgctggccaggttctggcgtgtcccgggcaccacgcatcctgtccatgagctcacgtcgttgtc

SEQ ID NO: 6949 - DNA, 170 bp, Homo sapiens
  chr16:21569179-21569349
  hypo
cgtcatcatctcactacagcagagatccgcagttccccgaaacaaataccacgagtctcaaggtaagacctgcacgtaaggatgtcgaaagataaatatgtcttaagaacatgtccatgagaaggggctttgccagccatgcaagcataaaagaagaaaagtccctcatt

SEQ ID NO: 6950 - DNA, 370 bp, Homo sapiens
  chr16:21569399-21569769
  hypo
gtacgggggacagagggaggaggctctaggctctgacttgcccttgcagagcttggaatccaggagtgtcagacggtggtagagataaaaagctgtgtgtctgagaggtgagggcgtgggctttggggccctaaacttgcttgggacgcccgggagggcccccgtggaagcggcgtttcagtggagccctgaagatgggtttctatttgtcaggtgaagataatggcagctccaggcagaaagggacgaccagcggaaaggaccctggtgagagcagccaccacgacggaacaggcagaagcaccagctggcaaaggcactgtcaggggcagcgggagatgggattggaagggcaacagggttggcgccc

SEQ ID NO: 6951 - DNA, 73 bp, Homo sapiens
  chr16:2278311-2278384
  hypo
cggagccctggctgcccagcctccgccttcccaggccctgctgacagcaggctcgttgcagatgaggacgatg

SEQ ID NO: 6952 - DNA, 150 bp, Homo sapiens
  chr16:24739345-24739495
  hypo
cgttttggtgcatatgtttcatgactttctgtgcattcattcactagcttaacctatcggagaggacaggaacccaacatgtctagggaagttttgtttgtttttaacgggagagattcaagcatgttgtaaagccagttgaagctgggc

SEQ ID NO: 6953 - DNA, 713 bp, Homo sapiens; identical to SEQ ID NO: 6438
  chr16:24837143-24837856
  hypo

SEQ ID NO: 6954 - DNA, 50 bp, Homo sapiens
  chr16:2770043-2770093
  hypo
cggagccccaggcagtgcagcggagcctggtgggggactgcaccaccagg

SEQ ID NO: 6955 - DNA, 48 bp, Homo sapiens
  chr16:2849309-2849357
  hypo
cggtccagctgggcgagctgacttccaggccaactccttggaacctgc

SEQ ID NO: 6956 - DNA, 276 bp, Homo sapiens
  chr16:29170096-29170372
  hypo
agagccctcaaccagggacggagccgccctgtccacggagcctccagacccaccagaacgcctgggtcaccgcggctcccgggcgggcctcactgcgctgggacacgtcaggacacgtggcagctcccagcgcggtggaaggcctgagccctgggaacactggctggaaaatggaactcggaggacagagcttgtcgacggcgtctcgtatgaatcctggaggagacgcccgtgtcgagggcaattagaatccaggcgtgagccccggctggctgc

SEQ ID NO: 6957 - DNA, 54 bp, Homo sapiens
  chr16:30826509-30826563
  hypo
aaaacatctgctctccgaggtgtgggtgaaggtatggggggtccaaaaatgtcc

SEQ ID NO: 6958 - DNA, 48 bp, Homo sapiens
  chr16:30907062-30907110
  hypo
acgcgcacacctgcacactcacacgcacacaaatccactcgcacacac

SEQ ID NO: 6959 - DNA, 50 bp, Homo sapiens; identical to SEQ ID NO: 5983
  chr16:3238043-3238093
  hyper

SEQ ID NO: 6960 - DNA, 97 bp, Homo sapiens
  chr16:3537877-3537974
  hypo
cgctggtgccctgggaggccaggcagctgggcgcgctggacccatgtccaaagccatggggtgagtgaaaccagattaacccgctgagcttgcccac

SEQ ID NO: 6961 - DNA, 282 bp, Homo sapiens
  chr16:410714-410996
  hypo
ggtggccgcgtcggcgacgtatgggccccgtggtgctgcggtgcacgacctctgtgctgtcaccccacagtgtccgctcctgcacgtacacgcgtgcacgcgcacacacgtgcacacgcacacacacacaagcacgccccgctttgatctctaaaggagagtccattgacaagctcttaatcgcagctgcccttgcagggcctgtccctgaagtcccgagtaatgggatttggcgcttctgatccatcgggctggccgcttcccgtgtcataggtggacatt

SEQ ID NO: 6962 - DNA, 111 bp, Homo sapiens
  chr16:411606-411717
  hypo
gggaccagatgacgggcctcagaaccctatggtagccatggcaaccagcccctttagacaccgccacccccgagccactcctgactgctgagggagcaggcggcactgccc

SEQ ID NO: 6963 - DNA, 176 bp, Homo sapiens
  chr16:4478626-4478802
  hypo
cggttagctgtcttgttccccaagtgagctcataacctgccatgggcaagttttatatcaggtagtgtacacaggtgagaggtggcatccttcagggtacgtgctgttttcacagatagagtcatcaactggttgggcggggtggctcacgactgtaattccagcgctatgctggc

SEQ ID NO: 6964 - DNA, 107 bp, Homo sapiens
  chr16:54966659-54966766
  hyper
cgcgccggcgcctcaagaaagagaataaaatgacgtggacgccgcggaaccgcagcgaggacgaggaagaggaggagaacattgacctggagaagaacgacgaggac

SEQ ID NO: 6965 - DNA, 151 bp, Homo sapiens
  chr16:611800-611951
  hypo
cgtgtgtcctggggagtcggtgtgtagggcctgtgtgagcatgtgagtgccgtgttggagtggtttggaaagcccccccacacctggatgggtggtgagtgtgttatcacggacaagcagccgtgttcaccgtgatggagtgtgaggtgtg

SEQ ID NO: 6966 - DNA, 83 bp, Homo sapiens
  chr16:612320-612403
  hypo
gcctggcctggccccacatgagactgaccccctaagagacccccagtgcccacctgacgccctgctagagcaggctctgtgcc

SEQ ID NO: 6967 - DNA, 131 bp, Homo sapiens
  chr16:67189038-67189169
  binary
cggcggcggcggcggcttcacctccgacagagagggcaccgggggctgcaagggggccgaagcgacctccccgtcgccaccccgggcccccgagccgcacttcagatttcgcagcgcatcctccagctcag

SEQ ID NO: 6968 - DNA, 377 bp, Homo sapiens
  chr16:67189259-67189636
  binary
tgaccctagcccggccgcacctgctgggctaggatgcaactcaaacagcgctcctcgtccgccagcaaagcgtccagccgctcggcgccggcgcgcagctccagttgcagcggcaccgagtgctgggcgagcgcggccgccaggctcctctgcagcgcggcgcgcagcgccccctcgcggtaggcgcggaggaagcggccacagggctgccgcccgcagaatcgcagctgcacgatcagctgcgggtcgctgcggtggatcttcagcatctgcagcacgtccgggctcccgccgctctctgcggaggcgggcggtcaggcgccgggcggtccccaagctcggccgttctccaaacggccggaggaggggcgaagccc

SEQ ID NO: 6969 - DNA, 271 bp, Homo sapiens
  chr16:67198282-67198553
  hyper
ccccttcctatctgcttgccctgcctggggcttcactgtgcctctggccattaccttctaggacttgcccagcccacaccaggtcgcgcaccggcgatttctcctgtagaacaaagaaggaaatagagggaccgagaggggtgggactcgaacccaagtctcccactcatctcaccccaccccaccccactccaccccaccccacccctccactccactccactccacacatcccatccagccagccttttctgcctgctggtgcctcggc

SEQ ID NO: 6970 - DNA, 784 bp, Homo sapiens
  chr16:69143292-69144076
  hypo
cgccagatgccggtgcagctgacgacagccctgcgtgtggtgggcaccagcctgtttgccctggcagtgctgggtggcatcctggcagcctatgtgacgggctaccagttcatccacacggaaaagcactacctgtccttcggcctgtacggcgccatcctgggcctgcacctgctcattcagagcctttttgccttcctggagcaccggcgcatgcgacgtgccggccaggccctgaagctgccctccccgcggcggggctcggtggcactgtgcattgccgcataccaggaggaccctgactacttgcgcaagtgcctgcgctcggcccagcgcatctccttccctgacctcaaggtggtcatggtggtggatggcaaccgccaggaggacgcctacatgctggacatcttccacgaggtgctgggcggcaccgagcaggccggcttctttgtgtggcgcagcaacttccatgaggcaggcgagggtgagacggaggccagcctgcaggagggcatggaccgtgtgcgggatgtggtgcgggccagcaccttctcgtgcatcatgcagaagtggggaggcaagcgcgaggtcatgtacacggccttcaaggccctcggcgattcggtggactacatccaggtaagggcgcctccctaggagcgtgtgtacatggggataagtctggacagcctggcaaactctccgccaagaatctgaggtctggtctaggtcccttgggttgtgcacacacctgtgcacttaagaaggcaacaaggtggcc

SEQ ID NO: 6971 - DNA, 262 bp, Homo sapiens
  chr16:77752668-77752930
  hypo
cggatattataaatattagagcgatatttctttaatatcacagcatgtaagccctgtgtgtaaacactggatattataaatatcacagcgatatttcgctgatatcacagtgtgtaaccactgggtattgtaaatatcacagtgatgtttcaccaatatcacaacgtgttactagtggatattggaaatatcacagcgatgttttgccaatatcacagtgtgtaaccactggaaattgtaaatatcacagtgatatttcgcc

SEQ ID NO: 6972 - DNA, 554 bp, Homo sapiens
  chr16:77753318-77753872
  hypo
cgatatttccttaatatcatgatgtgtaaacactagatattataaatattgcatcgatatttcattaatatcatggcgtgtaaacactatgtgtgaacactggatattagaaatatcacaacatttcattaatatcacggtgtgcaaacactgtgtgtaaacaatggatattatgaaaatcacagcgatatttcattaatgtcacagtgtgtaagcactgtgtgcaaacactggatattatgaatatcatagcgatattttattaatatcgcagtgtgtaagcactgtgtggaaacactggatattatgaatatcacagcgatatttcgttaatgtcacagtgcgtaagcactgtgtgtaaatactggatattatgaatatcacagtgatatttcattaacgtaacagcgtgtaagcactgtgtaaacactggatattatgagtgtcacagtgatatttcattaatttcacacgggatattataaaaatcacaacgatatttaacatcatagtgtgtaaacactttgtgtaaacatcgggtattataaatatca

SEQ ID NO: 6973 - DNA, 49 bp, Homo sapiens; identical to SEQ ID NO: 5986
  chr16:77822069-77822118
  binary

SEQ ID NO: 6974 - DNA, 261 bp, Homo sapiens; identical to SEQ ID NO: 6455
  chr16:81563939-81564200
  hypo

SEQ ID NO: 6975 - DNA, 163 bp, Homo sapiens; identical to SEQ ID NO: 6456
  chr16:81564229-81564392
  hypo

SEQ ID NO: 6976 - DNA, 240 bp, Homo sapiens; identical to SEQ ID NO: 6457
  chr16:81564541-81564781
  hypo

SEQ ID NO: 6977 - DNA, 92 bp, Homo sapiens
  chr16:85033902-85033994
  hypo
cttttcttcctggataacccgcgttcctgagtccagaccctgtcttggatttacttgtatctgtaacttcaagcaagtgtcttaagctcttc

SEQ ID NO: 6978 - DNA, 357 bp, Homo sapiens
  chr16:85673482-85673839
  hypo
cggccgggggcggaggtacggggagccttgcgtgtcctcagctgctccaggaggcacaggcagcacctgggaccaggcaccccctccctgggaaacagttgggggcgatcgtgctgcgggcctttgctctgggaggccggcgctttgggaacagggtggctccagagccttcccaggtgggctggagagccgccgtctggaggacagttctgagcaggtgctcctggctggcgaggaagccccacctcaccccagcaccacccatggtgcagggagctggggttgggcgcacaagagtctgagcccgttcccaccccgcctccttgtcaccagcccggtggccgggactcatggctt

SEQ ID NO: 6979 - DNA, 238 bp, Homo sapiens
  chr16:85673886-85674124
  hypo
cctgccctggaagctgccagaggcctctccaagcaggtgttggccgctgtgttacctgcggcaggggtggcccagccacccatagcccggcttgggccacagggacggggccgacaggtggtggcagtggggctggaactgctctcttgtcatcgaggcccgcggggccctgtgccgccttcccctggtggtgtctgctggctgcctgcctcgtcttgtcactggctttgcaggcaag

SEQ ID NO: 6980 - DNA, 140 bp, Homo sapiens
  chr16:85674334-85674474
  hypo
caaagaaaacagcaaaacaaacacggaggaaggatcccgcctggcaggcgcgcctcgcgtgggtgtcagtctgcggcggcggcggctctgcaggcgtctggagcccgtctgtctcccgcgcaggtgtgagcgccgcgggc

SEQ ID NO: 6981 - DNA, 114 bp, Homo sapiens
  chr16:85679455-85679569
  hypo
cattctacctgcttctaccatgcttcctatgcatgcattctaccatgcttctaccatgctttctatgcatgcattctgcctgcttctaccacgcattctacctgcttctaccac

SEQ ID NO: 6982 - DNA, 178 bp, Homo sapiens; identical to SEQ ID NO: 5759
  chr16:85932121-85932299
  binary

SEQ ID NO: 6983 - DNA, 169 bp, Homo sapiens
  chr16:87311888-87312057
  hypo
ccaggcagcaggccaggaccacgccgcatgttcacaggctcagttatagccgtcgaccacgccacggcgcccaaccacgccacggagcccgaccacgcctcgaccatgccacggcgcctgaacttttatctccatttctcaggtgaggacctgaggctcgggtggcccc

SEQ ID NO: 6984 - DNA, 184 bp, Homo sapiens
  chr16:88512691-88512875
  hypo
tggctctgcactggcgtgtcctctcctcgaggcggctgagtctgccgttcggggacctccctcgctcccctgcctggtgtcctctcctcgaggcggccgagtctgccgttcagggacctccctcgctcccctgcctggtgaaggtcatggggtcccgggcctcttcaccctctgtgttgtctcc

SEQ ID NO: 6985 - DNA, 729 bp, Homo sapiens
  chr16:88805932-88806661
  hypo
ggctgtggggctggacgataggccccaccccagctctgacagtctccgtgctctgcaggccgaggcaagtcacagcctctcggagcctattccccttctgtcaaatgggatgggggcttgacgggacagatgaaccagaccagtcctgtcctcacaggcctccagggctgcaggggctgctgggaggctccgaggccagggtaacagggagatcagggcaggagaggcccaggccctgagcccacccctctcagagaccacacagcagctgggggcgaggctggatcagaacgcagggcgccatcgctcaccccacccacagcctggccctggccctggccctgggaaatcttctgagcagagccgtgaaaaatgagcatttctgggagtggaaagaacagaggcagctgctgtgagagaacaggtgtgaggccaccgaggggcaggcccggccctgacttggggtatgaggccaccgaggggcaggcccggccctgacttggggtgtgaggccaccgaggggcaggcccggccctgacttgggccccacgtgccgcagccatgctgcagacgcccctcaccctcctctagcggccagcacccctcgggctggctggcacactccgtcgcatgcctgcaaacacgtgtgtgtgttgcccatatgtgggagtgagggtcgcccgggggccctgccaggccgggtcatggggcttctagatctttcggaac

SEQ ID NO: 6986 - DNA, 211 bp, Homo sapiens
  chr16:88943232-88943443
  hypo
gcagcagtgactaattggtcggctcccccaggtcaggcggggcgcagtgtctggcaggccaggcatcggaggccaggcacagcatccggtgggcctggagctgggtggggttggcacggtgctgtgtccggcaggccaggggccagtggggtcagcggggcacggtgtccagtgggccaggtgggctgggggagccggggcgagaaggccc

SEQ ID NO: 6987 - DNA, 279 bp, Homo sapiens
  chr16:88946079-88946358
  hypo
tgcctgtgcagacaagtgcatgcaaataaacacaggcatcccaggcatgtgtgtgcaaagctgggtcacgtggtgtcacaagtcaaagcttgcactctaccgcagcggctccccaggcactgcacccctgcagggcaagggcgaggcccaccccagggcctggtcagccaggggcgcacccggaatctgcattcctaacgcgagccgggggagctgctgctgacctgaagcacttggataactctgccgttccgccttcacctctggccccacccagac

SEQ ID NO: 6988 - DNA, 274 bp, Homo sapiens
  chr16:88959987-88960261
  hypo
cgcagatgcccgtgcacacaggccagtgcatgttgaggacaagcaggtgacataaggaacagctgatgagcgcgctgcagggccgcctgttggccactgagacgtgactgcctggctggccctgctattggggtcagtgttccaggggcctggcagacatggggctgctatggaaagtcccagggccgggcctcaccccttttctcaggtgacagagctaaggccaagcctcttgcaaggcggccagcgcacccctcctgcgcctgggacaccc

SEQ ID NO: 6989 - DNA, 79 bp, Homo sapiens
  chr16:89254530-89254609
  hypo
cgtcagcggagtggatgtgggacgcctggaagtggaggacagggacctgccaggctccccaaactgggtggccaggttc

SEQ ID NO: 6990 - DNA, 144 bp, Homo sapiens
  chr16:89254764-89254908
  hypo
gatgccggcacacacagatgcccacacacagatgccggcacacacacatgccggcacacacagatgcccacacacagatgccggcacacacacatgccggcacacacagatgcccacacacagatgccggcacacacagatgcc

SEQ ID NO: 6991 - DNA, 375 bp, Homo sapiens
  chr16:89650291-89650666
  hypo
cggcagctacacagccccgggggtacacagacacctcctctcaggccccgctgggtggggtcagccagcctggggcctctggtcccccacggtggggtcaggccccacctggccaagcctggagcccgggcgtccccctgccaggtgatcgccgaggacatctcggggaacaacggctacgtggagctctccttccgggccaggaagctggacgacaaggtgagtgcaggtgccgggcacgcctggctcaggctgaggtccgggaaccggttcgaaaacccggtccctgcccagcgctgacctcgcgtggctatgtcccgtgtgagacgtgtgcggagtgtgcctggggctgggcgtgctgccgtcacggtcgcc

SEQ ID NO: 6992 - DNA, 141 bp, Homo sapiens
  chr16:89650710-89650851
  hypo
ctgggctggggctggggcagctccctcctgtggggaccactcatgaccctgctcagggatggggaaataggcccagcacccccgaggccactgtcgtgacaggaggaactggaacagcgcgcggttctgcgggctcgtcac

SEQ ID NO: 6993 - DNA, 738 bp, Homo sapiens
  chr16:89900815-89901553
  hypo
acctgcccgcactcgcggttggccatcgtagaagcctggataagcatagcccgtgtgaatctgtgaacctgcccgcactcgcggttggccatcgtagaagtgtggataagcatagcccatgtgaatctgtgaacctgcccgcattcgcggttggccgtcgtagaaggccccataagcatagcccgtgtgaatctgtgaacctgcccgcactcgcggttggccgttgtagaagcctggataagcatagcccgtgtgaatctgtgaacctgcccgcactcgcggttggccgtcgtagaagcctggataagcatagcccgtgtgaatctgtgaacctgcccgcactcgcggttggccatcgtagaagtgtggataagcatagcccatgtgaatctgtgaacctgcccgcattcgcggttggccgtcgtagaaggccccataagcatagcccgtgtgaatctgtgaacctgcccgcactcgcagctggccgtcgtagaaggccccacaagcatagcccgtgtgaatctgtgaacctgcccgcactcgcggctggccgtcgtagaaggccccataagcatagcccgggtgaatctgtgaacctgcccgcactcgcggttggccgtcgtagaagcgtggataagcatagcccgtgtgaatctgtgaacctgcccgcactcgcagttggccgtcgtagaagcctagataagcatagcccgtgtgaatctgtgaacctgcccgcac

SEQ ID NO: 6994 - DNA, 81 bp, Homo sapiens
  chr16:89901590-89901671
  hypo
cccgtgtgaatctgtgaacctgcctgcgctcgcggttggccgtcttagaagcgtggataagcatagcccgtgtgatttttc

SEQ ID NO: 6995 - DNA, 174 bp, Homo sapiens
  chr17:10632714-10632888
  binary
cgactaaaaagtttaatgatgctataaagggttttggtcggcttcgtctcctaggccctgagatatgttcagtgtcgtccgcgggccggacgttaacgcaggagccagggccgcttcttctgaggtcccctgggaagttccacgcgcggaaccagccccttccagggtgtgagc

SEQ ID NO: 6996 - DNA, 245 bp, Homo sapiens
  chr17:10633350-10633595
  binary
tagcccccactcagcgacccattcagcccgccccgaacgccgcggggtgtaggcggcgccgtcctggtttcgcggatgggaaagcgagtccctcagggagcgcaggtctcggtggtggacggaagtcgaatttgaacccgtataggttcaactccaaaccctgttttcactaaagctaccttcctcacaaaaaaaaaaaaaaagaagaaagaaaaaaaagaaggaaaaaaggaaggaaggcaggc

SEQ ID NO: 6997 - DNA, 299 bp, Homo sapiens; identical to SEQ ID NO: 6464
  chr17:1454071-1454370
  hypo

SEQ ID NO: 6998 - DNA, 104 bp, Homo sapiens
  chr17:16282523-16282627
  hypo
gacaatgcaactaagagcactctgactacagaagcatgatttaaagctccacaaccctgcaataaccacgaagaaaaataaaaagcggctagtccgccaggcac

SEQ ID NO: 6999 - DNA, 209 bp, Homo sapiens
  chr17:16923475-16923684
  hypo
cgctctgacctcacctcctcccagctccctgactccttcggcggggggcctggccagcttgttcggccactctgggctccaggctcttcaactggaaagagatgcttgtggagttcctcatggcaagtctgggcaagccagcctgacggccagcctgcgactccttgtccagaactctgtcaactccaccagtgcctgtcacggaaacc

SEQ ID NO: 7000 - DNA, 1755 bp, Homo sapiens
  chr17:17685255-17687010
  hyper
cggggccccgggccggccgccccctttttgcggggggagagcaggagccgcctctcgcagccactctgcgcgcggggtgggagggagagagggaggcgaagggacgacagcgccgggctccccgcccccatcccacccggttccaatatttcgcagaaaggcacgcggctcctaatcggtcttttccaggctgagatttagccgtgcgatgcccgcgcaggggcgggggccgcgggccaggggaggcgctcagagtccggagccgccgagcgaggtgaggagcccgcgtcctcggctggtggagcgggcgggcgggcgcgcaaacccgagaggcagatatagaaaggggggcaggttaaaaataaccctctccggctgggaagctcgcgcgcgctctctcgcctcgttcggtgccagaggactccaggggaggtggcgttggggagggcagagcgggattccccctcctccgccgggcggggtgcccgcctgcgcgccgcggttgcacgtgtgcggggccgcgcgcccgggccccctctgcacccggtcggtgggtgccccctccccaggaccgggcgcatctggcagtggccccccgcccgcagccttgcgcggctggagggaagcgctccattattcattatttacgagcgttaataggtttgagccacgggggcggggggttgggggggcgacgaggacccagtggggaccgaagcattagaagaagggatagggagggagggggaagggcgggggcggggctgtgccgcggcctggaggaagaggtctcggcctggggcccggcgagccgggcgcacctctccgtcaggtttctccacaccgccggccgtcgaggctgctcagggcgccaagagggcagcacgggccttagattttgctctcggcctctgtccttcgcgtcctcgcccttaccgaggcgtggggagggagctgcggaggccgtacgccccgccctgcgcgccccttgccgccgccgcgtccccgcggcagccccggcctcatttatcatcatctttggtcaagtggagtgtgcaaggaacagctgcttcactcggctgacttcgagggcggctacgggagaatcagggagatgaatgatgggggctggtggcagccccccgcggtccccgcgcaggcgagagggaggcggggacgtccagggccgcctccgcctcatggcgagtgcagcgcccccttcctctctcctggcgcctgcagcgaccggggaccgggggaccggggcaccgaggaccgggcccgccccgggaggggactgggcgcggggacgggggggcgcccttcgccggcggagaactggcgggcgcgctgccggcagagcccgaggttgccgtgaccttgctggggtcagcgggctgggctgcggaggcggcggcgcggcgtctttggtgcgctttccggattggcgcagaggccgggaaacaaggcgggggcgggcgggggaacacaaatagaaggtgaaattttacctgcccctgagggagtcctgcggattttctccggcagcagcaggcgctctgcctttgtcttacacggctgaaacatctgttgcagaggggcggagaggccgcaacaacccccacacaccctgcgctgctccccgtccccctctgccccagccgggctgcaggactccaggcgccgcgttaaccctgctcgcgctggggcgcgcgcccgcactcgctgccgcagtccagcgcctcgcgtggggct

SEQ ID NO: 7001 - DNA, 367 bp, Homo sapiens
  chr17:17687055-17687422
  hyper
cccccctccacctcgatggggtgctgaggtgtaggcggggggcgggggcggaaagggttaatggcctagtcgcagaccctaattgtcagagccggccccgcttcgtttcaattaccctaagtagagactgaatgcgcaattaacgaagtcagcttgccaactggaaagccggccccgctttcacgttgagcagaatactccaccagctgacttggacgaagcaatttcctcctctctctctccccttttttctctccttctctcttccaatccccctccctctttttctctctccttaataataaaattataccaagcagtttgcggtgtggcaggcggccagaaaagcgtttctttaaacgccgcc

SEQ ID NO: 7002 - DNA, 112 bp, Homo sapiens
  chr17:19513145-19513257
  hypo
cgttttatagcaaatagtacaatgaacaaattgacatatataaaaaggaacaaacgatacatgtcataacatgtgaatctcaaacttttttttttttttgtgacggagtctc

SEQ ID NO: 7003 - DNA, 115 bp, Homo sapiens; identical to SEQ ID NO: 6466
  chr17:2326357-2326472
  hypo

SEQ ID NO: 7004 - DNA, 119 bp, Homo sapiens
  chr17:25619839-25619958
  hypo
cgatgttttattaaacatttcgctatttgaagaattaatacactcatgcaaagaaaagatgaagtaaacatgccctacagtgttatcatttgagatctcttaaaagcggctatgcagcc

SEQ ID NO: 7005 - DNA, 310 bp, Homo sapiens
  chr17:25620264-25620574
  hypo
cggctatgcaacactctactctgtcccatgaatatctgccacatatttgaattcccagtcttatacgccccaggcctttgcaatgtttagggtccacacgagaagccattaaaatgcaaatacgtcatctgtgaccgggaaccaagctggcatctagcagatactgacacatttatcagtctgatgtgtggacaactaggtgcctcccagaggccttcaggtaaggtggaggaagggccaattctgagctgacacagtgggatccatcttggccaggacagtgggatccatcttggccaggacaaaggca

SEQ ID NO: 7006 - DNA, 62 bp, Homo sapiens
  chr17:25931759-25931821
  hypo
ggtgacacacacgtgtccacagatggccccccctcttttttcccttccccatctcagaatgc

SEQ ID NO: 7007 - DNA, 181 bp, Homo sapiens
  chr17:27207684-27207865
  hypo
cgacgggctacctgggcaaccccaccgcagctaggcaggcacataccttagacaggtccacgcctgtgagggcatgcacagaggcaggcagctcggccagcagtcggttcacttctgatgtgaccttactgttgtctccactgaggaccacaatctcatcgaccttggtaagtggggcagc

SEQ ID NO: 7008 - DNA, 126 bp, Homo sapiens; identical to SEQ ID NO: 6467
  chr17:27909050-27909176
  hypo

SEQ ID NO: 7009 - DNA, 157 bp, Homo sapiens; identical to SEQ ID NO: 6468
  chr17:27909205-27909362
  hypo

SEQ ID NO: 7010 - DNA, 53 bp, Homo sapiens
  chr17:27940911-27940964
  hyper
gatgaatccttagaggagcgctgtccctatcccttgctccttctggccggtcc

SEQ ID NO: 7011 - DNA, 168 bp, Homo sapiens
  chr17:29232077-29232245
  hypo
cgagagatgtctcccgatatttatggatcagtccgaagttttactacctagaaaattgtattttatacccatcaggaagcaagtagttgaaataattattccaactgcttaaagtttctgatatttttaatttagaggaatctttttgtaactaatatttcctgttaa

SEQ ID NO: 7012 - DNA, 61 bp, Homo sapiens
  chr17:30333052-30333113
  hypo
cgcgcccggccaagtatttttgtttaaattactttttggttgtcacttatctcaataaata

SEQ ID NO: 7013 - DNA, 123 bp, Homo sapiens
  chr17:37583075-37583198
  hypo
cgcgcccggcagtctatctctctttatcttttcttgtatcaagggcaaacagaaaataatgtccattaccatagttctttaatttagaaaacttcactttttttttgatcagtaactcactac

SEQ ID NO: 7014 - DNA, 71 bp, Homo sapiens
  chr17:3908060-3908131
  hyper
cgccgggacgcggcggctctggctcggcagcgccacccggtggccggagacagaggcggccgggccgagcc

SEQ ID NO: 7015 - DNA, 111 bp, Homo sapiens
  chr17:43121686-43121797
  hypo
cgtccccccatcagagactgtcaggtcctgtcccgctgaacccaacccccgtctggaactggctggaatcaccttaaaagctgtggcaagcggatgggtgcggtggctgac

SEQ ID NO: 7016 - DNA, 244 bp, Homo sapiens
  chr17:4545056-4545300
  hyper
aggtctccaatcaactccgcctaccgctggggcccccagctccaaggagcagagcttcaaggggcagaattcagccccagtccaaaaggcggtgtcctggcgagagcagggagtggaaaccactatcttgacgggagggagaaaaagaaaaggatttggaccgaaaacacgcaggaagagggaatcaacgcctggtacagcaggcaggcgaggtgggggtaggagttatgcacgtgtgtaccac

SEQ ID NO: 7017 - DNA, 98 bp, Homo sapiens
  chr17:46670752-46670850
  hyper
cgggcgaggacagggagcagctcgaagccgcttgcctgaagcggggctcctgggcgggcgcggggaaggcgcgcgagctctcgcccaccgccccaaag

SEQ ID NO: 7018 - DNA, 197 bp, Homo sapiens
  chr17:48619736-48619933
  hyper
ccaagtggactttttgcggggtgtggcggccgggtctcgaccacagcgtggatcaccggctgtttaggaaactgcagctgcacaacgtggggtgcaaaactgccccgcttcctttacagctcttctcaaccctcacctccatcccccgtcacccaggcaccttcgcttccagatgctgccaggctgtcactcaattc

SEQ ID NO: 7019 - DNA, 48 bp, Homo sapiens
  chr17:57297129-57297177
  hypo
tcagtcctgggtgatttatttcttttgcattgaagtgtgtggcttttc

SEQ ID NO: 7020 - DNA, 139 bp, Homo sapiens
  chr17:597508-597647
  hypo
cgacctgctctgctgcggcaacctgtaacctattaatacgggatgggggagaacgccgacattcctgcagactgtcgaattctgggtctgactctgtaataccgctagtttgcaagagtccagaaccacaggttgaaac

SEQ ID NO: 7021 - DNA, 112 bp, Homo sapiens
  chr17:61777761-61777873
  binary
cggcgtggggaagcaacggtggcagggacaggatggaagggccgcgctccgcatcctactgggaggggacgagttcaggctgcggcggctgcggtcgcgggacactgggcgc

SEQ ID NO: 7022 - DNA, 76 bp, Homo sapiens
  chr17:61778423-61778499
  binary
cgcacagcaggccggaggcacagccggcgagagacggccactcgctttggagcggcggcgaggccggcgccttccc

SEQ ID NO: 7023 - DNA, 57 bp, Homo sapiens
  chr17:66913081-66913138
  hypo
cgtgtacatgtttgtacaaacacctgtgtataataatacaaattcttggccgggcgc

SEQ ID NO: 7024 - DNA, 205 bp, Homo sapiens
  chr17:68164928-68165133
  binary
tggagagactgagggcggacaaggcgagagggaacgagccgtccacccttcggagaagcctaggcgccttgtaagtaattcgcgaacagtcgggagaacaaacagccaagcggcgctgcagtggccgcacttgcgcgcgtctcaatcctgggggctctgcgcgcccgccccagtccctcgccccattgactcagtggcttctccg

SEQ ID NO: 7025 - DNA, 81 bp, Homo sapiens
  chr17:73584287-73584368
  binary
ggcggccgagcctgccaccgccgggggccagggaacccctggtggccgcaggaagcccactgcagaggggaacggcggctg

SEQ ID NO: 7026 - DNA, 170 bp, Homo sapiens
  chr17:73584951-73585121
  binary
actgggccggccaaggacgcgagcgacaaccgggcgcagcggggcgccgagccagaaacaatgcaggcctcgacggcccgggctccgcgccaccaggtcggaaaggcggtggggcaggtgccagcggcggcaggcgagggcgaagcgggagccgcagcaggagcggggcc

SEQ ID NO: 7027 - DNA, 193 bp, Homo sapiens
  chr17:73615737-73615930
  hypo
cgagacccaccaccttcctgtagggcgagagtggcagcgacgtgcagctgttagccgtgtcccaccgtgggctgcgactgctcaaggtgacccaaggccccggcctccgccccgaccagctgaagattctctgctcatacaggtgcgctagcccacgaccctgggctagaggtgggggcaggtggcaaggtga

SEQ ID NO: 7028 - DNA, 109 bp, Homo sapiens
  chr17:73616587-73616696
  hypo
cctgccgacatagtgcagccggctgccgctcccgacttttccttctccaaggagcagaggagtggctggcacaagggtcagctgtccaacggggaaccagggctggctc

SEQ ID NO: 7029 - DNA, 185 bp, Homo sapiens; identical to SEQ ID NO: 6483
  chr17:74042063-74042248
  hypo

SEQ ID NO: 7030 - DNA, 124 bp, Homo sapiens; identical to SEQ ID NO: 6485
  chr17:75132773-75132897
  hypo

SEQ ID NO: 7031 - DNA, 93 bp, Homo sapiens
  chr17:75447727-75447820
  hyper
ccctgggccccggcccgaggccggcaggaccgagcggggtccccaggagaggggtggcggggagctcgatctccacgcggggaccagattttc

SEQ ID NO: 7032 - DNA, 148 bp, Homo sapiens; identical to SEQ ID NO: 5760
  chr17:76034983-76035131
  hypo

SEQ ID NO: 7033 - DNA, 489 bp, Homo sapiens
  chr17:76395100-76395589
  hypo
cgtcttcacccagagcagaaatgctgcgagtgggtggggtagtgccccaggagaaggttgggtgcagttaccaggagaagggtgaatgggtgctgtgtggcaagaagagcaggcgtctgccacgctgaggacttcaggcctgagacatggccagcatgcaggacagaggttggcctggaagtcctctggctaggagtagccccagctggtgtgactgattcaggtggacggcacaggtgaaggcgaggccacgtggaggtggctcctcattgggggcaggacgccttcctgttgtgagtcaggtgccgttttctctgtccgtgttcaggccggaagaactcccgcacaatgctgctcccactcctgcggaggttcccagagcaggtccgagtctccctctttcacacgccgcacctccgtgggctgcttcggctcctcatccctgagcgcttcaacgagaccatcggcctccagcacattaaggtgtac

SEQ ID NO: 7034 - DNA, 50 bp, Homo sapiens
  chr17:76395713-76395763
  hypo
tggagaacctgcttgtaggtctggctgctgtgcacccgcggcacctcccc

SEQ ID NO: 7035 - DNA, 657 bp, Homo sapiens
  chr17:7760506-7761163
  hyper
cgtccgaatcctgcgcggggtgtaacaagcgctcagaccgcgcagcccaggctgcccgcccgcggaaccacagctcccggcagcccgcggggcactcacacaaagcccagaggctgccgggagctgcagttccccaccccctccatcttgctgcttgactgcccctcagtcccagaaccagagcccgtgctaaccccagcactggagctgctctgacgccgactgcaacagccattctcttctcgtagcagcatggtcggtccagctccggccatttgcccggaggcctcctctgggcctttcaacttcctaagcacctttcaggttgggtggtccgagatctcgcgagcgctcccgacctctttcctttcgcgagatcccctctcctccccctcctagtctcctcggcaacggcacagatctcgcgagcttctcctacttctctagcgctgtggctcactgaagcgtactacgccggatgtcttaagatatcgcgagacctttacctctggtttcttacacatcctttagaaactggaatttagcgagaatacattctttcatactgcctcctcccttgtttttctgtctcagagagatagtctgtcctaaatatcccatgtagcccaggccactgaattaaaacggagcgtattc

SEQ ID NO: 7036 - DNA, 392 bp, Homo sapiens
  chr17:7761197-7761589
  hyper
cgcaactcaattacttgatccttatatgccccacgcgggactcatactacgtttcccgtgaacacgtgcagtccaaaccccgcccctgatatttatctcagtggacggtggccggaaaaggacaatggtttccatgtcagcggataaacgctctcccctcggctcccggacgcgacggaggtcgtagtagtagtgagtacgtgctgaggagcaaaggagtaaccaagagatccagtgaccgacagagcaagagccatgccgcgccggggcctggtggctgggccagacttggagtattttcagcgtcgctatttcacgccggcggaggtggcccaacataacaggcccgaagacctctgggtatcttacctgggacgcgtgtacgacctaac

SEQ ID NO: 7037 - DNA, 188 bp, Homo sapiens
  chr17:77825812-77826000
  hypo
agcttgaagccagctatggctggagcttttactcaacagaaattggtaaacacgacaaatcgtgacttgattttttcttttgttgattgtctatactttagaaagtgatagaaaaaaaaaaaagaaagtgatgaaaaagtgttaatcatgcagattaaacttaaaagtgtgtcctgttggctgggcac

SEQ ID NO: 7038 - DNA, 273 bp, Homo sapiens
  chr17:78668243-78668516
  hypo
tggagtgagagtgtcttccatatgtggggccgtggtgctgaaggcttgtgcgttgagtgcctcctttcccgtgaatgtgttggttctggtgaccagggtggagcctccctgcgccccttccttccatccagcatcaggttcccagttctctgcctgccaggcaggcgtgcacatatggagtgtctgggaacctgcagctgttgatcacggctggtggtagctccgcacttaagtaaggaggagtgattttcccgaggagatgtggtattggtc

SEQ ID NO: 7039 - DNA, 212 bp, Homo sapiens
  chr17:78791780-78791992
  hypo
cgcatgccacaggtgagcccggaagtgtgggggaaggtggagataaaccctcctgccaatggcagtgaaggagagtttgaggaggcgcgggccctgttggggggccaccccggcatctgccacatctgttgttggagtgtcatctgttttattttagtcgccattttgcatcagggtcagctgtgttgactcagcagagaaacaggtaccac

SEQ ID NO: 7040 - DNA, 279 bp, Homo sapiens
  chr17:79913166-79913445
  hypo
ctatttttttttgttctggtttttcttcttttgttttctcaggacctctatttttaaataaggagggagctacccggcgtggggctcccggggcccacacactcacggcacgtccttgagtgtgtggcgcagctcgcggccgaggttctggatgtacagccgcaggccctcctgcaccggctgccccgtcaggtgcacgttgtccaccgtcagctgtgcctcgtcaaacagccactgcaccacgaacacagggcctgcgggcggcggggctcagttcgg

SEQ ID NO: 7041 - DNA, 112 bp, Homo sapiens
  chr17:79988364-79988476
  hyper
cgccgcccactggtgggacgtgaggccagccagagagcggggctggccaggtctcccgtgctgaggccgtgccacggtgcgctggggctgcgtccgctcactgcgctccttg

SEQ ID NO: 7042 - DNA, 522 bp, Homo sapiens
  chr17:79989097-79989619
  binary
ccagccctgcagggagggcctgccggggtgcggctgttcgcccctcctcgccgctgccttgaagggacgggagggccgcgggggctgtccgtctgggggttcgggcggctgcagaccccggagttcccagctggctcccggcggcagggggcgggtccccgagaaagcgcagcgcgcggagccctccccgccgggtccaggtcgctgggctctctccggcctgcgctgcgccccgagggacccgtaggagacccccgggccggggtcgcgctggaggcgggggcgccgcagctcgcgcagctctgcccgggttcgggcggccccgccccgccagccgcgcggccgggcgccccccgcccgcccccgcccccgccccccgccccccgccggccgcgctcggctgtctccgcgcccggcgctcggcggcgctcggctgtctccggccgatcgctcggcgctcgggtccgcggccgctgcggcgccgggcatttctccgcagctcggctcgcggccgcgcccgcc

SEQ ID NO: 7043 - DNA, 106 bp, Homo sapiens; identical to SEQ ID NO: 6486
  chr17:80491467-80491573
  hypo

SEQ ID NO: 7044 - DNA, 86 bp, Homo sapiens; identical to SEQ ID NO: 6487
  chr17:80491602-80491688
  hypo

SEQ ID NO: 7045 - DNA, 69 bp, Homo sapiens
  chr17:8055823-8055892
  hyper
ctcttcccggcgcctgattggctagtggtctccactaaggtcagggctgtgtcacacacacgggcgcac

SEQ ID NO: 7046 - DNA, 58 bp, Homo sapiens; identical to SEQ ID NO: 6488
  chr17:80747254-80747312
  hypo

SEQ ID NO: 7047 - DNA, 52 bp, Homo sapiens
  chr17:80794418-80794470
  hypo
cgaagccgcattatttcacattgctgatacctctagcgcctgaaacacaagc

SEQ ID NO: 7048 - DNA, 33 bp, Homo sapiens; identical to SEQ ID NO: 6493
  chr17:80797632-80797665
  hypo

SEQ ID NO: 7049 - DNA, 70 bp, Homo sapiens
  chr17:80832134-80832204
  hypo
cgcactgtgggctgcaggcttgaagaaggatgtgagtttctggagtagcctggactgcacagccagggcc

SEQ ID NO: 7050 - DNA, 86 bp, Homo sapiens
  chr17:80832796-80832882
  hypo
cagtgggtgcttgggatcagagcatcagagtggaattttcgcagggaaatggaaatgcctgatcgagctgggcggtggcagcagcc

SEQ ID NO: 7051 - DNA, 188 bp, Homo sapiens
  chr17:81062393-81062581
  hypo
gggttcaaaacagcgcgagtcacaggagacagaagggaatctgagcttgcgattgctcattcttgtcaccctcctggctctgggacacctctgccatctcctaccaagggtaccccattcctggcgagttggaaagtggcctcatgggcagaaaacgagggcaaagggagctgcgtgctgtgagagac

SEQ ID NO: 7052 - DNA, 130 bp, Homo sapiens
  chr18:13195846-13195976
  hypo
tagacatttttaaaaagagataagaggaaaaagataagcagacatgggagacacacggctcctacgtgtacagagaatcaggctgtttgtttacttcacctccgttggtctttggggctccacgctgccc

SEQ ID NO: 7053 - DNA, 196 bp, Homo sapiens
  chr18:20512643-20512839
  binary
cgattcttttacaaatcaggagaaataggaatacctactatcggtttgaatctcaaacgaacagccacaagaaaaatggactttttaaaaaaaattatctaacagcatgttgtcccaataaataatgctgaaggagattccttctcgtttcaaatttgccagaaacttcccgtttaacctcagcaaaatacagatc

SEQ ID NO: 7054 - DNA, 1232 bp, Homo sapiens
  chr18:20512902-20514134
  binary
cgacaaggccgaaaactatgttagacggatccgcgtccataccccccatcagttaattttaactcttcattcggtacaggtcactctacacatgcttccctgcaaaatgcttaagctagacacagtgtacagataactttcacagaaccgcaagggcttgatgctcccccaacagaacggcttgagctttccccagcgcaattcagaaatgctgtggcggtcgccagactcttcgggtagctcccggcagctccgaggtagcgctcccctccccaaccatcgccctccgggatgggccgcaccgaagagcccgctcctcagctagggcacgaagtgcgccgccgcgatgggcagctggaggaaggggcgtgacgcaagtggaactcccgcgtgacgtcgcgcgggctcccgggcggggcgggtccggccgcctccgagcccggccggcagcccccggccttaaagcgcgggctgtccggaggggtcggctttcccaccgaggatttggcactctggtgagggaaaagggcgaaagagaaaagcgagcagccgtcctttcacagcctcagaaagtgctcgcttcccttcgggggctttcgcgaatcccgaggcaatctcggaggcggtgagtaaaagcaatctctttaccccacccggagctctgggtcggagcgactgcttctggtctggagctgcgtgcttggcgaagggctcccggggtaggggtggctcccggctctggggttgtgtctgatgaaataggccgggcccgggctacactcggtggtggtggaccggcgggaggacgagcgctacctcagtactacttctgggtctcccgcgcgggctgaggaagcgcctttcgccgccaagcccgccccgcgcatgcgccgactgcggctcgcgcgcgcgcttcggaggttttttggccagacccgcacgcggaaccggcgcgggcacctggggagaaatggatggagaagggacctggctggaaagcctttgccccgctgctctgctccgcccataagaggacccctgaaatgtcccgtgcagtttgttcaagtcccctgtgtgatgaaatgtgcctctcgccttacccgtgtgagaatacctgtggtgtggcagcgagtattttggtgagcacctgcagtgtagtggtttatactaaggaatacacacaaattacaggcctttgagcccagaatgcaacttgggaggtaagacgtgac

SEQ ID NO: 7055 - DNA, 94 bp, Homo sapiens
  chr18:3119830-3119924
  hypo
cgaggtgcggtgtggaggcaggtgtctgtggtttacctgggacggcgatggtccactcttcacatttgaagcattcgcttactgcggagggcgc

SEQ ID NO: 7056 - DNA, 1208 bp, Homo sapiens; identical to SEQ ID NO: 5765
  chr18:32556625-32557833
  binary

SEQ ID NO: 7057 - DNA, 65 bp, Homo sapiens; identical to SEQ ID NO: 5766
  chr18:32557864-32557929
  binary

SEQ ID NO: 7058 - DNA, 445 bp, Homo sapiens; identical to SEQ ID NO: 6006
  chr18:32558003-32558448
  hyper

SEQ ID NO: 7059 - DNA, 126 bp, Homo sapiens
  chr18:3330588-3330714
  hypo
cggcagctgtgccaatagaaaaggaaaaggactacctgggggcggccatgtccaacatggaggctccatcttctctttttttgttatcacgtgtacagtaataaagaaatgggcaacatggtgcac

SEQ ID NO: 7060 - DNA, 995 bp, Homo sapiens
  chr18:3879130-3880125
  binary
cgttcttgctgacacgactcggacttcaccatggcctggtccatgttcaccgaggccttctggtaaacctcccgggcccggctcacggtgagcgtggaggaccaggcgctcttcttcagcagcggggtgtccaggctgaccggcaggttggcgcaggtggagcacttgacgtcgttgttgctccgggaggccttcaccgcctgctcgctgatggtgttgtaggcctccaggaagtactgtgaggccgagcggtcggggcacctgcccatggtcatcacgcccgagggggcgtggtagatgcacatgtcaccatccaggttgtcgtccgagctccaccagcccggggaggtgctgggccgggccttgggctccgcgcgccgctccttgctcttgctgcgtttgccatagcgcgccgcctgcgcctcgtcagggctggccttgcccccgttgacgctgcccttggacggcccctccagggagtgcgacttggtgaagagcttctggaccgagtgcaccaggtggcggatgcggccggggctgtcgctgcggtgctccacggccgtgcgcttgtactgcagggtgtgatagccatcgcggctgagtggcagctgccgctcgaactggtccagcaggttggcggggatgcggttcgccttggtggccagggtgcggggcaccagggcacactcgtccttcagctcttgctgcgaggtgtagtgcctgcgggggaaggtgctgctggccagcgggtcgctgaaggggcccacgcactcagcctggaaggagttccgctgggtgtagtatgggtggtctgcggggtggtgctccactgggctcagcaggtagggcttgcggtcggagtggtgcgacagcgagtcacaggccgagtcgcaggtgaccccgtggtgatggctgcggctgcctgatagccctttcatggcggaccggaagcagccgccagggtcatggacacccggaagtcaggctccagaccc

SEQ ID NO: 7061 - DNA, 196 bp, Homo sapiens
  chr18:47339411-47339607
  hyper
cgattcacccggggagccctgaccaccgaggccgagcggcgggctcctgtgcgcagctgccccgcagcaggcgcccgcggcctatggcgccgccccattttttctaatacttggactcgaactagtggggtcactgttaggcgaagaaaggaatgacctccaaggtcacatgcaagcaaactttggtctcaactaa

SEQ ID NO: 7062 - DNA, 401 bp, Homo sapiens; identical to SEQ ID NO: 6009
  chr18:47339758-47340159
  hyper

SEQ ID NO: 7063 - DNA, 585 bp, Homo sapiens
  chr18:5237294-5237879
  hyper
cgggcctttcccgcctaccgagcctgcccaccacccgaagtttaagctcatcttggaggacctgacactcaggaagccgtctcccgttgttccaccggctttgtggccccaatgtctgtataagctgctgatttgccttgggaaaacaaaccagcatcgatttcagagaaattactggataatttgcgctgtgaggcgcctagatcgcaaggcgcactccgcaaatgacagccgctcccgtgcacttgtccagtcattcgggtggcatactgtccgggtggaagcccgccaaaataatccatttggaagggacggagggcttcgtcagaaattgccttcttgtagctatgagacattgagcaaaacagataagaactggggcaatggaggcataaacattaaggctaggatgtatttttggggagaaagcggcggctagcagggacgaagctcaacttcatgcgccgcgccccggaatgctttgcctttagccactagcggagccgcccgcctgagggagccctccgggagtgagcgcacgcaaccgtgcagtcagattcctccgccgaccgcggccctctctcc

SEQ ID NO: 7064 - DNA, 537 bp, Homo sapiens
  chr18:5238247-5238784
  hyper
gctggcccgggagcgttcgccggcccacctggtggctttccctggacgtttaacggcgactccgcccggcctcccgactttttgatgcaggcgttctcttacatgactttcttcgaggctagattctcgaaagacatcctgaaggtggctttcttaattagctgcctcaccggctggcggagcagttcgtagtcgcctacatcgagagggagagccccgtcctggctcagtactggggcttcgtggacgcgctgtagcgggtcttcgccgtcgtgggtaggaaacagtcgggccggatccccggtgtctggggagcggctgccggccgggcccgcgcgagccgcttcactcctacaagcccggctcactagttccaagctgctggactttgaccctcgctgggaagcttgatcgccgcctgttctcgccaatctctatgcctttgcactgcccagcaacccggtcactgcccaggacctgttaaaagttgaatggacctcccagaatcacgccgctgccaccgccgtttctagagac

SEQ ID NO: 7065 - DNA, 84 bp, Homo sapiens
  chr18:54483312-54483396
  hypo
cagggcctgaagcaaaagtccaggaggaagagcatgaccttgttgacgatgacatcaccactggtaagcacagacatctttaac

SEQ ID NO: 7066 - DNA, 128 bp, Homo sapiens
  chr18:60609821-60609949
  hypo
cggtgagcggtgacattatatctagctttgagtgaatctgcgtgctgagcctgccgtgaggatttaccgtgtttccatttcattggcttttatccatctaacaagttagggcttgaacacacacccac

SEQ ID NO: 7067 - DNA, 101 bp, Homo sapiens
  chr18:60985398-60985499
  hyper
cgacatctcccggttgacgctctccacacacatgaccccaccgaactcaaagaaggccacaatcctcccccagttcaccccgtccctgaagagctcctcca

SEQ ID NO: 7068 - DNA, 75 bp, Homo sapiens
  chr18:60985973-60986048
  hyper
gaagaggagttataatccagctattttattggatgtgctttgcattcttggacgagggggtgtcttcaatcacgc

SEQ ID NO: 7069 - DNA, 133 bp, Homo sapiens
  chr18:74113780-74113913
  hypo
cgcgctccatctctccaccaaccacacccccgcgccgcacccctccactactgtttataggctctcaagagggacagggaaaaccagtattgtttgagtgccaactctgcataaacaatttccacagaatgac

SEQ ID NO: 7070 - DNA, 61 bp, Homo sapiens
  chr18:74113942-74114003
  hypo
gtgtgtacgcgcgtgtgtacacgtttgtgtgtacacgtgcgcgcatgtgtgcacgtgaacg

SEQ ID NO: 7071 - DNA, 79 bp, Homo sapiens
  chr18:74518710-74518789
  hypo
cgctggtctttacgatgaccggttgtgacatgtgagcctcagtcctcgctatatcagggagtagcttcctccgactatc

SEQ ID NO: 7072 - DNA, 467 bp, Homo sapiens
  chr18:9478452-9478919
  hypo
cgaacaccacatgcctcgcgcccaaaaggacagcagaccgcgcttcagaacggaaccgccttctccatgtaaacttttgacgtaaactgtgtgcttcagggtggcctcttcttctccgagatcctctcctgcgtcccgagtttgggaatggcccggccgtgctcaggcccaggcggtggaggcctcggtgtagtagtgccgtgcttgtcgacgttcccaggagtccgggttcagaagccccctctccggtggattggcagcttcgcggtagctgggctagtcttcctctggaaactcagtaaaaagagtcggcgctgtccgcctgagcgcgggtttcctaccgagctagaggccagcctgcctcaggcgcagaagggtttgccgccggccttggtcagggcgagcagctccctggtggcgcccagagctggggtgtcctggggcgcggcaggcggaaaggcacgcgc

SEQ ID NO: 7073 - DNA, 81 bp, Homo sapiens
  chr18:9514129-9514210
  hypo
cgctgacgccccacccaaaaaaaggtagatactggaattttccccttaaggcatcttacttttcttgggtaggtcgtgttc

SEQ ID NO: 7074 - DNA, 279 bp, Homo sapiens
  chr19:1005441-1005720
  hypo
ctctgggccatcttctgcctgctggtgctgtccagctacacggccaacctggctgccgtcatggtcggggacaagaccttcgaggagctgtcggggatccacgaccccaaggtgggcggcctcggggggctgcgggtggccttggggggctagcggtggccccgggctgggctgtgtggggcaggggtggtcagctggacgtggaggacgtccactaggccaactctggtcccaagagacatttattcaattaatttatttatttaaagaaaaatagcc

SEQ ID NO: 7075 - DNA, 678 bp, Homo sapiens
  chr19:1080033-1080711
  hypo
cgcctcccacgtgcgccagctgcagcgggaccaggagcccgatgtgcactacgactttgagccccacgtctccgccaacgcctggtaccgccacccagctgccctgtccccggcgcacaaggccctgcctgggagccgggcttccctctgtcgggggcatgaagatgaagctgtcttgccccccatcacctcccctccttttcccggtttcttccactaggtcccccgtcatgcgtgcccggaagagcagcttcaacgtgagtgatgtggcgcggccggaggctgccgggagccccccagaagaaggcgggtgcactgagggcacacctgccaaggaccacaggggtgagtgtccggcggggcccaggggcggacgctggctccctgcgacccaccctggcccttcaccagagacgcctctttctccagccgggcgaggacaccaggttcacaagtcatggccgctctcgatctcagactcggacagtgggctggaccccggccctggcgcaggtgagggaggctctctggcgggctggggtgtggagctgcctcctctcctgagcctcagggtttcatcacccaccggggtgatggagggggcccccctggctgggggagtctgaacagtcctgattcccgcccaggggactttaagaagttcgagcggacgtcatc

SEQ ID NO: 7076 - DNA, 221 bp, Homo sapiens
  chr19:12995851-12996072
  binary
cgtgcaggcgtatggcttctcccctaggggacaaggaagccataagcgccactgtctgcccagtcatgtccccgggtcccctgcatctggccacacccctttactcagcctgggctgggactaggatgaacaaagtgaggcccctagggcacaaaatttaaggaggcactcactctcagaggccagccaagtccaagtcccgccctctgcaacccttcttc

SEQ ID NO: 7077 - DNA, 576 bp, Homo sapiens
  chr19:1333769-1334345
  hypo
cgctttgcacgttgtgcctgttggcctcggtttccccggtaaaacttgtgatggttgcatgaagcccagatccatgaataaaacacgaggtctggagttagtgcttcctctcctacagcgaatgcataatcagcccacaactgcggcgacgaggcgtccgaggcggccgcaccccagcagcgatcggtgattcatggctcgatctgctaattgcctctcgggccggcttcgggctgatgcgtttgacaaggcgaggaggctgagacgtgcattaggcactcagccgcccccgccgcccatggagggcgcgactgctgctccctcttgggggtgatccgtcatttcatccacgggggagttggggacctggggggcaagagagaggctggatgcctgggccctgtttgtaaacagcgttgatttctgagctgagatgtggcgaccaggcccggagcagggctgtattcacagtcgtcgaggggtctgccggccgtggccctgctatggaaccttgggtggggctggggaacaggacctcctgcctcacctcagacagcccctcctgggccaggcacc

SEQ ID NO: 7078 - DNA, 106 bp, Homo sapiens
  chr19:15695669-15695775
  binary
atccagggcctggcgaggggaaggcggagtatttctgagccaagaccctgacagcctctctggttgagcacagtggccccgtgctgagggcgggttgtcccagagc

SEQ ID NO: 7079 - DNA, 162 bp, Homo sapiens
  chr19:16186802-16186964
  hyper
cggggacgtgaccccccccccaggctgacccgttcctcgctctgtcgtccccaggtggaggaggagctgacgcacctccagaagaaactaaaagggacagaggacgagctggataaatattccgaggacctgaaggacgcgcaggagaagctggagctcacg

SEQ ID NO: 7080 - DNA, 621 bp, Homo sapiens
  chr19:16187000-16187621
  binary
gggagcccgcggcggggccaggccggagccccggggccgggaaggcggggagagccgcagggggaggaggaagaggaggaggagaaggcggcgcctcccagcgctttctccaaataagtcccgaaaaggggcactttccagcagctgtggccagcggtgccgacgtcaggccctcccccagcggtgctgacgtcggcggtccggccgggtgacctcatcgccccgacggcagccggcccggggggcggggagaggcgggggcggcccccgcgcaggcaaaggcttggggggccggggcgcggctgtgcagctctcgccggagccgagcccagccgagcgtccgccgctgcccgtgcgcctctgcgcctccgcgccatggccggcctcaactccctggaggcggtgaaacgcaagatccaggccctgcagcagcaggcggacgaggcggaagaccgcgcgcagggcctgcagcgggagctggacggcgagcgcgagcggcgcgagaaagtgagcgccccggcctcgggccccgcacccgcagcctcctcccccgcgcgccctcctttcttcccggcttcccgcgctgcccgcccgcgcgcagtcctcgggccgcctttttac

SEQ ID NO: 7081 - DNA, 634 bp, Homo sapiens
  chr19:16187640-16188274
  binary
cgacccacatccctgcgcccgcagccaggaccccctacttcctccgccgtcctccttcctgggcctgggacaggggagggggcgccgcctccgggtcgggcggggccggccaagcgggaaatggggggatggggcggagggggtgagcgatctccgggtggagaagtggagcggcgggagggggcgtatcgtgcaggctccgactccggggctggcgccggggtcccgggccgaggggaacccgcgaccggacttgtgggggagaatgaggatgaaaacgtggagcttccattgtctagggtttgaccggccgacagggatttcgacgggggaccggggatctggggagggggtcgcactttctcgcctctttcgcggcttcccggcttctgcttgcttccctgaccgttcccaggggcgcggcggcgacgtgtctgctccaggcggcgggggggatggggggtggaggaagttcagccccaagccgcccgcctttctccagctgattcctgcgggaaccggggcggcgggaccctgcctctctccagaaggccccgggaacgctggcgcggggccctgaacccacgatcgtttgagcgcctgctgtgcgcctccgccgcgagtcgcagggccc

SEQ ID NO: 7082 - DNA, 376 bp, Homo sapiens
  chr19:17172577-17172953
  hypo
cgttccctgggggtcagaatcgcccttgagtaagaactggttttaaggtgtggcaggcccagtctgatcccctggccacaccagcattcccagcttcatgcatggccttcaacccaattagatggggaaagactagcaggctggctctagtgtgcctgcttctcaaccacgcctgggaagggcatagcgcgaattctcacaaacatctacaccaggagtggcaaattgtagctcataggccaaatccagcccgcttcctttgcttgtaaatagttttattggcacacagctatacctgttcctctatgtctggtctggggttgtttttaatgttacaaacagcagagctgagtcttcttgttgatgttgttgagac

SEQ ID NO: 7083 - DNA, 88 bp, Homo sapiens
  chr19:1807818-1807906
  hypo
cgggaagtggctccacaggtcctgagaacatgctctgggctcctccttccccctcgcctctgaggtcagctgggagggcgggggccag

SEQ ID NO: 7084 - DNA, 90 bp, Homo sapiens
  chr19:18092401-18092491
  hypo
cgagcctgtggggtttcaggccaggctgacgtcactctctgggggcgcggtggggctgggcagggagcgcggcgcgtgtctgacacccat

SEQ ID NO: 7085 - DNA, 62 bp, Homo sapiens
  chr19:18092885-18092947
  hypo
cagcatctcctcctggatcatcgcagcctggaccgtgcgcgtctgcgagaggtgcgaccgcc

SEQ ID NO: 7086 - DNA, 354 bp, Homo sapiens
  chr19:18117804-18118158
  binary
cgatccccatcacgggctgagggtgaccgtgtttgtttatgaccgccccctccacccacacacctcactgaggtggtggaagtctcctgagccaggctcagaggcggacagtcacggcaggggatgggttcagcggcagcgcattacgctgccacgagagggcgccagcgtcccgcagacgacgcagaggcaactcccgctggagaaactccatgcgacttttctttggggaaactgaagcccagagagaggtcacgccgtcccgtggccacaccgcagctgtggacctgggggtgcccgagcgtcccctgcattcagctctgtggcgggacgggggctgaggatgactggagc

SEQ ID NO: 7087 - DNA, 37 bp, Homo sapiens
  chr19:18118537-18118574
  binary
cgggggaaacaggcctggaacagtcataggctctctg

SEQ ID NO: 7088 - DNA, 99 bp, Homo sapiens
  chr19:18119043-18119142
  binary
gcgtcggcatcttgagctgccggttcgcgagttcgaggccaggttccgcctgtcgtgggttcgcaccccggacgcgatgctattcgacaaggtgaaagc

SEQ ID NO: 7089 - DNA, 41 bp, Homo sapiens
  chr19:18241264-18241305
  hypo
cgatctccggtcccagcaagcctggccctctgtccccaggg

SEQ ID NO: 7090 - DNA, 124 bp, Homo sapiens
  chr19:18241355-18241479
  hypo
aagatcaacaaacagaacttgatcctgcgtaaccagatccagcaggtctttgtggagcgtgacattctcacctttgccgagaacccctttgtggtcagcatgttctgctcctttgagacccggc

SEQ ID NO: 7091 - DNA, 109 bp, Homo sapiens
  chr19:1857456-1857565
  hyper
tctgactcaggctgggcccgggtgagctcaggacagcctcggaaacaggcaggctcagaaaaatggagtccaggaagtcctggaaacctggcccggccccgtctgagcc

SEQ ID NO: 7092 - DNA, 276 bp, Homo sapiens
  chr19:18867553-18867829
  hypo
cgacagtcaccttgcagagggagacacaccccgatagtggagtggggtggtgggtgaatttttaatactgctcagaaatccattaatgtctccataatgttggtggaatgcttttcaaagtattcttgagaacgtgatcgccggtgtgctttgcagaaatccggtaatgaagcgaatgtttactctcagaatgaaggaggctctggccaagcagaaacccattcagccggcgttctccacagaggcttaacacccgccggtcgcacgccacccctc

SEQ ID NO: 7093 - DNA, 165 bp, Homo sapiens; identical to SEQ ID NO: 6511
  chr19:18963604-18963769
  hypo

SEQ ID NO: 7094 - DNA, 306 bp, Homo sapiens; identical to SEQ ID NO: 6515
  chr19:1977026-1977332
  hypo

SEQ ID NO: 7095 - DNA, 233 bp, Homo sapiens; identical to SEQ ID NO: 6516
  chr19:1978023-1978256
  hypo

SEQ ID NO: 7096 - DNA, 116 bp, Homo sapiens; identical to SEQ ID NO: 5770
  chr19:1979018-1979134
  binary

SEQ ID NO: 7097 - DNA, 89 bp, Homo sapiens; identical to SEQ ID NO: 6517
  chr19:2204172-2204261
  hypo

SEQ ID NO: 7098 - DNA, 92 bp, Homo sapiens
  chr19:2524648-2524740
  hypo
cgtgtgtgcgtctgcatatgagtgtgtgcataggtgcatttgcatacgtgcatgtgtgtggacatgcatgccagtgtgcacgtgtgtatgtg

SEQ ID NO: 7099 - DNA, 72 bp, Homo sapiens
  chr19:3219654-3219726
  hypo
agatgtgcccaagctcacagcctcactattctccgtgctcacagcctcgctattctccaggctcacagcctc

SEQ ID NO: 7100 - DNA, 267 bp, Homo sapiens
  chr19:32845502-32845769
  hypo
cgtcattgaaaaattgagagaaaggacagaccaaaacgcttcagacgatgacattttgaaagagttgcaggacaacgcccagtgccaacccaacagcgatacaagtttgtccggaaacaatgtggtggaatacatcccgaatgctgaacgaccctaccgttgccgcctgtgtcactacacaagtggcaacaagggctacatcaagcagcacttacgagtccatcgacagagacagccttatcagtgtcctatctgcgagcacatagc

SEQ ID NO: 7101 - DNA, 158 bp, Homo sapiens
  chr19:32850587-32850745
  hypo
cgttggatccatgtctcctgcgtttcggagagctgcatattcatgtcagtcataacctttgtccctgtaacctgtcagttaactagaaagaattatacattgcatagcacttaaaaatttgcggccgcttttcctttcttgttgcgttggtagctgac

SEQ ID NO: 7102 - DNA, 78 bp, Homo sapiens
  chr19:33209597-33209675
  hypo
cgtaactttacttcaccgtcttcatttacatcgggcgtaccccaagcagaaggtatttaaattcacagaaattctgcc

SEQ ID NO: 7103 - DNA, 88 bp, Homo sapiens
  chr19:33557659-33557747
  hypo
cgccctcagcggtcgcgatagatgccacaggtggaacagaatgcaatgtgctgcaaaaccagcccagcgttaacatatctttaaaaaa

SEQ ID NO: 7104 - DNA, 230 bp, Homo sapiens
  chr19:3360723-3360953
  hyper
cgactgtgcgcgcgtccctgcgggacggtgttgtgaaactatggctgggctgcgtgtccgcggagccgcgtgtccctgggtgaccgtggggtgtccccgtgtgggtgtgtggcggttggggggggtcgccagggagtggagaactgtcgagtggccgcgttccaggggacagttgggtgccgcttgctgtgtgcgagtgactggcgctgagcctccccctagggaagggt

SEQ ID NO: 7105 - DNA, 169 bp, Homo sapiens
  chr19:38873767-38873936
  hypo
cgttgggcagagtacgattggtgagaaaagagagcataggacacgtgggcaagtgctggccccatagggtggggatggagcctttgtgatcactctactcgtctctaatccctcctttcctgcagcgagggtgggtcctgggccccaacaactactacagttttgccag

SEQ ID NO: 7106 - DNA, 72 bp, Homo sapiens
  chr19:39094650-39094722
  hypo
cgctactagggagggtgaggtgcatggattgcttgagtctccgaggtcaaggctgcagtgagccatgatcgc

SEQ ID NO: 7107 - DNA, 86 bp, Homo sapiens
  chr19:39289891-39289977
  hypo
cggaaagattctttgtttatattggtgaaatgcacaaatctaaaatgtacagttggctgggcacagcgactcacgccggtaatccc

SEQ ID NO: 7108 - DNA, 57 bp, Homo sapiens; identical to SEQ ID NO: 6521
  chr19:39329516-39329573
  hypo

SEQ ID NO: 7109 - DNA, 137 bp, Homo sapiens
  chr19:3978022-3978159
  hypo
cgcctttatcgatgtcctcggccaggccgtcggggaagggccgcgccttcatgtacagccggttgtgcttgttgggggacttggagaggcagagcacgttcgactcttcactgaccgtctcgcggtacgagacgacc

SEQ ID NO: 7110 - DNA, 359 bp, Homo sapiens; identical to SEQ ID NO: 5776
  chr19:41190162-41190521
  binary

SEQ ID NO: 7111 - DNA, 575 bp, Homo sapiens
  chr19:42424093-42424668
  hypo
cgcccagacgtgacgaactcacagacatgacacgcccacagacgtgacacacccagacatgacgaactcacagacatgacgcgctcacagacatgatacgctcacagacatgacacacccagatgtgacacactcacagacatgacacgctcacagacatacactcacagacatgacacgctcacacatgcgctcacagacatgacacgcccagacatgatgcactcagacatgacacgctcacagacatgcgctcacagacatgacatgcccagacgtgacactcagacgtgacgtgctcagacgtgaggcacagacatgacatgctcacagacatgataacgctcacagacatgcgctcacagacatgacatgcccagacgtgacacactcagacgtgatgcactcagacgtgacgcacagacatgacatgttcacagacatgacatgcccagatgtgacacactcacagacatgacacactcacagacatgacacgctcacagacatgacacgcccagacatgatgaactcacagacgtgacacacagacatgacgcactcagacatgacac

SEQ ID NO: 7112 - DNA, 387 bp, Homo sapiens
  chr19:44099002-44099389
  hyper
cgctctagctcctcgcagccgtcgctgctgccgcagttcgccggtagcacaaacagatccgcagctcctaaccccgcgctgttcagcagagctgctgtctgatcacgggcctgggcggcagtctgtgaatccccaggacggaggttccgcacagccagtagcggggtccctcgggccagggcggccagcgctgcctctcccagggctggagccaacggttccccgttcccctcgggtccgggcagcaccagtaccagcacgttggcttccgccgcccagggccccggcgctgcgggtgggcagctcagctcgcccagaaaaaggcctgggcccgcagctcttaggctgggaaccccggagtccggccgtccctcgggggcctcgagc

SEQ ID NO: 7113 - DNA, 68 bp, Homo sapiens; identical to SEQ ID NO: 6053
  chr19:44711963-44712031
  hyper

SEQ ID NO: 7114 - DNA, 133 bp, Homo sapiens
  chr19:45603745-45603878
  hypo
cgtttgccccaatttgtagatgaggaaatggagcccatagaggtaaagtaattttcctgaggtcacacagtgggtaagtggtggagctgggattcaaatccaggcagccagcctggcgccgaagcctgcgcag

SEQ ID NO: 7115 - DNA, 334 bp, Homo sapiens
  chr19:45603910-45604244
  hypo
acgcattcggtgcaacgtgccatacggtctcttcatctataacccagaatcgtttataaaatagaggcaacagtgctggctttgcggtgttgtggcagggaggagaaacagaaacaggtggggtaagggcccagccttggtgggcacgcaggagggggtcactgtggttcgtggacagcttgagtccctggagatttgtgctgctcctctgtcctcagcattgcctgctgttctgacccttggcctctgggacgtgttcttcctgtgctactcagtgtctggtatgtgataggcgctcaatatattcttgctgcgtgagtgacttggtgacccc

SEQ ID NO: 7116 - DNA, 201 bp, Homo sapiens
  chr19:45656461-45656662
  hyper
gatcttcttgcgctggcttacgaacaggtgcttgcccaccgagtacacggccatgagcagccccgagcccgacagtgtggtggccgcgccgccaaacaccttgagcaggctgccgctcgggctgccgtggcccagcgcgtggccgcccagtgacaagtagagcagccccacacccaggcccagcgccgccagcagcgccag

SEQ ID NO: 7117 - DNA, 183 bp, Homo sapiens
  chr19:46002502-46002685
  hyper
ccgcactggcacgccaggctgaggacgagttcatgctcctggcctctgatggcgtctgggacactgtgtctggtgctgccctggcgggactggtggcttcacgcctccgcttgggcctggccccagagcttctctgcgcgcagctgttggacacgtgtctgtgcaaggtcctgggggcgtggc

SEQ ID NO: 7118 - DNA, 89 bp, Homo sapiens
  chr19:46519167-46519256
  binary
cgagagggtcatgggcccaggagtgcacgtctaggagttgatggggtaggcctgagggttcggagaaggtgcggtcggggaggagtctc

SEQ ID NO: 7119 - DNA, 421 bp, Homo sapiens
  chr19:46519582-46520003
  binary
cgcgctccgcttcgaccccacggcctttgtgaaagccaaggaaaggaagcagagagagatccagatgaagtcagtgccccttcctccctcacctgcccctgtccctggcccgtgcccgctcccgggctctcatctctccacgccaccatcagtctccatcccctgccacctgctcgcttctcgccggataccccgcctgctctcccttccgtccgtcctacctcctcgtctgtgtttctgcgtgctttccgctcgtaggcctgtcacctcaggctttcgctggcgtggctgtgacctttaggggcgcagtgacccccttgcctgcaggagttgggcgtacagaccggcgtctcctttcttttttcccaggcagcagcagcggaaccgcttaggcagtgggggaagcggggacggtccgtcc

SEQ ID NO: 7120 - DNA, 32 bp, Homo sapiens
  chr19:47116867-47116899
  hypo
cgtgagccaccgcgcccggccgtgccaaactt

SEQ ID NO: 7121 - DNA, 126 bp, Homo sapiens
  chr19:47335926-47336052
  hypo
cgttgtttttctgtttacaactacaaggtaaatgtcattcattcaggtgttttgtaacatctttgttgacatatatttacataccattcaattcacttatttaaaatgtatacttcggccaagcgc

SEQ ID NO: 7122 - DNA, 168 bp, Homo sapiens; identical to SEQ ID NO: 6522
  chr19:47482472-47482640
  hypo

SEQ ID NO: 7123 - DNA, 345 bp, Homo sapiens
  chr19:48150921-48151266
  hypo
cgggtgaggattggaagccatgatcgcctgcctctgttgctggttttagtctttaacccttgctctgtggacttgagaaatgtgcttttccatggtgcctgtgaccaagatgtccgcatcgttagtgaagaccctgctatgtccttgaccacactgcacggggatcctgtccacgatggggggtgtcctgttgggcttgagtgtctagatatggagaccgtagttcgcggggggagtggggggccgtttggcatatttgccctggcatttggggttgtttattgggggtgggagtgctcctggcatttcctgggcgggaactactggtgtagacctactggatta

SEQ ID NO: 7124 - DNA, 242 bp, Homo sapiens
  chr19:48229040-48229282
  binary
cgcccctgtctctccactcccactccaggctacgacttcccggccgtgctgcgctggttcgcggagcgcgtggacctcatcatcctgctctttgatgcgcacaagctggagatctcggacgagttctcagaggccatcggcgcgttgcggggccatgaggacaagatccgcgtggtgctcaacaaggccgacatggtggagacgcagcagctgatgcgcgtctacggcgcgctcatgtgggc

SEQ ID NO: 7125 - DNA, 457 bp, Homo sapiens; identical to SEQ ID NO: 6524
  chr19:49971410-49971867
  hypo

SEQ ID NO: 7126 - DNA, 78 bp, Homo sapiens
  chr19:50320125-50320203
  hypo
tttgagacacgccagagcaacacagtgagaccccatctctacaaaaaatttaaaaattagctggaagtggtagtgcgc

SEQ ID NO: 7127 - DNA, 100 bp, Homo sapiens
  chr19:52479250-52479350
  hypo
cggctgatgaaggtttgctggaggcaatcactccctggcgccgttatctactgcgacatctagagaatgcagtcttgcaagactactctggacccctggc

SEQ ID NO: 7128 - DNA, 119 bp, Homo sapiens
  chr19:52715152-52715271
  binary
cgtctactttgcaaacgattgaccgtcaagcccgggtttgagcctgactcactccagaactctggtttatggctgtacacttgcttagatacttacactggcccccaccgcctttgatc

SEQ ID NO: 7129 - DNA, 74 bp, Homo sapiens
  chr19:53463668-53463742
  hypo
cgaatcagctcggataacgggctggagtttgtggctgacttagtacagacgacagcaaaggtattaaagatcac

SEQ ID NO: 7130 - DNA, 340 bp, Homo sapiens
  chr19:54313999-54314339
  hypo
cgtggaaagaaggcttgagctcatcgaagccgtcgatgatgaaaaggaggcgctcgggaactcggatgagctcctggagaggcgcgctgggctcaggccagcagctgaagatgaggtcttgcatgctgcattccgtggcactctggttcatctccctgcagttgatgtagaagagataatcaaatctgccttggaagagcttcccgtccgcccagtccagcatcaccttgtgtgccagcatggacttgcctatccctgccgcgccttgcatgaccacggtgcgcggtggctcggggcgctcctcgtctggctcaaagagggtctctatcttgatggggct

SEQ ID NO: 7131 - DNA, 99 bp, Homo sapiens
  chr19:549193-549292
  hypo
cgcccgggtggggctgggggaatgaggctggcgggagggccggggccagggcagccgccgggcaggttcctggctctcccgttctctggggagtcctgt

SEQ ID NO: 7132 - DNA, 182 bp, Homo sapiens
  chr19:55691158-55691340
  hyper
accgcctcggtctccacgctgcctcttgaccccacataggcgtcttccctgtgtctgcctccccaacccgcctgtctctcttccctatcgcctggcctctgtctccagggtctctccctctcccctccgcctgcgccccactccccgccctcggctctttgtcttctccatacctgtctcgc

SEQ ID NO: 7133 - DNA, 134 bp, Homo sapiens; identical to SEQ ID NO: 6067
  chr19:56112791-56112925
  hyper

SEQ ID NO: 7134 - DNA, 134 bp, Homo sapiens; identical to SEQ ID NO: 6067
  chr19:56112791-56112925
  hypo

SEQ ID NO: 7135 - DNA, 146 bp, Homo sapiens
  chr19:56688223-56688369
  hypo
cgctgggggaccaggtcggcctgatccgatgatgggggaaggagaggcttaattgcttgcacacgtccaaactcctcaagatgtgtacattaaatgtgcgccatttttgtatctcgatgatgcctccataaagctaaaaaataaat

SEQ ID NO: 7136 - DNA, 171 bp, Homo sapiens; identical to SEQ ID NO: 6525
  chr19:56807013-56807184
  hypo

SEQ ID NO: 7137 - DNA, 37 bp, Homo sapiens
  chr19:5825278-5825315
  hypo
cgcaggtgctgtggggtgagggtggtgcgtgggccct

SEQ ID NO: 7138 - DNA, 521 bp, Homo sapiens
  chr19:5825362-5825883
  hypo
ctgaggcgtggatgccggcagggtgcgtgtgcagcgcctttgggtgtgggccacgagtacgcccatgtgcgcgtctgcgcccgcccctgccagcccacacaatcctcttttcttgtccttacaatgcacaagggtggcctccagcacgagctccacttctgtcctcccaccacttccctctctgcaagcggcgtgaagtccttcctaggactctgggacagagacccgggcgggacccccaaaatccagtgctccaggacttggggtgcggggggcaaagcacgaatggaggaatttcaggcactgcggagggtcagggcccatgggcgggtgcctgtctgccctactgcaaaaagcgagtggccactgactccccaagtccccatgttctaggctcctggtggaatttcaggctggggaccttgtgttctagcccctgtgcaagcagccagccccgctgcagggaggcagggacagacatcctaaaagatgattcattgttgccaggtgcggtggctcac

SEQ ID NO: 7139 - DNA, 406 bp, Homo sapiens
  chr19:603411-603817
  binary
cgcaggctcctcggaggaggcactggctcgaggtgtgggcgcccctcgtcccccaaggaagagtgcccggggctggtcccgcaggtgccccggggaggcaccggcctgaggtgtgggcaccctcgcccccaggttctactgggacttcaccatgctgctgttcatggtgggaaacctcatcatcatcccagtgggcatcaccttcttcaaggatgagaccactgccccgtggatcgtgttcaacgtggtctcggacaccttcttcctcatggacctggtgttgaacttccgcaccggcattgtgatcgaggacaacacggagatcatcctggaccccgagaagatcaagaagaagtatctgcgcacgtggttcgtggtggacttcgtgtcctccatccccgtggac

SEQ ID NO: 7140 - DNA, 159 bp, Homo sapiens
  chr19:603846-604005
  binary
tgactccgaggtctacaagacggcacgcgccctgcgcatcgtgcgcttcaccaagatcctcagcctcctgcggctgctgcgcctctcacgcctgatccgctacatccatcagtgggaggaggtgaggtggggcgggggcggggccaaggcagcaggggc

SEQ ID NO: 7141 - DNA, 125 bp, Homo sapiens
  chr19:640789-640914
  hypo
cggtgtccccgccgggcggggggcactgggaagggggcccgggcccgctggctgccgcctgaatcaccaccatcagggcaggtaatcaccccctgtccttcccaccgctttcatctgggcgccaa

SEQ ID NO: 7142 - DNA, 79 bp, Homo sapiens
  chr19:641007-641086
  hypo
ccggggcagaggcctggctccgctgcctgacctggaacagtctctgcctctctccaagcctcggtttccccagctggac

SEQ ID NO: 7143 - DNA, 385 bp, Homo sapiens
  chr19:7267319-7267704
  hypo
cgagacactgcttagaaccctgtatccccggcgtacctttctggcagtgactatgagtccaacatcgttcgacaaactgcccgttgatgacggtggcggggcagttggtcttgcccttcgcggtacccggacagatgtctccacactcctcgttgtcatctttgttcaacacgatgtaattatcctccacggaatccaggatacgggaccagtcgatagtggccaagtaacagagctcattgttcttctcgatgcggacagaaccccgggtgatgttcatcaggttgtagaggccgagttccttgaggtgaaccatctcgaagatgaccagcgcgtagttaaagaacagtcgtgatccccggatgaccgtgaggttggggaacag

SEQ ID NO: 7144 - DNA, 206 bp, Homo sapiens
  chr19:7267747-7267953
  hypo
taatcagtgatcatgatgagtttggggaaactgaggtctcggaaatcttcgggcctcgttttgaacatcaagagtatctgcaagtgtccttcgatgacagagcaattctccagctcatgcaacctagtgaggttgttccggatatccatgccgggacacactacaagagaaaatgaacagaaagcaagacaggtgagcagacgcac

SEQ ID NO: 7145 - DNA, 86 bp, Homo sapiens
  chr19:7838387-7838473
  hypo
cgcagtagcctgccagcacttgcggggggccacgtgaacagtgtatttactgaagttgtgcacatgcttatttcaggtgtttttcc

SEQ ID NO: 7146 - DNA, 337 bp, Homo sapiens
  chr19:7972050-7972387
  hypo
cgtcttgaaggagttggggggggagagaagacagggccgccagggctctgagcgcagcgccagcctgtgtggggcatgcaggctgtgccccacgcctgtgttgggagagagagtagatggggtgcctggccctgtgagtggttgtgagtatgtgtgtccgagggcaagggggactctgtcccggctgcatgggtgttaggtccacggcatgccccgggtgtgtgttgtgcgtgcgtgcacttgcacggcatgtgcgtgcatgttgacatggcagccggtgcacctgtggctcctgtcggcagacacgtgccctccagcctctcgctctctctcatcc

SEQ ID NO: 7147 - DNA, 291 bp, Homo sapiens
  chr19:813406-813697
  hyper
cgccatgggttcggcgggcgcgcgcaggtgcccggggctggcgtcgtcgggcagccccaggccgcggccctccaggctcttctgcttccactcgctgatgagctgcttggagcgcgaggcgtccagcggcacgtggatggtcatgtggcggcgcgcggggtcgtccagcgagggcgcgctggccctgggcagcgtgtggctgaaggtcaccatgttctccttggccatggggctgcgcggggccagcaggtccacgtccacgctggcgcgcttcaggctgcccagcgaggt

SEQ ID NO: 7148 - DNA, 291 bp, Homo sapiens; identical to SEQ ID NO: 7147
  chr19:813406-813697
  hypo

SEQ ID NO: 7149 - DNA, 322 bp, Homo sapiens
  chr19:813830-814152
  hyper
gcgggggccggggccgcgggcttctctgcaggtggggcctggaagttgcccaccgcgtggcaggcctgtcggggagaggggtctgggggtgaggcctggggctcagagggctcctcccctgtgatcgttggacttgccgcggggggctctggaccgggggtgggggctggcaagctcttgtccagtgggaccggttcccaccccaaggttgctgacccagcacatcgggcaggtctgagcccacgggattctgactccagcattccaagggcgagacacttcagcacccatgccttccccctaagaccccttcgggacccac

SEQ ID NO: 7150 - DNA, 322 bp, Homo sapiens; identical to SEQ ID NO: 7149
  chr19:813830-814152
  hypo

SEQ ID NO: 7151 - DNA, 102 bp, Homo sapiens
  chr19:814741-814843
  hypo
aggtcttcctgtaagaggcgtccagcgtgagccccgcccacctggggaccccagctccagtggcctctctgtgtctctgtttccccgcatgttcaccggggc

SEQ ID NO: 7152 - DNA, 689 bp, Homo sapiens
  chr19:8372877-8373566
  hyper
cgcgccttcccacaagcgatgaagtccaagtccacgtgctgggggagtgtcatgaactgacgtgcggtgcagccagtgactaggcgttgtcggtgcgcggcggcggggcgaagcctcgcgaggggtgggagcccgcgctgcggggcgtcactcacctgcggcctgggcagaggtcggggtggaaagcgggctcgcggcggcctccaggcctagtccgaggccgagcagcagcagcagcgccaggcccagagcccctgttcgccacgctccaacctgcgccatccaaccgccgctcatgctgtccccacagcggcgccggccacgcgctgtccagaccgctctcttatccctgcgcacgcgcacgcgcggggttggggcggggcccaagcccctgagttctgcggcgcccgcggctacgcgtaccgtaaatgtcagaatagcagggaaaagagaattagaggcccgtccccactttccccagtgaccagatcagttgaaaggtatggagcccgcttgaagttagaaacttctggggatgggaaggaatttgttggtgttcatttgcattatttcccgttccaaatgaggactgctgcaaatgttactgcctcgtgatcttctttaatatggcagccacgcccctcaggcactccgcatttcctccctcatcccactgcttttgtggcgcc

SEQ ID NO: 7153 - DNA, 159 bp, Homo sapiens; identical to SEQ ID NO: 6528
  chr19:883424-883583
  hypo

SEQ ID NO: 7154 - DNA, 544 bp, Homo sapiens
  chr19:884311-884855
  hypo
attttgtgccggaggtggggatgacgggcttggctccgtgggtgcggggggcccatcgggcggatagagatgggaatgggggccccagaagaggctgctggagaggtggggtggggtggggggcgtgttctcagcagcctcagctgacccgctgagccttggcttcctctccctgaaccaggttccggaggattccgtgcaccgcccctgcccggtctggcctgtcccctgctgcccgacggccccacccacagacccacgctccacagccgcccacacgcctgcagcccctcacggtgtccccgctggctgagcaacgacacctctcagcctcggcctcgcacagaatggtggcagccgccgcagcgggcgtggaaggatggaggagtctatacgcctaacacactcagaatgctggcaggcgcgcggtcacacccgagatcctagcactactggagatcgaggcgagacgatcgcttagggccggggttcaggaccaccctgggtgacacagcaagacctgcctccaaaataaaaaccaacc

SEQ ID NO: 7155 - DNA, 107 bp, Homo sapiens
  chr19:9129007-9129114
  hypo
cgcccgcccagccaacagagtgacctttcaaaaatgcaacaccggccatgccccgccccggtccgaattcttcagtgccttctcaccgccctcgggaccaagtccaa

SEQ ID NO: 7156 - DNA, 92 bp, Homo sapiens
  chr19:9129229-9129321
  hypo
aattaccctccttccctttacctgattctgtgtcccctaattctctccaggcctcccctacctccctccccagacagaaagcagagctcccc

SEQ ID NO: 7157 - DNA, 255 bp, Homo sapiens
  chr19:945745-946000
  hypo
cggcgtcgacatggccggggcaggcgtgttctggccccttgcactgcccggctcctgctgctggtgctgggctgcgtttctgttcagagaacctgggctgggagtgatgggaccgcagtctcccaccaggtgcctctttccaaatggacactcctgctgggcatgacacttctgaggctttctgggaccgtccaggtcccgtctgcagggaaccccaggacggagttaattgctgagtgcccagctctgggcaaa

SEQ ID NO: 7158 - DNA, 63 bp, Homo sapiens
  chr19:946112-946175
  hypo
ctggccggtctggggggcggggaccctgtacagaacgccccggccgcgtggagtggcaggttc

SEQ ID NO: 7159 - DNA, 68 bp, Homo sapiens
  chr19:956638-956706
  hypo
tggccagtctggcgctggccgggttggggcggagacaaagaccaggcagctggacctcgggcagcctc

SEQ ID NO: 7160 - DNA, 123 bp, Homo sapiens
  chr2:10047588-10047711
  hypo
cggttttaaacatgctgagacaatagccgcccctcctcaacgcctttaaaggtgaccaggtagcctctggggctcggggaaagctttcggcaagtatgtcacacacaccctgcctgagtaagc

SEQ ID NO: 7161 - DNA, 166 bp, Homo sapiens
  chr2:10152421-10152587
  binary
cgtatgagtgtgcgtatgggcgagtcaggtgggcagacgtgcatatgagtgtgcatatgggtgattcaggtggacacgcgtgggtatgggtggctcacgtggacaggcgtgcgtgtcagcgtgtcacgtggacaggcgtgtgtgtgggcgggtcaggtgggcaggc

SEQ ID NO: 7162 - DNA, 91 bp, Homo sapiens
  chr2:10152958-10153049
  hypo
cgtgtgtatgggcaggtcaggtggacaggactgaatatgggggggtcaggtgggcaggcgtgcgtatggtcgggtcatgtgggcaggcgtg

SEQ ID NO: 7163 - DNA, 327 bp, Homo sapiens
  chr2:10153562-10153889
  hypo
cgtttgtatgggcgggtcaggtgggcaggagttcttatggtcgggtcaggtgggcaggcgtgcatatggtcggtttaggtggacaggcgtgtgtatgggtgtgcgtatggacgagtcaggtgggcaggcatcctacaggcgggtcaggtgggcaggcgtttgtatgggtgggtcaggtgggcaggtgttcttatggtcgggtcaggtgggcagacgtgcatatggtcgggtcaggtggacaggcatgtgtatgggtgtgcgtatggacgagtcaggtggacaggcgtgcgtatgggagagtcaggtggacaggcatgtgtatgggcg

SEQ ID NO: 7164 - DNA, 93 bp, Homo sapiens
  chr2:10155172-10155265
  hypo
cgtgcgtatgggcgagttaggtggacaggcatgtgtatggacgagtcagatgggcaggtgtgcgtatgggtgtgcgtatgggcgagtcaggtg

SEQ ID NO: 7165 - DNA, 63 bp, Homo sapiens
  chr2:10156251-10156314
  hypo
cgtatggctgtgcgtttgggcgagtcaggtgggcagacgtgcgtatgggcagtcaggtggaca

SEQ ID NO: 7166 - DNA, 158 bp, Homo sapiens
  chr2:10306915-10307073
  hypo
tgcgtccccgcctgtgtcctaagcactccacaagcatgagcgtgtctagatggtgatggtttgctcatggtctctctctcagagcttttaccctggcggggttgggagcgtggcaatgggtcaccactgaccctgttaggaaacaagtgtgtctgtac

SEQ ID NO: 7167 - DNA, 55 bp, Homo sapiens
  chr2:10600813-10600868
  hypo
gaatgacatccacagccgagacagcagcaatgagggcacatgggaaggatagggc

SEQ ID NO: 7168 - DNA, 291 bp, Homo sapiens
  chr2:10666473-10666764
  hypo
cggctccccgtcccgcctcctcccaccatgccccagaactagcaccccctgagcacttgcttgagccacggtgagatccagaacccggccggagccaggcttcggccaagccgcggccacgctgccatctgacaagcccggggcctgtcccaacaagactgaggcccgtgtggagacaactgcacagtcgtgaccggttgtcctgacagacctgctagcacctcccgaggctgggagggcgctaaggggagctggcctgcctgcccgcctgctgcgggcggcacctccggc

SEQ ID NO: 7169 - DNA, 265 bp, Homo sapiens
  chr2:111874622-111874887
  hyper
cgccgtctcactgtactgaatttcaagaatcatggcctactgccagccaggtcaggaccgaaggcgctagtctggggagactggagcaggtctctagtggttcacctgttcggaggctcttcctgttcagttccctctgcgcgccagagggtggcaccccaggcactccagaggtggagaggaggggacgacaggggaggcaaagagagaggagcggagggaaggaccagggaggaaggaccaaggagggagctttaataaattc

SEQ ID NO: 7170 - DNA, 205 bp, Homo sapiens; identical to SEQ ID NO: 6082
  chr2:111874987-111875192
  hyper

SEQ ID NO: 7171 - DNA, 138 bp, Homo sapiens; identical to SEQ ID NO: 6083
  chr2:111875611-111875749
  hyper

SEQ ID NO: 7172 - DNA, 209 bp, Homo sapiens
  chr2:113103038-113103247
  hypo
cgcccgttttcgaatccatttggcacctccttcgcctaagaatttgcttttccaggcgtcccctttctgttccgtctctgtactgcactaacttcacctatacacaggtctgtatcctcctgttaaaaccactgaccaggactgccgcttctgggtgcgatacagtaacaggcattggattcctcctcttccctcaaacaactagaaag

SEQ ID NO: 7173 - DNA, 89 bp, Homo sapiens
  chr2:113103431-113103520
  hypo
aaatggagcagaggtggagatgagaggagcaagggcagctgcgtgggagcactgccgaggagagcgctggcaggcacagaactccagac

SEQ ID NO: 7174 - DNA, 31 bp, Homo sapiens; identical to SEQ ID NO: 6084
  chr2:118981062-118981093
  hyper

SEQ ID NO: 7175 - DNA, 120 bp, Homo sapiens
  chr2:119615627-119615747
  hyper
tcacctttcactaagatgtttccaatttaccaaggggatagaatgagagacagagatgtgagagatacagagagagagatagagagtgcagggtcgggggaggaggcagagagcggaagc

SEQ ID NO: 7176 - DNA, 98 bp, Homo sapiens
  chr2:127428888-127428986
  hypo
cggagggagagccagagcaggtgcaagcatgcgaggcaggcttccctgagcccgacagccagggacaaccagctaacacccaagttcagaaaacagtg

SEQ ID NO: 7177 - DNA, 74 bp, Homo sapiens
  chr2:135293582-135293656
  hypo
cgcgcccagccttgtttgtatgttttacattgtgtgtgtatatatatttagacggagggcgcacgcgtatatac

SEQ ID NO: 7178 - DNA, 240 bp, Homo sapiens; identical to SEQ ID NO: 5795
  chr2:168149264-168149504
  hyper

SEQ ID NO: 7179 - DNA, 240 bp, Homo sapiens; identical to SEQ ID NO: 5795
  chr2:168149264-168149504
  hypo

SEQ ID NO: 7180 - DNA, 221 bp, Homo sapiens; identical to SEQ ID NO: 5796
  chr2:168149556-168149777
  binary

SEQ ID NO: 7181 - DNA, 98 bp, Homo sapiens; identical to SEQ ID NO: 6535
  chr2:171815760-171815858
  hypo

SEQ ID NO: 7182 - DNA, 86 bp, Homo sapiens; identical to SEQ ID NO: 6097
  chr2:173099596-173099682
  hyper

SEQ ID NO: 7183 - DNA, 42 bp, Homo sapiens
  chr2:175190730-175190772
  hyper
cgtccgacttgtccgggaatggagcagagaaagaggaaccag

SEQ ID NO: 7184 - DNA, 351 bp, Homo sapiens
  chr2:175199018-175199369
  hyper
gtacagagaggcctatttcgctcctctcggaggagctgtcccttcgcgccccctccccagtataactgtgagagtgaaattgaatctagtggaataaggaattgggtagaagacacacgaaaatgataaaaatcacaagcaagaatgatagatacaagctgaagttgtgttctgtaggcaaaagcctggacacacaaagtgagggctcacatttccgtctccacttgggccctgctggtgcgggctgtgtctgggtgtctcctcccctcctgcctcctttcctacaagtggggagtcgagtaggactgtcagccctaacttgcaacatctcggggtggtttgtgtgtgggg

SEQ ID NO: 7185 - DNA, 129 bp, Homo sapiens
  chr2:180886599-180886728
  hypo
cgcggggtcggtgtataataccccccgccgcgatgtggggagtgatatcaccctctctcaccctggatattacgaacaacctcgcggggggtggtggtccataatatccgggtggggggagaggctgat

SEQ ID NO: 7186 - DNA, 34 bp, Homo sapiens; identical to SEQ ID NO: 6099
  chr2:182323095-182323129
  hyper

SEQ ID NO: 7187 - DNA, 175 bp, Homo sapiens; identical to SEQ ID NO: 6104
  chr2:20865462-20865637
  hyper

SEQ ID NO: 7188 - DNA, 450 bp, Homo sapiens; identical to SEQ ID NO: 6105
  chr2:20866660-20867110
  hyper

SEQ ID NO: 7189 - DNA, 291 bp, Homo sapiens
  chr2:219256000-219256291
  hypo
ttaccagggggtgagcgcgggtgggtggggagggcgtgacccagagaggctccccgcctcgggcagggccaccggtcctaccacactcgtccctgcagggcgtgatcctgggctgcctgttcggccccgcggccctctacatctgggccataggtctcctggcggctgggcagagctccaccatgacgggcacctacgcgggacagttcgtgatggaggtagggcagggggcgggcccaggagggcaaggggtccaaggacagcaggcacactactgggggctagaactcc

SEQ ID NO: 7190 - DNA, 113 bp, Homo sapiens
  chr2:219294067-219294180
  hypo
gtggtggacggagagaatgaattggcatccccgaagctgatggaggtgatgaaccacgtgctgggcaagcgcagggagctgaaggcggccgtgcccgacacggtggtggagcc

SEQ ID NO: 7191 - DNA, 595 bp, Homo sapiens
  chr2:219757371-219757966
  binary
cgctcccggcctcagcgtttgcctctgtataatgggagtgggtttcagaagcaggccaggctaagcgctgggaggggagtggggctgcgcgccgtgtcacccctcacggtgcctccctccgcaggcagtgatggagaacatgcggcggaagtgcaagtgccacggcacgtcaggcagctgccagctcaagacgtgctggcaggtgacgcccgagttccgcaccgtgggggcgctgctgcgcagccgcttccaccgcgccacgctcatccggccgcacaaccgcaacggcggccagctggagccgggcccagcgggggcaccctcgccggctccgggcgctcccgggccgcgccgacgggccagccccgccgacctggtctacttcgaaaagtctcccgacttctgcgagcgcgagccgcgcctggactcggcgggcaccgtgggccgcctgtgcaacaagagcagcgccggctcggatggctgcggcagcatgtgctgcggccgcggccacaacatcctgcgccagacgcgcagcgagcgctgccactgccgcttccactggtgctgtttcgtggtctgcgaagagtgccgcatc

SEQ ID NO: 7192 - DNA, 64 bp, Homo sapiens
  chr2:219758014-219758078
  hyper
cctgatcgaggtcccctcctggagcctggccctctgaggcttacggtcttggcaaggcagcatc

SEQ ID NO: 7193 - DNA, 38 bp, Homo sapiens
  chr2:223753603-223753641
  hypo
tagacatgtctgtgcctgcgtctctttgagggatatac

SEQ ID NO: 7194 - DNA, 77 bp, Homo sapiens
  chr2:225906328-225906405
  binary
cgctggagacctaatgacccacgtctcctccagcctgtgttcctcagccctttctggaggagtattaagtggtttgt

SEQ ID NO: 7195 - DNA, 115 bp, Homo sapiens
  chr2:232527239-232527354
  binary
ttccgcgtgatggacgcccggaagccggcacaacaaatgcccaagcgccagggcttcgctgtctgcaggtccttccgctgcccgcggagcgaagatggcgcctagagcttgcagc

SEQ ID NO: 7196 - DNA, 99 bp, Homo sapiens
  chr2:233198455-233198554
  hypo
cgctgccgacggtgaggctgtgggtggtgccagccttccaggcctggctgggcagctctgggcttgtcaggctctgacccatcccgtcccgcagatggc

SEQ ID NO: 7197 - DNA, 129 bp, Homo sapiens
  chr2:233198583-233198712
  hypo
acccagcgcagttccggcactacgcgctcaatgtgcccctgtacacacacttcacctcgcccatccgccgctttgccgacgtcctggtgcaccgcctcctggctgccgcgttaggtgaggggtgcagtc

SEQ ID NO: 7198 - DNA, 321 bp, Homo sapiens
  chr2:234751574-234751895
  hypo
cgcatgtcgttgcactacacgacacaaaagccagcctgaaaggggctccctgacagctaaatctggggttacttgagcgtcaaattgcataccggcaatggattataacatgtgaatcaaagaacaaaaagactccatgaattcctactgatcctaaaaaataaaaataaaataaatcaaagcatgagagggaactacaggaagcaaaaaaaagaaccagaggggagatagctcttttgagcagaataatgccaactgacgtgtgccaaggaacggcagagacagaaacaacctgggcggggacctccacccaggcgatcc

SEQ ID NO: 7199 - DNA, 788 bp, Homo sapiens
  chr2:241380563-241381351
  hypo
cgcctccctacagcaggacggggggcatacctacctggtggccgaaccgcagggctgcacatcagacctcggaggagagcttagtgggtgtctgagcatgcccatgtctgttctatggcatccatgtgcatggcacaggtgtcagccatgggctggcactagacaggagacgagccaggggaggggctcacccgaagccacactggtcaggtctggcctggggccccacatctgccgtgcccgggccagtgagaggctggacgccttttcttaagccagaccgtcctcacagggcctggctcagttatttcagatcaagactggacccgtggtggaggctggggtgggcactcctacatgcggggcctctgcccagccctggccctgtccagtgtcgacgtgcccagagccctgagccggcctggatcttgccagtcgccagcacagccctgtggggcccgggatcttgcccactttacgtgggggctccagacaggagccgcctgcccggagcctgggctcctcgctgccgtgcctgtggtggcttttctttgtctgggaacaggcctgggcaggtgccctgagccgcttgaagtctcctgacggggtggggggtgcagtgtagggtgttgaggcttgggccagggaagcgggcggttctccctccacctccaggccccacacccaggcgggagcacgcagcagccaggtgttgggtgagggctatgctgaggagcagggcccagagctgcagcctccttggctgcccttggcccgccgtgggtggc

SEQ ID NO: 7200 - DNA, 463 bp, Homo sapiens
  chr2:242004407-242004870
  hypo
cgagggggtcccctctccctagagggcccaacggtctccaagggcagagcgtctggccgctgcttgcccaggccccttccctgaggaacagggaggggataaaatcccccggtgggcttgaaacacggtcacacattcaaaagtgtgaccctcctggaggtacgtggccagggacaaagaaggactctgccagcgatggctgtgtcaggcccaagagccagacccggctgagccgccgacgggagccaggcatgcatagctaacggctgaccagtcccctccccttgttttgacccaaaccctgaagagctcttcccaccgacggccctcaagatggagagagtggaggagagtggggtctctatctcctggaacccgcccaatggtccagccgccaggcagatgcttgatggctacgcggtcacctacgtctcctccgacggctcctaccgccgcacagact

SEQ ID NO: 7201 - DNA, 514 bp, Homo sapiens
  chr2:24272450-24272964
  hyper
cgtcaggcggggccaggctcgctaacagccgggcggggtcccttcccccgggccccgccccggccgaccccacctttccgcgcggctccgccccgccgcccccttgccagtggcccctccccgcgcaggtcccgactccagccgcacctcctccggctctgcagtggcggcgaggaggcgagccggagcgacggcggggctggggccggagccgagccggggtcgggcagcagcagggaccccccagaggcggggcctgtgggaccgctatgggcgtggagatcgagaccatctcccccggagacggtaccgggctccctccggagccaggggaggggaggggtcccggggcggagcccggagggcgggggtctgattcggaggtggcgtggagggtgctgaagggtcggggggctggatggggaaggcaggcggagacgccggacgggattcttgggggtctaggagaccatcctccgccatcctcttccgcgctcacctaggggaatgtagg

SEQ ID NO: 7202 - DNA, 309 bp, Homo sapiens
  chr2:24584022-24584331
  hypo
cgctagtcacactccgccgagcagtaggaagactctgtccccatagagcatagcacgacgaagctaaactttcctccccacccctcgccaagggacaggcgaagctcctactcagaatttgtctcttttctcccctcccggttcctggtctcctcacaaaagaccagacttcaactcaagccgccaccgtatcccaaaaccccaaaggtttgcccttgacaagaagcttcttcaaggggaaaggctttcttttgattggggtgagggaggagttagtgtttcctaatgaacgtaaccaaatgtcggcct

SEQ ID NO: 7203 - DNA, 496 bp, Homo sapiens
  chr2:25044264-25044760
  hypo
cgtgaacctccccacccgaattgcctcagttgtcctgagcctcatgtctctcctggtggtgggccaggcccctgcatgggaagggagcctgctgcggggcaggccagctgggggtgctcacctatgcgcagcatgaagttattgaaggactggttgttgatgttggtgagcgtatccttcatggccagcgcgaagtcggccaggtcagccaggtgctgccagcgctctctctcggacttgtcttcctgtgccaggggaccgtggagaaagtgtcaggggccgctcactgcagcagcctgctctgctgccttccctggcagtgttctgggggtggattccctacacctagatgttcaaggccttacttttcctcccacaaaggagtcgcagccacgctagctctgacttgccactgtgacaaagttcacgtagcaggtctaggcaaagactgggcaattgagcagaggagacggacctgtgagtctgaccacgaggc

SEQ ID NO: 7204 - DNA, 191 bp, Homo sapiens
  chr2:25047277-25047468
  hypo
cgtgccacgtgctcaggcaacatgttggtgaccaaggcctcgttccagcgtcgcatctcatagacacgttccttctggtcgtggacctcaatcttccacaagaaaagtgtccgtgccagtttttctacctacagacacagacaaggcgaggcatgtgctctaagctggccactggatagaaggatgaaaaa

SEQ ID NO: 7205 - DNA, 99 bp, Homo sapiens
  chr2:27007597-27007696
  hypo
cgtgagccaccacgctcggcaagatggagtttcgccatgttggccaggttggactcgaactcgaactcagtggttccgaacaacttggcctcccaaagc

SEQ ID NO: 7206 - DNA, 38 bp, Homo sapiens
  chr2:30453530-30453568
  binary
cgttcggctaaagctctttgtttctgctgtcatgagcg

SEQ ID NO: 7207 - DNA, 75 bp, Homo sapiens
  chr2:31550134-31550209
  hypo
cgttcttgcgctagaaaatttctattttgtagagagattgctatcgcacacttactacaaaggaccgacgttatc

SEQ ID NO: 7208 - DNA, 248 bp, Homo sapiens
  chr2:318873-319121
  hypo
cgggtgtgtgtgcacgggtgtgcatgtgtgcgggtgtgtgtgcgggcacgtgtgcaggcgtgcgtgcaggcgtgtgtgcaggcgtgtgtgcatgggtgtgtgtgcgtgtcgtgtgtggccctgtgtgtgcgggcgtgtgtgtgggcgtgtgtgtgtgggcgtgtgtgggcacgtgagtgtgggcatgtgtgtgcgggcatgtgagtgggcgtgtgagtgtgtctgtgtgtgcgcacaggcgtgtgtgc

SEQ ID NO: 7209 - DNA, 425 bp, Homo sapiens
  chr2:319186-319611
  hypo
cgtgtgtgggcgtgtgtgtgtcgtgtgtgcacaggcatgtgtgcggccgtgtgtgtgtggacacgtgtgtgtgggtgtgtgcggaaacgtgtgggggcacgtgtgtgtgggcacgtgtgtgcctgggcacgtgtatgcgggtgtgtgtgtgtgggcgtgtgtgcggatgtgtgtgtgggtgtgtgtgggtgtgtgcgtgggtgtgtgcaggcgtgtgtgcaggcacgtgtgtgcgggtgtgtgggggtgtgtgcgcgggtgtgtgcaggcgtgtgtgcgggcacgtgtgtgtgtgggcgtgtgtgcaggcagaaagcaccaagatgtaaacagctggcgctcacttgtgcaccaccaaagctagaatgtttcatctcccctggtggcttagtaagtgacagaacagcaccaagatgtaaacagcc

SEQ ID NO: 7210 - DNA, 135 bp, Homo sapiens
  chr2:38303709-38303844
  hyper
gtttaaattttatcttaggttctcgcaaacaaattgccacctcagtggaggctctttggcatgctaaattttttccagttcttgcggcgagatcaggaatccctaaaagtagccgctcccccgccccggggcccc

SEQ ID NO: 7211 - DNA, 77 bp, Homo sapiens
  chr2:42720186-42720263
  hyper
cgcctggagggagccgcctcggccccgccggggcgcgcctcgtcgcggcccagcacgcccggctcgtcggccgagta

SEQ ID NO: 7212 - DNA, 64 bp, Homo sapiens
  chr2:43019535-43019599
  hyper
cgcagatggaggagggggaggaggcgagggcagggggcggccatgggggtgctggactcacatg

SEQ ID NO: 7213 - DNA, 126 bp, Homo sapiens
  chr2:45161096-45161222
  hyper
cggggagcagcggcttttcaccctgctatagggaggtgcgtttggctgagctgtccccccaccaaataaagctaatgatgtagtaatttaggagggggagaggggctgggcaaaaggagagagggg

SEQ ID NO: 7214 - DNA, 42 bp, Homo sapiens
  chr2:54343989-54344031
  hypo
cgactggctattttaaagagcaggcgtacgagctcaagtggc

SEQ ID NO: 7215 - DNA, 428 bp, Homo sapiens
  chr2:61175657-61176085
  binary
cgtcgagtttgcgtgttttagggagaaccacatacctactgtcaggggtgggttgttttggtttttttttggtgaaggaaaagggttatacaaaaggatatgtctggaaaagttatgaatacatcttgtttagggtgacatttcaatataataattacaaatcgatgtgcataataaaccgggacctttcaatgtttgttagcccagcttgcaactaataataccgcatgtctttttacatttcagattttttagggacacaggcttgtttttctcacaattcgttagagattttcttttatgtcacaagataaaaattaagaaatagaggttaacgctgtaaaaggtcaactaattccaagttttaaaaattgggcgtaatcagaaattcagattcataagaactgaatcctcttcattttcttgtc

SEQ ID NO: 7216 - DNA, 66 bp, Homo sapiens
  chr2:62116634-62116700
  hypo
cgcgcccacccggaggtgccctcctttaactccggctggatctatccgcgaggtggggtgggcgcc

SEQ ID NO: 7217 - DNA, 312 bp, Homo sapiens
  chr2:68672378-68672690
  hypo
cgaaaacccacaccaaaatcatcaccagcgtgcacatctgttcccttgttgagatttaatcactgaagagcaggtggaagccgtcctgaacgaattaccccatgtacctagaagcctcttcccaaatcaagcagtgatcacctcactcataaacagagcacgcacccaaaggttttgcttgatgtattttgagactagtttcacgtgttgctgctaaacgtttccagggagttgcaaaagttaatccttatggatcggtgattgaaatacagtgacatccctgctgctctgcagtgtgcgcaaaggtcaaat

SEQ ID NO: 7218 - DNA, 123 bp, Homo sapiens
  chr2:69928507-69928630
  hypo
cgtgtccctcccgctagcaaacaccattctattttctatctgtatgattttgactactctggctaccttgtaaaagcggaatcatttgtctttttgtgactggcttatttcacttagcgtaac

SEQ ID NO: 7219 - DNA, 318 bp, Homo sapiens
  chr2:70351179-70351497
  binary
cggctctttttttcatcaggatgtggagagtgggcgccttgggaagacgaaattgagtatgtgcgggggaggggtcatatgaaacaaggtcgggaagggggcggggagagctggggctctggaggagcttggggctcgcgctgcgggggaggaagcgccttccgcggtcgctggggggaagtggttaggaggaagcacgggcagtggaggggactgctggagggtcccatctgggaaagcaggcacggatgcggggacatttccgcccgtcaccctggcaaagcgctcgcagggctggagggacagagttctcagatc

SEQ ID NO: 7220 - DNA, 236 bp, Homo sapiens
  chr2:70351563-70351799
  hyper
gcaaaacagaggaaacaaaggaatgatgaaatgaactgagctgccttcatgccccggatgaatgttcagccattagaaaagagtgaatcccagctgggatttggggttccacggtgtactagaaaagcaaaacaaagagaagcgcctactagatgccatcttggaaaacaaaagcaaacgtgtgtgtgtgtgtgtgtgtgtgtgtgtgtgatgttacatgggcatggggaaattac

SEQ ID NO: 7221 - DNA, 346 bp, Homo sapiens
  chr2:72359340-72359686
  hypo
cgggtgggtcttgggttagactgtggcgctcagcatggcctccgtctccggcaggatctcgttctggttggagtccaggccaaagaacttgacgctgaggccatccacggggtgcaggacggggaccaaggtgatgcgggggaaggtccgtgtggccagctcaaagcggctggtgctagccagctccaccgccagcaccttcaggaacagcttggccaggtgcttgcccaggcaggtccggacaccgccaccgaacgggaggtaatggaagcggccatccttgtcctcgctccgcgcctggctgaagcgatcggggtcgaacacgttcacgtctttgaacacgggc

SEQ ID NO: 7222 - DNA, 121 bp, Homo sapiens
  chr2:73147029-73147150
  hyper
cgtgggctcgatccgaagcctgggtctcgaaacctggcgcccaggggccgagttgtagttggggcggtgtgtgagcccgcgggccgccgcggccgaggggctggcgggttggaggcttgtg

SEQ ID NO: 7223 - DNA, 359 bp, Homo sapiens
  chr2:74152840-74153199
  hypo
cgctccagtagccattaacgccccaccctggttatccttaaaaaattcgattaaaaaaaaagttcttaatatataaacatgacctcagccatcctatatatacatcaacataagaaaaaggtcccgtgctttttatgggaacagcttcaagacaggtatcccagcccccggcccctccccagcccccttgcaatcagatccttgtcttctaaaacctgccacacctaagagcgctgcctgaaggccggtttggcctgttgactcctggttttgactgttggtgatttaagcgattggaactggaagcaccatttgacaacattttgtaaatcattacttctgaggttgttatgacgacg

SEQ ID NO: 7224 - DNA, 90 bp, Homo sapiens
  chr2:74153227-74153317
  hypo
cagcagcttaggtccctgccctcctgcagagcacacttcaccgacagcaggactcaggttttatacaagtctctactcgccattgcttac

SEQ ID NO: 7225 - DNA, 236 bp, Homo sapiens; identical to SEQ ID NO: 5803
  chr2:74781700-74781936
  binary

SEQ ID NO: 7226 - DNA, 123 bp, Homo sapiens; identical to SEQ ID NO: 6112
  chr2:74782349-74782472
  hyper

SEQ ID NO: 7227 - DNA, 75 bp, Homo sapiens
  chr2:85819578-85819653
  hypo
cggtgtttgagatgagtcaggctgggagggttccacggcaggtggtatagaaagagagcagacaaggccgggcgc

SEQ ID NO: 7228 - DNA, 84 bp, Homo sapiens
  chr2:8647920-8648004
  hypo
cgtgattgttcaattcctaatgtacatgagcataatcactccgcaagtgccgcaccgctttcacacatgtgaacagctagagcc

SEQ ID NO: 7229 - DNA, 255 bp, Homo sapiens
  chr2:8834468-8834723
  hypo
cggagcaaggcagccaggggcccagtgcgaggagaggagaacggacaggatgggggaggcccatcacacccagcctcacaggccgcgctaagagctttggcctttactttgtgtaaactgggaccttggagagctttgcgcaggagagtgatggaaccaaactatttagcagccacatttcttttaatgtttctcgtttataggttacacatttgttgttattattattgatttaataatactgtgtcaagataa

SEQ ID NO: 7230 - DNA, 121 bp, Homo sapiens
  chr2:8834896-8835017
  hypo
accaacctaaatattataactaaggaaacgaatagaatggtgtgcatcagaggtacctccgccagtgcttaccccgtttgttatagagggacgggttgtccctgctgcttttttatggagc

SEQ ID NO: 7231 - DNA, 87 bp, Homo sapiens
  chr2:88591077-88591164
  hypo
cgccactgcactccagcatgggcgacagagcaagactcagtaaataaataaaacaaaaaaagcatgcacgcacaaagcaacaaaaac

SEQ ID NO: 7232 - DNA, 210 bp, Homo sapiens
  chr2:8860527-8860737
  hypo
cggactccgttcctgtctaccagtgaggctgctgtgactcgaaggaagagccaagaggaaggagccggggaaagctggggctgccttggctgagcacgtgttttatgctctccaccaaccttgtctacgagggaagatggagacaaatgctgcccaggcctgcgcagccgagagtggtggacactgggggaagccggtaccgcggtgtgc

SEQ ID NO: 7233 - DNA, 59 bp, Homo sapiens
  chr2:96991316-96991375
  hyper
ccctgggtcccgggagacatcccgaggtaggatgggcccttggcctcctacggataggc

SEQ ID NO: 7234 - DNA, 79 bp, Homo sapiens
  chr20:20350750-20350829
  hyper
ccccttggcggggagaagctttttttcttgctagtattcgctgtgttcatggtctagaaatgcggtctggtctcgcctc

SEQ ID NO: 7235 - DNA, 206 bp, Homo sapiens; identical to SEQ ID NO: 6114
  chr20:21080357-21080563
  hyper

SEQ ID NO: 7236 - DNA, 35 bp, Homo sapiens
  chr20:30996055-30996090
  hypo
cggttcgaggtagtcattcaggtttgcgtttttac

SEQ ID NO: 7237 - DNA, 165 bp, Homo sapiens
  chr20:33879796-33879961
  hypo
cggtctggcccggaggcctcctgcccctgagcctcgctgagctcagggcccccgcgcacatggctggtcatgtagtccacatccagggcgctcaggaagggcagctcccgctcctcggagatgacccgcaggtaggcagcctcaccccgctccaggagggcgtcg

SEQ ID NO: 7238 - DNA, 131 bp, Homo sapiens
  chr20:33880280-33880411
  hypo
cccctggcctctggaacctgtcaggtcagccccacctgtctgcctgtgttgggactcgcctgcccagggaagcggcagtgccaggccctcggtgcacactcctgcctccctctcttcctcccagcaacgcc

SEQ ID NO: 7239 - DNA, 60 bp, Homo sapiens
  chr20:34190072-34190132
  hyper
agggggcaggtccccgcgcgccctcacggacaaggtgaccttaatgaaacccttggtccc

SEQ ID NO: 7240 - DNA, 187 bp, Homo sapiens
  chr20:36767690-36767877
  hypo
cggggccattgctgtacgtaggctaccaattaaaacacacgcacacacatacacgagcctgccgggctgggaaaactggatgcttatcttcaaggctgcattaaagactctgagggcacataccctctgggtatttgtaggtgtgggtgatatcctcccgctcgtctcggcccacgctcttagtgct

SEQ ID NO: 7241 - DNA, 109 bp, Homo sapiens
  chr20:36767917-36768026
  hypo
tgcacagacccatcgtcctgctggatccagtctaccacgtcggcattgacctccgcaaagacaaagggcgcatcgtacttggtgctcaggtcgccctccttgatggcac

SEQ ID NO: 7242 - DNA, 161 bp, Homo sapiens
  chr20:36802873-36803034
  hypo
cgccgatggttttgtctttccagaatgtcataggcatgaaatcacgcagtatacagccttttgtgtctggcttccttcgcttaccgtaatgtatttgattcatccctgttgttgcaggtatcagcggttcattcctttttattactgagtactattctgtc

SEQ ID NO: 7243 - DNA, 148 bp, Homo sapiens
  chr20:37145099-37145247
  hypo
cgaaggaaaagatgaacagatttgatgacaaataacaagcgaggaaaaattatttgcaacaaataaaatagccagagggttatcgtttctatgtaaatatttagattggtgcaaaagtaattgcggtttttgccattaaaagtaatgc

SEQ ID NO: 7244 - DNA, 173 bp, Homo sapiens
  chr20:42088459-42088632
  hypo
cggaccacctgttcgtacagaatacaggcttattgtagaaaatctttctagtcggtgcagttggcaagatttaaaggtatgttttgtaattcaagatagaaatgatatgactaatgctttaaagtaaactccttttatattcttatttctgggaatttattatggtatataga

SEQ ID NO: 7245 - DNA, 55 bp, Homo sapiens
  chr20:42833281-42833336
  hypo
cgctcctgccctccccacgccagtagtcagcggtgtctattgttcccatgtccac

SEQ ID NO: 7246 - DNA, 192 bp, Homo sapiens
  chr20:45833348-45833540
  hypo
cgaaggattacagcatggaaagcctcagcacagagccccacgtggggcaggcccacatcagcgacacttggaggaatataggtgacctttgcttctctagactaaagaaaataaataagaatatagatggggtcctgatgtaccctgatatgaaggtggcagctaaatgctgacctttggaaaactcaactc

SEQ ID NO: 7247 - DNA, 167 bp, Homo sapiens
  chr20:46365433-46365600
  hypo
cgtccctgctcacctgtccggtagccagtgctattgaggtacacggcaaaggtgcggctctcgtgctgtgcctgccaggagggcgaggagcagttctcattgttggtgtaggtgttgtggttgtggacgtacttgccagtgaggatggaggagcgtgaggggcagca

SEQ ID NO: 7248 - DNA, 125 bp, Homo sapiens
  chr20:46365635-46365760
  hypo
ccccgccctgctccatgatgcgccgggtcttgttcatcacctgcatggaacctgcaagtcaagggtggaagtaaggcgcagggcaggagacccgggcggcaccggcaccagggggctctcagcac

SEQ ID NO: 7249 - DNA, 1116 bp, Homo sapiens
  chr20:4981401-4982517
  hyper
acactcgaaatgtcattttttccccccgaaaggtggcaaggagggggactcgcgaccccccagggaacaggccagaaaggccccggggtcggaggagctgcttctaaaattacttcgcgcagtctttgtagaagggaagaaagcaagaatgtaaaaggcaccctcttgccgcccctcctgatgcccctgaattccagggggcgagacgatgcccgtgcgcaccaccgggggaggggcgagggaagcgaccccaggacgcgcgggcgcagagcccgggaggaggcggcggcagccagtggggttctgggggcgccccatttgcctccccgctgcgcggcctgagggcccgagcgcgctgtggctcccgtggcgggaaggggtgggtaccccgggggcccggcccggccggcagaacggcaggagctgagggccgccgggcatcttgggccccggggccagggtggccggcgggcgcggggtcccgggagatgggtcggggtgggggcgcgcaggccgcgccgcggggccggtgggtgacagcgcgcgggggccgtgccaggccggcctcgtgggcgcggcgagcacctcgcggccccgccggcaggtgcggcccgcaggccgggcagggggcgcggcggccgggctctcacctggctgcagctcgcgtggttcccgtcctgccgccgcgcctcggcgccgcagtgcccgctgcagcctccgcctccggtccccgcgacagccgcctgcaaaatggcgccgcggaggggcgggccgggggcggggtgcagcggagccgcccgcccccgcgccggtctggggcccacctccctccccgcccccgacccctgccctcgggcctccccccggggaggggctgctccctggcacccggcagcgctccccggaacatcccgggcctcgcacccagccgtccccttcccgttcctttcatttccctcccctgcgcagaaagatcgccccccttcgcgacccttcccaccagtcacacctgttcctggggacccacctggcaagcagagcgctggtccctgagtgtcctggtccaggtcccccctttttaccccgcctgccaccgagccctgtcattgctcgagc

SEQ ID NO: 7250 - DNA, 162 bp, Homo sapiens
  chr20:52214819-52214981
  hypo
cgtgaacgcggagtctgctgttggaaatgtgttgggaagggagagttcccggtaagaattatgtatttaggagctttccaaatactgatggcatgttgagccatcagactggataaaatcacacgaaagaggtgctagtattgggcccttgggtggttcagc

SEQ ID NO: 7251 - DNA, 174 bp, Homo sapiens
  chr20:52374073-52374247
  hypo
cgcgcccggccttaagtttgttttcaaagtgcgtttcaaacttaaataaacccaggctcagcaatgaaaggattcaggttattacattctgattgtccagggagcaggcagtgcggctggctccccgggagaatgctggatcgttcattcagcgagtgcgcatgcctagaagac

SEQ ID NO: 7252 - DNA, 62 bp, Homo sapiens
  chr20:55026786-55026848
  hypo
cggcggagtgacgatgagatttaaacaacgcactcgcgccctctttggaaagctactaaccc

SEQ ID NO: 7253 - DNA, 111 bp, Homo sapiens
  chr20:60448951-60449062
  hypo
gagaggtgaggcggggtggggtctgcgtgcaggcgggtgagctcctggtccccgcaggacacccacaggaccctcggggagcctctccagtggcgccgtcggggagtgatc

SEQ ID NO: 7254 - DNA, 58 bp, Homo sapiens
  chr20:60470129-60470187
  hypo
cgcatggcccgtgcagggcaggaatgcactggcgtgcggcacagcctcctctctctct

SEQ ID NO: 7255 - DNA, 77 bp, Homo sapiens
  chr20:60470257-60470334
  hypo
ggagtggctcgattcctgatgtgcgcagtaggagagaggccggggctcagtcagggaggggaccggcggcggaggtc

SEQ ID NO: 7256 - DNA, 37 bp, Homo sapiens
  chr20:60502550-60502587
  hypo
cggccgcgcctgcttttctcacagacacttccaaaag

SEQ ID NO: 7257 - DNA, 266 bp, Homo sapiens
  chr20:60662808-60663074
  hypo
gctctgtacactcacctgcatgcactcacacgcgctcctatacactcacctgcacacgcactcacacaagctcttgtacactcacctgcacacgcactcacacaagctcttgtacactcactgcagactcacccacacacgctcctgtacactcacctgcatgcactcacatgtactcctgtacactcacctgcacactcacctgcacacgcacgcacacgtgctcctgtacactcacctgcatgcacacacatgcgctcctgtac

SEQ ID NO: 7258 - DNA, 64 bp, Homo sapiens
  chr20:60842033-60842097
  hypo
cgtgcgacggctcacgcctataatcactgtcagaggctgaggcgagaggatcgctcgaggctac

SEQ ID NO: 7259 - DNA, 368 bp, Homo sapiens
  chr20:60842477-60842845
  hypo
cggagtcctttacaaaaggagcttcaggcctatcctgtgcgtttactgtttggggtctggcatcatctacttgtccagggagagaaggagaattcaggaccacagccgggctctcaggaggccaccggggtagtcttatttcgaggtctgttcctacagctaggaactgtgtttttgtttgtttcagtgatgcttcaaatttgggccaacaggctccacctaacctctgcggcctcatgtctgcgtctcttttctccctcactgacagtcccagttttctgcagccctggcgaggacagatttagaccggcacgcagttgtgactcactcactttgccccacatacctgtgggaccagctctgctgcc

SEQ ID NO: 7260 - DNA, 237 bp, Homo sapiens
  chr20:61287746-61287983
  hypo
cgctgaggccactcccactgcgtggctgaagcctcgaggtcaccaggcggaggcgcggagatgcccctgcatcagctgggggacaagccgctcaccttccccagccccaactcagccatggaaaacgggcttgaccacaccccacccagcaggagggcatccccgggcacacccctgagccccggctccctccgctccgctgcccatagccccctggacaccagcaagcagcccctc

SEQ ID NO: 7261 - DNA, 60 bp, Homo sapiens
  chr20:61288557-61288617
  hypo
acctggatgagaacgtcaagtccagctgctcgcccgtctacattggtgagtggggctggc

SEQ ID NO: 7262 - DNA, 242 bp, Homo sapiens
  chr20:61318783-61319025
  hypo
agtggcgtccagggcagggcaggtgcgtcatccgggcgggatgcagagacacgtccttccaccaaccatctgaggagcacttggcacccacacaatgagcccggcaagggccacgccaggaggcagcgcacggggcagagcctctgagccagagagggggaggtcccttgggaggcccctgccatcccccgctctgggtgggcctctccagccagactctgcgccccaagggcagggctggg

SEQ ID NO: 7263 - DNA, 566 bp, Homo sapiens
  chr20:61488430-61488996
  hypo
cgcgctcttagaagcttgcacctcagctcctgccttctccccacgcgcctttgctgatcgcacctggcatcctttctccatagtaagtcacagcctgagagtgactgcatgcggagtcccgggagtcctcctagtgagccagcgagcctgggcatagtctgggggatccttgatccatctgggaaagctaacgatgctcctacctgctttattccctctgaacgcagaaacggctaaggatcactcatctgtgataaccatgtatgactaaggtaatcatatatgagtcagcctgacaagcagtcacacgtattaccttctatctctttccattcggttatgcctctccctacgttgagaccttcctccctggggcccactctgggcctgctcccccaggtttgcctgtgaggactccgaggactgccaagcgccttgtgtggcggtggcaccttcgcccacattctgaatctctccaagggctcttcgctctacatttgtgtccaactgacgcattctactccgattcctcttcagtgcttgtttgcatagcgctgcttctttgc

SEQ ID NO: 7264 - DNA, 58 bp, Homo sapiens
  chr21:19274771-19274829
  hypo
cgtgagccaccgcgcccagcctggagtgtttaattttatgtgtcaacttgtctgggct

SEQ ID NO: 7265 - DNA, 108 bp, Homo sapiens
  chr21:33954435-33954543
  hypo
aagcccacatctttatggggacgctatttttacataacgcaaacggtacaaaaacataaatgcgcttttggtaccagagtgtgcgattcttgccccgcgtgtggggac

SEQ ID NO: 7266 - DNA, 42 bp, Homo sapiens
  chr21:35286360-35286402
  hypo
cgtgagccaccgcgcccagcccggtaccttgattttaatatc

SEQ ID NO: 7267 - DNA, 122 bp, Homo sapiens
  chr21:38362977-38363099
  hypo
aatgcccgcatttctaccctgcccactagaaactgagggattgccacagctcccgtgaggttcagcaattccctgggacgacacagaactcagggagacactttactgttagaagattattg

SEQ ID NO: 7268 - DNA, 211 bp, Homo sapiens
  chr21:38592864-38593075
  hyper
cgctataacgaggtaacatacagcacttagaagacggcctgacccagaataacactaatgttcacatggctgcgagtctcagaccaaaatcaatagccggtatctactgaaactgcagcaaggcgaaaccacgggaatggcgctccgttgagtagagcaacgcacagcacatcacatcgcatcctccgtagcgggaggctctggcctcacc

SEQ ID NO: 7269 - DNA, 259 bp, Homo sapiens
  chr21:38593104-38593363
  hyper
tattcggggacccgcaccggacaggcggcccaggccccctggcgcccagctggccgccctgttgcagctctcatgccaagacctgcgcctaacggcagggattccggcggtcatcatttattcttggcgctaagctgccgcttctcttttttatcaccacagagtaacgcagaccccaccgtttccttccattctgagccaaccactccagcagccaccggggcgccaggttatgctggggctgcaccacccggcccga

SEQ ID NO: 7270 - DNA, 38 bp, Homo sapiens
  chr21:38593729-38593767
  hyper
actgagaacaccagcatctgctgccgccctgaatcagc

SEQ ID NO: 7271 - DNA, 39 bp, Homo sapiens
  chr21:44482534-44482573
  hypo
cgtgggagccgctcccacgtgaccaagagggtgaacagc

SEQ ID NO: 7272 - DNA, 206 bp, Homo sapiens
  chr21:44482687-44482893
  hypo
aaaactgcccgccagccccactgagcatccgtgtgacccacaccggcccttcggtctctgctctccctcaggccaaagtcagctttttggctcttaacagacttttccggggccttaattttcacacgttttccctgctccctgcctgtgccacctgggctacatcccttggtgaggtcaggccacgtgtgcggacatcgtccccc

SEQ ID NO: 7273 - DNA, 159 bp, Homo sapiens
  chr21:44482954-44483113
  hypo
tgtttcagtggagaagctggttggggcccagggtcagccaggctccccagtgtgagggtgagttacaggctgcaccggcactgtggccgggctctggactcgacctaccgtcctgtccagcaccgtggggatgaagtcgtagccgatcccttccacctc

SEQ ID NO: 7274 - DNA, 320 bp, Homo sapiens
  chr21:44840079-44840399
  hypo
cgggtgaggccagggcaagtgtggccaggctcacctccaccgtcctctgccggtccacgcccagggtctgcatgatacccagcgcctgctcatcgtagtcgcccaggttggaggtgtagctgtgtgcggagaaggcggggcaggcgggtcccggcaagcagggctcagcccgcatccaccggtgctgccggatctgggcgatggtgatgcgcctggcggggtccaccaccagcatgcggcggatcaggctctcacagtctgtggaggggccaggaggctgagccagggcggccgggacctcggctgcgctcccacccacc

SEQ ID NO: 7275 - DNA, 402 bp, Homo sapiens
  chr21:45167210-45167612
  hypo
cgcccaggcgatttcagtatctgccttctttgtcgttgtgtctagggtgtctgtttgcttgctgtatattcactgagcacagcgggcttctccactggcacagggcacgcctgggcctgtgccctccctgccccgctgggtcagtggttgaagtcaggatatctgtcactgggcatctaactgggtggggcgggctggtgtgctcagcgtctgtctgtccactttctcccatgcttgttctctggaaggttccctgtcctgcgcccagcctgcaggaccccagcttgcagctccctgccttcccttcatggtgctccctggtgtgggctctgctgaccctcggcagacacttgcgtttggatcacgaagagttggggccactgtccagttcagtgcggctac

SEQ ID NO: 7276 - DNA, 59 bp, Homo sapiens
  chr21:45583689-45583748
  hypo
cgcgttcccgagcgtgcactgaaggtgttagcgcgtggcaccggagacaccaggctgga

SEQ ID NO: 7277 - DNA, 270 bp, Homo sapiens
  chr21:45750126-45750396
  hypo
cggctgcccacagtctgctgcacggcctccagcccctctgcatccagctcccgcagcagcagcaggatggcagtcaggacgttctgagggcagaggggtgcggactaagcccacccggcacggcgaggctgcttccctccacaagggctggggcctggccagcggtgccccaccacggagcgactggtcccgggggtgtgggccgtccaagtgactgaccggcacactcggagaatctgagcagaggagccccgcctgtggacgcgtgtg

SEQ ID NO: 7278 - DNA, 43 bp, Homo sapiens
  chr21:46311711-46311754
  hypo
cgcccgcctcacctgcagatgccgcactccaagaagcccttgc

SEQ ID NO: 7279 - DNA, 60 bp, Homo sapiens
  chr21:46319505-46319565
  hypo
ttgtatctctaaagtcctttgcggcccccagagcctacaacgtcaggctgcaagagcgtc

SEQ ID NO: 7280 - DNA, 663 bp, Homo sapiens
  chr21:46323288-46323951
  hypo
cggactcggtgatctcgttgagggcccggagcaggtcgccacctagcttcttgacattcctgaggtcatcaagcatggagtaggagaggtccatcagatagtacaggtcgatggggtagcccttggcccgccggaaggtcacgttgaacgctgctgcctggcctgccggtggggacagaacaaaaggagccacacctcacatctcacacagggtgtctgggggcgtgtggccccgagcgggctgtgcactggcaccctctcctccagcccccaaatcctcctgacctcccctctccccgcctggcaggagagctgaggaccagacacaggacatccaggcaggctggagtttcagaggaaggacatgactcccggacgcaggcatgtgcctcgcagtgacactgaaacccgcctggggtgcttagagttgacgccagcgacattggggacgcctttcattgagagtggcagcggctcacctgggctcacacctaacccggccccatgcctgcagtcccacgggcgccctcatcagcagccacatagacaggcatcacacgaacctggcacttcccagcaaggcccacgcgggccgtccccaggaggcccctttctccatcccagccctggacttccgctcgcccgcgtctcagtcacacgtgc

SEQ ID NO: 7281 - DNA, 278 bp, Homo sapiens
  chr21:46397986-46398264
  hypo
cgccaaggatgcctggcgagtgggtggccgaggcaagttggagcctgtgtccctgctgttcagtgtcctggcccttccctgacacgagcagacacggcatccacagagacagcccggacaccctccaaggccccggccgatgggacagacgggcgtacaggagccataggcagcagatcccacgctccctcggccggggccagcttggctgcccagccccagctccttagagaacgggcttctcgcttcagaggagctggtcacaaaccagtggtcgc

SEQ ID NO: 7282 - DNA, 60 bp, Homo sapiens
  chr21:46424401-46424461
  hypo
cggtccacccccactgcggtgcagtgccagggtgagccagccacccccggcgggagaaac

SEQ ID NO: 7283 - DNA, 360 bp, Homo sapiens
  chr21:46424520-46424880
  hypo
tctgtgcgtttcccatggatgaggtcatagagcgcgtggccttccgtgcctgcctcttccgggcagcagcatggtgggtgtttctgaggctcctccgtgtcgctccacccgtcagcacttcatgcctctcggggctgggccacatttcgttgcagggatgggccacgtttttaacctgtccatcagcggacggacgtttgggctgattttatcttttggctatgatgaataacgcggtgatcaacattgattcacaagttttgtgcggacccgttttcagttgtcctgagtatcagcccgggcctagacttcccgggttatatggtgatacagtttaaacgcatgtccttgccaagcctc

SEQ ID NO: 7284 - DNA, 771 bp, Homo sapiens
  chr21:46492439-46493210
  hypo
cctggggagatggagggaagcaccatggggatttgctttttcttgctgccgacggagcccagccaccacgggagggaggcccggccagcctgcggtgggtgggtgacatgtggcccggatctgcccggggcgcctgcctgtaagtgggcccagcagacaccccatggagccgaggcaagccgtcccagctgaaccggcttaagctgcaggcccacagagtcatgagcagtgaagagaggttttcgccctctgaggtttggggtggcctgttacacagaaatacacacaacgtcctcaggcacgtatctctttaagaatgtgtcccgagaaggcgtcccaggagtcttgatttttatttagccgtccacggttgcccctttgggtgcttcgccttcagatggggtgaagggctcacttgttagctggctggccccaaagacaggcttgttttccaccaggcagtgactgaagccggcagcctgctgcataccgcgggccttcccctgacctgtccgggactgcgggctggcggctgacacctgcggagtgcttaccgcataccaggctcccaaacttccatctgtgttcgtcttttaagttttgttgttttccagagtcggagtctcagtgttgcccgggccagagcgcagcggccatttataggcgcggacctcggcctcgcacaccacagctccagctctgagacacaagcgacccgcacccccccaccgcccagccccagcctccagactggctgagatcacagtgtgc

SEQ ID NO: 7285 - DNA, 82 bp, Homo sapiens
  chr21:46812995-46813077
  hypo
cggcacgaggccgcccgcctgcagcaggcccgcaggggcacggtgggtccccgcccgctcctcatgccttgagcgcgtcatc

SEQ ID NO: 7286 - DNA, 192 bp, Homo sapiens
  chr21:46813106-46813298
  hypo
agacctcaacacggccagcacggtgtgcatggtgtgcacgcctcctgcgccggggccaccagagtgggctctcaccggaggagaaagacagtcggggagagcagcgctgtctgtcacgctttgtcacgctttgccggtgtcatctgagaagtggtgcaggggacaaggggggcgtgacaggactggtcctgc

SEQ ID NO: 7287 - DNA, 261 bp, Homo sapiens
  chr21:46839249-46839510
  hypo
tgctgtgtgtagtgatgcgcgatgccgtgtgtggtgacacgatgccgtgtgtggtgacacttaatgtcatgtagtgacacgctcgcaggatcgccaaggccaggctggctccaaaggcttgggtctggcttcctggggccactgggtgctctctgaggccgcccatcactgttcgggccctggggtgggagctgggctgcaaagtggcctggactttatgtcctgccaggtacagtgtttccctcagcagatttatcaggc

SEQ ID NO: 7288 - DNA, 325 bp, Homo sapiens
  chr21:46844304-46844629
  hypo
cgcctggagcgcagctctgctgtgggttagccgtgggtctctgggcgagggttcccgggatacagacacctgccccaaggtgccccacagaggatgacccccagggcagccgtgcctgagcctgcgtggtcacctcccacagtgccaaggcgctcccccaaggcccctgcggcccacctgaccagtggagaactcgcgagcactcggccagtggtgcctccaatttgcagcctccaatccctggtcagaggtgtgacctgaccctggaccagagcgctgggccaggtcctggtggcttctgcccttcagcttggaagctcctgaa

SEQ ID NO: 7289 - DNA, 449 bp, Homo sapiens
  chr21:46844763-46845212
  hypo
aggcactgcctcgcccgcgcctctttctcccagacctgagccaccgctgccaggatccttccccagctggttttccttctctttgatgtgtttccactgagggtccaaaccggtccaggcgcgggttccagaactttcttcagatctctcgcacctgaaaatttcctctgtagccattcgcaggaggtttctcagatgccccgggctcgggggccagtcagtctcatgaggacggggtgggtctgacttgtggcatcgcggcctctccatcggtgctgctgggcctgtgagccaatgggtgggcagcaccacccaccgcctccttcctcacaccagtcttgggctgcgcagagccccagccatgtgtgtgctgagtgcagtgtgaccgcgtccgcccgtctccccggacacgcctgttggagccccggccgtgtgtgtgtgtgtgctgt

SEQ ID NO: 7290 - DNA, 55 bp, Homo sapiens
  chr21:46864076-46864131
  hypo
cgctccatggtacctcctgcctcccgaaatcacctctaagttcactttgtgccag

SEQ ID NO: 7291 - DNA, 231 bp, Homo sapiens
  chr21:46894937-46895168
  hypo
cggtccctgaggatgtttctcctccgggttttcctgaagtttaaaacatccagccgccttggcgcgtgttcggcccagccgggcgtgcgctggggaaacctgtgcggggagcatctgcggtgcggcctcctccagggcagggctctggccagaagagaggagcgcgttccccctcccgcctccgcatgtctgaccaccggccgaggcaggttcagaagcgtcactgtcctc

SEQ ID NO: 7292 - DNA, 216 bp, Homo sapiens
  chr21:46895491-46895707
  hypo
ggagagcccctcccagcagtggggtgacacatgtgcacacgcaggtgtggctccaagagctccctctatgccacgaagacatattcctggctggggacagggatgctgggctgggcagacgctcggagcctgggcacaggccccgctccggccctgcctggccgccgcgtgtctctggtgagaggatattcctttaaaacgaggtcctgccctgca

SEQ ID NO: 7293 - DNA, 575 bp, Homo sapiens
  chr21:46895736-46896311
  hypo
cttcccttcgccccatccctccgttagctcgtgcgtggccatcagggaatgaacgcgtgtgtgagcctgacgaccaggaggagaaggcggcgcagggagcgcgcggaaggctttccccagctcgggccacctgagaaaacacaggaggggcggggagtggggaggccccagccgcgggactgaggcgcggtgctgtccgtgagagacgggtgcgggaacgtgttccctgcggggaccctctgcagattcacatcagcttcccagcatggcctgtcgggcgccgggaggcctctgtggtgacggcaggcgcggtcctgggtcctggggagccggggagcccacaggcggccacacccctgcggcccacggaaggaagcccctcgcgcacggccctggagcaccctcctgtttcagaggatttttctttatctttcttgcgatcttaagtatttcatttcacaaaccaagcaagtctccaccgggcatctgccggccgaataacaggccacctcccctctcgtcctccagggcgcggccctaaaacccaggctccccgcgccaccccccgtcaccac

SEQ ID NO: 7294 - DNA, 828 bp, Homo sapiens
  chr21:46906455-46907283
  hypo
cgggagccagggctggaggtaacgagggtgccctgtgcacctcccgctgtgcatgtgggcctccccctgtgcatgtgggcccaaccccgaccaagttcgggctccgtggctctctcctcagttgtgtttctgtgtggctgaaatcgtgtcgtaaagttagaagaaaggctgctgtggggcctgcgttgcttggcagaatgttccttaccttttgatttgcagggtttagaaagcatcataagaaaacgtgtctacgctggggttgcagggccagcgggggctgggctgggtcctgacacgctctcctcaccccacgcaggggagcaagggagcccccggtcctgctggtgctcgtggggagagcggcctggcaggagcccccggacctgctggaccaccaggcccccctgggccccctgggcccccaggaccaggactccccgctggatttgtgagtaccgcctacacctgaccccctggagagccgggggctgccgttgccccagccctactacccctggcatctcactcacagagcagcacgtcctgggcggtggccttgctggcactgcctcatcctgggattccatattccgcatggtggggctcgagtctctcgcccgtcgcccgtgccccacggtgctgatggggatcttggcccagccatgccccagcacccgtgccctgaccaagagcgaatgagctgacccgagacgggctgccccgggggggctccacccaggccctgccaccaggtagacagtccccatctgagaacggcggctccccaggccaccgtggccccaaagcatgtcccaccctcctctc

SEQ ID NO: 7295 - DNA, 756 bp, Homo sapiens
  chr21:46912528-46913284
  hypo
aaggctgggtggggtccgggcaggcgcgagggtgcgtgatgaccccagctgacgccgtccctctttccccagggccggccgggtttcgcaggctttcccgtgagtaacctggtgccagagctgcatgctgcccggctggggaggggtctccacctggtagcacagagcagcccggtcgagctggggtgggccttgtcaggcccgagggatagcgacagtcactgcccccaaggaaatgatgggagtgggatgtgggcgagagccgctggcaggccctgtgctgggtgggcacccgtgagggtgaggcagctccttgcacctgcagaggcctgcagtgtccagagtgaggctggggccgggaggtgtcctggtgggggtcacctgcggaggcctgcagtgtccagagtgaggctggggccgcgaggggccctggtcgggctgtcgaggcaggcatattgcggggggcagctgtcgggggagatggagcagccgtcggggatgggggagatgccagccgctcgggcctcacggcctggcctccattccagggacctgcaggacccaagggcaacctgggctctaagggcgaacgaggctccccgggacccaaggtaaggggctcaggtgctgtccctcaaccccctttgtgacccaggggtggctccagcctgcccagatgaccactgttgggagggacctgggaccccccggctgctgctgtgacacgtgaggggtacatccctgctcgggccgtcc

SEQ ID NO: 7296 - DNA, 300 bp, Homo sapiens
  chr21:46924382-46924682
  hypo
cgggggcggcggtttcttcggctccagcctgcccggcccccccggccccccaggccccccaggcccacgtggctaccctgggattccagtaagtcccagcctgtgcaggcagagcccatgtcccaggggtctgggtgcaggagccgagggcaggtccagcccggccttcgacacccgcgaaggccggagctgcccctgcaagctcagcagccccgacatgtccctgtccccgtgtggggacgcagcaggccacatgggtgtgggtgcactgaccccggacaccccccgtccccctgcagc

SEQ ID NO: 7297 - DNA, 51 bp, Homo sapiens
  chr21:47532134-47532185
  hypo
aagaacctgcagggcatcagctccttccgccgcggcaccttcaccgactgc

SEQ ID NO: 7298 - DNA, 96 bp, Homo sapiens
  chr21:47565081-47565177
  hypo
cggctgccatggcctgtgaatgtggggtcaccctggccgaaccctcaaaccctgctgggcccaagcacttgccggggtgagggcggtgctggtggt

SEQ ID NO: 7299 - DNA, 337 bp, Homo sapiens
  chr21:47565270-47565607
  hypo
ccccagctgggggttcgctgttggtggggcccggggagccctgctgtggccgccactcaccaggtaggcggtgaaggcctcggcgtcggcatccaccagcgtggttagcttggccgaagcctcgcggaagggcgggatcaggcgccgcatcgtcgtgtccagggactggaattggcgccgcccgtaggtcatgaggcccaccatggagcccagcgccgcaccctgcgagaggggtggatgtgggggtcgcagggaccccagacggcccgggaccgaccccaggaagagccaggggcccgggtgatccctgcgggggtcccacccgtgtggcccccac

SEQ ID NO: 7300 - DNA, 384 bp, Homo sapiens
  chr21:47602705-47603089
  hypo
tcatcagctcgccgccttcagccatggcgggtgcgtccctccttgtccctcacggctcctgcagccccatggaggtgggagcccagagcccgcaggcaccacagaaacagcccaggcacggagttccgtagccaccaccgccttccacgccttgtgatgtcactgccctagtgatgaggtgcccagcaccctgcctgcccccgcgatggctcatggccccgttgaggcagtgaagctggaggcccgtggcgtgcacaggcagccactcccacattatgaccagggcccgagaatgccaaggacattaggcagctacgggatgtagcgactgtactccaagaggggcgtccaagccactccccattgagcggcccagccagggtc

SEQ ID NO: 7301 - DNA, 106 bp, Homo sapiens
  chr22:18084157-18084263
  hypo
cggcctagcagagaatagctcaggtaaccatcagttcagaaaccgacacaagtgactgacatggaaagatgcgcgcgatgtaactttgaaaagcaagctattaaac

SEQ ID NO: 7302 - DNA, 130 bp, Homo sapiens
  chr22:19706042-19706172
  binary
cgcccagtcagggggatggctcggtcggcctcgggggtcgacgatcccccgggtaggcgacgtgccctgtccaggcctcacttcccgcgtccgcaaaacggggtggacaacgcagcctaaggcagagccg

SEQ ID NO: 7303 - DNA, 91 bp, Homo sapiens
  chr22:19924393-19924484
  hypo
cgccaaaacaaacaagtagattagaggcgtgggcttattcggtcatgctggaacctcctaatgctcaaggggtacaagtgtgtcgatatac

SEQ ID NO: 7304 - DNA, 391 bp, Homo sapiens
  chr22:21319195-21319586
  hyper
tccctgggaggtcgcgaggatccccggagacccagactcgggcccggggcgcccccggccagagcggcccctggctgcctccctacgccccgcgactccggtccggacgccgagggcctcggcctgcccctgtcccccggccgccccccacctgctccggcccggcggggcggtgctgggcccgcgggctccccggccgcagtgcaaacgcagcgccagacacgccccgcccgcgcctccccgcccccccgcgcccgcggccccaagcggttcccgagcccaggcccgcgccgagcccaggtgagcgcccgccccggggaccctggtccccggaaccccggtccccgcccgccgccccgcctcttcgccccggcgccgggggccagcgctt

SEQ ID NO: 7305 - DNA, 137 bp, Homo sapiens; identical to SEQ ID NO: 5811
  chr22:22862472-22862609
  hyper

SEQ ID NO: 7306 - DNA, 137 bp, Homo sapiens; identical to SEQ ID NO: 5811
  chr22:22862472-22862609
  hypo

SEQ ID NO: 7307 - DNA, 86 bp, Homo sapiens; identical to SEQ ID NO: 6560
  chr22:29587127-29587213
  hypo

SEQ ID NO: 7308 - DNA, 80 bp, Homo sapiens
  chr22:30084279-30084359
  hypo
cggcccctcggcactgaagatgtgtttcagtgcagctctcctcggcaccggattcgttgctgcaacagtgggagggaaga

SEQ ID NO: 7309 - DNA, 120 bp, Homo sapiens
  chr22:30084388-30084508
  hypo
aggttctgttctcatgatccttgctgtgatttctcttttgatgttggcaattttaaaatgacatcagtctatctggacctttttcctaaggctcttgctcagaccactcagtagatagcc

SEQ ID NO: 7310 - DNA, 821 bp, Homo sapiens
  chr22:30950922-30951743
  hypo
cgctgggcggtgggacgtcaccaccgcaggaaatcgcgaatgaacttccagagcttggtgacccacaggttggcgccgaggtccatcaggtactggatctcgggcgtgagcatgcgccggcagagctgcgcgtgccgctgcccgatgctcttcttgaggttgtagcccaggatggacttggtgcccagcggctgccagggctgcatggcctcgtcctggatggcggcggcgtccacggcgtggcccccgtcgatgcagatggtccgcatgcgctcgttggcatggcgcagggcggccacctcgcgggccatgcgctcccgcccgaaggcctccaccttgcgccagaagctggcgttgaagtggcggtagaggtgggagtccagcatgttccaggcggtggcgcgcccatacagctcccccgagagccgcggcacgggcgagtcgcggcgggcgttgagcttgaagtagagcacgtcctccagctcccagcacagcaggtccttcagcagcaccagcgactcgtcgaagtactcttgaaggagcaccaggtggaagcgacgctccacctccaggatgtgctcctgcacctgcgggctgctggggtccaggctgttgtcatagcccaggtcgaagaagagcaggtttcggaggtagtgggcattgaagccgttggggtcgtagtagcgatccgggtcttgcaggaactcggtcagcttgtcgccggccgagagcttccacgtgaggggcaccaccggcccgaagtagtggaaggaggactcgaacaagcgggcggggtcgcggagcaccgtgatgaagatggc

SEQ ID NO: 7311 - DNA, 106 bp, Homo sapiens
  chr22:41634855-41634961
  hypo
gcaaattgccctgcaggtccagccgctgggtcagctggggacagcgaggagaaagtggggctgagccaggcagggaccccgcctttgcaagtgctgcttcttcccc

SEQ ID NO: 7312 - DNA, 141 bp, Homo sapiens
  chr22:43351254-43351395
  hypo
cgtggacaagagaccaagaaggtaaactgaatgaatgaatgaatgaatgaacaaacaaacgaacgaacgaacgaaaaaacaaatcaactgatccagccagccagcatccaggtgaactgtccctccaggcagtgatctaac

SEQ ID NO: 7313 - DNA, 39 bp, Homo sapiens
  chr22:43434578-43434617
  hypo
tcatctagttccatttacaacagactcatccacaaaacc

SEQ ID NO: 7314 - DNA, 402 bp, Homo sapiens
  chr22:44208017-44208419
  hyper
cgcgcgtggccaccccgaatacagccttaccgggaacccctcctcgattctccgcctagctgggccggcacccgcgtgcgcggaccccaagccgcggggtctcagaggggctgcccattcggcgtctctaggacgctgttgcccgagagacgacggcagtcgctgactggagaatgagcctacgcgcctggcaagaagctgagctgtgattggtcaattggagataaacgaggagggggcggggccaggtcagtcccgcgcctccgctcccggaagaaatttccgccggaagtcccgttctctggggagcgggaaccctggcgacccgtgtcatgggagcgggtttctgttacgtgggctttagcgcgagctgggcggtcggcccggtcccaccgaactgca

SEQ ID NO: 7315 - DNA, 72 bp, Homo sapiens
  chr22:44208448-44208520
  hyper
ccctgctctgagaagcagactctgcatctgtaaaaggctaagcgtgcccactggggcctgtggtcaggattg

SEQ ID NO: 7316 - DNA, 108 bp, Homo sapiens
  chr22:49857262-49857370
  hypo
cgtgaaccaccgcgcccggctattattcaaaattcttatagatggaatgttggtggactctccactattcgtttacttatgaaatcatgtgttgacatcagtgtagac

SEQ ID NO: 7317 - DNA, 469 bp, Homo sapiens
  chr22:49911038-49911507
  hypo
cgccatctgagggacaaagtccccgagccccgatgcctgggcgcagagctggagactcggcttcttcttcgacctccccggccacttcccaacaccacatcacctcaacgcaggtataaggcacgtcccgtcattgcccccgttttagagctgagaaacatgaggaccagagaatcaaggctgtctgagccagagggcgcctcgctggcccctaccccaaaacagcacccgccctgccctggtcattactgccccccaaccttaaccaccctccccactgccctacagaagacccttagaagggggctgactgatggaccatggtgaaggccagcctggcctccttcagccacagtgtgaagcgcagttcaccaaaactggaaactgccatgcatcccggtgtcatcaaacaccacagcaaaagagccaggtgaacgcacggaacatcaagccgcaaccctccacacct

SEQ ID NO: 7318 - DNA, 193 bp, Homo sapiens
  chr22:49911586-49911779
  hypo
ccgtcggagctggggatcatcctcccagagtttcagcagctcagagaaggccagcaactcaccgagccatgccacagcgtgcaagcacagcggcccggccctcctgcattctgtcatgcactgcgtgtcatcttattaaaggatccaacgcaggctcataaaatacttaatgaaaacatgccaccaggtgcac

SEQ ID NO: 7319 - DNA, 153 bp, Homo sapiens
  chr22:50899708-50899861
  hypo
tccccaacttaggacaggccaggcagagtcagaagcaaggaaggtaagggggggggggtcccagaatctcagggtaccacagttatggggaatcccaagtgggtggggaaggagcagacaaaggcccgtttcccacgggcacccagaaccccc

SEQ ID NO: 7320 - DNA, 97 bp, Homo sapiens
  chr3:10638636-10638733
  hypo
cgagtacgcgtgcacacacacaggcacacgcacacgcaggtgcacacgcacacaggcacacacgcacacaggcacacacccagacacacacaggtgc

SEQ ID NO: 7321 - DNA, 762 bp, Homo sapiens
  chr3:111578054-111578816
  hyper
cgtaaaccctcccgcccttctttcagctcttaaaaaaagcctgccacgaaagtccctactgcgttgctgcgaacgtagctttgagaagctggcgcccagtgatggggcaaacagccatgcccttccagcagccgtgaaagccccaacagcaaactgcctgggagcggggcaggtcaccaacttcgttgctcgaactccctgggtgcccgccgcggtggttacaaagggggtcaagagtgccggacccagccgcgcggagcccaccattgcggcccgagggggacccgacgggggcccgacggtgtggcgtggcgcaaggagcgcgcctgccttctctcgccgccgggaacgggctgcaccaatggccaggtgaggaggcggcggtggtcgcccgggaggagggggtggtgccgactccgtgtgccaggagtgcgtcccggggacgctgcctcccccgcggccgagttggttgccgccggttgcgctgcggagggttgggggcggagaggaggcagtggctgcccgggccgaggaggggcgcgctgactgctcaccgcgagtcaggaggggccggcgggctcacggagggagacagggtgggcgggggcaaaggctaggcgctagggcggcggcgccagcgtagagcggcggtttggaggaaagatgagacggtgagtgggctccggggacacagagtttctttgcttctttacaggctgtagggacaaaagcccgggctggggtcggcagtgcccaggctgc

SEQ ID NO: 7322 - DNA, 166 bp, Homo sapiens
  chr3:11581157-11581323
  hypo
cgtcttaagctatattcgttttctcttatgaatttaaaaaataaaatctattgatgcgcatacaatcaaatatatgtaaaagtgcacatttctgagctttgagaaacgtactcgcttgtggaaccagcacagttcggcgacatcgagcaggtctgtctggcctgtc

SEQ ID NO: 7323 - DNA, 33 bp, Homo sapiens
  chr3:121637776-121637809
  hypo
cgcctctgtctgggccttgctctggcccactgg

SEQ ID NO: 7324 - DNA, 64 bp, Homo sapiens
  chr3:12586164-12586228
  hypo
cgaaactctgtctcggggaaaaaaaaaaggtataatcctttcttttgctttctaattcatcctt

SEQ ID NO: 7325 - DNA, 421 bp, Homo sapiens
  chr3:127394412-127394833
  hypo
cgcccaggcttgtttttcttaatagtccctgccatcgttaggtagtgggttgattgtcctgcctcactagagtataagttcagcaggacagggacctgtgtctcgttcactgctgtgctccagtgtgtgggacaagcccagccaccaagtcagctctccgttctgtgttgtctgtcttccgtgtgagtgagtatgtgcctgtgtgagtgcacacagacgtgcccattcgcctagcccttgactgggagggtgttggggtcagagtgggcccagggtaatttgggaaggcatcgccagagattcggagccccatgtgtgggaaggtggggaggagggacagggagattagaatttcccccaggccccttccctgctaactggtgagccctgcctcccccaggagcccgctgcgaggccaaca

SEQ ID NO: 7326 - DNA, 278 bp, Homo sapiens
  chr3:127394909-127395187
  hypo
cacggcttcctgcaggaggcgggattactatgacgacttcttgcagcggtgagccagggcacacgaggggtgcagcatggggtgcggtggccctggtgggtgtggcgagtctgctctgactgtggcctgcactgggttctgagtgctccgaggaatggggtggggctgtgccaagtatcctccctcctggcttgtccctccccaggcttctagagcagggcatccacagtgacgtggtctttgtagtacacgggaagccattccgggtgcatcgctgc

SEQ ID NO: 7327 - DNA, 33 bp, Homo sapiens
  chr3:12743274-12743307
  hypo
cgagtagttgggattacaggcatgcgccaccac

SEQ ID NO: 7328 - DNA, 58 bp, Homo sapiens
  chr3:128056326-128056384
  hypo
cgccctctctcacaggaaggctcataaacacaaggatctcgctcaagccccggcacgt

SEQ ID NO: 7329 - DNA, 46 bp, Homo sapiens
  chr3:128056497-128056543
  hypo
gtcacaaccaggtttctcagcagctcctgtgctgggcactgaggac

SEQ ID NO: 7330 - DNA, 334 bp, Homo sapiens
  chr3:128216313-128216647
  hyper
cgtgtgccagcgtgggtggactccgggctggggaagcgacagggaatggtgtgtgccggtgtgacagacgccagagcggcggggtggaacgtgctgtgtcacgggagactttcttgaccaaaacggaatgtgcgagtgtggaaggaagaggggccgtccgcggagtttggggacacccgggcgtccgagccccagagcctctgcagctgggacaaggaagcccgagcccgccgcctgaggtccccgcgccgttagtgacacgcgccgccgacaaaggctgtatttttccaggctcgcgccccgcccgcgcgcgcgcgatggtccccatggcgac

SEQ ID NO: 7331 - DNA, 378 bp, Homo sapiens
  chr3:128216713-128217091
  hyper
tccaggcaggtcaaacccaaagtcacacaacctgcgacgcgggccccgcccccactccccggccgcccctcccctgccccggccccggccccggccccagcccggcgacccccggctgctgcccaagcgcaggcgcagagcgccacctggcggcggcggggtctcgggtggggtccgcggagccggtgcccgtgcagaagaggtggggtgagggtctctacctccagaaggcgggctctctgggagcaggggctttgctttgtcactgctgttccccagggccagactaacacacagtaggtgctccataagtgtttcttgaaaggatgtttggagggatggatggatggatggatggatgggcaggaaattatagac

SEQ ID NO: 7332 - DNA, 185 bp, Homo sapiens
  chr3:128737561-128737746
  hypo
cgccttcctgcccttcaggcagtccctccccggtgatttctctgtatcttcttgttgggatgtgttcttgcgaagtgagtctttcgggtctgtttgcaccccattggcggcgttgtggcacatgtctcactgtgcctctgactccccactcggcgctggagttcccaccccaaatgttgttctgc

SEQ ID NO: 7333 - DNA, 334 bp, Homo sapiens
  chr3:129290351-129290685
  hypo
cgtgggctcccggccaatgtggtggacggccatggacacattctgcaccatgtggaaacgctcaccagccactgtgatggtcctgccgccactgcgggggacagcaaaacctatcagtgcacctgcagccccagagagcctgggggaagggcggggtgccagtctcacctgacagggctgcggcggggactgatggccgtgatgaccgggttctgcatgtaccagaaggtgaggttgccgtgcacgcagccccgacgctcgaagcgcacacacacaggcaccggagccggcagggccccctcaggcatggtgcaggcgatgctggtatctgtgc

SEQ ID NO: 7334 - DNA, 216 bp, Homo sapiens
  chr3:130424529-130424745
  hypo
cgaatctgataggtggatggtaagattgtactacttaaaaccggtattactggttttttattttggacagttgtcacttctggaacctacaaaacaaatagaattctaactatttacgtcgtaagcaaagtatatttgaagacagaagtgtatgcatgtttttatctataaattataacagctttttgtcctcattaatgtaccaattttaaaatc

SEQ ID NO: 7335 - DNA, 271 bp, Homo sapiens
  chr3:13611739-13612010
  hypo
cgcgtgcgtgccggtgtgcaccgtgtctgtgtgtgcacacccagtactgacaggcttcctttctgattcccccagggtcttacaggagaggggaccgtcctgggctggcctggaccatggtgctgctctgggagcctgcaggagcctggcttgctctgggcctggccctggccctgggccccagcgtggccgcagctgcccctcggcaggactgcacgggcgtggagtgcccgccgctggagaactgcattgaggaggcgctggagccggg

SEQ ID NO: 7336 - DNA, 186 bp, Homo sapiens
  chr3:13612341-13612527
  hypo
cctgacgccggtggagagctcatctgctaccagctccccggttgccacgggaacttctcagatgccgaggagggtgaccccgagcgacactacgaagacccctacagctatgaccaggaggtggccgaggtggaagcagcaacagccctggggggtgaggtccaggcgggtgcagtccaggcaggc

SEQ ID NO: 7337 - DNA, 124 bp, Homo sapiens
  chr3:141174173-141174297
  hypo
cgtgctcgacatctgcgtgagtgtggtgagtggaagagcatcaggccatgtcccaggtctttccaaatcagactccattatttctgacattcctcttcctaaagaccagaggtaggaattcagg

SEQ ID NO: 7338 - DNA, 308 bp, Homo sapiens
  chr3:142895557-142895865
  hypo
cgagaaagggggcggctcagcagcagcagctgcagccgctgcagcctctggtggtggcgtgtcccctgacaactccatcgaacactcggactatcgcagcaaacttgcccagatccgtcacatataccactcggaactggagaagtatgagcaggcatgtaatgagttcacgacccatgtcatgaacctgctgagggagcagagccgcaccaggcccgtggcccccaaagagatggaacgcatggtgagcatcatccatcgaaagttcagcgccatccagatgcagctgaagcagagcacctgcgagg

SEQ ID NO: 7339 - DNA, 322 bp, Homo sapiens
  chr3:143316169-143316491
  hypo
cgctggcgtccagagaaagagagagccaaagctgtccttcttgcagacagacaggagggggccaaaacacagctcaggcttgtttgtgctcaaagagagaaagttaagctgttgaccctgaaggcaagggagaactggcctcgcaaccttgcgtgggggtggccaattcaagcagctgagacagagcggacagcgtaagaaaagctgctcaggagagaggtagtttaagaaagctgttgatgagagctgctgctgaataaaaccatattcacccgcctgtggccccccgagggttctttctgctcatccacccactcccctc

SEQ ID NO: 7340 - DNA, 87 bp, Homo sapiens
  chr3:148705325-148705412
  hypo
cgggagatttcctctttgaactccttgaccgaggctcgatcgcagatcacaatttcctccttgtccttgggggtcttgacggtgacc

SEQ ID NO: 7341 - DNA, 66 bp, Homo sapiens
  chr3:148705462-148705528
  hypo
gccacccggccgcccgccagcccgcccggctcctcctcctccccgctcgcccggccggcccggctc

SEQ ID NO: 7342 - DNA, 77 bp, Homo sapiens
  chr3:150187009-150187086
  hypo
cggcgtgagccaccgcgcccggccaacatgcaacaatacttctaagcaaggcgatacagatcagcaactctggtgcc

SEQ ID NO: 7343 - DNA, 124 bp, Homo sapiens
  chr3:151112517-151112641
  hypo
cggcgctcaggcgccatgatgcagccgccttctcttcatgcaatcacatcgcagcagcagttgatacagatgaagcttctgcagcagcagcagcaacagcgacttctcaggcaagcccagactc

SEQ ID NO: 7344 - DNA, 108 bp, Homo sapiens
  chr3:16925425-16925533
  binary
cgagatcctgagccccgggacccttgttccgggccccgaggcctacttggtagttgcccctcggggttccgggtgggtgactgacagttgcagcagctctggggaggc

SEQ ID NO: 7345 - DNA, 74 bp, Homo sapiens
  chr3:16925583-16925657
  binary
cgcggcccgatgacccggcctcggtgacagcagccgcgacggcggcaatctcgacagggagctaggcggctcat

SEQ ID NO: 7346 - DNA, 231 bp, Homo sapiens
  chr3:16925705-16925936
  binary
agcgccgagctcgggaggagacagcagccggcgggtggggtgggtctgggctgccccctccgggagctgccccggggccgcacggcgattgtcatacccggccgcccctgcccgccgtgggcttcctctcggcgccgcgggccttaacggggctctgaggggacgtgacagagctcggcacgcggcagcctctggggagttagggtccggagagacccacgcgtcgccccc

SEQ ID NO: 7347 - DNA, 256 bp, Homo sapiens
  chr3:16925965-16926221
  binary
agccgcctccgcgtgtccagagagtgtcggggcggccgccacttcccctcgcccttcgccggaggtgggcgccttttcctgcgtggcgggtgctccgaccccagttgctctgagccccggggaagcgcgccccgagcccctgacgtgggcgccccgttacctcggggtgggtgcctggggcccctgaggtgggcgcgggttgccccggggtgggcgcccggcccgcgcgggttatttttggcgcccgcagaggcgc

SEQ ID NO: 7348 - DNA, 93 bp, Homo sapiens
  chr3:16926261-16926354
  hyper
cggggctccgccggcgccggagctgactcgtctctctcttctttcccctgcaggaatcttccgataattctgccgccgcgactttaaccgtgc

SEQ ID NO: 7349 - DNA, 54 bp, Homo sapiens
  chr3:169540679-169540733
  hypo
cactgaagaaccttgaagtcctgggactggatgacaataaaataggacaggtac

SEQ ID NO: 7350 - DNA, 283 bp, Homo sapiens; identical to SEQ ID NO: 5816
  chr3:170626174-170626457
  binary

SEQ ID NO: 7351 - DNA, 508 bp, Homo sapiens; identical to SEQ ID NO: 5817
  chr3:170626710-170627218
  binary

SEQ ID NO: 7352 - DNA, 102 bp, Homo sapiens
  chr3:177238890-177238992
  hypo
cgacagagcgagactccgtctcaaaaaaaaaaaaagtccttgcaaaaacttgtctcagaaagggaaaaaaagtgagatacaaaggtagttagagcagcggtc

SEQ ID NO: 7353 - DNA, 48 bp, Homo sapiens
  chr3:181444767-181444815
  hyper
tctagcgccctctttttttttttttttttttttttttttttgcctgac

SEQ ID NO: 7354 - DNA, 125 bp, Homo sapiens
  chr3:186079497-186079622
  binary
cgcagagagagccgagccccaccctgtgcgttccccaagcctgcacccctcgagcggggcatcccttcctgcagggctttgtggcaggtggaactgtcggggtgggcgccgtggctttggctgca

SEQ ID NO: 7355 - DNA, 301 bp, Homo sapiens
  chr3:186648488-186648789
  hyper
cgggctggggaagacgcctggggcactgcccggcgttaacaaagggagccgataccgaccggcgtgggcgcggagcgggcggccgccaccgagcgtgctgagcaaccgcagcctccgcggccgagagtgcagcgagtgagtagggggtgcggtgggcggcggcgcggcccgggctatcccgggaggagtgtgatgcaaaggggcgcgggaggatagcggaggcgcggggcccgcggcgcgcgtagggcgcagggaatctctctccagctccgcctcagctgccttggctccggggctggcc

SEQ ID NO: 7356 - DNA, 46 bp, Homo sapiens
  chr3:187455297-187455343
  binary
cgctcacacataagagcacaaacaccagccctgcgcgccggggcaa

SEQ ID NO: 7357 - DNA, 447 bp, Homo sapiens
  chr3:187456666-187457113
  binary
aaggggtagggatgagaatctgggaagttaaaatgaagtaagtgcatttattggaaattaggagtcccgtggttccgggagctcaaaccgaatggtgtttttaccgctgcctaacgctagagagagccctccatcaaggtttgaaaccgtcaacccctttctcgcccctcccctccttcccattgacctagtttggccagagcctcccgatttggagaatgccttccgcccttcccccctcctctccagccagagaggctacagaggctgttggattattggtaatctaataactccaataacccgctgaaaaatccaaagggaaatctgaaagtgtaaagcactgtttagggacaaggacaaggaattttaataaggctgcaactgccgtagtgaaccccgcatcaggggccctgccgtggggctcccggtctcagcagtgtttca

SEQ ID NO: 7358 - DNA, 509 bp, Homo sapiens
  chr3:187457654-187458163
  hyper
tcagccaaggtccttattcacgttaatgaagatggaaggcactaactgtccttggaaagcgatgagtcaaacttgaccgcgcttcaaactcgttcccagattcgtttccagtccgaacagaggcgcgtttctccgacgcggcctccgacggctcccgcagtgggaggggccgaactcgatccccgccgacccgggcgggggcgacggcgctgtctccccctgcagagcgcgcctgctgccgctaggggccgccagcatgcggacgcgcgtttgccatcttaagtcacgagctcggagaaagaaaactttacggaggaactgttgtggcacaaattctggcctatccacatgacccccaccccctcacacacacacacccggtttctcgccaggctactatgcagaggatgttaggaaggggaagagagcgatttcagaatcgaggctcgccctgcaagtctttggtccaggccttaacccccctcttaacacgcaaacccccgagctcc

SEQ ID NO: 7359 - DNA, 1066 bp, Homo sapiens
  chr3:187458583-187459649
  hyper
cgaagcgggttatttgtggtttttcttagtgcaaatagatgctcatcgctgagtgatgggcaagcagcgaggcctttctgattttcatccctcttgccaaaactttggaggttgtatgccatccccattggagggtgccctccttctgtcagtcctagcatctggtcagggtaccgccgcccgggaggtggaacggcgagcccaccgcccatggccgcgaactcgatctcagcccaccgctaggtggcaggccagcccgtccgagaatcgccgcgcggccgcagcttccacaccgatccctacccgcccctctttattttctgtctggtgggggcgagggttgggggtgtgattgcctctaaaagcaaagctagaaaacatttaatttagtgtatgtaattccgttcctcccgatgctcccgcctctagcaaccacaacgcggtatctggagctggtttcatgtatcataagttgatttctcccccagcctccgaaaagctttatgtactgggaagggaaagaaggtgcacttgtcttcaaaaggcagaatggcactcgacagtattggcagagattcttgccaaacactggtcatccagcaaagaaagtcgggaataaactcctgatcttctcggaggaaaggggcgctgggggccgagtgctggatcccactcaggctcactgcgcctggcaaagcgggggagtggggagtcgggtatggtcttttggtgaagttgtgggtctcggagtggacatcgggagggttgggaggggccgttcctggtttccactggggcaaagagaaaccagccagttctgccaccacgctgcaccctcgctgtgctcgcggcggcagcggcggtcccacttgttgcgcagtgctggaaaccggcacgcgccattcgatgttgattcacagagggctacagaccagcctaccattgctccacgccatccacaaacctcctcaacacaccccctacacatacgtcctgccaccgccggcaaaactacagcatttccagccactatggtgttttacaccaaaacatccctcactatctc

SEQ ID NO: 7360 - DNA, 154 bp, Homo sapiens
  chr3:193922622-193922776
  hypo
cgaaactcgcctggacaagtccaacttcattcttttcagtacgactagctcctgtgcgctgcagaagactcgggctgatctgaaagcgcctctcctattcgagactctcaggttttaagtaggtcttccgcacctgcagatgaaaaaagatgtg

SEQ ID NO: 7361 - DNA, 296 bp, Homo sapiens
  chr3:194786359-194786655
  hypo
cgggccggggtgtgatctgttggcgggccggggtgtgatctgtcggcgctctgtgatctgtcagcggcctggggtgtgatctctcagcgggctggggtgcctgtgcggtgatctgtttgcgggctggggtgtgagctgtcggcggtctggggtgtgatctgtcggcggtctggggtgtgatctgtcggcggtctggggtgtgatctgtcagcgggctggggtgcctgtgcagtgatctgtcggggggctgaggtgtgatctgtgggcgggctggggtgactctgcagtgatctgtc

SEQ ID NO: 7362 - DNA, 968 bp, Homo sapiens
  chr3:195622064-195623032
  hyper
cgaaggggtctggggcccaggtatctggctatcccctagccttccccattacctgcggtccctcctcgcccccagccaggcgctggtaagcagatctctcccccatggagccccaaatcccagcggctgcggtcagggagagaagcagcgcccgcagcccccgccccgcagcggcaccggcagcgtcactgccctgcgtcctggggggccgggcctcgagcatcctccagaagtgcagggccgctactgcgtctcagcccccatagcctcatccgccatcggccggcggccgggtggtcgcgcccctcctcctgccggcctgcggccattccctcctgcagcccgtcccagctccgttcctcctctccggggcgcggctcccaccctctcccagtgagccagctgtgccagccccgggctgacccccaccgagagccggggctctgccttcgccggccgcggaaccgggctccactcagccctcagcccgcctccagggccccagagccaccaactggggccttggggattcacgagtcccccgtattcacggtaaggggccatccgagaagcccacagcagaggggcctccgtccgactccatctgagaccccctcctccgaggcatcccggggctgcagcccaccccgcccccagcctgccccggcggccactctgctcccagaacgccgggcgcccacctgccccgcagctcggccctgcgctcagccggctccgcgccgcctcccagcgcccgcctcccgcgcaggccacgcccccgccccgaggcccccgcggccggttccccgcgcgccactcccgcaacgccgcacgcgctgtgcgctgggcacgcactgacctccttgacttcagagcggtgacacgagggcccggactcctgctcaaaagccgcccaacacaggcccacgcgggggtgccgcgcccagcactggcgcgaggccatcgcc

SEQ ID NO: 7363 - DNA, 83 bp, Homo sapiens
  chr3:195637425-195637508
  hypo
tcagacacatcggaaactgtgtagggctggctctttctgcgctcacactgtccagcaatgggccccagggacttggccagagc

SEQ ID NO: 7364 - DNA, 254 bp, Homo sapiens
  chr3:195640380-195640634
  hypo
cggagagccatggctacaacttgagcaagtcaaacacgctgtgattcaggccagggagatgagcgtgggtaaagaacactgtacgaactagctcagggcttctggaactgtgtgcggctgaatcaccggggcatcttggtgaactgtaaattctgattcagcaaactgggaggagggcgctgagatccagcatttccatcaagcttcccatggaccacactctgactatcagggccttcgatgcagacagtctc

SEQ ID NO: 7365 - DNA, 105 bp, Homo sapiens
  chr3:196754412-196754517
  hypo
cgccctctgagcagcgggtcctcctgaggctcccacctcctggcctgggcccggcgggaggcaagctggcctcgtggccagggagactcgggagatcctatcggc

SEQ ID NO: 7366 - DNA, 118 bp, Homo sapiens
  chr3:196754758-196754876
  hypo
ccgcacctccatgccaccgagcactgcgggcaggggaccgtgaggcccggctcccccgccctgcccagccccggcccaccatggagggtggctccagcagttctgtgtgagcccattc

SEQ ID NO: 7367 - DNA, 295 bp, Homo sapiens
  chr3:25728355-25728650
  hypo
cgccgccgccagcaccggacccggagccgccatgcccaagtgccccaagtgcgacaaggaagtttacttcgccgagagggtgacctctctgggcaaggacttgcctcggccctgcctgaagtgcgagaatgtgggaagacgctgacctccgagggccacgctgagcacgaaagcaagccctactgcaaccacttgctatgccgccatgtttgggcaaaaaggctctggccggggtgaagccgacagccacactttcaagtaaatcgggtggtggagacctcatccttggccgctc

SEQ ID NO: 7368 - DNA, 191 bp, Homo sapiens
  chr3:4347767-4347958
  hypo
cgcactctaccctcaaggtgtttacaactgtcacgattagcttcaatattcctgccgtgcgtgtgtgtgtgcgtttgagactattctataaatctgtttccaatcttgagtcatatttttctttgccatatccaagaacaatctgtaaaactatgtgcccgacgtatttttttaattaactcactttaagc

SEQ ID NO: 7369 - DNA, 82 bp, Homo sapiens
  chr3:50377892-50377974
  hyper
cgccgaccccctctgccgcgacttgacccgcggcgactgcgctgccccttggctgccccttccgctctcgtaggcgcgcggg

SEQ ID NO: 7370 - DNA, 167 bp, Homo sapiens
  chr3:50378002-50378169
  hyper
tttgcgcacgacgccccagatgaagtcgccacagaggtcgcaccacgtgtgcgtggcgggccccgcgggctggaagcggtggccacggccagggaccagctgccgtgtggggttgcacgcggtgccccgcgcgatgcgcagcgcgttggcacgctccagccgggtgc

SEQ ID NO: 7371 - DNA, 59 bp, Homo sapiens
  chr3:5165842-5165901
  hypo
cgcgcctggcctcctattgtaatattatgattttttgcgcttggaatgactatctttcc

SEQ ID NO: 7372 - DNA, 333 bp, Homo sapiens
  chr3:53032401-53032734
  hypo
cgtctcaaaaaaaagaaaagaaaagaaaaaatgtagatcaataatattattttgctgacgcattggagaaagtaaaggctgggtgcagcttcaagctgaggaccacccaccatgcccccatcatggtggttcccctaggtgctgaagggcccagccatagctctcgccctcgcagggtccctccagggtctctgctgtttcctacctaggggtgactgcagccatggctaagaaagcgccagcgcccacccacctgggccaatggactggttctgctcgtgccacgctggttctgctcctcgccatctcggcagttcagaaagaaccccaacg

SEQ ID NO: 7373 - DNA, 261 bp, Homo sapiens
  chr3:57679351-57679612
  hypo
cgacagagcgagattccgtctcaaaaaaataaaaataaaatatatgaacgcataatggtgacggtggctaacattgaacgcttactttgtgccagttgatatgccaagtacaagtgcgaatacttacaaatattaccttattgaatcttcacataatcgcaaataagtagactatttatttctttttacagataaggaaatggaggtcctggaggttacatgactagcccaacaagtatgacaactccgatatcggcttgc

SEQ ID NO: 7374 - DNA, 1462 bp, Homo sapiens
  chr3:61546692-61548154
  binary
cgctcggctttgtttcccggcgggggaatgcgctgtgttggaggcgcgaacaggagccgcagacggtgagcctcaccgctgcaaatgccagggcagtgaagccgaacagaaaaccccatcgctttaaaaaggcagctgtccgccctccccctttcccctcgccagggcgaggggcccctcaagtccgggatccgcgagctgcgcggaggatctcgccaaacccgagcaccgtgcggcgtcttttaagagctcgaacaacgggaatccagcaaaaaacaagccggccccagaaggcagcctccctcctctctccgcgcacgggctacaatcgcccccagtccccaaactgtcccagtagaggccgcgcggagagagcagagccgagggacccagcgcaaggcgggagccaagcgcggctgctttaagaacgcggagagcgcgcgcccgccgccagctggcccgggctgcgcgcccccgccgccaccgcgcgccccctgttcgctcgctccttcgctcgccggctttaaagtctctgccaggatccatgctcacatgttacttcctgtatggaggcatggccagtttccagccccgcgctcttcgttccttcccagcctgcgccggagccacaactttcaggagcatggactgaaggcgccctcgccccagcgcccctctgagatcctttgtgttttcctccgtttcctccggccgtttctattttggggggctctccgctccccctgcctctcccctccccttcccctctcgcaaacatgcctccttccttcccggggccctggaaggagctgcctgcctgaagcccggagacgccgcgccgcgctcagccccgccgccgcccgccggctctcgggctgtgctgcgctgccgactcaagttggggatcctcggctgctcgccgccgccgcccgcggtccctgcctgccccaggcccggggcatcgccgccggccgccgactccgcgccctgcccgatcggctctctcctttttaaacggaaagcagcctttctccgccgagaggatcgtccccagcgtggctctgcgttcccggtcactttttgagattttccggggggcgctcggcggcttcccggattccaaggggactcgggccgccgagcgcggggggcccgtggagcgggcgagccggggaagcgccccggcttagcggaggctcgcacggaggcaagaacttattcaacaagtttacctccctgctttcctcttttcgatgtgcgttttcggacatgcggaggttactggaaccgtgttggtggattttgttcctgaaaatcaccagttccgtgctccattatgtcgtgtgcttccccggtgagtgccggccgccgaggggatgcggccccggccggcgcgcgttggggatgcggagttgtcgcctgggcgcggagctccggcgcccgtccgggagaccctggagag

SEQ ID NO: 7375 - DNA, 1570 bp, Homo sapiens
  chr3:66550318-66551888
  binary
cgcacgacgcgtgctggctaacccccaaatctctacgacccacgctcgctcgtctccagaccccacgaggcacgctcttcttctccaggctctctcgcacgcctactcccccggacctccacgcagaatctcccttccgccactccaacctgacagtcttccaacacgcacaagcacgcacaactccacacacacaacccagtccgcaccccctccctgagtacgaacccccgccgctccatccccaagtgacagagccccggggcgcagagagggcggaaagggcggcactcacaggctccgcgtccaggagggcaggtccccgggcaacgcagccagcccgcgcccaccgcagtccagcgagtccccagcgcaagtgcaggcggccgcgcagggcgcccgcgggccggccgcggcggtcaccggctccagccgaagcaaaagcagccagagaaggagaaggcaaggcgagcggcgcggggccccgagccctccccggaccggccgcgccatcttgtctggagcgcgctgcgaactccgggcgcggggactgtgaggacccgaacggccgcagacgcgggcgggcccgcggggcgctccgctcggctctagactccgcaccggggcatggcccccgccccaagttctctctgcggccgcggctccggcactcagcgtgcccccggtgcccgggccgctccggagcacccggcgggggccgcaaaccccgcgcccatccgggccggccggcccgcccgcgctagctgcgaactccgccgattcgggcaaggtgtacccagcctgcgctcttcgtccgcccggggcacgccgagtgccgctaccgacaccggccgagggcagtgctgccgctgcgcctggaagacaggcgttcagccccgcagcccgagctcggtgccggcaggcatcttcctctgggctcggagcgcaaagccgtagacctcgggctggacggcgcggccggccccgcgctgggaggccccagtgcgcctcgctgtccccacgccgcggccagagagcgcgcgcgcgcgcgcagcctcgggttccgcacggctcctccgcgcagcaagagtcccgccgacctcgcagccgaacaatcagccgcttgctgttcgcctccccgcggcccagccccggccggtcccccaagccccgcccccggccgctcgcccgcacacaccccctaggctccgcgctccgcggccgcctgctggcccacgttggatgctttgcaacagcgccccgccacgcctccccgcctgctgctcattggctgccggagtccaccgtggccagcctcgagggccattggagcgctcgctgtgatcccgcccctcccgcttcaccggctaccccgcccccacactcttttcccacccaaggtgtgaagggcgggagactgggaggagaaagggagggacggcccccgcctcttaaaggagacacgcaggttgttgttggagaacgggaacgcgggctggggaaaggaggcgtgaagatacgccctctgcgtcaagaaggggagagaaagttaagagggtaaaacgccccc

SEQ ID NO: 7376 - DNA, 768 bp, Homo sapiens
  chr3:67048599-67049367
  binary
cgacacgcatgtgctcgcgtcgtggccaatcagcgccaggaattcggaggctaggggtggagccagatgcacaggacaccccattggccaggggaagcttagaagagccggaacccgggagctagagaagcgaaatgacatttcctttttaaatagctggagtcggggccccatcgagaaatggccgcgtcggcaggtgggtcgtgtggtggccagggcggcgtggagggaggtgagggggaaggtgggccggggccggccacaggcagtgggatgaggacgtagcggtgcggagctagagggaaggatgaagcggtggaggggaatgagaagagggaggatgaatggtgcggagggcggtgggcggtccggcgggaccgggatggggaggctgggtacccgccggcgctgcgccccaggaggcagcgggaggcggcttgagggggcaccggcggccgccgttgttcgagcttccctcgtgaggctctgccctcggctctcggcggagtccgcgcagacgcctctcctgggctgcgagcgcgtttcctccgcgagcacgggtgccgggctcgccgggctccgcaggagcaggctggcctttgaacttgttccgccgatcgcgctccgccctctgtctcccagatccttaactcgcggtcccacgaggtcgtgcgtatatccacagacatttgtatatatcttgtagggggaaaaagcctagcaagcagacacacaaacagaaaaatcccgcgatgccgtaactggctc

SEQ ID NO: 7377 - DNA, 63 bp, Homo sapiens
  chr3:72703941-72704004
  hypo
cgtaaacactctcggacccatggcaaattcggcttggcccatccctaccacatattttgaagc

SEQ ID NO: 7378 - DNA, 113 bp, Homo sapiens
  chr4:100555198-100555311
  hypo
cgctgtacatatggctcgtgcctggactcgctcgtgcctagaaagagtaaagccatgtcgaaactgtctacgtttccttgagtgtttttccagctcccccgcactcgcccacc

SEQ ID NO: 7379 - DNA, 207 bp, Homo sapiens
  chr4:10090148-10090355
  binary
cgacgagtctgcagatgtggggagggcgatgtctaagttctgcatgtcaggactagcattaggcagcctgcggctctgagcagtcacgggagcaggcagacaagccattccccaccccaaaacccatcccagttcttacctggccgtcagcactggctgtggcaaatctgttcccatcaggagagaatcgcacacagttgacaaagc

SEQ ID NO: 7380 - DNA, 60 bp, Homo sapiens
  chr4:104854506-104854566
  hypo
cgtctccaggaataaattctaatttaaaagtgcatttaaaaaaagatcagccccgggcgc

SEQ ID NO: 7381 - DNA, 81 bp, Homo sapiens
  chr4:113444864-113444945
  hyper
cgaggtgtcagcagtaatttaaagaaggtattcagtccgccagcgtctcttttctccgtttcccccttccacccctcccac

SEQ ID NO: 7382 - DNA, 115 bp, Homo sapiens
  chr4:113445444-113445559
  hyper
caaaacacctcccctagggttctgatagttgccaagtttaagaacaaccggatttaagccccacgggtttcgttttcttttgttttgaggatttagcaaatcagctagaagtgac

SEQ ID NO: 7383 - DNA, 59 bp, Homo sapiens
  chr4:1290581-1290640
  hypo
cggaccccactgcctcgagacgctcccatcactcggctcccgtgacaccatcctctggg

SEQ ID NO: 7384 - DNA, 355 bp, Homo sapiens
  chr4:1290669-1291024
  hypo
cttgcctatgctgtcttctctagtcttggaggccttttgttttatgtcaccagccagccctccagaggttgtgtggcttcacagacggtctccaagctcctgtccccacactgctgccctccccaggcctctctccctgaggccatcccgtgtagtcacctcccggagctctcttcgcatgtctggaaggcagttcaaagatacgataccaggcgcaaaaccaaatgccgcatctcggccttggggccccagacgagccccagacctgccttactaagccacccttcccaagtcagttgacagcgatgtcccccggcacttgttcagtgacagccgagaactcggaggttttctc

SEQ ID NO: 7385 - DNA, 167 bp, Homo sapiens
  chr4:1326509-1326676
  hypo
cgcaaacttaaatgtgccaaaatgttgttttttagacatgcaagaaagcacttcagccaagcagaagggagccagctggacgaggtgcgccaggccatgggcatgctggccttcccgcccgacacgcacatctccccgtacaaggtagggcgtgcgtccctggggtc

SEQ ID NO: 7386 - DNA, 116 bp, Homo sapiens; identical to SEQ ID NO: 6592
  chr4:152591291-152591407
  hypo

SEQ ID NO: 7387 - DNA, 43 bp, Homo sapiens
  chr4:153247386-153247429
  hypo
cagagggagaaacagaaaaacaaaacaaaacaaaaaaacccac

SEQ ID NO: 7388 - DNA, 111 bp, Homo sapiens
  chr4:154421947-154422058
  hypo
cgctcacacacgcgtgcatgcacacacacacaggcatgtgcacttttttcctagttgtgaaaatcgatggaatgactacatggcttagtctcctctttctccagagacgcc

SEQ ID NO: 7389 - DNA, 353 bp, Homo sapiens; identical to SEQ ID NO: 6166
  chr4:15780742-15781095
  hyper

SEQ ID NO: 7390 - DNA, 41 bp, Homo sapiens; identical to SEQ ID NO: 6593
  chr4:1791229-1791270
  hypo

SEQ ID NO: 7391 - DNA, 107 bp, Homo sapiens; identical to SEQ ID NO: 6594
  chr4:1791344-1791451
  hypo

SEQ ID NO: 7392 - DNA, 140 bp, Homo sapiens
  chr4:185765461-185765601
  hypo
cggaagcaccgctgctgaggaacaaccacctcctcctgaccatcgcaagctgcccaggaagacatgctcatagcagtgtccgtttccctgcctaactttccaccagaagattccttcatgtctacgggcggacccaggcc

SEQ ID NO: 7393 - DNA, 128 bp, Homo sapiens
  chr4:186348212-186348340
  hypo
cgtctcaaaaaaaaaaaaaaattaataagaaaaaagttaagtgatgggaaagttctaggcaagaatttcttccctccctcctccctggctcgcttgtgtgccgggagctgcgcagatgcggggatacc

SEQ ID NO: 7394 - DNA, 58 bp, Homo sapiens
  chr4:1911667-1911725
  hypo
cgttaaaaaaaaaaaaaattatttatcatgcttgggatttatggaccagtttgaatcc

SEQ ID NO: 7395 - DNA, 127 bp, Homo sapiens
  chr4:2524742-2524869
  hypo
cgtctcaaaaaaaaaaactcaaaccaatacataattgtataccttaagaaacaaacaaacaaaaaactaaataaaaagttagcagaaggaaggccataataaagattagagtcaagataggcccggc

SEQ ID NO: 7396 - DNA, 124 bp, Homo sapiens
  chr4:2907414-2907538
  hypo
cggccatagtggcgagtcaccttctgactcctgttgggtgcggcatgacccaagtgcagcgcaggccatctgcaggcaccagcgacagacgctgcaaggggtgcttcgtttcagcgttaatgcc

SEQ ID NO: 7397 - DNA, 222 bp, Homo sapiens
  chr4:3446222-3446444
  hypo
acacccgagtgggaggaatggcctgaggtcacccagaaacaagggacaaggggtggaccccggccccgactccgctgtcgtggggcactgcgcggcccctggcccagctcctcggccctgcccccagcttgtctgagcagcccttgcctgaacgggggcacctgccacctgatcgtggccaccgggaccaccgtgtgtgcctgcccaccaggcttcgctgga

SEQ ID NO: 7398 - DNA, 68 bp, Homo sapiens
  chr4:3447170-3447238
  hypo
tgcatctctgacaaatggggaaactggagctcacgggatcaggctggtccaaggtcacgcagtgggtc

SEQ ID NO: 7399 - DNA, 309 bp, Homo sapiens
  chr4:39447953-39448262
  hypo
cgagtctgtggcttcgtccccacagttcagcgatcctcatctgtacgtgtggaacgccactggcaacagactgttgcaccgagtggaaggggtgaggctgaaaacacgacccgctcaatgcacagattttgtaaacatcaaaaaacaacttgagatgttggcaagaatgaaagtcacccactaccggtttgctctggattgggcctcggtccttcccactggcaacctgtccgcggtgaaccgacaggccctgaggtactacaggtgcgtggtcagtgaggggctgaagcttggcatctccgcgatggt

SEQ ID NO: 7400 - DNA, 635 bp, Homo sapiens; identical to SEQ ID NO: 6596
  chr4:513070-513705
  hypo

SEQ ID NO: 7401 - DNA, 221 bp, Homo sapiens; identical to SEQ ID NO: 6597
  chr4:513734-513955
  hypo

SEQ ID NO: 7402 - DNA, 76 bp, Homo sapiens
  chr4:56222936-56223012
  hypo
cgcgatcttggctcactgcaacctccgcctcctgggtagcctagagggatttttaaaacataaattactacctcac

SEQ ID NO: 7403 - DNA, 148 bp, Homo sapiens
  chr4:617098-617246
  hypo
cgccctgaacctactcacctacaatcacgacgggctcctggggcaggacaaagccacaggtgaggaacgcggtgctgcgggtggaagctgctgtcacagtcgtgttagggtgagtggactatggccgcagactgtgggctcctcccag

SEQ ID NO: 7404 - DNA, 44 bp, Homo sapiens
  chr4:628787-628831
  hypo
gtctgcctccttacctgcctgcccgcgtgttctgtgctgcgcgt

SEQ ID NO: 7405 - DNA, 421 bp, Homo sapiens
  chr4:628950-629371
  hypo
ttctgtgctgcgcgtccacctccttacctgcctgcccgcctgcccgcgtgttctgtgctgcgtgtccacctccttacctgcctgcccgcctgcctgcgtgttctgtgctgcgcgtctgcctccctgcctgcctccctgcccgcctgcccgcgtgttctgtgctgtgcgtccacctccttacctgcctgcctgcctgcccgcgtgttctgtgccacgcgtctgcctccctgcctgcctgcccgtgtgttctgtgctgtgcgtccacctccttacctgcctgcctgcctgcctgcgtgttctgtgccacgcgtctgcctccctgcctgcctgcccgtgtgttctgtgctgtgcgtccacctccttacctgcctgcctgcctgcccgcgtgttctgtgccacgcgtctgcctccctgcctgcct

SEQ ID NO: 7406 - DNA, 37 bp, Homo sapiens
  chr4:71566942-71566979
  hypo
cgattctgctgcctcagtcttacaggcgtgagccacc

SEQ ID NO: 7407 - DNA, 115 bp, Homo sapiens
  chr4:71706531-71706646
  hypo
cgagagctgtagcacaagtctgtgctgccctgcgctgtgccaccgaaacccgtggtgtgagtggctaaagaaccctttctgaaaggaattgtgataccttggttataaaaaaatc

SEQ ID NO: 7408 - DNA, 161 bp, Homo sapiens
  chr4:8466231-8466392
  hypo
cgcacggggagctgtgtgtgtccgagagacttggtcacgaagcaggttgtgctgctcctcgttgacgtttcgttgctgagtctccttatctcagattcttctgagctgttttcattctcaaggagtaactaggtgaaagatcaggtcttcgctcaggcttc

SEQ ID NO: 7409 - DNA, 58 bp, Homo sapiens; identical to SEQ ID NO: 6193
  chr5:114515671-114515729
  hyper

SEQ ID NO: 7410 - DNA, 132 bp, Homo sapiens; identical to SEQ ID NO: 6194
  chr5:114515769-114515901
  hyper

SEQ ID NO: 7411 - DNA, 44 bp, Homo sapiens; identical to SEQ ID NO: 6195
  chr5:114516274-114516318
  hyper

SEQ ID NO: 7412 - DNA, 95 bp, Homo sapiens; identical to SEQ ID NO: 6201
  chr5:125930492-125930587
  hyper

SEQ ID NO: 7413 - DNA, 170 bp, Homo sapiens; identical to SEQ ID NO: 6202
  chr5:125931062-125931232
  hyper

SEQ ID NO: 7414 - DNA, 218 bp, Homo sapiens
  chr5:132082800-132083018
  hyper
cgggagtcctggcccaaggcgggcgcagtctccagccgccccacccctggctgggggctctgctcagggagcacggccggcaggggggaggaggcgtgcgctaggcagcagcggggatggagggaagggagggggtccgccacccgcctgtgcgcgcccagtcctgccgcatcctgggtgcgcgccgcccacccgcggggcgagtgcccaggaggcga

SEQ ID NO: 7415 - DNA, 73 bp, Homo sapiens
  chr5:134880614-134880687
  hyper
ttaccgctgcctggcctggaaggataggaggggcaaggagagaaatgcgaagtaagattcgattttaaaagtc

SEQ ID NO: 7416 - DNA, 391 bp, Homo sapiens
  chr5:135091190-135091581
  hypo
cgctatggtattaatgaaatatcactgtggtatttatcatatctaatgtcaacacactatggtgttaatgaaatatcgctgtgatatttaccatatgtagcgtcaacgcactatggtattaatgaaatatcgctgtgatatttatcatatctaatgacaacgaactatagtattaattaaatattgctgtggtatttcttatatctagtgtcaacgcactatcttattaaggaaatatcgctgtgatatatatatatggtcatacgtagtgtcaatgcactatggtatgaatgaaatatcgctgcgacatttatctcatatctaatgtcaatgcagtgtagtattaatgaaatatcgctgtgatatttatcatatcatatttagtgtcaac

SEQ ID NO: 7417 - DNA, 121 bp, Homo sapiens
  chr5:137912553-137912674
  hypo
cgtgagccaccgcgcccaacccagttttagatttttaagaagaggaattaattgattcaacagatatgttttggcatgcctaccgtgtgtcagtcactctcccaggtggtaggaatacagc

SEQ ID NO: 7418 - DNA, 64 bp, Homo sapiens
  chr5:139227938-139228002
  hyper
ggaaggggctggcaggcaggctgcccaggctgccgccgagcgcgcaggtcccgcgccgcggtcc

SEQ ID NO: 7419 - DNA, 156 bp, Homo sapiens
  chr5:141931151-141931307
  hyper
cgcagctcattgcagccccgaggaaatcaccgggggagggctcgggagtgcggcgcggcagccccataatttccagggcccttctcctacactgacacgtaattgtcagattgttttatgagagcagcttcctgcccgcttcctgcctggcttcca

SEQ ID NO: 7420 - DNA, 718 bp, Homo sapiens
  chr5:142783958-142784676
  binary
cgcgtgccggcaggtcccccaccaccgcatcatctgggcggccgggtcttcagctgccgccgccgcgctctcgcactgggagagaagttgcaaagcagaacccaccctcccccgcgccccgaccgtcccccaccctcttccccgagtctgcgaggcggcggcggcggcagaaggaggcgccgcctgccaagttcaacccccacccctcccgcccaatgtgctcacactcgaaggaagttgcacgccaaatgcaaaacctccagcgagctggatttctttgcactttttttttattattatgattaaggaaagcagggggcggcaggcttaaaagcaagttgcaggcgaaatagtaagttgctggcgaaatatagccccccttccgaaactcctgacctcttcttccaccccggccagggcccgcgtccaagttcccggtgcaggccccacccccgaatcttgacatttgctgccctcgactctgtgcgttgctcaccctatcacgttcataggacccctgcccctacaaataaaacaaaatacaggcagctttaaaatgccagcgttcaactccctacagatgttcctgttaggagcttccccctcagtccaaggggaagggaactcgtggtccgtcctgagaaaggagagggccgtggggcgaggggtgcccgtgcgggaagcccccgccccagctcccttccccagctcgccgcgt

SEQ ID NO: 7421 - DNA, 32 bp, Homo sapiens
  chr5:142785272-142785304
  hyper
aaccctcagccagaagaatttttatgaagggc

SEQ ID NO: 7422 - DNA, 294 bp, Homo sapiens
  chr5:151150270-151150564
  binary
cgctccacatgcttcatttccaaaattctcagcaaaactccgcgggagaccctggtcacatgcctggaacgagaacaaaccggggcgtgtctgtgccggacggctgggaaccaaagctatttccatagaaatagggccggccagccttgagttgtagccccgccagtgcctgaaacgccaggaggaggggacgagttgccttttaaaggcgtagcgacgagaataagcccccacccgcggcaattcgaggctgaacaatagtggtgcagctcgggacgtggtgcgagggcccac

SEQ ID NO: 7423 - DNA, 229 bp, Homo sapiens
  chr5:151150681-151150910
  binary
tcaggccttccaccggcgaccttccggcgggagcctgcgggcggcgcaggaacgaccctccttcctctgccccgcagcagtgctgagtaatggtgagagcagcaaggcccttggccgccgcacgtaagaaaaaagttgtaataaaaagaaaacaacccgggaaactttactagttggttcgccaggtacaaacctatgcggaaaaggcggggtacaggcctcggaggcc

SEQ ID NO: 7424 - DNA, 62 bp, Homo sapiens
  chr5:156558383-156558445
  hypo
cgctatgcggagatgtgtattatgtttaccattgttaaggaaattgagttttatggaagttt

SEQ ID NO: 7425 - DNA, 173 bp, Homo sapiens
  chr5:159343215-159343388
  binary
cggaagagtgactagcggggaaaataaccccagcgggccgcctaggggtgggtgacccgcgatctccacgcccaggtcccgccctcgcggcccctgcccccgccccgccccccgcagagggcgcgccctgggagcggcgggggacgcggctggcttcccggcttgcggggtgg

SEQ ID NO: 7426 - DNA, 152 bp, Homo sapiens
  chr5:159343648-159343800
  binary
gcgcctgacgtggaccattaaacttggagctgccgcctcgtcccctctcctcctcctcctccctctgacaggcgagcgagcgactcggtgcaggcaggagacgtgctgccgggctgggctgcccgggggagatgactcctcgccaggagggc

SEQ ID NO: 7427 - DNA, 163 bp, Homo sapiens
  chr5:159776164-159776327
  hypo
cgtggcatgtctatacctcgttggggtcatcctggtcggcatagattaggaagcccgtaaagaggctgtctgtccagtaagggtcatagaagagcccgttctgctctgagtagaagatctgcagccaaacttcgtcaccctgcttgagagccaggatggtgga

SEQ ID NO: 7428 - DNA, 147 bp, Homo sapiens
  chr5:159776588-159776735
  hypo
ggtatggccactgccacagctgcaggggcctgggaggcctggctcccccttcttgcccttgggccccttcttgcctggtgtgccatgcttcccgggggtaccgttgacccccttggggccacgggggccagcccgcccaatggcccc

SEQ ID NO: 7429 - DNA, 42 bp, Homo sapiens
  chr5:1729774-1729816
  hypo
cgcggctgtgttagaggaggcgccggggcctgggtgcagaac

SEQ ID NO: 7430 - DNA, 331 bp, Homo sapiens
  chr5:1729886-1730217
  hypo
cctccagacccagcctgtgtgcagaggggctggcggagctcggacgccgggctcgctggcctttgccgatggacctcgggtgtgtccaggccgggcgagggccggcagctccagtgaggcgggacctcactctatctgtgttgtgcatcctgttcgagtttctgggtcccgatcttgagcaagccaactgacctctctgatgttggtttgctcagatgtaacgtgcggttgacagcgtctatgctggagcacgtggcggcttaagagcaataggtgaaaggggtatctcagaagacgccctcaggacacggggatgccataggcctcgggt

SEQ ID NO: 7431 - DNA, 56 bp, Homo sapiens
  chr5:1730252-1730308
  hypo
cctggcaggctggcacccgcgcgtgggctggggctcactctagctgttcccttggc

SEQ ID NO: 7432 - DNA, 158 bp, Homo sapiens
  chr5:177310267-177310425
  hypo
cgtaaaaagattaaaactgtatagaaaacttcgaagaggaaagtaaagaacttgaaattccactatgtaaagaatgctcctgttagtcacgttgtggtgaacattgtccagcatccagccatgcagatccttcatgtaactgcatgtccctgtgacgc

SEQ ID NO: 7433 - DNA, 596 bp, Homo sapiens
  chr5:180218508-180219104
  hypo
cggaaaaatcaaaaagataaatgcacctaagagggaaacacaggcaggccgatgcagcctggggactgtggtcccacctcagctcatgatgtggcaaggaggggcccaggaaggacaggcaggtgctaattccagctaggatcatagccctcccacgtcagtgggggcgccaggtggacacggcggccccggaactggaaggtgacaataccccggtagccagctctcggaacccccgacttaaggtcatccatgacacccagagccttggcgaaagccttgaagctgtccctgcccgtatactgcacccgcacctcccccagctccttccggtcattggtcctcactttctccacctgcagctggggagcaccgtagacgcgggcgaggaaatctcggtcataggcctcccgctgcaggtaagacaggtccagctgggtgaagtgcacaaactgctggttcagcttgataaacttgaggtgctggtcaaagaactgcccgtggctcacacccttgcggccaaaggtcatcgttcttgagatctcagggcgtatgcaggcccgcccctgccgctgctccggccgccgcatccagtc

SEQ ID NO: 7434 - DNA, 343 bp, Homo sapiens
  chr5:192307-192650
  hypo
gtgcacaacgtgcggctgcatgcgggccacgtgcagcagcttctggcccaggtgggcttcccccggctggcctcgctcaccctgcccaccaaggcctttgatgcaccccccacctacgcctccactcccgacggcgaggaccccctcctcgcctccatcgcccgggagctcagcaagatggcgcagctcactgagctcagtgtggccttctccacgctgaccgggaagatcccgacgctgcttgggtgagtcttggggaggggactgagggcgggctggtggctgcagaggcaaggagagatcgtccaggggcctgctcatgtccaaggccatgaggctacac

SEQ ID NO: 7435 - DNA, 99 bp, Homo sapiens; identical to SEQ ID NO: 6210
  chr5:42950747-42950846
  hyper

SEQ ID NO: 7436 - DNA, 175 bp, Homo sapiens
  chr5:42995428-42995603
  hyper
ctatgtgctctctagaattttaccggttttcatttgtctactaattttcgtgcattcgttactattgagtttcataatatctgggtgccctctgcccacgagctccggagagcataaatacccaggctgatggtagtgctaaaggttctgcttcatctcgtcaatcagcgcaaac

SEQ ID NO: 7437 - DNA, 76 bp, Homo sapiens
  chr5:54518558-54518634
  hyper
cgatcccagataaagcgctatgtagatccagcggttcgacttctccacgggggagagaaatgtcctaaatatggaa

SEQ ID NO: 7438 - DNA, 62 bp, Homo sapiens
  chr5:74753672-74753734
  hypo
cgtgttagcttttctttctcaagccagactggtttttcttgggtgtatgggtataggcgcgc

SEQ ID NO: 7439 - DNA, 80 bp, Homo sapiens; identical to SEQ ID NO: 6218
  chr5:87957200-87957280
  hyper

SEQ ID NO: 7440 - DNA, 157 bp, Homo sapiens; identical to SEQ ID NO: 6219
  chr5:87969885-87970042
  hyper

SEQ ID NO: 7441 - DNA, 600 bp, Homo sapiens; identical to SEQ ID NO: 6220
  chr5:87970918-87971518
  hyper

SEQ ID NO: 7442 - DNA, 227 bp, Homo sapiens
  chr6:10417842-10418069
  hyper
gggaagagggagtatttgtgtgagagacagagtcacaaagagaaagagacagtgaggggccagaacgactctcttttctccgattgtcaatgcccagtgggagccgggagcccaacaggcccagcccatcagattcggcccctccgggccccaaatccgctcgccccacccgagatccaggcctccagccacttgcctaactgtgagcccgcaagagccaggcccgc

SEQ ID NO: 7443 - DNA, 105 bp, Homo sapiens
  chr6:106958136-106958241
  hyper
cgccgcccctgctcccccgctttcccaggctcgcctcctcctcttcctgcccacctctatgccccgcacctacccagtccccactctggcaaaccccggagcgcc

SEQ ID NO: 7444 - DNA, 404 bp, Homo sapiens
  chr6:106958337-106958741
  hyper
gatataagaagcccaggttttcccccttcctgggagcgctgcggatcattcgcaggcggcccggcaccctcgcataggtgggccggcccctggggctccagccgtgcgaccccggaaccacacgtgtggcgaggaacgggtcccggggcggagtaggcagagtcccaagcgcatccttcagccacacctcctcggctctagggggcggtgagcaaaggcggtcacccctgcaacctcgcccgctacccccacgcactcctccgtgttcacatggtaggaactcccacaggcaaaagcctttccgatgcgctctgcagccgcgggatcactcgggtgtttgaacgctcgcgcgctcctcccattggagctccggctaaggcggggcccaggtgcttgcttcctcc

SEQ ID NO: 7445 - DNA, 334 bp, Homo sapiens
  chr6:106959606-106959940
  hyper
cccccctgacgccgagctgtcacctcgctggagcagcagtgcagcggctgtggctgtgcagcagtgccatgaaaatgattcaccccaattagaacctctggaggcagagggagagcctttcccagatgccaccaccactgccaagcagctgcattcctcgccgggaaattcctccaggcaagagaacgcagagacgcccgcccgcagtccgggggaggacgcttcaccaggtgctggccacgaacaggaggctttcctgggtgtgaggggtgcgccagggtcgcccacccaggagcggcccgcgggaggactaggcgaggcccctaacggagcc

SEQ ID NO: 7446 - DNA, 263 bp, Homo sapiens
  chr6:106960046-106960309
  hyper
cgcacacggccagctccgcgcaggcagactgcacagcccgccccaagggtcacgcccaccctgctaaggtgctaactttggacatctacttgagtaagactgagggggcacaagtggacgagccggtcgtgattactcccagagcggaagattgcggtgactgggacgacatggagaagaggtccagcggccgtaggtcggggaggcggagggggtcgcagaaatccaccgactcccccggcgcggacgccgagctccctgag

SEQ ID NO: 7447 - DNA, 155 bp, Homo sapiens
  chr6:106961023-106961178
  binary
ctttcccctccatgctgaacttaagatagtgaagggccagtttacacagtcaagatttaagatgacacctgtggcagcctcctcagttaattccctttttaacacaagatttaagtttaacgaatgtaaaaataggatatccgttgaagctcaac

SEQ ID NO: 7448 - DNA, 543 bp, Homo sapiens
  chr6:1080648-1081191
  hypo
cgctgatggatctggaaccacttctaaacccgctgcctgtttgcgaggagggcagaccactgacggtgggaaggatgcatttccccaagccacggaccacactgccgaggccctgactgtcctttcccggacccctgcctggcacgcctgggaaaggtttaccctgggggcgggggcaggttggcgccaggcagcttgcagaatgtgtgctcggaccccgggcatcgcgaagtgtgcgggccgtgggccccggctgcaccgccagcccctgcctggccaccccaccgcttacttgacctccaggaagcgcctgaaagaaagcgagctctgatatgtgcagctccagtgtgtttcaataagctgttttcaaagagtttgggtgcctcttcagactaagcccgttcgaaacctccatcttctttctagggttttcttcaacgggggcttagatgataaacggagacccctgttccctaccggttgaaactgtgtctgcggcaacagtaagcacccggccgagacacccacacccccatgtcgtgc

SEQ ID NO: 7449 - DNA, 40 bp, Homo sapiens
  chr6:108478767-108478807
  hyper
cgaagccccccatgcggcaagagcgagtcgcaggaacaag

SEQ ID NO: 7450 - DNA, 121 bp, Homo sapiens
  chr6:109058656-109058777
  hypo
cgtaacacaaaagcagtccaaataattcttttcagatcatagtatacagtttactggcctagaattagtttataatcagttgtggtcgggccaagaaaattattgatattgggccgggcgc

SEQ ID NO: 7451 - DNA, 114 bp, Homo sapiens
  chr6:109059982-109060096
  hypo
cgcgcagggaaggatggccgccccaccctaatcttataaggcaaatcaactttccccttagctggtgccatcttctctgctccttactgtacaggtggctggcaaagaagggac

SEQ ID NO: 7452 - DNA, 94 bp, Homo sapiens
  chr6:110768091-110768185
  hypo
cgagcagccatgaaggtgtaataatcaactgcaaacgccgctgctattccaaacaaaaacatgctactgcttgtggcccacaagaccacccggc

SEQ ID NO: 7453 - DNA, 430 bp, Homo sapiens
  chr6:11273720-11274150
  hypo
cgatgctgaggtgcgaacggccggggactgcgcctatctgtgtgcgttcacctgtgttgccctccacacagtccccgcctgtggtctagccttctactccctttccggccggcagattccgtcttgccagtggcttgatatgacttcatttatttgaggttgtgagtcaatgttatcaagatccgaattaccctgggcattgttcatacaatggaaggccgaaatggacacccatgacatgtagggcaaccgtgagtagagcctcactcaatatgagattgttccctggaaaattcctgtgttcacccgacagcaagtgattcagatgtcaagattaaggaaaacgactatgggggtggacaggtactttgacgtactctgacctctttttataggattggtttcttcttcattagcattttcccaagtc

SEQ ID NO: 7454 - DNA, 135 bp, Homo sapiens
  chr6:136901469-136901604
  hypo
cgccttccgaatgatactgtctaaggcaaacatccagtgcggcttgatgttatgattccgaagaactttattgacctggagagagagtgacatttagcctactttaatttttaattgcaaatagcctagatgatc

SEQ ID NO: 7455 - DNA, 139 bp, Homo sapiens
  chr6:158093637-158093776
  hypo
cggtttctctcttctcgcaccccaccctccccgcccgtgccctgtccccatccctgtccctccccacctctgccccctcctctccaccttctctttgctggcgcctcccgctctccagtgcgaccaagaccagtgcatt

SEQ ID NO: 7456 - DNA, 172 bp, Homo sapiens
  chr6:158094082-158094254
  hypo
ctgggcctggccagccaggactccctgcatgaggactctgtgcgcggcctggtgaagctcagctccgtgtgacccacatggccccaggccgggggacaccagaggctcctccatgggcagcaggagtgagcggaggggtgtgtcccacagcgactttcccagccaatgccac

SEQ ID NO: 7457 - DNA, 56 bp, Homo sapiens
  chr6:158321417-158321473
  hypo
cgcaaatattttctcccagcctattgcgggatctggccagcagcccgcaatgcaac

SEQ ID NO: 7458 - DNA, 264 bp, Homo sapiens
  chr6:167140099-167140363
  hypo
cgtgatcaccttaaatcacataaacatgatcaccttaaacagagaactggatctcgtgtactgatgctgctggcagcattggaaagtgactcttacaacttcagttgcgataccggtttccataagcttctgtgaattcttgtcaaagctttaaaactgaacacggcaacaactctaggtgaggagtgtttggcagatgaaacccctccaccagggaggtgacgggtctcagggagtgtgtctggcgggtggggaggaatccca

SEQ ID NO: 7459 - DNA, 365 bp, Homo sapiens
  chr6:168672446-168672811
  hypo
cgttcccgctgaaatctgcctgggcggccacacgcttcctgtgcaggctgcagggacccagaggacggtgtcttgccgagggatcctccctccctccaggtacctcgccccgggacagcagaagtgagagacaatccgagcatatccatgtaatgtggaaatgctgtactatcacccatctaaacaaagctcggaactgtctgcgccccaggacggggtcccagctggcccaggagaaatcgcactcacaggcccagcagagcccaacgccagcgctcagaatcccacagtgtctagacacgcacagcagcaacacggaagcggcacagggacagccccagcggtggcgacccagctccacaggc

SEQ ID NO: 7460 - DNA, 235 bp, Homo sapiens
  chr6:18368676-18368911
  hypo
cgtcagcggcgtcttcagcgtgatcttccgggtcaggactgaggtcaggtccacctcatcagctatgaagtctatgaatcctgggagaatcgggacgtcgttgtaggtgaggccgtcagcgctggtgaagagctgctgtgggatgagcccgtcctcaggcacgtagccggtgcagcagttgctcagatagtccgccatgctgcgggagaccccgcgaccccacgtaaacacccgc

SEQ ID NO: 7461 - DNA, 130 bp, Homo sapiens
  chr6:26271217-26271347
  hyper
cgaatgcggcgagcgagctgaatgtccttgggcatgatagtcactcgcttagcatggatggcacacaggttggtatcctcaaagagccccaccaagtaggcctcgcaggcctcctgcagggccatcaccg

SEQ ID NO: 7462 - DNA, 327 bp, Homo sapiens
  chr6:26272105-26272432
  hyper
agcaacaaatgttaactgaattctattttgtcccaaatggtgttttgcttcggttgagaatttttaaggcacaggctaattttaggttttccaacgactcttatcatttacttttcgttgggtcctattgatgatattccaggataccacccccactagcctcttctgcaggataacttgaacactgcagtggccctgtccatctaaactttacaaggttttgtaaacgttactgaacttgcttcttcccgactacattaaagcacttacttgagatattaaacattttctcattagtcctgtttgcctagtcagtcacttgtatag

SEQ ID NO: 7463 - DNA, 210 bp, Homo sapiens; identical to SEQ ID NO: 6237
  chr6:26322359-26322569
  hyper

SEQ ID NO: 7464 - DNA, 248 bp, Homo sapiens; identical to SEQ ID NO: 6241
  chr6:26577475-26577723
  hyper

SEQ ID NO: 7465 - DNA, 1073 bp, Homo sapiens
  chr6:27655169-27656242
  hyper
cgaatccgggcctcgcctcctcctcccttttcagatcataggatttctctcccccgcaaataatggcccttacttcgtaaacacgctggctccgtaatccctattattgttttgggggtttggttctgtccagggaggaggtgagggcagatgctcaagagaggctgtccccaccgtccttttgtctcagcgaaccgcagtccgcgcccgagcgccactagctgtcctgggacgggaactgcagcggcaagtgtgtgactttcttgagcccggagccacaggcctgggaagcgccgctgagacttcagggtcgtagtgacagaggaaccacccgaggctaggcggggagagggtgcagtttccggatcccgaaggcttcgagaagagccgacctgtctggaagggtctccaagaacagagaggactctgcaaccatcactcgggagccgcgtcctttcatccttgagacagctccgtggtccaacggttccccgatccgctggccgagatctcaagcttggatgcaacttcggattcgccccaggcaggaggaaggaagccccgattggaaacgttgacttgaatcttctcggatcagaattagcaggttaagaaaaactgtttccccgtaagaagcagggttctttggtgttcaatgtggagctccgccactcccagcccgggtgaaggaaaactgggaaacagaatgaatgtgattatctattcgaagataaatttccacaaagcatgccgtttgatagtagcttataatgtggaagtaaggcatcctgtcatccggccggttagctcagttggttagagcgtggtgctaataacgccaaggtcgcgggttcgatccccgtactggccaagtattctctgtggcttttatcaccagaatggatagtaacccagacatcgatctaaacgtgtacctgtgtgtttctccaggcttaactttgccccgagaaaacggatctgtgaatttggtgcgccctcgcttactcgacagcggttaatttgaacggggacgtttctttccgctgcctccaaggcatacccacatcctaccc

SEQ ID NO: 7466 - DNA, 68 bp, Homo sapiens
  chr6:27777648-27777716
  hyper
cgaaaatagaaaataaaatatggagaccatgaactgctaagtctgtcagaggaataggtgaacaacaa

SEQ ID NO: 7467 - DNA, 402 bp, Homo sapiens
  chr6:27778156-27778558
  hyper
ggggctctttgaggacaccaacctgtgcgccatccacgccaagcgggtgactatcatgcccaaggacatccagctcgcacgtcgtatccgcggcgagagggcttgagtctcaaggactcactgattacatacccaaaggctcttttcagagccacccacatgcgcgctgaaaagatctgtttctctcaggaattcttcctggtacttgttttgcctgtagtagatagggcccatttccagacgttatacaatctgtttcgtaagactcagcctatccctttttgaatgctaattttgggagtcttaacatctaataatgtccggcatttttccgtaagcattgagtgtagccaaaagttccttcgtgtattgctctcccatctccgcagcccggttttgacc

SEQ ID NO: 7468 - DNA, 134 bp, Homo sapiens
  chr6:27805774-27805908
  binary
cggcctggatattgggcaggacaccaccctgggcgatggtcactttaccaagcagcttgttgagctcctcgtcgttgcggatggccagctgcaagtggcgcgggatgatgcgggtcttcttgttgtcgcgggcc

SEQ ID NO: 7469 - DNA, 535 bp, Homo sapiens
  chr6:27805936-27806471
  binary
cggttaggtactccaacaccgccgccaggtacaccggcgctccggcaccgacccgctcagcgtagttgcccttgcggagcagtcggtgcactcggcccactgggaactgaagacccgcccttgaagaacgggtcttagccttggcgcgagctttgccgccctgcttgccacgtcccgacatgacgtaaaaaattcaatcagtaacgttcctgagactgacgtaacgctaaagctccgctacttatagtcaacagaggcacgaaaactaagctgtgctattggctaacattacagtttcgctttaaccaatgggattgcggttttgaaaaacacttattttgattggacaaagttaatatacgtttccaggactcaccactggttaaacgcacaacttcattctctaccccacttgcgttaagaagcagtgaataagcggtaggttgacagagctaccgtcttcctgtttttttcctccaattttccggcagttactcccagtcatgcccgagccctcaaagtccgctcctgcccc

SEQ ID NO: 7470 - DNA, 72 bp, Homo sapiens
  chr6:27833292-27833364
  hyper
cggtgctggagtacctgactgccgagatcctggagctggcgggcaacgccgcccgcgacaacaagaagaccc

SEQ ID NO: 7471 - DNA, 51 bp, Homo sapiens
  chr6:27858740-27858791
  hyper
ttttacctgacggcttctaattctgtcgcctaggctggagtgtggtggcgc

SEQ ID NO: 7472 - DNA, 315 bp, Homo sapiens; identical to SEQ ID NO: 6252
  chr6:28456978-28457293
  hyper

SEQ ID NO: 7473 - DNA, 209 bp, Homo sapiens; identical to SEQ ID NO: 6253
  chr6:28457345-28457554
  hyper

SEQ ID NO: 7474 - DNA, 143 bp, Homo sapiens
  chr6:28458192-28458335
  hyper
gccaggtcgtccatgggggttttcaagcgttttctcgatgactgatttttctagaagcgaatggattttattctcccaggtgtaaaggctacctcctgcttcacacccgggtaacataaaagacagcgctgggaccgaaactc

SEQ ID NO: 7475 - DNA, 197 bp, Homo sapiens
  chr6:2920938-2921135
  hypo
ttcccctcctcctatccggtgactccttggaccacatcaacccagagcaacaagacccattgcccctgctacctggggcccgcatggcatgtctgagcaatgaccccatcctcgctgcccgctgcccagctggcggaccctgccaggttcttactgcgatggccactccccaaccaccacacccgcagcacctccac

SEQ ID NO: 7476 - DNA, 138 bp, Homo sapiens
  chr6:3263649-3263787
  hypo
cgagcctttcgtgtgaaactggtcctagaacttagtagcactgtggttccagcttcatctttcccaactccgctgacctcatatgcgacatggggtccacctacttggttgttgacggacgccacccctctttccctc

SEQ ID NO: 7477 - DNA, 97 bp, Homo sapiens
  chr6:33995852-33995949
  hypo
cggggcctggggcccgagagggcagaacggggccaggcactcacctggggcctcaaggttctcgcagagctcagacttggcctctccgttgggccgg

SEQ ID NO: 7478 - DNA, 54 bp, Homo sapiens
  chr6:34219827-34219881
  hypo
cgtgagccaccgcgcctggctaacatcttttaactacttaaagaaaaaactctc

SEQ ID NO: 7479 - DNA, 1248 bp, Homo sapiens
  chr6:35655519-35656767
  binary
cggcggccaaacgctgaacacactgtcctgaaccacactgaagggtatctacaattctgcatctccgcttacaacttgaaacttactacgctttcgccaccactgcagaacccgattttagagactacgatggtcctgccggttcgttaatcgaagaaagccactctgcaccctgacgctcgtagtgtctttttggtaatactggtttttgactcttatactgtgaccggtgcacctttttggacgaccaataaggcggaagacgttttcacgtcccagaacagaagagcataaggagccctggcacagcgttcagccgcttcggtatggcctgggagtgacgcggatcacctgttagacggcgctgcgcggactcctccacaagcggccgacagcggcgatgcggttccccaacgcttgtcccgaggcggcaggtgaaggcggggaccgcccgtccacacccggagcgcggccaccccgccaccatccccttcacagccccgccaggtgggcgaatccgccccgcgcccgcggcgtcccggcgctcggctcgccctggggtccggttgtcccggcgcccggacccgaaagcgaagtttggctcccgcccgcagcggtgccggctgagggtccggccgcctgtccggggagagccgggggccagagaccggaggcggagcgggacctgtcatcccgggcgggaaacaaaagcccagtgaggacgggcgggcgcgacccgcctcgcctctgccgggagaggccggcgggggcggagagcggcgcccgcggtcactagtctccgcgcctcccgcggggagcaccggccccgcggcccctggggcgcggcgaggggcgccgcagtggggccgaggcctcccgcgcgctcccctcgaggcttccggaccccgctcccccgcgacacgcggctcctgggctgcgaagccgcgtgggggtgggagctgaggcagcgagtgcgaccgcggcgggacctggaaggagggcgttcggctcccggggcgccgcggccggccgccccatctccgtggccatggcgccggtacctgtcgccgcgggggctcgccgactccgtcactctccgccttgcccgtgctccgctaacccttcagcccgcccagcaggccgcccgcgcgccggacaccgccgcccgagactggcagcgcccgcgagccggcccgaatccccggggcagcgcccggcgccgtcccgccccagccggccgcaggaccc

SEQ ID NO: 7480 - DNA, 223 bp, Homo sapiens; identical to SEQ ID NO: 6607
  chr6:36198250-36198473
  hypo

SEQ ID NO: 7481 - DNA, 108 bp, Homo sapiens
  chr6:36238212-36238320
  hypo
cgcagaaagtcagaggccgaggagatggaagaacaggtgttcaagggggacccggacacccctcactccatctccttctcgggcagtggattcctctccttctaccag

SEQ ID NO: 7482 - DNA, 314 bp, Homo sapiens
  chr6:37023826-37024140
  hypo
cggccacatcttctgagctgcggggtggaggcctggctgcccacctgcattccttactctgcgtacccatgatctcatcccggccctcagccacccacagggcaggaggctttgccccattgtgcagatgagacagccatgccctgccctgggatggtcatttggcctgggctcagggcactctagtgggccccaggctccggcggggtgagtggaatgtggtcacggaggccaccccacgctgtcttgttgggtttaatgagccccattggtctgtccataccctgaataagctctggtctaccgaccctcct

SEQ ID NO: 7483 - DNA, 49 bp, Homo sapiens
  chr6:38020529-38020578
  hypo
cgccgggcgtggtggctcacgcctgtaatcccagagtgattacaggcac

SEQ ID NO: 7484 - DNA, 132 bp, Homo sapiens
  chr6:38084382-38084514
  hypo
cggccacgactacttgagaatacggaacggtccgaggaaaccagtcgatctaaacagaagagtcgacgtcggtgcttccagtgccaaaccaaactggagctggtgcagcaggaattgggatcgtgtcgctgc

SEQ ID NO: 7485 - DNA, 61 bp, Homo sapiens; identical to SEQ ID NO: 6255
  chr6:391113-391174
  hyper

SEQ ID NO: 7486 - DNA, 97 bp, Homo sapiens
  chr6:42762779-42762876
  hypo
cgcatgaacgacagtcaaggtaactgaaaagatctacatctattgttagaaagttgtctaacttgttttccaaaactttctgctattagatttaaaa

SEQ ID NO: 7487 - DNA, 358 bp, Homo sapiens
  chr6:47202003-47202361
  hypo
cgcacggcctaaaacctgtacttctgactctcaagataagttcaactttaaatctttggatacagcaagcttggtaaataattttcaaaaatcttgccagactacattttatcaggccttccccgaaacacacatttgatagcatcatgaggataaagggtggccgatagctctccaccgggcagtgcgagctgcaaagattttggaggcgtgtcttcgccagccaatggcgaggttactctcgggccagcgtatcttgaagttttggactggtcttcctgggcaggtaattcagatgactcaactctcagctacaactggactgtggacggggagggacgaatcccaggggctcttt

SEQ ID NO: 7488 - DNA, 155 bp, Homo sapiens
  chr6:47202453-47202608
  hypo
atgtagagtcacagcggagaaggggctccgactcatccacgaagaagcccttgttcttgtcctgtggggaaggctccaccgtcaggagagcggaattctcaagtttcgcgttggggctggggatggggctcgggctaagcgggctggggctcatc

SEQ ID NO: 7489 - DNA, 73 bp, Homo sapiens
  chr6:52344303-52344376
  hypo
cgtttaaagaaagctcattagtttctgtcataaatgcatacctgtgaatttatcattggagggttaatactat

SEQ ID NO: 7490 - DNA, 159 bp, Homo sapiens
  chr6:52344405-52344564
  hypo
ccaagctaagtgtgttgctaccttctctccagtgtttggtcaccggttcatcatccttgatacagacgagtatgttttgaaatacatggagagcaacgctgcccagtattcaccagaagcactcgcgtcaattcagaaccatgtccgaaagcgagaagc

SEQ ID NO: 7491 - DNA, 126 bp, Homo sapiens
  chr6:56894243-56894369
  hypo
cgcccttcggtggaaaagttcagtctgaacgtttagcgagtgctgcctctaaagagagcaatcactacacttacggctgagactttgcgcttagtagttcagaggcccccaggcagactacagacc

SEQ ID NO: 7492 - DNA, 80 bp, Homo sapiens; identical to SEQ ID NO: 5845
  chr6:6009552-6009632
  binary

SEQ ID NO: 7493 - DNA, 975 bp, Homo sapiens
  chr6:71998106-71999081
  hyper
cgcctgctgacggtgacacctcttcgacaccacgtccacgccagtcctcagctccaggagctgggcgggatccctcatcccgctcagctgggagatgccccgggagggcgtcccccggctccgggcggcgagggtagtagccgaccccaatccactccgggggccgccgggggccgcgtgaaggcaggtgttccggggagaaacgtggaagggaggcgcggcctggggccggtggcgctcggctgggggccgcagttggctcccctgggggctctgggcggcggcagctcccgcctgtggggaggagaaggagccggatgggcgggttcaggcgcgcgcggcggcggtcccggggccgccggctcctccccgcgagggtgcctgtccgccgctcgccgcgctgaggcagtgcggggcgggcgcgcctaggctgccgcccagcgccctcgccgcggccatgcccgggccctagagcgcctgccgcagcttgcgccccgcagccccgcagccccgcgcccgccgccgcctcttcaatgggcaacctgctcggcggggtcagcttccgcgagcccaccaccgtggaggactgcgactccacctggcagaccgactcggagcccgagcccgaagaaccagggccgggcggcggcagcgagggcccggggcaggagtccgagcagcccgcgcagcccccggagcaagccggcgggcggcccggcgccagccccgcgccggacgaggacgccgaggcggcgggcgccgagcaggtacgcggcccagcggtggcctcgggtcgggctggggcgccccgacaccccagaggggcaagtgccaagccgccctcgcgctcggaggccaggggcgccaggtggctgctcgccgctgcgacccgacccctccgcgccgcggctgacctgtctcccggtggagcccgggggcctgcaggagcccaaagcgccggaccctcccactgcc

SEQ ID NO: 7494 - DNA, 41 bp, Homo sapiens
  chr6:74019373-74019414
  binary
cgtattctgagactgtttcaatcacaaataagactcggaac

SEQ ID NO: 7495 - DNA, 102 bp, Homo sapiens
  chr6:74020094-74020196
  binary
gaacactccccagggctgccaggccagcgctttccaggggctccagcctacagcgccgccacctggggctggagccagaaacgcaggggccgggggctcacc

SEQ ID NO: 7496 - DNA, 79 bp, Homo sapiens
  chr6:90359827-90359906
  hypo
cgaagccaaatcttgtctttccgaaattgactagcaatgtatggaatgactttccgtatgtttagtcgtttcccagttc

SEQ ID NO: 7497 - DNA, 188 bp, Homo sapiens
  chr7:128597312-128597500
  hypo
cgaaacaacctggtgaagtctcgcaaggcccagcaaacttgtttacattcctcagcactagaaaagaaaaggtaggttggtccttgactgaggagaaagacagaatatgctgaaaaacaactgcaacattggggcacactgagaaccgtcccaactctgctaggagctctctccatcgtctcctgagc

SEQ ID NO: 7498 - DNA, 56 bp, Homo sapiens
  chr7:128602091-128602147
  hypo
cgtcccagctttcttcaagttgaccaactaaaaaagctagggaattggccaggcgc

SEQ ID NO: 7499 - DNA, 124 bp, Homo sapiens
  chr7:1308164-1308288
  hypo
cgcgaccctggcaggaggtctcagagaagacggctcgccacaggccctcagaacaccctcctggtctacagaggggacgctgaggctgggagcgggaatgtggctggtccctgctgctccctcg

SEQ ID NO: 7500 - DNA, 140 bp, Homo sapiens
  chr7:1315705-1315845
  hypo
cgggtgacccgcctcggcccgctgagcagccgaacgcgctgacggatccattaggccgctcccggccccggccccctctccctccattcctggccggcgctgtaaatctccgccaatttcggtcctaatcatcattataa

SEQ ID NO: 7501 - DNA, 177 bp, Homo sapiens
  chr7:134898284-134898461
  hypo
cgacagagcgagactccgtctcaaaaaaaaaaaaatggtgacaataacacccaccttgcacagtagtaatgaagatttaataagacagtgtatgtaaaacgcttagcacagtgaatggcctattggtaaaatgcatggagtgttcccttctccttccctcgaatggtatgacttttc

SEQ ID NO: 7502 - DNA, 77 bp, Homo sapiens
  chr7:138993466-138993543
  hypo
cggtcaggacttgaaatgtagatgtgggaatcatacaaaaataattcaaccttagaaattcaggtaagaggccgggc

SEQ ID NO: 7503 - DNA, 102 bp, Homo sapiens
  chr7:1460672-1460774
  hypo
cgtaacacgcatcccatgggcgtcccgtgccaggaattgagggggccacaccctactcaacgcgggggacagtctccgggctccgtggctcacggatggtgg

SEQ ID NO: 7504 - DNA, 163 bp, Homo sapiens
  chr7:148851234-148851397
  hypo
gagaagaaactagccagctgtgaaaagacagttaccgagcttgggaaccagctggagggcaagtgggccgtgctgggaaccctgctgcaggagtacgggctgctgcagaggcggctggagaacttggagaacctgctgcgcaacaggaacttctggatcctgc

SEQ ID NO: 7505 - DNA, 130 bp, Homo sapiens
  chr7:148884017-148884147
  hypo
atttttaatgtttttgtaagaataaggattattgtcatgaaaaaggtcctggaaaacaagtcaggaggccagagttttaaccttgctttcagttttctcattcataatgtgaggataatacctagtttac

SEQ ID NO: 7506 - DNA, 87 bp, Homo sapiens
  chr7:149024-149111
  binary
cgggagaacacggtcaggcccgcaggagacgccgcggcacctgccagaaagagagccgcaggccaagaccaggagacgcgagagagg

SEQ ID NO: 7507 - DNA, 575 bp, Homo sapiens
  chr7:149220-149795
  binary
tgcgccggcgccggggcttcctccacaccgcgcctgcgccgatgacaacccgcctctacaggacgcctgcgcaacgccatagtcacctcatcagctccgtgcacttacgagtctctctctgatcgaccacgtgttcctgtcggctcacagaggccgcctcagggtcctcccccattgtcttcctcgcaccctccactgttcccggcccttcactctgcgcttgcgcaggagtcgctcgctcctctctgcgcctgcgcagaggccacctcctccccgcccgtccgctcccttggcgtcgtcttgggccgcgccccgaccccttctgtttacgcatgcgcaggagccgccctgcgcgggtggggggctgagcccctgtggcttcaggtttaaaggcgcgagcgccacccacgcaggcacaagggctcctagtcgttttatttttagcgtaaggttttcctctttaacaaggaagtaaaaaaaaaagttgtgcaataaatattaatcgtccttatatgtactcgggaacgttcgtcctttaggttttctcctggcgcatgggcgccgccaatcatttc

SEQ ID NO: 7508 - DNA, 219 bp, Homo sapiens
  chr7:152569939-152570158
  hypo
cggtggctgcgcaggagggttggtcgagcggccgcgcaggagggatggtggagtggccgcgcaggatgcctgctctgacctgcctgactatctgtctatgctgtgacctgtctgggtctgtgctgtgaccgcctggaagccgtgtggactgtgtctcagagtcacccctttgctggggagagaggagggagtgttatccactccttcggcccccccgcc

SEQ ID NO: 7509 - DNA, 239 bp, Homo sapiens
  chr7:155581980-155582219
  hypo
tccaacaggcctttctggggcctgtcctgcttgccttgcggcagccaagggatataatgggtgccggccagcctcccctcccatgaccccgaggaagtccctccagcccctccctgagtctgctcctggcagaatccctctgtaagtggatgcggggtccagagatgccaccggctgggccagaccccatgaggagaagctgtgccggagcctgcaggactgggtccaggtcagggctc

SEQ ID NO: 7510 - DNA, 265 bp, Homo sapiens
  chr7:156347383-156347648
  hypo
cgcgggacgggtaaatggaaagacccttcagcgccaaacactgctgaggaggtagagcaggtggaacacgcatatgccacaggcgggaaagaacaatgacaaacactttgcaaaatggatgggcaggtttgtttggtttttcatttgtttgttttaacgtgcccttactatgcagcctagcaattctactcttgggtatttacctaaaacaagaaaaaatatccacacaaatacttgtcgcccaagtgttcataacgcttcattc

SEQ ID NO: 7511 - DNA, 805 bp, Homo sapiens
  chr7:156433175-156433980
  hyper
cccgccaggcgatccccaaaaacgcccgctgcgcgagcctcgacgggaacgcacctgcgtctagacgctgacgccgtgcgcggggcgggggccggcgagcatgcgcagtgtggtgtggacagggcgtggttggcaagcatgcgcaatgtgggccgggcggggctggcgagcatgcgcagtatggggcggggcggggcagggctggtgagcaagcccgcggggagcgagcgcggaggcgggcgttgctacggcaacggtgggcggccagggagttgcctgagggaaaaggggcagacgtccctgggttccggtgttcgcggaggagtcgaggcacggagaggcttcgggggagggacggaaagaagggtggcccgccaggcgggcggggtccatggattcggggtgagggccgtccgcggcctcgctttcgcctcctccgagccgggccggcgatggccgcagctgtgaggcgaggtcgggtcccgtagcggcgcgcagcctccttgggggactcggggtcctggttagtttccacagctccttctatctgaggggtacgaatttacggctgcctaaagccttagaacagtgatcccacgtcggtaattttagaacccggtaggaccggctgccatcaggggccccaggtgcagggtggtgtcagctttgagaggaattggagcctcgtcaccgcgcgcttcctgcatgagtggaacctcagaaaacggtcagcggggttcagaaggcaggagataacaccaagaccctacgtaggattgcatctttacgtcgtaggcttggtctc

SEQ ID NO: 7512 - DNA, 50 bp, Homo sapiens
  chr7:156744799-156744849
  hypo
aggttcttgtatgctactgtgcctgcagtaagttaaggccgagcaaaagc

SEQ ID NO: 7513 - DNA, 96 bp, Homo sapiens
  chr7:156799510-156799606
  hyper
caagtggaaatggatagtttggagttaatgagaccaatttttttttttttttttgtctaggagacgtctgagtgtccctgttaaacagggcccatc

SEQ ID NO: 7514 - DNA, 150 bp, Homo sapiens
  chr7:157086147-157086297
  hypo
ggagcagcgctgtgcacgttccactcacctgaacggcatcgtctgagtcgcgtttgataaaattcgtaggaggccactggtctggcctgagctcctgcaggaggcctggcagaacagaccaaaacgcagccactcgtgctagagctccac

SEQ ID NO: 7515 - DNA, 42 bp, Homo sapiens
  chr7:157262486-157262528
  hypo
cggcggcgcctaattccaccttgtgtgccagtgcagttcata

SEQ ID NO: 7516 - DNA, 215 bp, Homo sapiens
  chr7:157263471-157263686
  hypo
gggcatgttgctgaggtgctgggagctgggcctgacacttctgtgttttattgaatctcccaacatccaacatcccatttccatttaacagatgaggaaatgaaaacacagagaggagaaggcactcgcctgaggtaccctgccagacgctggggacgggctcacacgcagcggcccaaagcctgctgcctctcggagcagcgggggtctgggac

SEQ ID NO: 7517 - DNA, 218 bp, Homo sapiens
  chr7:157916520-157916738
  hypo
cgtgaacccgtgctgacccaggcagagctggttctctaatctgattggatctcagatcccgtgccgacccaggcggaacaggctctctaacctgatttgacctcagatcccgtgccgacccaggcggagctggttctctaatctgattcagcctcagatcccgtgccgacccaggcggagctggttctctaatctgattcgacctcagatcccgtgcc

SEQ ID NO: 7518 - DNA, 70 bp, Homo sapiens
  chr7:158349387-158349457
  hypo
cgcgcaggtcagacggctcccgggcaggtcaggcggctcccgggcaggtcaggcggctcccgagcaggtt

SEQ ID NO: 7519 - DNA, 361 bp, Homo sapiens
  chr7:158349747-158350108
  hypo
caggcaggtggctcccgcgcaggtcaggcggctcctgtgcaggtcgctcctgggcaggtcgctcccgcgcagggcaggcggctcccgggcagggcaggcggctcccacgcaggtcaggcggctcccgcgcaggtcaggcggctcccacgcaggtcgctcccacgcaggtcagagggctcccgtgcaggtcactcccaggcaggtggctcccgcgcaggtcaggcggctcctgtgcaggtcgctcctgggcaggtcgctcccgcgcagggcaggcggctcccgcgcaggtcagacggctcccacgcaggtcaggcggctcccacgcagtttaggcagctcccgcgcaggtcaggcagctccc

SEQ ID NO: 7520 - DNA, 421 bp, Homo sapiens
  chr7:1641978-1642399
  hypo
ggcccaggctgaagtatcatgatgaagagcttggaccgagggcagttaaggtgtgtgagtattcagatcccccacgtgcccttctctggaaggtgccagcgacctgtcctctctgggcctctgtcttctcctctgtggaatgggaatgatggcgtccgcacctcatagggctgctggaaaatgggtctgggtctcggctggaatttcagccagcgccgaggaccagaggccctggttcctgtccacgtggcctgggacccccgcggccccgcacctgggctccgggggcaagtgtgttcgctttgaggacccagccttggaggtcagatggcatccgttatgggttaaattttgtccccctaaattcatatgttgaagtcttaacccacagggcctcagaatgggatggtatttggagccc

SEQ ID NO: 7521 - DNA, 313 bp, Homo sapiens
  chr7:1694568-1694881
  hypo
cgaagggggtgcccagcctcgccccgcccagcgcacccctgcagcagcccgggagggcaggccgtggctcctgggaacacggcgcccagctgcaatccacattgctgctagtgaatatggacaattcagagacatgaaataaggcagacagagaaaaagcatcggtgactctgccaggctacatatgtgtgtgcgtgtctgcatatatatacacacacgtgtatacgcacacacagagccacacatcactcaacgacagggacacgttctgagaaatacatggttccgtgattttgtcatcgcgcgtacatcc

SEQ ID NO: 7522 - DNA, 60 bp, Homo sapiens
  chr7:19156644-19156704
  binary
cggactcccgccgccgctgctgctgccgccgccgccgcccgcgccgccgccgccgccaca

SEQ ID NO: 7523 - DNA, 207 bp, Homo sapiens
  chr7:1931663-1931870
  hypo
cgccagccctgcgagctccgttcacggtgagcaccctacgcaggtgcaccgtcttccacccttcatacatcatgtttatggcaccttttccatatttaaacacgtacagacacgcagatgcttagcactgcgccacggtggtctactgcattcagcacagtcacgcactgcacacttttgcagcttggcagcagccggctaaaccat

SEQ ID NO: 7524 - DNA, 212 bp, Homo sapiens
  chr7:1932177-1932389
  hypo
cggaaacgctccattaagcatttcctttgagtgacagacccacaataaaaaaagctgtggattttggaacattcccgacttcaggttttcgaatcggggaggctggacctgtatacctttccccctcatccatatgacaaacccggtaggtcgacatcgccacatgtttgtgcagttccggaatctgtgccgtccacgcctctggccctgac

SEQ ID NO: 7525 - DNA, 1116 bp, Homo sapiens
  chr7:21984770-21985886
  binary
cgagttaggcccttaacgcgtaattggggtcgtgctgtgcatatgatttgggatcttgcagcttgtttaactcggcccaatgacgttaccatttcccccaaatggttactaattccttgaaaacgtttacaaaagttctagaataaacactaaagttattatttttaaactccattatccaagttggactggtctggcgatcgactgttaaaaaaaaaaaattacaactttcttaagcttcctgatctctgtgccaattcccggagaaagtgtggggagtgcacaaaaaaagcccctcccccgtctcacgagggctgcaaacgcaggcgctgcgccccgctagctccccgcctgcacccccggcggccacccgagactgagcagagcgccaggctgagcgcggttgtgtgctggggcgaccggcctctgtggtccgcgtagcacaaacgtgacccactgcgcacacctgcagggcgcgcccactccggcactcaaccggctgggcgcgccagatccccagtgccgcagccaagggccacgtttccagcccaaggccagcaggaccgggtggcaaagggaagtcaaactgtgggtgcgtccggacggcggcgggcggccggaccctcacctggtagcgagtcgccaactccattcttcctaaccgggctccagtctcctcccagcacgcggccacgggagcccggactcaccacggcccggcgcaccaagaacgccccgcgcccgagcagctagcgcgctccgcccggagcacaggcgggccccgggaggggcgcacttgacgccctggacagggggagcgcgttgcgctgccccctcggtgccgcctcactgggcctcgtggctccgatcacgttccaacttcgcggccactgaccttgtcttcgcaggcggcgcgagagggggctgcagttgggcgcggcaagagcaattaccagtgttagggcgccgggctcccccctgcagcagagggagggagtggagccgtccggcggggtttagcgcgggagaaatgagggggctgtcccggcgcagcctccagctggcacgcgcgctggatacttggcagggtttattccaggtcatgccctggggcgc

SEQ ID NO: 7526 - DNA, 122 bp, Homo sapiens
  chr7:23507981-23508103
  hyper
cggaacaccacgccacacggcagggggtaagcaccagaggacaagaagttctcagctgagtctctccacccaataacggagtgagaacagaatcggggcaaacagaagcagcagctcacctt

SEQ ID NO: 7527 - DNA, 761 bp, Homo sapiens
  chr7:23510081-23510842
  binary
cggccagcggactgtgaaaatatcacactacgtgaggcaggcgccgcctccccataaaaaacccagaagggtgactggcaggagggaggggagaggaggaggaggaggagggaggaaggcgcaggaggcggaaaaaatccgctccgagtgtccggctttttgaatgagccacgtgttcaaactacaaatcaacgtctcacgtgaggaatcccagagcctcaattagagtgggtttcggagaaaaaagcgagcgagaggaagagggggaggggaaacgagattgggagagggactctgagaagggggaggaggaagaaggaaaatgctaaaggaaccgcagccggcaccaagcggggcgctgacggtcacaactcgagtttgtaaagggttatctggtctgggcggatcctgggagggagggctggaatattgatttttttttttttaatgaggaaatgggcagaggtactaacaggcagttcctcagcgctagttaccgtagttttaatcattcgatttttcaaaataggttattaacaacaaaaccagagtcacaatcccgaactcgcctggtggctttaatggcattagaagtgtaaccccagcaaagccgcaggcacgtttctaaggctggcatggacggaaatgctgcgaggaggggtgggggagtgggtgaggggggcagggggtgggggcaagacaggcgggcgacgcgccccaccccgtgcgcccttctcgggccctgggcaccgcgcgagtgg

SEQ ID NO: 7528 - DNA, 229 bp, Homo sapiens
  chr7:23513246-23513475
  binary
cgcccggcttgggaccagcctggagtctcaagccgaaacccctcacgcgggtgggcacacaatgcccggcgtgtcgcctgggcctcctcggaggtgctttaacaggctcttgcgcttttgaacggccctcctggactctgatctgtttaaactagaggcgttaataagtgataacctggatctgccctccttggaagctgcctgcctatattttattgtttaaaataaa

SEQ ID NO: 7529 - DNA, 53 bp, Homo sapiens
  chr7:23514425-23514478
  hyper
ctggagtcacatcttcgtttccctgcccatttccaacatcttagagttgatgc

SEQ ID NO: 7530 - DNA, 104 bp, Homo sapiens
  chr7:27204281-27204385
  hyper
cgcctcctctcccgtagccctgcgggccgctcttcactgctctccagacttggggccctatctgaggcgtcccaaacaccaacttctggctcctggccccaact

SEQ ID NO: 7531 - DNA, 59 bp, Homo sapiens
  chr7:27233098-27233157
  hyper
gcagaaatgaaatcaactgtggcaaggccttggctgctttcacggaggagtttttctgc

SEQ ID NO: 7532 - DNA, 38 bp, Homo sapiens
  chr7:27278957-27278995
  binary
cgacaagccagctcctggcccccggctcaggactcctc

SEQ ID NO: 7533 - DNA, 136 bp, Homo sapiens
  chr7:27279659-27279795
  binary
aacagtgttcttatccagtcctctctttttttgtcttctttcctttaaaaacccaaccgctcttaatgtgaggttgatgaaaggatgcttttggaagaagtgacatttggttaaaacgttttccccctaatgcgcc

SEQ ID NO: 7534 - DNA, 60 bp, Homo sapiens
  chr7:27285386-27285446
  hyper
ggtgtctgctttggctgttcctgccctgcgaacactgtccccggagcgggaccagactac

SEQ ID NO: 7535 - DNA, 34 bp, Homo sapiens
  chr7:27686735-27686769
  hypo
cgctttggaccattatgaaataaaataagggtta

SEQ ID NO: 7536 - DNA, 45 bp, Homo sapiens
  chr7:27686815-27686860
  hypo
ctagtaagtgactaatgggccagggagtgtctgcagcatggagac

SEQ ID NO: 7537 - DNA, 399 bp, Homo sapiens
  chr7:2770640-2771039
  hypo
gtccttttgcctagagctcgctggctggctggtctgacagcattcctgagccaggtattccagggcacggatccgagaaacccactcaaggaccacacagacaacacacacccaagagtctgaccgacagccgtgggggctgctcaacgacgacaaaccccggggcttcctcgctcactgcagcatgatgtccttcaggttctcctgcaggatggtgtctttcacagcatggaacacgaagcggacgttctcggtgtcgatggcggtggtgaagtggtggaagagtggcttgctgcggttccgtctcttcctgtcgaagcactggaccaggtagcgctggacgtcctccagcctgtgcgggtcgcccctgaagtccgggaagtgcttcttgatgctcac

SEQ ID NO: 7538 - DNA, 126 bp, Homo sapiens
  chr7:27831654-27831780
  hypo
cgtaaagcagaggaacaggttcaggcaactcggcaagaagttgtctttctggctaaagaactcagtgatgctgtcaacgtacgagacagaacgatggcagacctgcatactgcacgcttggaaaac

SEQ ID NO: 7539 - DNA, 551 bp, Homo sapiens
  chr7:287728-288279
  hypo
cgagccgtctgacaggtggagggggagggtgctccacgcagaggcgtggtcgggccttgggtcccgggtcggccctggcagacggcccacgtccctccacacctggtcacctcgcctcacaggacaatcaccacgtcctccgtcagcaagaaaagctctcgccctgcattctccatttaattaagcgagtgggagcctgtggtgtggttcagaaggagttccattaaaagtggctcctttaatttaattttgttttaaatttagccctggaatgagggcaggctttagctatgcaggcagttggtgctgtgtgcccatcagtgaggcatcgccagccccagtccctcaggggcctctcccacccccatcaccgtggggccaggcagagccaccggacctagggctgggtttattcggaggcagggacacagaggcccgctgagccgcacagagcacagaccctcccctgccccgttcttatttggaggcagggacacagaggcccgctgagccgcacagagcacagaccattccccgcccgtttcttgcca

SEQ ID NO: 7540 - DNA, 468 bp, Homo sapiens
  chr7:288328-288796
  hypo
catgaccaaggagatccgggacgtcacacgggacaagaagctctggaggaccttcttcatctctccaggtagcctggcacgggggcccgcattcatctctccaggtagcctggcacgggggcccgcattcatctctccaggtagcctggcacggggagcccacattcatctcgccaggtagcctggcacgggggcccacattcacctctccaggtagcctggcacggggggccgcattcatctcttcaggtagcctggcacggggagcccacattcatctcgccaggtagcctggcacgggggcccacattcacctctccaggtagcctggcacgggggcccgcattcatctctccaggtagcctggcatggggagcccacattcacctccccaggtagcctggcacggggagaccacattcatctcgccaggtagcctggcacaggggcccgcattcatctctccac

SEQ ID NO: 7541 - DNA, 428 bp, Homo sapiens
  chr7:293618-294046
  hypo
cgcttcccgggcgaggggctgggcacagagcagggaggcacttgcctgaggtcacacagctccaagccctcctaaccccgcccgggaggcccctttaatacccgatttggatctgcaaagagaaatggctgtgggcccgagaaatgcctttctcttttaacacgataccatctgaaaccggcttaggcgaggacgggaggctgttaacagcagacgaattttaagcctccagccaatgagcgctcagatgaagattttcctcctgaaatggagctcctgccccggtgggggctgcctcgtccgactgtgggctgccgactaatctgtatcagcacgagacaggattgcagctggtctttccttgatcgttcgttcttacaataatgacccagcgttggcagtggggtgagggggcgcgggaaggaggg

SEQ ID NO: 7542 - DNA, 829 bp, Homo sapiens
  chr7:294114-294943
  hypo
gggccaggtcggcctggcacccaccccgtttcctctccgaacctcagcttgttcagctaagaaagggcagccgggaccggccaccctcctgttcactccgctgggaagcgccctgccgaacctgccttctgatcccacggggagcctgccctgcagccaggagagacccctggaatcactcagcctggctgcataggaatgctgggactgggggagctgtgagtgaggttcggggctccggccccaacaaaaccacgttctcaccagttctacagccccaggctttccagagtttctccacaaacaaataaagcaagaaaaactagatttaatcagcaaataaatacaggaatagcgccgtcggccgggcctccagcatcagagcagtgaacccgcactgctagcgggcctggacagcgcttgcatttttctgattattctttctttattaaggtataattcatgtaccacaaaatttaccatttaaaagcgtacagttccgtggtttttagtatatccacaatggtgtgcaaccatcaccactgtctaaatccagaatgtcctgctgaccccaaaaaggagccccgtaccatgagcaggcggtcaccgttcctcaccccgcagccctcgacgagcagcgtcccacccccagtctatctggatttgcctgttctgggcgtttcatattaagagggtcatacgacgtgtggcctcctctgtctggcctccttcgcggagcacagggttctcgggttcagtgagggcttcattcctcttcttgtttcatttcgtttcgtgtcatcgcacggatggaccatgttcacctggc

SEQ ID NO: 7543 - DNA, 396 bp, Homo sapiens
  chr7:3018114-3018510
  hyper
cggcgggacagaggccttgtgacagaaaagggaacaagaactcagggttttacgttgtacccacaggtgcagagctgagaaaaggaaagagaaatgaagaacggcaactcggagggaggagacggtgggggtggcgcgggcaccgggtgcaggctgagaaagcgagagggcggtccggccagggggtgggggtgctgcaaccagctctggtcacgccccttctcctgagagctcccaggactgcaggcaacttgctgaagaacttgggtaatttcccggaggccggctcacctgtttccagcccatcagtgatcttgaaacttacaaatactcagactcacactttccgcctatccgtgcaaggtaagaggagccaaacacatctcgaaatgcacc

SEQ ID NO: 7544 - DNA, 34 bp, Homo sapiens
  chr7:30341584-30341618
  hypo
cgcttcactccctggtgttcgcaaggcagttttc

SEQ ID NO: 7545 - DNA, 277 bp, Homo sapiens
  chr7:31032061-31032338
  hypo
cgtgtccagcttggccgaggttgccactcctggtcctgcgggaatggtgtgcatgcctgcacgcacgcatgtgtgtgcgcacaggagcatgtgtgctgagggtgcaggcacgtgcctgggcttgtgcctgggcatgtgcccggctctgccctgacaaggcctgccggctccctagcagctggagcacccgctgtgctgacagggcctgcaatcacgggaaattaccaaacccagaactaaaattaaggctgctgctgctgctgctgctgccgccgcc

SEQ ID NO: 7546 - DNA, 101 bp, Homo sapiens
  chr7:409502-409603
  hypo
cgccgtggccagacgcccggcgatcgtccactgtgccgaggccccgggccccaggctggctgcagaggcgaacgacgcggccggccccgcgctgcagacgg

SEQ ID NO: 7547 - DNA, 46 bp, Homo sapiens
  chr7:409781-409827
  hypo
ggccccaggtcccgcgggttataaagcaagggctggacccagcccg

SEQ ID NO: 7548 - DNA, 95 bp, Homo sapiens
  chr7:409892-409987
  hypo
ataaatagactctttgtttcaaagaaaatgtttttaaaagcaaggcagccaagccgggcccaggtaacaagcagagggaggaggcctcagaggga

SEQ ID NO: 7549 - DNA, 52 bp, Homo sapiens
  chr7:431783-431835
  hypo
gatctgagaggggctttcccggagccaggcagggaggcggccgtgcacctgc

SEQ ID NO: 7550 - DNA, 58 bp, Homo sapiens
  chr7:47639927-47639985
  hypo
cggctgatcgtcgagagcacgcaggcagaagagcacattgacaggcaccggcatgccc

SEQ ID NO: 7551 - DNA, 102 bp, Homo sapiens
  chr7:50344738-50344840
  binary
ctgagcagccccgctgtcaccaggagaggagttctagctcccaaccatatttaaatttatgtagacctacatatacccacggaagtcagcctttataaagtc

SEQ ID NO: 7552 - DNA, 108 bp, Homo sapiens
  chr7:6443719-6443827
  hypo
gagggacagggagtgccacctccaggggagaactgggtgagcccaaatacggcaggagtggaggtgacattcatgtttggacctgtcgaacagtggcgaagctctgag

SEQ ID NO: 7553 - DNA, 101 bp, Homo sapiens
  chr7:6443856-6443957
  hypo
catcctggcccagagctaggggctgaagatggagatgttgggaccctagactggccctggaagagtagaggttggtgaaccacatgcccttaagatccttt

SEQ ID NO: 7554 - DNA, 61 bp, Homo sapiens
  chr7:6443990-6444051
  hypo
cccgacgctttgggaggctgacacaggaggagcgcttaagcccaggagttctagaccagcc

SEQ ID NO: 7555 - DNA, 274 bp, Homo sapiens
  chr7:653522-653796
  hypo
cggccccaggacagggaagcctgcggagccaagagggtgcagtgctgggaggtccccgcaggggcaagcagggctgccaccaagcgggtgggagacacccaaggactcgtccaccacccagggaaccggactgtgaggttcaggtcagcatggagggcgggaggcgtggcgcccacagaggggaggggagccaggcccagatgacagacgcctgcagactccacgccccgcacgcccgaccaggacaggccaacgcagggctgggcacttcttc

SEQ ID NO: 7556 - DNA, 90 bp, Homo sapiens
  chr7:66293278-66293368
  hypo
gtgttttctaacgccgcagcgaaacccatccgtgtgccacgtcaattccttagccgccatgccatgctgtcatctcagcctgagcttggc

SEQ ID NO: 7557 - DNA, 118 bp, Homo sapiens
  chr7:67353388-67353506
  hypo
cggtaggccaactgactgggaagtgaggagcacctcttcccggccgccaactgtctgggaaacgtggagaacttctgcacggctgccaattgtcagggaagtgaggagagcctctgcc

SEQ ID NO: 7558 - DNA, 31 bp, Homo sapiens
  chr7:7839208-7839239
  hypo
cgagtaaaggactttttatagtgcgttatac

SEQ ID NO: 7559 - DNA, 251 bp, Homo sapiens
  chr8:102450881-102451132
  hypo
cgaaacttcctcgaggcgctggggtggggaggctgtaggctgcaggcctgcttagcgcccttctcaacaactgctgtcatcagggagagcgagcagagtgcgtgcactccgggcggcgaagccccagcagaggcctgcctggctgtgctctgggtgccactcattcatgagggctgcgctgcgctgcgggcaccacgattcccacggaggggctgtaggtacttaaggggccctcagacgtcaggacaaac

SEQ ID NO: 7560 - DNA, 126 bp, Homo sapiens
  chr8:103572766-103572892
  hypo
cgatcaagtcaaagttcgagtgaaggatggaaaggtatgtgtgtcggctgagcgggagaacaggtacgactgccttggatcgaaaaagtacagctacatgaacatctgcaaagagttcagcttgcc

SEQ ID NO: 7561 - DNA, 221 bp, Homo sapiens
  chr8:118531602-118531823
  hypo
cgctcatcacaatagtgttctgtttgtccccatgacaaacatgctgcagggcttttgcctggtttgttcagtacgctatcttcactcctagcacccagcacataataggtgctcagccaatatttgtcgaatggtaattaccgaagacctgcgaattactatgtttaaaatctctaccagggttcctatgacatatttagtaactatttcctggaaagtcc

SEQ ID NO: 7562 - DNA, 541 bp, Homo sapiens
  chr8:121823361-121823902
  binary
cgccacccttcccccccccccaacacacacacacccggccccctggggtgtgtccgcatgtggccgagtgagtgtgagtgtgagcgtgcgggtgggaagccgagcaggtgtgtgcgcgcccggcgcggcccgcgcgctgttaaccccttaccttccagcagcacttccttgcccgcgcgcttcaacgcctgcaccgcctcgtcgtgggtggcgtcccgcaggtcggctccgttcacggacaggatggcgtcgcccacgtacagggcttgggtctggtccgccgccagccccttgaagatcttgctgatgaggatgggcatcttgttctccttgccccccttgatgctgatccccagcccgcccagctcctgcttcagcaccttcacgccacgcttctggttcgagatggactcgggcacctgctcgggcaggtcggtgaaagcggtgcggaccccggcgggcgagtccgggggctgcgcgccgcccgcgcccgggtgcccagccccggcgcccctgcagaacgagccattggtggcggtcc

SEQ ID NO: 7563 - DNA, 44 bp, Homo sapiens; identical to SEQ ID NO: 6624
  chr8:126044399-126044443
  hypo

SEQ ID NO: 7564 - DNA, 631 bp, Homo sapiens
  chr8:128871653-128872284
  hypo
cgccgtggctgactccaaacttgaactctggtctctgtttttggagcttgcttccttcctacgaccctagactgctcctcctaaataattaagtggcaaacatggcacagacagtaacctcacataagaagctatgaggttaggacagaaatatccactgctggcctgcgaactattcacacaggtctgactccccgccagagtcctggctgccctggtcctgtggaatcccgtcatggcttctgtctaaacggagcaggctcagggccatgctgaacttggagaaatctgtgcaggagtcagatttgggctttagagtcacctggggttgaatctcgggcctgctatttattgaacctgtcctagcctcaatcgccttatctgtaccatggggatgataccatctaggtcgaaggtagttgcaggagattctcatgcacggaggcccttggccgtcatttgtttctttgtctctacaagcagagaggctgagtcatacagatcctgaggggagatcactttctcttccctcctttcgtgtgtcatctccacctgggtgtggtgagccccaggaataatgctgtgacatcaagccccgtgaacacctcctttcacacggaccccgtgactg

SEQ ID NO: 7565 - DNA, 191 bp, Homo sapiens
  chr8:128872459-128872650
  hypo
aggaggccggctcctggcagaatcggcttccagctctgggcactggggtgcggtgtgggaccagcaacaggctgctcctctgccaggaaccgccagaaccaaagtcttctcgaaggcatcttcagaaggcaagcacagggctgagcactccggagaggagcctttgggggaaaactttttctcggagcttc

SEQ ID NO: 7566 - DNA, 171 bp, Homo sapiens
  chr8:134335659-134335830
  hypo
cgctgttctgccaggtggcccagcccgacgggtgtctccctagcttctccgacagctttgccaccttgcacccacttgcccgcgtgctcagtcacgtcctcctcgtcggccgcgttccccaggcagctgtgtcagcctcccaaaatacaggcaagcctctggcctggggcc

SEQ ID NO: 7567 - DNA, 368 bp, Homo sapiens
  chr8:140785341-140785709
  hypo
cgtggcaggaccacgcctctgaaggagcactggctgcctcgggagtcacgtggctgcacctacccagcaggtagggctgtgtggggttagtcacccagcaggacgcctggcgcgcccaggtctctgcctctgtccctcctcgtgccgatggctctaacaggtttcaacgaaaatccaaagtgaatgctagagagtatttagcaccagtgggatcactaaaatgaacacaaatgaagacaaagttcccaacggctgccagaggccccggctacattcctggagtttgtcctgaaagcctccctgggagcaggcagtgcagcagacggcactgggtgggggaatcagcagcctgaacaggcgactgcccc

SEQ ID NO: 7568 - DNA, 327 bp, Homo sapiens; identical to SEQ ID NO: 6625
  chr8:142227279-142227606
  hypo

SEQ ID NO: 7569 - DNA, 193 bp, Homo sapiens
  chr8:142367176-142367369
  hypo
cggccacgtggtagaccacgaggctcgtgtggtgtggcatgtcgggccacagcgccacggccacttggcgggcgtggaagggcgtgaagcagacgagaaagatgatgagcaccgtgagcaggagctgcatggcccgcacgcggcgctggcgaccctggtggagcagacccggccgcgacagtgcacacatgat

SEQ ID NO: 7570 - DNA, 288 bp, Homo sapiens
  chr8:142367824-142368112
  hypo
ctgccaggaagatggctccgtgcaccgccatcagcgccagccacaggcctgggaaggtgccatgcagctcctcgtccagccgggcaaacaggtggaacaggggcacctccagcccgctggcattggtccgcactgttgtcactgcggtggcattggggactgccccggccgagggccccgctggagacacagagggcatgacggcagccagcacaccccaggcctggaagcaaggagaccaggtcaccccaggcgccagcctggccttaagccctgccctgaggccca

SEQ ID NO: 7571 - DNA, 74 bp, Homo sapiens
  chr8:142439127-142439201
  hypo
cgcacctgaggctgcgctggtcaggacaggttgggccatgctgcggaaacagccaggcctgaaccccaacgact

SEQ ID NO: 7572 - DNA, 219 bp, Homo sapiens
  chr8:143089100-143089319
  hypo
cctcagtgaaggagctgggctcagacaggatgcccaagagaagaatgacctgaaatgacatctccgctgatgcccagctcagtgtgcagaggctattgtctccccgtccacccacccctgaggaagccagcctgtagctatcccctcaggcccttccctgacctgctgggctctgctgttagcccctgagcagccaccactcgcacctggacacaccgc

SEQ ID NO: 7573 - DNA, 56 bp, Homo sapiens
  chr8:143333267-143333323
  hypo
cgcccgcgttctctgtctgcagggcccgggcaccatgtacccgccgcccatgttct

SEQ ID NO: 7574 - DNA, 66 bp, Homo sapiens
  chr8:144343416-144343482
  hypo
cgctgagatgtgatcgtttctttcctgagaatgagctgaggtaaaaacatgctggggaggaagatg

SEQ ID NO: 7575 - DNA, 228 bp, Homo sapiens
  chr8:144343992-144344220
  hypo
gccacgcctgtctccggcagcccctgcccgcacccgcacccctgcacctgccacgcccgtctccggcagcacctgccacgcccgtctccggcagcacctgccacgcccgtctccggcagcacctgccacgcccgtctccggcagcccctgcccgcacccgcacccctgcacctgccacgcccgtctccggcagcccctgcctgcacccgcacccctcacggctgtctc

SEQ ID NO: 7576 - DNA, 231 bp, Homo sapiens; identical to SEQ ID NO: 6627
  chr8:144351704-144351935
  hypo

SEQ ID NO: 7577 - DNA, 284 bp, Homo sapiens
  chr8:144359694-144359978
  hypo
cgaagctctgggagagctcagctgggggtggctccaagtgctgagtgccagtgattctgccagtgccttctccctgccctgcctgtgccctccgggacagctggcagaccccggaccccagcctggctcctccgaggctgtccctctccaggtctcacctcccctcctactgtgactcatccagaaccccgggcctggcccccagatgtgcctgtggcgggcctctgaggtcactgtcctggtgaagacgaaggctaccgtccccgctttctggcagtgtctgc

SEQ ID NO: 7578 - DNA, 91 bp, Homo sapiens
  chr8:144360545-144360636
  hypo
actaggggattcatctggtgccgtcactgatcgtgtgacctcgagcaagccacgagtcacctcggagcctccgggttcttctctggaaaac

SEQ ID NO: 7579 - DNA, 207 bp, Homo sapiens; identical to SEQ ID NO: 6628
  chr8:144414283-144414490
  hypo

SEQ ID NO: 7580 - DNA, 121 bp, Homo sapiens
  chr8:144636569-144636690
  binary
gcgcacacgtacgtgtatgcacacgcgcacaaacatgcacaaaacacggacgtgcatgcacacgcgcacatgtacacaacacgcacgtgcatacacatacgcacaatacgcacgtgtgtgc

SEQ ID NO: 7581 - DNA, 77 bp, Homo sapiens
  chr8:145698674-145698751
  hyper
cctgcacccctacgccgtcccctggcagtcctccatgccccagtcccgacaacggctcgggctcggctctcgcgccc

SEQ ID NO: 7582 - DNA, 52 bp, Homo sapiens
  chr8:146079313-146079365
  hypo
tgacaggttgggtgcggtggctcacgcctgtaatcccagcactttgggaggc

SEQ ID NO: 7583 - DNA, 81 bp, Homo sapiens
  chr8:146176654-146176735
  hypo
cgtgagattgtgcatggatcgtttctaatacggaaatgaattgtacacttggacataaagaatacaaataaggctgggtgc

SEQ ID NO: 7584 - DNA, 197 bp, Homo sapiens; identical to SEQ ID NO: 6630
  chr8:23423722-23423919
  hypo

SEQ ID NO: 7585 - DNA, 576 bp, Homo sapiens
  chr8:26436208-26436784
  binary
cgatggggagatggggacttggatcctccccgggtcttccgcccccacccaaaaagggctttctggagccttctccgggtccttggaaaaaggagcgggtttgagccctaaggcgtaatgacagcagagggatgctgaaaagggcagggtgtaccggaatggtgtggaaacgggaaggaaaaacagggacgaggtgatgagcagaggaggaaggcggggggcaaggcgggggcttcttgttggccaggaaccggttttgggtgccccccccccggttttctcgccctgtagttcggggctggggccctggcggggattcgggctctttttcacgtctcttttccgccccttctgccgctcaggaggcgtccgtgttggtgcatacaaagcggactgcagggtgggcgcggggaccgcggcgagcggccgggcgctaatggcgctgcgcgacgcgggagcagatggcccggccccggccagacaatgatcgcggcggccggagggctcggcgcagtgctggggcctggacttgttggtttgcaaaccacggggaaaacgtctgtgccgtgaattagc

SEQ ID NO: 7586 - DNA, 320 bp, Homo sapiens
  chr8:27779460-27779780
  hypo
cgccgtgtcgctctgctggcccgtgcggtcccgcagcagggccaccgcctgctcggtctgcaccgcctgcgcctgcagcccccacagcgcgccctccagccgctgcactgcgcccgccagcgccagcaacgagtctgactggttctgcagcgcgtcctgcaccttccacacctgctccgtcaggtccgcttgcagcggagcctgcagcagccgcagctgcaagtcccggaagctctcattcagccggttcacattgcgagtcagggccttcaggtcgtcaggggagctgcgcggcctggacactgcggaggaggaagagg

SEQ ID NO: 7587 - DNA, 39 bp, Homo sapiens
  chr8:41668308-41668347
  hypo
aacaggagaaacttcccacacctgtctccccgggaattc

SEQ ID NO: 7588 - DNA, 172 bp, Homo sapiens
  chr8:42750012-42750184
  hypo
taaaggtttctctgcccttggtgtagggaagaatgtttgaaaaaaagaccattgagaatacttcaggtaagtttttttttttttacacttacaaaatgctaaatgatcaggggtcaactatcaagtggtactctgtaaggcaaccttaaaaactcactgctgacccaggctc

SEQ ID NO: 7589 - DNA, 188 bp, Homo sapiens; identical to SEQ ID NO: 6631
  chr8:49571728-49571916
  hypo

SEQ ID NO: 7590 - DNA, 239 bp, Homo sapiens; identical to SEQ ID NO: 5853
  chr8:60030908-60031147
  binary

SEQ ID NO: 7591 - DNA, 115 bp, Homo sapiens
  chr8:60031791-60031906
  binary
ctccaccgccgcctcttggtcccgccgccgccgctgccgccgccgccgggcaggtaacttcatgcgctcattgtcccccccgcccgcccccccatccccgcctcccgcgcccctc

SEQ ID NO: 7592 - DNA, 229 bp, Homo sapiens
  chr8:60031912-60032141
  hyper
cggcacacgcgctcgggctctaggtactgggcgttttattggagattctgagttgttctgcttgtagtttattttctccaccttggaggcccgggatgtggggggtgggggggtggggcggggatccagaagggacagggcgggaggggggcgagcgtcccgggccgggcggggtagggagcgcggccggacgcgggctcgtcaaggcccaatggctgctgttcggaac

SEQ ID NO: 7593 - DNA, 203 bp, Homo sapiens; identical to SEQ ID NO: 6303
  chr8:60032288-60032491
  hyper

SEQ ID NO: 7594 - DNA, 313 bp, Homo sapiens
  chr8:6414561-6414874
  hypo
cggggtcatatggtgttcactcacttacgctaatgaactgagaaataacgcacttctgcccaaattcatgttcattcacactcctctcagcagttttctgcagtcttcccagccccacggaaaattctgcttttgtcagaggaggggatatgcgtgctttcccgtgtttgctttaccgctgggcaatccatacaaggctactaaactgcagagggtactggtgttagcatgccccgtgtttataagggacttaaaaaaatatacaggcttgcatccaccatacctaccatacttgtgtactagagatattctc

SEQ ID NO: 7595 - DNA, 69 bp, Homo sapiens
  chr8:66877733-66877802
  hypo
cgagccatcaacgtcacccccatggccgctagagatcatatcaaaggaaagcgcagagtgatccactgc

SEQ ID NO: 7596 - DNA, 281 bp, Homo sapiens; identical to SEQ ID NO: 6304
  chr8:67025640-67025921
  hyper

SEQ ID NO: 7597 - DNA, 235 bp, Homo sapiens; identical to SEQ ID NO: 6305
  chr8:67026578-67026813
  hyper

SEQ ID NO: 7598 - DNA, 349 bp, Homo sapiens
  chr8:68115303-68115652
  hypo
cgtgtgcagcttacctgctttccacagggcagtcctctgttcgttgttggaattaaacgcttttgcaaatctatgtgactctaataagcagtccagtagcttaaaaagttgttgtgatgttaaaaagcggtacattccttggtcttgagtatcaacgcgaacatcaaagtccaccgcatctctctttggaaaacaaaccaccccagcatatacacacagtcacaataattttacttgatttacaactcaatgctccccaaagaccagttttacaagaaagccacagatactcagcttgatctaacctaacagaaagtaagggaaggtccaccttccagtacgcatcctc

SEQ ID NO: 7599 - DNA, 959 bp, Homo sapiens; identical to SEQ ID NO: 6308
  chr8:70745324-70746283
  binary

SEQ ID NO: 7600 - DNA, 226 bp, Homo sapiens
  chr8:71447632-71447858
  hypo
cgcgacacaggctgagtatttctgttcctttttgcccccgctctttcctgattaattatttctaaataatgcgttttaaccgatcaagcgttgccttttccaatactacctatgacctgcccctcccctattctaagcctataaaaagctcgtgacccagccacgaggggaggaaaaaaccatccgactaagggggtgggcgaccaccccccagagtcccttctcc

SEQ ID NO: 7601 - DNA, 146 bp, Homo sapiens; identical to SEQ ID NO: 6635
  chr8:71447942-71448088
  hypo

SEQ ID NO: 7602 - DNA, 50 bp, Homo sapiens; identical to SEQ ID NO: 6636
  chr8:71448124-71448174
  hypo

SEQ ID NO: 7603 - DNA, 55 bp, Homo sapiens; identical to SEQ ID NO: 5856
  chr8:72756949-72757004
  binary

SEQ ID NO: 7604 - DNA, 107 bp, Homo sapiens
  chr8:94684099-94684206
  hypo
cgatatatcaccaatatcacagtgtgtaaacactgtgcttaattacaaatatcagagcgatatatcaacagtgtgaaaacactgtgcataattaaaaatatcagagc

SEQ ID NO: 7605 - DNA, 137 bp, Homo sapiens
  chr8:94685461-94685598
  hypo
cgtcaatatcacagtgtgtaaacactgtgcataattacaaatttcagagcgagggagcgatgtatcaccaatatcaccgtgtgtaaacactacatgtaattacaaatatcagagcgatatgtcatcaatatcacaac

SEQ ID NO: 7606 - DNA, 94 bp, Homo sapiens
  chr9:100503340-100503434
  hyper
cgtttccggttctgatgcgctggatcttgaagctcttctccaccactagcgccctgcttgtaaccttagcacacgcaactctgaacaggaatag

SEQ ID NO: 7607 - DNA, 78 bp, Homo sapiens
  chr9:125126554-125126632
  hypo
cgtaagcaaaaatgtttctttatactgtatatggctgaatgacggtaagttattaatgaagtgttaaagcaggaacgc

SEQ ID NO: 7608 - DNA, 34 bp, Homo sapiens
  chr9:128118022-128118056
  hypo
cgcgagtgaagaacagcttcaagatgcacagctg

SEQ ID NO: 7609 - DNA, 36 bp, Homo sapiens
  chr9:128118095-128118131
  hypo
gccttctaccctaatcaagatggggacatacttcgc

SEQ ID NO: 7610 - DNA, 39 bp, Homo sapiens
  chr9:131461561-131461600
  hypo
cggcctctcaaagtgttgggattacaggcgagccgccgc

SEQ ID NO: 7611 - DNA, 495 bp, Homo sapiens
  chr9:133761121-133761616
  hypo
cgggctcgcccatacccgtgacagtggctgacaagggactagtgagtcagcaccttggcccaggagctctgcgccaggcagagctgagggccctgtggagtccagctctactacctacgtttgcaccgcctgccctcccgcaccttcctcctccccgctccgtctctgtcctcgaattttatctgtggagttcctgctccgtggactgcagtcggcatgccaggacccgccagccccgctcccacctagtgccccagactgagctctccaggccaggtgggaacggctgatgtggactgtctttttcatttttttctctctggagcccctcctcccccggctgggcctccttcttccacttctccaagaatggaagcctgaactgaggccttgtgtgtcaggccctctgcctgcactccctggccttgcccgtcgtgtgctgaagacatgtttcaagaaccgcatttcgggaagggcatgcacgggcatgcacac

SEQ ID NO: 7612 - DNA, 208 bp, Homo sapiens
  chr9:135645005-135645213
  hyper
cggtcatgagcttgcctctaacccagcaaagcgtgtggaagaaacatcggcagtgagggctcccatctctcatttctcaaagagccgagactttcagcgaggccacttgccattcctggtaggtaatcagatcgctgttaattaataaagctgtcaggtggctcgtcctctctggtcattagtatcctttcagaaagagaatcctgcc

SEQ ID NO: 7613 - DNA, 452 bp, Homo sapiens
  chr9:135645250-135645702
  hyper
aacttaatgctatgcaaatgagaggctcttctcatcattagcttatagccacgaatgttaatcgcataattgggtcttcaacagggtaattagacacgatttcctccattagtcttacaaggctaattattgttgagcggagagggggactgctcccagggctccaggcgaagaggggcatctggttaaagcgaattcgggcgcatcgtccgccaggtaaaaacagcagtcgcgatccattgtcacagcccactgtccccacccatcgtggggaccgggctagggagggaaacggaaccaggggaaggcctgggggggtcacactcgtgccccttgcctgggtcctgggatgcagacaacgtggcatttaaaagtgaaagcggaaacaaacagcagccccgccagcccgggcccggaggcccagccccgcgccaagggccacccctcggcgc

SEQ ID NO: 7614 - DNA, 275 bp, Homo sapiens
  chr9:138660497-138660772
  hypo
cgaggtggaccgcacggctgcagtgagtgaggctgaggccctgcccaggcgggaggggcaccgtggggccggggagcgggggtccctgagggaagagacctgccccaggctgccggtgccgcccagcagcccacagaggccagcccgtctgcactgaccaaccacccaccccgccaggaccaccagaccatcctgcgcgcctgggccgtgaaggacttcgcccccaactgccccctctacgtccagatcctcaaacctgaaaacaagtttcacgt

SEQ ID NO: 7615 - DNA, 252 bp, Homo sapiens
  chr9:139611146-139611398
  hypo
cggcccgcctgcgtctcttaaaggcttccaggatgtggctgcgttgggctcctagggccccgttctccaaacctggttctccttgtgggtctggtccggccggaacttcccaccaatctgcattacggtggacggtgggaaaaataggggcagtgtctctcgcggtgggcgcgctcacctggccttgtgcggaggtgacgatgttatgaaatgagatcaggataggaagggtttgtaaaaatatcttcattc

SEQ ID NO: 7616 - DNA, 206 bp, Homo sapiens; identical to SEQ ID NO: 6644
  chr9:139698453-139698659
  hypo

SEQ ID NO: 7617 - DNA, 93 bp, Homo sapiens
  chr9:34664955-34665048
  hyper
cgtgtggggaggggcgctcggctcgaatggcgacagcggcggcagagtcaggaggtcagtacggtgggcttcggtttaaatctttaatgcact

SEQ ID NO: 7618 - DNA, 82 bp, Homo sapiens
  chr9:34665215-34665297
  hyper
gcggggcgggagctaccggattccccccgatgggtcctcagagactgagtcccgtccatgcccggggcgggtccgcggtatc

SEQ ID NO: 7619 - DNA, 167 bp, Homo sapiens
  chr9:4864421-4864588
  hypo
cgctttatcagtgtttggcatctaacaaaggccgagccacgtcactcctttactccagcaaatgaaagctgtccggttgtcagggtttgcccgggtgtggggctgccctccttcctggtcgcatttggcccgtacctgtcaggtaccctgagcacgggcctgggatc

SEQ ID NO: 7620 - DNA, 381 bp, Homo sapiens
  chr9:71788570-71788951
  binary
cgtgtatgtgttggttagccgggcaggcctctagacaggacctaaaactttgaggttttcccagttcgactcttcgtaggagaactgaagctgcctgtgtgaggccctgcgaacctcgccaaaaagtcttcctacaggatgcccccgcgacctcaccggggaaacaccgcggacagtcgggccagcagcgcccggagctcactccaggtctccaaacttgcagcacttcccagagcgcgcgcgctcggagcgggacctgcttgctccagtgcacgccgcggagcgaaccatcgggctggcgggggtggaggggtgcaggcgtgggggctgcgggccgctcgggccttgggcttctcctgccgccgccgccgcctcccgccc

SEQ ID NO: 7621 - DNA, 45 bp, Homo sapiens; identical to SEQ ID NO: 6327
  chr9:71789757-71789802
  hyper

SEQ ID NO: 7622 - DNA, 36 bp, Homo sapiens
  chr9:80833898-80833934
  hypo
cgtctgtggggatccgcaaagatatgggatccagtt

SEQ ID NO: 7623 - DNA, 182 bp, Homo sapiens
  chr9:80834011-80834193
  hypo
catttcctgcagtgtgccagcaggatggcccacaagccatctactactcggacaagtacttcgacgagcactacaagtaccggcatgttatgttacccagagaactttccaaacaagcacctgaaactcatctgatgtctgaagaggagtggaggagacttatgtccaatggcgtctaggcc

SEQ ID NO: 7624 - DNA, 130 bp, Homo sapiens
  chr9:85843821-85843951
  hypo
cgctgggagctgtagaccggagctgttcctattcggccatcttcatttcctcgctatttctaacgcatctgcagtgcttgtccccgctgaagtcttgaactcaaagtcattcaggatgattggaatccac

SEQ ID NO: 7625 - DNA, 74 bp, Homo sapiens
  chrX:44922889-44922963
  hypo
cgctgggaagtacagacactattttgataggcaataatcatataacaggaagtggaagtaatggaaacgtgcct

SEQ ID NO: 7626 - DNA, 85 bp, Homo sapiens
  chrY:14532154-14532239
  hypo
cgcagacctgcgcccaggcgcagtgggtggaaataaatcctcgtcacgaacccgcagaacagaggcgccgtctttgggaagccgc

SEQ ID NO: 7627 - DNA, 74 bp, Homo sapiens
  chrY:16635744-16635818
  hyper
cgcgctggaaaccccgcgtgaagatgaaatgactgtagctccgtgctgctcctccaaactcgggagcggtatcc

SEQ ID NO: 7628 - DNA, 1082 bp, Homo sapiens
  chrY:16636060-16637142
  binary
ggtatcaggtgatccggagccctagtcggtgcccactaagaacaccccttctcccatcgggggttcggaggagtgttaagcctgcgggtctgccagtccctaaggtagggatgggggaggggtctgaggaatccgttccaataggcacaccatccccacagccctagaaaaggcaaccaccacccgctccttcctcccgcaccatcccatctcaaggctctctgctgacccgggccgatttcatctggtctcttctcccccgcttcccacctcccaattcccgcgcagctcggctccgttccctcccactcccctaggcggaactgaaagcgaagatcagccaagagcacagtcggaggcggcagagacggtggcgggtgagctaggggctgtgagacgaagcagggagagagtgaacttcagccccgtcccctccccactgccacggctggggcaacccaacccgcgcctgaagcggcttggcttgacctgcggaagcgcgggccgggatggcgtggggagagggaggtaggtgccactgggctgcagatgacgagtgggttgggggcttgctgtgggacaagaggttcaggttccggcctgcgccttccactccgcggtggcgctctctgcctgcggttttccaggaggccgatctaccccagggacactctcatccttcaggcggtctcctggacgccctttcctccccttgcctcccagcctgacctggctctttcgcccctcggagaaccggtaggttggggtccctcggcgggggtctagtgagccgagtcgcgagctttgcgcccccggtatctaggccccgtgccgcgcgcaaatccgggcccaggcgtacagttctggagcctagtcgccgccagacacagggccctttgtacccggaggagcgggagcgggagcgggggcgtcagggcaacccttgcaccccagaggcctgcctaggaccaccctgggaacaaatgtctcgctcggaaaacgaggtgaacccggaggatgtcctacgcatcatacccctccccttcttgagaaggctttttctttttttctttttttttccc

SEQ ID NO: 7629 - DNA, 90 bp, Homo sapiens
  chrY:2655227-2655317
  hyper
cggcagcatcttcgccttccgacgaggtcgatacttataattcgggtatttctctctgtgcatggcctgtaatttctgtgcctcctggaa

SEQ ID NO: 7630 - DNA, 596 bp, Homo sapiens
  chrY:2655346-2655942
  hyper
ttttccactggtatcccagctgcttgctgatctctgagtttcgcattctgggattctctagagccatcttgcgcctctgatcgcgagaccacacgatgaatgcgttcatgggtcgcttcactctatcctggacgttgcctttactgttttctcccgtttcacactgatacttagagttacagctttcagtgcaaaggaaggaagagcttctccggagagcgggaatattctcttgcacagctggactgtaatcatcgctgttgaatacgcttaacatagcagaagcatatgattgcattgtcaaaaacaaggagagtgcgacaaaattgaaaggtgccagagttcgaaacttattttactatccaaaactcacttctaccagattctttgttacgttaacttttgtaatgaaacttgcatttctccgccctcaacaccccctcaaccccgcccaaccagcctaccccctagtaccctgacaatgtattcattctcaagcaaaacatggtaattcagtaacgttgactacttgccctgctgatctgcctccctgactgctctactgctgtcctgaaaaatgcgaatttgacttaatc

SEQ ID NO: 7631 - DNA, 122 bp, Homo sapiens
  AEKP01184864.1_3582-5885:491-613
  hypo
cgtacgtatacatatacacgtaactatatgctgtgcaggtttttctagctaaggagtcatgggctgtcccagagagccgaagtgtggaggaggccattccatctaggtttgtgtaggtgcac

SEQ ID NO: 7632 - DNA, 289 bp, Homo sapiens; identical to SEQ ID NO: 5717
  chr1:101702081-101702370
  binary

SEQ ID NO: 7633 - DNA, 393 bp, Homo sapiens; identical to SEQ ID NO: 5718
  chr1:101702796-101703189
  binary

SEQ ID NO: 7634 - DNA, 185 bp, Homo sapiens
  chr1:101774910-101775095
  hyper
cgcagcaaacgggaaaataccaatttagctctgtttgctgcagcttcgcagctttaccaggagagggcgccgacggacctgacttttgccttgcctcgcagtagagcccaactagagggtaaacagcagccacagtaagttctagctgttgcagaaataaattacaaatacatgtaggaaaaagg

SEQ ID NO: 7635 - DNA, 244 bp, Homo sapiens; identical to SEQ ID NO: 5866
  chr1:103574168-103574412
  hyper

SEQ ID NO: 7636 - DNA, 515 bp, Homo sapiens
  chr1:1047017-1047532
  hypo
cggctggggcagtgggtagaccacacccacgctcaccgtaactccagccgcccaggcagcagtaactgaaaaggggaggcgggagggtccactggcgggtttctcacgctgctgaacctcggtaaacacagccccgagggctggctggagcttccactgcatccgtgtagctaatgctggtcatcttcgtagcaagcaaaggaagccaacgtgaaacgtagctttaagggcccaataagaactgtctggggcctctctacctaaagatccctctcgtgctttgatagaaaacaaataccgcaaaccccttgatggggtgtaaaggagacatccccctttgttgacatgcatggtagtcgctgcccacctacccgtgggctcagcacaccggagtcgggcggttgccgtaggtggctcagcagacgtgagcagggcaggatcgggcccatccccccaccgggaatgtcaggccaccatcaggtgatggtcaggtggctgttaactgtctaaaagaa

SEQ ID NO: 7637 - DNA, 584 bp, Homo sapiens
  chr1:1047619-1048203
  hypo
ctcaggaactgggcgagttggctcaagcgtgtgcactgagaggcaaaatggcggcgtgtaaccgttctatgaccttctagggacgtttgacaggtaacggaagaacgcctcaggtgagcatgggcactactccagtgaacacacggcgcacggtccctccctccagtgaacacaacgcacacgctccctccctccagtgaacacacagcgcatgctccctccttccagtgaacacacggcacatgctacctccctccagtgaacacacggcacatgctccctccctccagtgaacacaacgcgcacgctccctccctccagtgaacacacagcgcatgctccctccccccagtgaatacacggggcatgctccctccctccagtgaacacaccgggcatgctccctccctccagggaacacatggcgcatgctcccgcccaagtactagcaagatgctgcatgggtggacagcccaccctgaagaaggatcaggggagaaggggtgcaagaccccagaagcctgccaggctataaaaccccaagtcaaaaggtgaaaccgcacacctgatctctcacatcgccc

SEQ ID NO: 7638 - DNA, 259 bp, Homo sapiens
  chr1:11020521-11020780
  hypo
cgtgccctttaagtcgccaggaggaggctatatttagggcccgtggacattccgcaggagctcgggcagccttcactgggagcaatcgctaatcactgcattgagtttacgggtgcccctgggcacacttaacccagggcaatgaatagttattgcgcggcctcccgctcggggcctgtgggcacacttaagcgagctcgcagatcgctgcgagcagggcacggctcgggtacacccttgggcaccctgcgccatcagc

SEQ ID NO: 7639 - DNA, 66 bp, Homo sapiens
  chr1:110672768-110672834
  hyper
cggctcccacgcctcttgctggggagggtggctcatttttcacgggtgccgcgtgactttccagac

SEQ ID NO: 7640 - DNA, 162 bp, Homo sapiens
  chr1:11131899-11132061
  hypo
cattagactgccttctccaaccaccaacgagacagctacagcacctccagcactccccaccaatctctctgcacagcacctgctgccatctgccaggatagatactgattgcccaccatccctcagcagaagggaagccccacaggggcttcattcatcgcc

SEQ ID NO: 7641 - DNA, 248 bp, Homo sapiens
  chr1:11141000-11141248
  hypo
cgggaatcaaaattgtgccctgggctctggaaaatgtttggctcttttcatgaatgtaaggagcaaacctaagaactagaacctggccagacacagagcccaagtgtcgcggtctgtgtgactgcggctgaggtgtaccttgaggcagatgtccctgctccgttgccacaccacctgcagctgcaccggctgcccgttgccgcgctcccacatctccagcctcattttgtcatagatatatagcaggt

SEQ ID NO: 7642 - DNA, 818 bp, Homo sapiens; identical to SEQ ID NO: 6654
  chr1:113498720-113499538
  binary

SEQ ID NO: 7643 - DNA, 191 bp, Homo sapiens
  chr1:1181916-1182107
  binary
cgcgggaggacgcgctggcggtggcgttggggggatctgcgcgctggccaggctgctgcgtcctctgtgcctcccgccgggccccgacgcccccgaggagcacgagctgcggcccgaggaggaccacgaccgcggcccaggcccagcgccgcatggctccgtcccgaggcggctcagcgcggcgagtctcg

SEQ ID NO: 7644 - DNA, 54 bp, Homo sapiens
  chr1:1182227-1182281
  binary
cgacggcgctcaggtccccccggggtcccgctccagcccccgctcccagccccc

SEQ ID NO: 7645 - DNA, 64 bp, Homo sapiens; identical to SEQ ID NO: 5719
  chr1:12123950-12124014
  binary

SEQ ID NO: 7646 - DNA, 517 bp, Homo sapiens
  chr1:12226892-12227409
  binary
cgctggaggtatcggcccagcgatgctggagtggtcgggtcggaggcccagcagcgtctggggaggggcgtgggggaggcgtgtccaaggccggctggccccgccccgccccgccgcctggcctctggcccgctggggcgcgggctttcgctttcagtcgagggctagcgagcgcagcggagcctggagagaaggcgctgggctgcgagggcgcgagggcgcgagggcagggggcaaccggaccccgcccgcacccatggcgcccgtcgccgtctgggccgcgctggccgtcggactggagctctgggctgcggcgcacgccttgcccgcccaggtgggtgactcgcgcggcccacgggggacagccgccccgcatgtccacccggctggtgcgcagccttcgggtgcccgggccgcgctctcccggggcgctgtcacgggctgggaggctgggagtcccagtcgccgccccccatccgcatcagacacgcgcgcctctggggacccgctggggact

SEQ ID NO: 7647 - DNA, 207 bp, Homo sapiens
  chr1:12227438-12227645
  binary
caactctggcccccgaagcccctcttacccgcgtcgtgacaggggcgcaccctggttcctccgcgagcgcaggccggggcatttggggctgagcagcgggtcctgggcagacccccgctagacccgggacccctcttccctcaccccggcgactgccgcgacagcccttccctcccacgcggtggagaaggggctgtgccggggcgc

SEQ ID NO: 7648 - DNA, 241 bp, Homo sapiens; identical to SEQ ID NO: 6348
  chr1:12304451-12304692
  hypo

SEQ ID NO: 7649 - DNA, 110 bp, Homo sapiens
  chr1:1502406-1502516
  hypo
cgccctacggacatacacgtgcctctgcaacatggctgcctgcaggatgcccactgccggccttccacagccacaaaagaacagacaagtagaataatccatccatgggg

SEQ ID NO: 7650 - DNA, 130 bp, Homo sapiens
  chr1:1502555-1502685
  hypo
gagtagaggaagcaaaagagcccaagggcaccctgctgcgccaccacacacgtcacccacacacacagagaagatgtgctcatctagtgtacgtgaaacacctgagtcccctgaggctgatgacagctgc

SEQ ID NO: 7651 - DNA, 84 bp, Homo sapiens
  chr1:150586185-150586269
  hyper
cgacacttcagacatggaccttaacgtcaaaccaggattcatgatcactaaatgactttccttttgtacgtgtgagcaggtggc

SEQ ID NO: 7652 - DNA, 68 bp, Homo sapiens
  chr1:151373761-151373829
  hypo
cgaggcccgcgacttagtagaacgctgcatgcgagtgctgtactaccgagatgcccgttcttacaacc

SEQ ID NO: 7653 - DNA, 77 bp, Homo sapiens
  chr1:151597643-151597720
  hypo
cgcgcttttgcccagtgttaaatttttggacgtaggtgctttaaaaatactggtgtaggccaggcgctgtggctgac

SEQ ID NO: 7654 - DNA, 79 bp, Homo sapiens
  chr1:151694406-151694485
  hyper
ttatctgtaagaagatgggtggcttaaactttcaagcatcctggggaaagacttgggttaaatgcgcacgccgtttccc

SEQ ID NO: 7655 - DNA, 207 bp, Homo sapiens
  chr1:155012870-155013077
  hypo
cgatgggcactatttgcagagggaagctgagcgggtttgagaaagtgctggttatacagggaggtgaccaaccagggcctctttctccagggccagtagccaatctgcgacacaatctcaacaacgtgatcgcatcgctgggctgcaccgtggagctgcagatcaacaacacccgcgcagcttggcgcatctccacagcccccttac

SEQ ID NO: 7656 - DNA, 155 bp, Homo sapiens
  chr1:155043706-155043861
  hyper
acttaggcccgcccagccacaggcgctcaggcccagccggccttccctatacaactttcctcatagcatgcgcgggcggctgattcagtcccggggcgcgtccccatggaaagccagggctgagtccactcatggggccgagacgggctgcaggc

SEQ ID NO: 7657 - DNA, 97 bp, Homo sapiens
  chr1:156215233-156215330
  hyper
cgatgcctccagtgctgttcgagagcagtgaggtgtgtcctctcctgtgcctccgccttccccgtccccactggaggggcctgggaacccaccggga

SEQ ID NO: 7658 - DNA, 43 bp, Homo sapiens
  chr1:156390054-156390097
  hyper
cgcggctctagcccctcgctcaagcctctccctcccgcccgtg

SEQ ID NO: 7659 - DNA, 92 bp, Homo sapiens
  chr1:156432033-156432125
  hypo
cggcattttgcagatgaggaaacccaaggcatgaagcctgactcctgtgtgctcccacaactaaggctagcacccacagccttaaccatgct

SEQ ID NO: 7660 - DNA, 104 bp, Homo sapiens
  chr1:158083079-158083183
  hyper
cgggcaaaggcaccgagctcttggtgtggttctcctgggataagcccacagtcacaaacttgtgcaggaatgggggtaccgggaagcagcccggtgttccaagc

SEQ ID NO: 7661 - DNA, 157 bp, Homo sapiens
  chr1:160040177-160040334
  hyper
cgtgcggggcaaggaagcggagacccagacagctgcaggcgcagagagaaatatccaaagacagagacccagacagacccggggagaaagagagatgaagagacgatatgcgaaacgataggagctgagctggcagggtgacaggggaagggagaag

SEQ ID NO: 7662 - DNA, 52 bp, Homo sapiens
  chr1:160040504-160040556
  hyper
ctccctgagccacaggactgtatctttgggcacaattcccgtgttgttcacc

SEQ ID NO: 7663 - DNA, 75 bp, Homo sapiens
  chr1:160040592-160040667
  hyper
cgcgcagcacacggtgcccacctgcagcggctttctctgtaaggaaagataaggccggaaccctcagcgaagtgc

SEQ ID NO: 7664 - DNA, 86 bp, Homo sapiens
  chr1:160878353-160878439
  hypo
cgagaacaggtaggagacaactgaacccctcctgatgatgaaagacctgtcgttggagaatcgaccagcaatgatagcgatgactc

SEQ ID NO: 7665 - DNA, 93 bp, Homo sapiens
  chr1:161276123-161276216
  hyper
cctcctctgcagggccgcctgcctgcgtagccagcagtaccgaaccacgtagaaaagcagcagcagcaacagcaccaccccgaggacaccccc

SEQ ID NO: 7666 - DNA, 346 bp, Homo sapiens
  chr1:171220542-171220888
  hyper
cgcagctggtgccccctcgagaggggcgctgccgcagttggtaccccgtgtgagaggcgctgccgcagtaatgacttactgataactcactgacttgaccgcgcgggttcttttcttaccttcgttttcgggcggttcgtcgcgtttccttcacagcattcctcacacagttcctcacacagcgcctcacatggggcaccagctgggggcagggctcctctcgaggggtcaccagctgtggggagtctgtcccttgcagacccctgacccaatgaccggtgaataaagtacgctgacacacagatattctgagggtcccaggtgcttacaggctccctgccgagtc

SEQ ID NO: 7667 - DNA, 492 bp, Homo sapiens
  chr1:17736188-17736680
  hypo
cgcgagcgatgtgctcgcccgagagtggatctgctgcggccagttggtgccatctgtcatcaagggtgaggacagccacccagcctggccagcaaccctgtgcactctctcctgcagaatgattgttacctctcaaacaaatcttagcgtgagacaccaggaaagccagctgagatggtaaacaagacaacccaaacagactgcgatgatcaaaatcatgaggagtgacataccactgggtacggacacgtccccgagctggcacagctgcccccactcacctgctctgagaaaatgccatccagagtctttacctcctgggctgcagtggaagacttgggcttgtggtccccgtagccctggcgaagcaaacaagatgttcgcaatcgaggatccatgtggctcagtccacaagtggggaatcacggcaacatttcctggcccccactaaccagaagccagtgatgatgccctctggcccatgacaagccc

SEQ ID NO: 7668 - DNA, 62 bp, Homo sapiens
  chr1:179333937-179333999
  hypo
cgtgagccaccggccgctgatggtattctttcctgagggcagattttcacgccagaagcccc

SEQ ID NO: 7669 - DNA, 43 bp, Homo sapiens
  chr1:179835828-179835871
  hypo
cgtgcccgggtgcccaccacctagttttattggtttatacacc

SEQ ID NO: 7670 - DNA, 129 bp, Homo sapiens
  chr1:180919554-180919683
  hypo
cgaggtgaacggggccaaggtggcagggctgggcttggctcacattaaggagctcctggcccactcagagagcttgtcaatccgtgtcctgaggcagagacctgtcccacggtgacccagaagtgccgc

SEQ ID NO: 7671 - DNA, 47 bp, Homo sapiens
  chr1:180919718-180919765
  hypo
actcagggtggttggcaggaacgtgctgcacagagctgctctgtggc

SEQ ID NO: 7672 - DNA, 210 bp, Homo sapiens
  chr1:19043143-19043353
  hyper
aatacctccagcctgggtcctctctccacccactccattctctcaaaccctcatttccctctttgcctgcctcctcccatagctggcctcgcctctacccattctcttccccctaatctctctcattctcctctcctctctcattccgcacccaacaaacacctcttccccctccatcttcagcccctgcgcgccccccttgcccttgcc

SEQ ID NO: 7673 - DNA, 146 bp, Homo sapiens
  chr1:197191306-197191452
  hypo
cggcccgctccttgttgccctgcactgcgcggccgcagcggcaccatgattgtgtttgccgtgctcctgtcgttggtggcgggtgtttgagggaacgagtttagttcttggtctgttattttcagaaatggaaattggcctatacc

SEQ ID NO: 7674 - DNA, 120 bp, Homo sapiens
  chr1:1986115-1986235
  hypo
cgccacttcaccgctggcaccgtcgaggtctgggggcaggtctgactggtttcctttaccttagtgaagccggcggcctgcaccgacccggctcgcgcccatcccggggtcacccacatt

SEQ ID NO: 7675 - DNA, 414 bp, Homo sapiens
  chr1:2013582-2013996
  hypo
tcaggggtgctggacgcgtcagacgggttctttgcagcccttggcagcgtcgcccgctctgtcccgcctgttgtgtgcgccttttccctgctccagggctgtgtatttggcaagagggaggctccgtggcacgatcacacgtgcaggagctgggggctgccagagcggctgttcaagatggacttggcaaatcacctctttcaagttgccggctacccggctgccgtagacagagtgaagtctggtagtttgtgtttatttatttatcttggccagcagagagaattgagtttgcatggagactgtaatttcattctgtgagtgtaagatcacgtccgcgttcctagcgaccggttttgtgatgtgggcagtgccgtgctggtaaatgctctgtgaggaaggaacgatggtggg

SEQ ID NO: 7676 - DNA, 174 bp, Homo sapiens
  chr1:2014025-2014199
  hypo
aaatgctcccaccacggccgatttcaggctgccgaagtggaggggttcagtgaaggtggagttgggcaagggcgtacacggtcggcttctgagagttggtccccccgcccaaccctcccctggagatgggatgtcaggagacctggttccatttgtttttttgcctgagcgtcc

SEQ ID NO: 7677 - DNA, 289 bp, Homo sapiens
  chr1:201915739-201916028
  hyper
aatccccaagctgggggcgggcctacctcgctgtcagagctgtttgaaacttgaggacattccagggaatcttggagcgctgcgtgaccaaatttagtacagagcagtttagccttttaaagacaaggggccacgcaatgagaaaaagatacaaaaatgcgtaggctggcagaagcagatcacagccacggagagccagacaagcagggacgaggccatgagggccggtgaactcgccagcccggggcacgttcaagagcgtattttactactccatcaccgggtggac

SEQ ID NO: 7678 - DNA, 280 bp, Homo sapiens
  chr1:204530924-204531204
  hypo
cgtgatgaagatgaacatggttcctgttctcctgtctagggaaactggttaagcatgtaaatattagcatagtgaatgttttgttgtgagactacatgctgctatgagaaatacagaagggggacgtaatgtagccaagagcttctgaacaacctccgggaagagatgagctgagattaaaggaaggttaggagttaggagaggaagggaaaagtgccgtagttaggaggaaacatgccaaggtcttgaggtgagaaaacagtggcatctgggaagaact

SEQ ID NO: 7679 - DNA, 79 bp, Homo sapiens
  chr1:204531757-204531836
  hypo
tgagctgctcgcctgcggtcggactgctctccccttctacgcccaagcaccgccggtctgccctgctgcgccttccacc

SEQ ID NO: 7680 - DNA, 137 bp, Homo sapiens
  chr1:204537877-204538014
  hypo
cgggctccgcacaggccaggagctgtcacaggagctaaagcagggattcctgtgccatctccggtcccttctggatctgagattcaggaattctggggctgtgattccttgaaggcagagccgggaacatgaaaacc

SEQ ID NO: 7681 - DNA, 80 bp, Homo sapiens
  chr1:204540741-204540821
  hypo
cgatggcttctgtatgcatctgctctttggattcttttttgagcggtcgtaacatcttactagttcccttattaatcgac

SEQ ID NO: 7682 - DNA, 157 bp, Homo sapiens
  chr1:214809726-214809883
  hypo
cggttggagctgccctttagttctgattgatatcttaattcgatagagtgtcagtttagcagcagggaagcaggatcaggacacggtagatgggagtataataactacaacaggttctgtcttattttaatgatgaaatgaacgcatatacatgaac

SEQ ID NO: 7683 - DNA, 342 bp, Homo sapiens
  chr1:21563161-21563503
  binary
cggcctctccttcccccaccctcctctatctgtgctggacgccgcagcaccccctccaagtgcctggccagcctcaccttttccttggctgattttcgggtttcctcatccatccacttcagggtgctcaggctttcctcaaatgccttcttaatctccaggatgatctcggtggcctgaggagatacacatcacagcagtaaggtctgcgcactggtctcaggtaaatgcaacaggcaccccgtgcagaacaatgatggccagagattaaactcaattttccaagcgtcaggctgggtgagaaggggagccacagctgtgcttccaaaccacgctcctaac

SEQ ID NO: 7684 - DNA, 84 bp, Homo sapiens
  chr1:21568244-21568328
  hypo
cggctccaatgtcttccttcaaagaggccacgctctctgcctacaggtcacgaagtcctggaagtactacaggatggtgagaaa

SEQ ID NO: 7685 - DNA, 235 bp, Homo sapiens
  chr1:21573434-21573669
  hypo
tcatgcccggccacaggtgatatttgtatcaccattttatgaaggaggagaatgaacttaagaaaggttacgaaatttgcccaaggctacaaagctggtagtttgaaagaggctgggatttaaacctgtgcctgtaaccaggatgtcctgctgcctctcgtaaaagcccgcccaggtcccactctcctgagtcagactgtcatccccacccctgcccacctgcccaagaagaggg

SEQ ID NO: 7686 - DNA, 198 bp, Homo sapiens
  chr1:220700617-220700815
  hyper
cgcgggtgcctacaggatgtcttgaggcaggtgggtggaagtgtgaggaagccacctggaagagggaggacagggcccaaatcagacacagctctccatcctccctaaacaggctcgcctaagtgacacttccttgtgtcccaggaagtgacgatcagccagtgtagatgttgtgactcgcgggtctcacccactccg

SEQ ID NO: 7687 - DNA, 574 bp, Homo sapiens
  chr1:2239631-2240205
  hypo
cgttctaacacccgcggcagctgcacgcgctcacagaaggtggaggttacttgcccaggtacagacgacctcggggcagtgacgagcaaagaccagagactgctgagccctcgcatctgggtggcggaattgcctgcggggttttgcccttggtttactgaggggggtcttggttgctgctgaagccccccaccccttctaaagtgcaatgcaaaagggacatcatgtatatgcagcgtttgtttggaattttctttgcttttgttttctttgcggttgttctgtgtgcatggattccacacctctgccgtaggtagatccgtcagcgggcattattaccgtgtcttgtaaagggtcggttttgttatgcaacatgcagaatgctgtttttagccttgttttaccagagttgttttttttttcagttatttcttcaagggaaactaaatgatttagttggagcaaagctttaagtgtgttggcgtgcttctgtgtggctgtcctgtgtcgccaggtcgaagatcacagtgaggtagaggccctgccccatccccagggccgccaggcttgctcc

SEQ ID NO: 7688 - DNA, 936 bp, Homo sapiens
  chr1:225614356-225615292
  binary
cgtggcatagagcaagacgctcgaatgacgttggacagcttccttttcacacctgagccccggtagccccactaggcaaaatgcaaacaggaaccccgggccttgctccgcgccctttgcttcatgaagcaacagaaaggccaccttcctggctgtaaaggcagaagcgccttcttccccataaacatccttgggcagctcatcattcccctcctgctcgttcttctccctcttcccaggcagcctgagaaacaaaacttaaactggacttgttgcctaatctaaattaggatccctctgctcttctccgtagctccatcttctcccacacaccagttactacaatgcgtaactacagatctacacgtgtttacgtgcaaggtccccgggggcctgttcaccctggcactgcccaggcgccgcgcctcgcgctgcaggtgtccacgcgcggaccacggtatctaccgcgccctcgtgtgaacacccgaccgggccccgtaatcactctgggaaagcgccttcaacaaagccctccgaaagcaagtgctttactaagtgccccttgaggctactggcagtgcgaggctggctgtcattagaacatttttctgaaccctcaaaaaggtgaaaaagcaggaccgtgctttagcaggaacacgcacacccgcctaaatacccgatttttgagactgtccgggcgaaggaattcaacgcataggagcgagcagccatgcagtgtgcctggagaatcaccaaaccgcgacgaccacgaccctcaaagccagtgacaagcagcgcgaatctaagcccacctcggccgcagacccttccccgtcccgccaggccgccgcgccctgtcagcctcctactgcaggaccgcggggccgcctgctcatctgtcagacgggcgctcggaggggccgggagccaggctgc

SEQ ID NO: 7689 - DNA, 476 bp, Homo sapiens
  chr1:2257929-2258405
  hypo
cggtgccccacagacggcgagcaggcccgaggccagtgtccacagggaccgcacatggggaggtggtgcaggagccctgggcggtggactgggggtgcgtctgggcacccactgcgtgcctgggactgcaccttcatgcgggtgctggtccctcactcctgtccctcacgcgctggccatgacggccctggcaccggctgccctctggaggccccagtaagtccgcaccaccccggcgccatctcctgccagttctgcctgaggcagcagctgccaccaccgcgcagacacatcctgctccctcctgactttcggaggcctggcctggcatcggcctggcagtctcggcctccccgtcggggttggtgtctggggatcagggtgaagacacagcgacccgggcctcacccagggtctgtgtgtggctgttctgcagcgctggacgtctgaggcctgtgtcgtccccacagacgcgc

SEQ ID NO: 7690 - DNA, 85 bp, Homo sapiens
  chr1:226062794-226062879
  hypo
cggtcagttttttcctctgagtttgattcccctgaaggcaggccccgcaggccctgcaatcccccagcagagagcatgcatgcag

SEQ ID NO: 7691 - DNA, 135 bp, Homo sapiens; identical to SEQ ID NO: 6684
  chr1:226163215-226163350
  hypo

SEQ ID NO: 7692 - DNA, 295 bp, Homo sapiens
  chr1:226826337-226826632
  hypo
cgagccgctgcagcagcaacacacaagacagaactttgtcatgaacttgtacaacccacactcctggactcggagacagctcgccagctcttgctggcagggagcagcgtgacctcgggcacacaagatggggacaagcaggtctacccacagcaggtctgctgtgaagatttgctgcacgcttggcatgacacctggcagacggcgggcactgttctctctctcagggcatgggaaatgctctctggagctatggggccgatggctaagggagagtcagtgagtgtccgccaag

SEQ ID NO: 7693 - DNA, 46 bp, Homo sapiens
  chr1:228083620-228083666
  hypo
gaggggctctgggtgagtgctggccctgtaggtccctcggcctgtc

SEQ ID NO: 7694 - DNA, 203 bp, Homo sapiens
  chr1:228361379-228361582
  hypo
cgatggcttccctgggctggaacaggcaggtctggttctcagtggctgtgcacaccgttcccctgcggggccctgcccatccctgctcccacatccagcggactgttgtcatttctgccctaggctctgggactactccggatgatgccctcgggcaggctattgcagttctgccagtccctgggcaaacagggtctgtctgc

SEQ ID NO: 7695 - DNA, 128 bp, Homo sapiens; identical to SEQ ID NO: 6693
  chr1:229038524-229038652
  hypo

SEQ ID NO: 7696 - DNA, 103 bp, Homo sapiens
  chr1:229543603-229543706
  hyper
gttcaaaccaaggtaagagctatcagatccagccagatctgcttcctaagcctggccagggccctaagcacccccacccacacgctcagaggcgggcgacgcc

SEQ ID NO: 7697 - DNA, 219 bp, Homo sapiens
  chr1:230308302-230308521
  hypo
cgaatggttggactgcacagtgccctgcacgcatagattcgatcaatagtgcctaaggggcttgctcatcttccagccactgtacctcctcatccccacggcgcctttcctcctccactcccctgaccacttgcctttggcaactgagccaagaacacttcttatttttttcttatttggatcagagacagattatactgggaatattctattaacaac

SEQ ID NO: 7698 - DNA, 464 bp, Homo sapiens
  chr1:231038126-231038590
  hypo
cgggattaaaaaaaaaaaaaaaaaaaaaaaaaggaaagaaaaatgccagccgtagtaagtgcttaaaacacattagctcccgaagggccccaaaccctggagacagaagcatccggttgcaacccctcatccctcgagaggtggcagcaagccttatagggaagcccaagcccaagcccagtgtggcatagaatagagcagggggcccgcagggagcctccacaatggcaggagttctgcacgctcagtaccggtagcccagggctctggaggtagagaagtctgcggaccagccggaggaggccgaagaggcagcgcatgcgctgttggccagcggacccgagcgggcagaggtcaatcaacagtagacgctgtacccactgaggcttgctgccctagcacagggagcatgagctaaacctcagtgcggaggatctgggcaaaggcccgagggtggccaagac

SEQ ID NO: 7699 - DNA, 588 bp, Homo sapiens
  chr1:231175062-231175650
  binary
cgcggggctgagggacccggccgcctccctcgcccggggtgcgcgtctgctttcgcagccatctgtgcgccggggccatcccgcggtaatcggatcacggacgcgcggcctggggcgccggaaagggggccgggctgttccaatctgctgtctacactggcggcggacaaaagttgtcctcttcgtggtaggaaaacgcaatcgcgttaatccgttgggccgctgtgaaagcctttcccccaccgggaaggtctgtttcactcggggagaggtgacaaggccgcccccgcccccaggccaggcacgaaccccgcacagcgcttccgggcgcccaggtttccgagccagcggggccggactgagggcgccgggcataagaaagccgccctctgcgcgcggggctctcccgcgggggttccaatcgtgggcacggagcacgcgagaaaaatgggggtcgttgggaggacggcgccggcgcctggggcggaggagcccgaaagggcgggtgggcgcggggacttccggacagagcgcggtccccgcgaactttcccgggacggcgagcccggccgggaagagccccagctc

SEQ ID NO: 7700 - DNA, 709 bp, Homo sapiens
  chr1:231175692-231176401
  binary
cggcgtccaggttgggaggcttggcgggcagcgctgccgcccgggccccgccgccgcccgggcccccgcggctcagctcgtcctggatgcgcgacttctgcgcgtacagccgctccaggtgccgccagcccccagacgcgccgccgcccgacgccgagtgcagcagcccgctcaagctctttggcagcgggggcagcccgtccacccgcagcccccggaccgcgccgttgcccgcggccccgggcgccgcccgggccccactcatcgcgccgcggcccggccacgcgcctgccccgctgcagcgaaccaaggctttcccccggcccgcccccttcccggcggtgccccgcccacttcccctcccgcgccacgcccccccggccccgccccctctcctcgaggcccctgcgcgggccccgggtccgggtggcgtccgcgtccagcagccgggctcgcctccacccgggtctcctcctccctcgcgcccctccagcgccctaattcatctccaactccgcgtgactaccctctaaccccccgactcacctccagccccgtcacgaacccttctgtgccactccctagctccgaacctactaagccccccgcgacccgcagcttcccggttcacccccatctctgtccccacctcctctgaaccacctcccagcttcccggctcacccctagctccgaaccctctcacccgc

SEQ ID NO: 7701 - DNA, 93 bp, Homo sapiens
  chr1:2330473-2330566
  hypo
cgctcaggtgcccgggccacccgagcctgtggtgtagcttgagcatgtgcttcttgagaaaagcctccttttctgctgcgctccttgtggggc

SEQ ID NO: 7702 - DNA, 115 bp, Homo sapiens
  chr1:234881099-234881214
  hypo
cgcgtattgtattcctgttgtatattgtacatgtaatgcatgctagctgccatttagaatggaaaagcatgccctcaccacagtcaggcccacattttgctttccgtgttaaaga

SEQ ID NO: 7703 - DNA, 158 bp, Homo sapiens; identical to SEQ ID NO: 6362
  chr1:23693515-23693673
  hypo

SEQ ID NO: 7704 - DNA, 80 bp, Homo sapiens
  chr1:23884853-23884933
  hyper
cggcaggagaggttcccggggtcccaggcagaacgggcgccagcacctgcgttctgggcgggggaggaaagaagaccaag

SEQ ID NO: 7705 - DNA, 67 bp, Homo sapiens
  chr1:23885004-23885071
  hyper
ttggtctgtacctccagctgataactccgcgccccacgctgcccccacccagttggcgccaaagacc

SEQ ID NO: 7706 - DNA, 468 bp, Homo sapiens
  chr1:23885100-23885568
  hyper
ttggaattgacactagctgggagggggctgccgaagacagctccctatacaacatggaacagaaagacttgtatttagtcggacccatgtctactttgccagaccctcggccactgcgggagggcagggcccaggcgcatttaaggcttaaatgcacatcacatggaaactgactctgccattcatttgatgcaaccatgggcaagtcacttgtccctctctggcctcagtttccctaaaccgagtgagtggcaatttttcaaaacgtctgccaactccaggacttgccgtttaaacctccctctccaagagaggagatactcacctggaggtgtcaggacacggccgagtcagtggcaaaagctccttttgtcgttggagatgacaagttccggagtgagctcggctgtctgattagaggaaaagagggaagagttacgcgaggcaatcgggagctccgagggtccc

SEQ ID NO: 7707 - DNA, 31 bp, Homo sapiens
  chr1:245281788-245281819
  hypo
cgtgctgtaaaacaatgacagtaagccgggc

SEQ ID NO: 7708 - DNA, 443 bp, Homo sapiens
  chr1:2461988-2462431
  binary
ccttttcccaggccgccaaacgggaggggggcaggaaggagggccccctcccccgccctcccctccgctcccctcccctgcctctccccagcggcttcccactgctggctggcagaggccgtaggagcagataagggaaaaactgtagaatgaacaagtgccacggcttcctgggggatgggcaccttccctgactgggacctgctgcccctccaggggagggggacagagggggcgacgctcttaggatcagtcctacgtgcctatattacaagccccctgactgtcacctgggactcctgacttctccagacctagaaaatgggccttgtgccttcctggctgggctccgggcagctccaggaagctggggcccgtgctccacgtggagcccggcacccggcagctctccccgcggagccgggcacccggcagctctcccc

SEQ ID NO: 7709 - DNA, 88 bp, Homo sapiens
  chr1:246655176-246655264
  hypo
cgtgatggatcaaaacgaaaacaagaccactctgtaatcatgtctgaacgcaactctgttcaactaccgatgtgctccctggctggac

SEQ ID NO: 7710 - DNA, 247 bp, Homo sapiens; identical to SEQ ID NO: 6698
  chr1:25070663-25070910
  hypo

SEQ ID NO: 7711 - DNA, 255 bp, Homo sapiens
  chr1:2520320-2520575
  hypo
cggcctccggggtgccgtgactgcctgcccgctgctacaggtggtgataaagtgctcctgcatttcgtccagaagtccccaggcgactacgtccccaaggagcacatcctgcaggtcctgggcatctctgcggaggtctgtgccagcgacccgcctcaggtgagctgggccttgggggcgctgcctgccagcccacgccctgcccctaggtcccctgggaggagcactcggcttggctgggagctgagccacagc

SEQ ID NO: 7712 - DNA, 38 bp, Homo sapiens
  chr1:2520987-2521025
  hypo
ccgccggcagcaacgagccattaaaactgcagttcctg

SEQ ID NO: 7713 - DNA, 39 bp, Homo sapiens
  chr1:2521063-2521102
  hypo
ccacagcccccgccttgctcactgttgggccctcagggc

SEQ ID NO: 7714 - DNA, 80 bp, Homo sapiens; identical to SEQ ID NO: 6706
  chr1:31863055-31863135
  hypo

SEQ ID NO: 7715 - DNA, 262 bp, Homo sapiens; identical to SEQ ID NO: 5880
  chr1:32180427-32180689
  hyper

SEQ ID NO: 7716 - DNA, 130 bp, Homo sapiens; identical to SEQ ID NO: 6707
  chr1:32410105-32410235
  hyper

SEQ ID NO: 7717 - DNA, 215 bp, Homo sapiens; identical to SEQ ID NO: 6711
  chr1:3328319-3328534
  hypo

SEQ ID NO: 7718 - DNA, 644 bp, Homo sapiens; identical to SEQ ID NO: 6712
  chr1:3328625-3329269
  hypo

SEQ ID NO: 7719 - DNA, 103 bp, Homo sapiens
  chr1:3342039-3342142
  hypo
cggggcacggggcaggggcgcgggctcccttccccccaccctctgtggcccggcctgccatgcagagccggggcctgcactgaggagcgcgtgtgccccttcc

SEQ ID NO: 7720 - DNA, 484 bp, Homo sapiens
  chr1:3342321-3342805
  hypo
acgcggggtggggcagcccccagagcacccacacgggcaggccccacagagggggagggggaacagcaggggagtgggcgccgggcagggaagagggccacagactacccctcaggaagccaacaggcacccctcaaaccgtggtcattaaagagaacctcgtgctctccggtgtccctaagaaacctgcctccctaacagcaccccaggtgtaccccgttcgcggttggtttgccccacggagggaggggtccagcgagaggccgccccctgatgctcccgcccctccgcagtgagccagcaccccggggtcctcacgaaccacctggggaccagcgcgtcctctcccacctcagagtcggacaaccacgcacttttagacgagaaagaagactcttatttctcggaaatcagaaactttattgccaatagtgagatgaaccaagcatcaacgcgaacagagaaacggtaagaaaactatcgc

SEQ ID NO: 7721 - DNA, 229 bp, Homo sapiens
  chr1:36025968-36026197
  hypo
cggcggcggatcttcgatgctgtcggcttcaccttccccaatcgtctcctgaccaccaaggaggcgccggatggctgccctgaccatgttctgcgggctttgggtgtggccctgctggcctgcttctgcagtgaccctgaactggccgcccatccccaagtcctgaacaagattcccattcttagcaccttcctcacagcccggggggacccggacgatgctgcccgcc

SEQ ID NO: 7722 - DNA, 125 bp, Homo sapiens
  chr1:3697578-3697703
  hypo
cggataattcagcattgccgcatagaaacctccgcaaaaccggccaaacaaacgcggacaggcggccctggcgtcagcgcacgacagtcacgtggggaggggcagtggccaggtcggccttggac

SEQ ID NO: 7723 - DNA, 307 bp, Homo sapiens
  chr1:3705404-3705711
  hypo
cgcgtgccctctgggagagaatggggcagtctaagcagcagtgacgcctgctggggaagaacacaaggcaggggctgagaccaagcccagctgctgggcactacctgagccacgcgtccatcggatctaacagaactgccacaattctgtgcttctcagcacagggtgggctgggctgggatagacttgttggactggtggctccagcccagacctcccttccggccccacatgggacgagagccaatctactcctggaatccaggtggcctcacaaagtaccaggagccgtatcaccaatgctgtc

SEQ ID NO: 7724 - DNA, 130 bp, Homo sapiens; identical to SEQ ID NO: 6717
  chr1:40771005-40771135
  hypo

SEQ ID NO: 7725 - DNA, 237 bp, Homo sapiens
  chr1:41268046-41268283
  hyper
atttggaaacggaaaaagtagccggccgggcgggggaggccgcggggaggtaatcggagccgcagcaccgccccggcccctcccgctctcggggcctggcattggcaaagccccgcccctcccagggacgcaagagccccgcccaccattccccgcccccggcatgccccgcccatttccgtaagccccgccctcgccgaggcgggctgggggcacctgggagtgccgagcagtggc

SEQ ID NO: 7726 - DNA, 49 bp, Homo sapiens
  chr1:46744609-46744658
  hypo
cggagccgccggatggcttccctggctgtgactgcatcctggtccagcc

SEQ ID NO: 7727 - DNA, 255 bp, Homo sapiens
  chr1:46957171-46957426
  hyper
agggctttattgacttgatggaccttggaggaaaggggctgtctgtaccgcaagggttgtgtgctccacagccgaggaaattgtgcaagttcctacctggctgtggcgatggcagggcgaccagagtcctttcccctctctagtgctagggattctgtgcgctgcaggcgggtcagctctgtccaacccctttctagaaagttctatggtctgttagttttaggtgggtgtagtgggggttgttttcaatttttc

SEQ ID NO: 7728 - DNA, 196 bp, Homo sapiens
  chr1:51763389-51763585
  hypo
ctgtcctggtacacattgtctcctatctccctgctcccactcctgtcccctgcaagccatttcgcacactgacctttttaagtcagatcatgtcagttccttctggaaatctggttatattccatcacactcaggagacatctcctacaatttccttgacacctgcagcactccagccacacgacggcctcagggc

SEQ ID NO: 7729 - DNA, 32 bp, Homo sapiens
  chr1:52194847-52194879
  hyper
cgatgtctcaccggattaataaaaatataggc

SEQ ID NO: 7730 - DNA, 323 bp, Homo sapiens
  chr1:52194968-52195291
  binary
tccgttatcaaggtgaaactccggggaccaggctccacagctgccataaactggatggcacgttagaagccggtgggtgtaggtgaggcacgctggcgcccgcgggcccttctccagccgctacccagtgggaatccgcggggctgaagccccgaaaccaggctgagcgtcccagagcgcaacctccctttcccccagcagcgccggcgccgcagaagccgcgtgtccccaggcgcactcccccaaggtgaacccccgccccccacggaggcggctgggtcgcgggtctgggcggggcgctccggacgccctcccgccgctgc

SEQ ID NO: 7731 - DNA, 387 bp, Homo sapiens
  chr1:52195348-52195735
  hyper
cgccaatcgtctgcctctcacctcctacagcaggtgacccatggccaatcgccaggggtctctttgccaggagccgccagggccagccaatcggggcgacccctccgccggggaggggacgggaaaggggtggggggtgaagggggtgaagggggtgtcccgggggacgggctgaacctcagtcaggaccgcctgcaccgcagtccggggatcgggtcgaggggagaagaaaaaggggtgctcgggagcagcccccggctacctcccctggaggcacagagggcgggggccttggcgaatggctttcttgctggccacttgcggagtgagtagaccccgagggtctgggagaggggccggcccctacccctgagtccccggggtccc

SEQ ID NO: 7732 - DNA, 137 bp, Homo sapiens; identical to SEQ ID NO: 5883
  chr1:53168691-53168828
  hyper

SEQ ID NO: 7733 - DNA, 121 bp, Homo sapiens
  chr1:6046277-6046398
  hypo
aggctggcgcgctctctgtgggtggggagggacaagcacgttttgggtgaagatcctgtgccagtcgttcatcctgcccgcctgagggtcccgtgggcttcccggatgatctgtgccagtc

SEQ ID NO: 7734 - DNA, 216 bp, Homo sapiens
  chr1:60539399-60539615
  hyper
cgcggtccgtgcttctccccaggaagctgacactctcagacccggggacgggacggggcgtggggaccgagcccaggaatccggccaatcacagggcccgcatcgcgggcggcgcctgttccgccctggtcgctaaggacgctgaaggctgtttctgggcggggaccaggtttttctccactgcctaggcaatggacccaggctctggctgccaac

SEQ ID NO: 7735 - DNA, 92 bp, Homo sapiens
  chr1:61833628-61833720
  hypo
cgtctcactttgtccttcgagtaggatcaagcgctcagaagcagagcgatgtatacgtttgtcgaacgaatgagcgttgctccgcttgcatc

SEQ ID NO: 7736 - DNA, 220 bp, Homo sapiens
  chr1:6479997-6480217
  hyper
cgagctttaagggagcggctcgcccgccccgccccgccccgcggagtccggccgcccgctggtcccacctcctgcctttgttcctgcgcagggtggagccgggaggggagaccgcgacgcccccggggatcccgctccccgcctttgcgtcctgtctaccgcggggtggcggcccccagttttccccgagcacctgcgggagagtggtaaaggcgccatc

SEQ ID NO: 7737 - DNA, 54 bp, Homo sapiens
  chr1:6507073-6507127
  hyper
cgctgagttcccaacgcagactgttggccccgcccaaatccacaggacaggtgg

SEQ ID NO: 7738 - DNA, 61 bp, Homo sapiens
  chr1:66999412-66999473
  hyper
ggaattattaagtttttcttaaaaaaacaaaaaaagaaagaaagaaagaaaaagaaaagaa

SEQ ID NO: 7739 - DNA, 36 bp, Homo sapiens
  chr1:66999673-66999709
  hyper
ggaatggggacgggaaataggttctgtgtgctctcc

SEQ ID NO: 7740 - DNA, 34 bp, Homo sapiens
  chr1:70710406-70710440
  hypo
tctaggagtcggcgacgatccaaaagcccaaggc

SEQ ID NO: 7741 - DNA, 78 bp, Homo sapiens
  chr1:85773944-85774022
  hyper
cgccctttactcagtaaggagggcccaggcgtccaaagcccaccagggggcagcggcggcattcttagccccacttct

SEQ ID NO: 7742 - DNA, 112 bp, Homo sapiens
  chr1:85774083-85774195
  hyper
atttttctgcaaaagctaaggtcggcaaacatggatattcggatttccattgtttttgaggctaaatcaaaagatgcctctggggaaaaggggcaacatgcactgtcggatc

SEQ ID NO: 7743 - DNA, 171 bp, Homo sapiens
  chr1:91170461-91170632
  hyper
cgggtaagaggaaatggataacagaagtttgggcccggctctgcaaccaggcacgcccaggtagctgccactcaatggctgaagagaaggcaatgggagagcccctgcaatcgcgcagccagccgcgagggtagtagtcacgtgatgccgctggctagaattgtttggtgc

SEQ ID NO: 7744 - DNA, 61 bp, Homo sapiens
  chr1:91185065-91185126
  hyper
aaaaaaaaaaaaaaaaaaaaaaacagcactacttggagggtgggttgagctgtttctcatc

SEQ ID NO: 7745 - DNA, 171 bp, Homo sapiens
  chr1:92948154-92948325
  hyper
cgtcactggccagctccgcgcaaacgaatctaagcgacaagcagctagggtcctgccgcctgggatggaggcagcagccccagcgggcaagctgtccaagtcccagagaagccggatgcctccttcccctacgaatcagctcccttctcccggaaagactctccaactccc

SEQ ID NO: 7746 - DNA, 142 bp, Homo sapiens
  chr1:92949466-92949608
  hyper
ctggagagctgtagttcccatcgggtgggttaccccaactcagctactcatcgcctgcctggctgtgctttacggctggcgagggagggcggggacacgcggatcggtttaggggccggggatgcccagtggtcgaggaccc

SEQ ID NO: 7747 - DNA, 228 bp, Homo sapiens; identical to SEQ ID NO: 5892
  chr1:92950207-92950435
  hyper

SEQ ID NO: 7748 - DNA, 133 bp, Homo sapiens
  chr1:9402333-9402466
  hypo
cgatccctccgtgagaatgaagaaatgcaacccatgagaagaggtttgcgtagtgacaagtccagaaactgtgtgcatcagcctggggcacccctagctgtgggcagaagctccatggtgcagctcatagtgg

SEQ ID NO: 7749 - DNA, 177 bp, Homo sapiens
  chr1:9402616-9402793
  hypo
acgtccctctcccgcctcatcctgccttgttcccagtgtagtgatcaccctgacatcggttctcccatgtcctcatcccccgccagcccgcggggtcatcccctccccagaccacagtttgggcccaggggtctggggcacacatccgagatgcaggcacacatcccggactcctcc

SEQ ID NO: 7750 - DNA, 148 bp, Homo sapiens
  chr1:95428574-95428722
  hyper
actgaactgcagcaaacccaggggatccaaggctacgttgaaaagcctttgaccacagtgcagggagcagaagacattaatgacgtgatgtcgacacagcccgcactcaggatcctccaggaaaagaacacagagataaccccggatc

SEQ ID NO: 7751 - DNA, 331 bp, Homo sapiens
  chr10:102490316-102490647
  hyper
cgcagtgatttattcgcttcacccggcggaatcaggtgctgaaccgagccccggaacgagagaacagatttctcccaggaaaggttttgtgaactaaacgatgctaattacggggtgggggatgcgtcgcccgggaaggggaggcgcgcggggccgagcgcggcctgggaggggagagaccggggctggccgaggccctcccggggcgcctcccctgcacctctcgccctggctttcgcctttccctgggaactttcccgtctgagttaactattaaccaccggcgagaggcaattttcttcggaatttcagcgatttccttttcgcagtg

SEQ ID NO: 7752 - DNA, 414 bp, Homo sapiens
  chr10:102490715-102491129
  hyper
cgcctcaaacagtgtccttcgcgacggcggaaaactacagcccgcccccgctcccgtgcctgctcaggaagccgtgaccaagccagtgcccgccggtgcccggagtgaaggtggaaaaagccgagtgctcctgctcgggggcggggttgagagggggagattaatccgggcaagccaaggggaccttagacttgcagccagggccgccacccgaggagcccgcatgcagggacgcgcctgaaggcttagtcaaacccggggaaatgccctcccccgcctgcagaatccccacgccgtctcttacttcctccctctttgccactggcgagcttacacgtgcacacacacacacccctctctgtctgtgaccgcaacaaactttgtgaaacttgaaccgctgggtgcaaagttcac

SEQ ID NO: 7753 - DNA, 34 bp, Homo sapiens
  chr10:102995986-102996020
  hyper
cgttaatggtagtcagctccctccctttcacaga

SEQ ID NO: 7754 - DNA, 130 bp, Homo sapiens
  chr10:103985878-103986008
  binary
cgttttacgggagaaaaggctggggaagtgggcgggcgatggcctacgacgggacttggggcggggtgtgcgaaacgcctggcaggcgggcccttgagtatgaccaatcagaatgcggactgcgtcccag

SEQ ID NO: 7755 - DNA, 280 bp, Homo sapiens
  chr10:104416719-104416999
  hypo
cgcagcacttggtggccctgccgggcggcgcccaaccagtgcactcaagccccgtgttccccccatcgcagtatcccaatggctccgccgcccagcagcccatgctcccccagtatggcggccgcaagattctcgtctgttctgtggacaactgttactgttcttccgtggccaaccatggcggccaccagccctacccccgctccggccactttccctggacagtgccctcgcaggagtactcacacccgctcccgcccacaccctccgtcccccagtc

SEQ ID NO: 7756 - DNA, 142 bp, Homo sapiens
  chr10:104417062-104417204
  hypo
ctacagggtgtatgggcagccgtccaccaaacactacgtgacgagctaacgccacgcaggcggcggggcgctggggaatcttcctccccagcccccgggctcgggagttatgcatccagagacctgcccttctaccttcctc

SEQ ID NO: 7757 - DNA, 737 bp, Homo sapiens
  chr10:111767130-111767867
  binary
cggggggcgtgcggaggttgaacctttgcagtggcctcctacagccccagcagccagcgtgggcggccgaggctgactcaaagcggcggctcagcctcgggagtaggagtagggggctcgctcatttagggcgggagacatttccgaggcgcccctcctccccttcgcggtcgggtttctatcggggtcgtttccccctctggccctccggggacgccgcggattcgagctgcacagtcagaagaggacgttgaaaaggcgccaggcagccgccccgaaccaggccctcccggctgccgggcctgcaggcccccaccgctgcggcttcacggacttagagcttgagggcgcggagggggctgcgggggcgggaccaggactcccgaggggcgctcggggcggggccagagagagctcggggctgccagaggcgaggtcttgaggaggcggggccgggaggcttcggagcccaagaggcggggccagaggcgtagggggctgcgaggggcggaccttgggggcgtgaccggggggggcgcttggggacctaggggcggggcgttagggggcgggaccaagggacgctcgaggggcgctcggctagtcccgccagagcgcgagccgccagcccgtaacggtcgccagtgtgaggggcgggagggaaagaagaggggtttaaattagattttttaaaacacagagcaagcgccagaggcgtcggcatcccaggtgtcgcc

SEQ ID NO: 7758 - DNA, 164 bp, Homo sapiens
  chr10:114200406-114200570
  hypo
cgggctgcactcatgtcgatcttcactgtgttccacccaaaggagagctatcgcagcaacaatagcacacgcacaaaatgtttggttatggtaactggtcagactctactgtgacacgtaaaacaacttgatcaaagagataacaacgtggccctgtggccaac

SEQ ID NO: 7759 - DNA, 240 bp, Homo sapiens; identical to SEQ ID NO: 6731
  chr10:118891774-118892014
  hyper

SEQ ID NO: 7760 - DNA, 216 bp, Homo sapiens
  chr10:121398054-121398270
  hypo
gggcacctggctgccaacaccaagattggcccccaccacatccacacagtccgtgtgcggggaggtaacaataaatacggtgccctgaggcgggacatggggaatttctcctggggttcagagtgttgtactcgcaaaacaaggatcactgatgttgtctacgatgcgcccaatagcaagctggtccgtaccaagaccctggtggagaactgcttc

SEQ ID NO: 7761 - DNA, 138 bp, Homo sapiens
  chr10:122708760-122708898
  hyper
aggttaatcaatcagcagccgctcagtcacccatcccttccgcatcagttgcgtggggctggggatcatgcctagggcgggaggcgtgggagcgcagggcgccccgggtccggatccggctacaggggcgaacagagc

SEQ ID NO: 7762 - DNA, 319 bp, Homo sapiens
  chr10:126354246-126354565
  hypo
cgtgggccggtgatatggccctttccacgtttctaagtgatgacttgttggtgctgtgacctccaggaggccagggctaactgtcctctccattgctgcatccctggtgcctacaagggcctgactcacagcaaatgctaggtaaataaatagtggctgaacaaagagattaatctagaattgaatctcgatcctcagaggacaagactagctcatcttactgtgactcggcttatagtcggctacgtagacacagctgtctccaccccagccctgtagcctgcacctaccttgcaggtaaggatggggtcttgtacac

SEQ ID NO: 7763 - DNA, 380 bp, Homo sapiens
  chr10:12827582-12827962
  hypo
cgaggccccggagggactgtgctgggcacctcctgggtctggaaactcgttggtcttctgcaagtttggaagctggacgctgtgattttttggaattacagcagagtccttgccacgcgtcataaaactggtaacacaacactggccggttcggctggttctcaggcaggaaaactggcgtctgacaagatcagagtgagaagtggactctcccagggctatgtacctcaccacagctgaaacaagaaaatggatgggttgggggctatgctagaaaggccgggtgaattcagcaggttggtgaaacagtgcagctgactcccgatcacaggaggcgagcaggagagagaacatcctcgtggatctccacggtttggccc

SEQ ID NO: 7764 - DNA, 38 bp, Homo sapiens
  chr10:129897014-129897052
  hypo
cgctcatccattcattcgtgtttaccgagtgcctgctc

SEQ ID NO: 7765 - DNA, 203 bp, Homo sapiens
  chr10:133783038-133783241
  hypo
cgcacacgggagggcgaggtggagacacgggcagcgctcaggtcccggcccaggaaactcagtggcttttatcccgtttccttcaaccccagatgtgagccctctggccaacctacctaacccacctgcccccagtggcattccggtctttccagtctgtccaacacacggcagccacagaacactgtctgcacgccaggact

SEQ ID NO: 7766 - DNA, 873 bp, Homo sapiens
  chr10:21815648-21816521
  binary
cgtaagataaaacctctgatttgctgcgtgctgccgggcacattctctgccctctcgtccgaaggacgagtttaaaatggagagtttaaaataatagcatttacaggaggaaataaagagcgaggagatggttctttggccggttttaagacatacatgctttttttttcttttaatacaagatgtcttaagggttaaaagcgttctagggtttgctgtatttccttctagatttggggtttcctgaggaaatcttttccggagggaaatagcaaatcaacattaagatggaagcgagacttctcagccacttttggaaatgaagggggaaattgtaaaaatacattcagaaaagggcgcgaaggcggcggctgaggggaagaagctggagtcttgggaggaagcgcagtgggttggaatcgggggaaggagggcccgctaggtccgggcggggaagaaggcgtgcgggcggcggggcgtgcgccgggccgggcagctggaggaaggcgcggcgggactggcgagcgcgaagaggcaggcggggaaggcctcggggggcgggggccgggcgcggggccggcgcgccggaggaagcgggacctggctcctcgcgcccgccgggccgcccccattgttctgccctagcaccgctgttagccgagcacgtcctgaccgagggaggggccccgcgggccaacccgacccccgtcggcgcctccccgggctcctgagctccggccgggtcgggtcgggccggcgcggcaagttttgatggtcagactcagccagcgaggggttcccagctgaagacctcggaggaaggagcctttacagcgtgctgcgaaattgaaggaagccgggcgagcctgcaac

SEQ ID NO: 7767 - DNA, 92 bp, Homo sapiens
  chr10:22047245-22047337
  hypo
cgactaacaatctagctacagggaaagaagcctcaagagacactgtgttaggatcacaccctggggctctctgcagcgcctcatggccagat

SEQ ID NO: 7768 - DNA, 32 bp, Homo sapiens; identical to SEQ ID NO: 6742
  chr10:22626103-22626135
  hyper

SEQ ID NO: 7769 - DNA, 54 bp, Homo sapiens
  chr10:27825982-27826036
  hypo
cgtttggtccttcggtgaatgagaagggatgggactccaggaacaaaagaaggc

SEQ ID NO: 7770 - DNA, 137 bp, Homo sapiens
  chr10:30736731-30736868
  hypo
cgttaccaaatagattccgatgttctcctgatcccctggaagctgacttacaggaatattggttctgattttattcctcggggcgcctttggaaaggtatacttggcacaagatataaagacgaagaaaagaatggc

SEQ ID NO: 7771 - DNA, 253 bp, Homo sapiens
  chr10:31609416-31609669
  binary
tgggggagggggcggacggaccgacggacgcgcggggctgctacttgcaccgcagctgcagtgtttattgatttgtgctgctgtgccaagggaaacacacacccctctgcctggcgtgagagttaaaaaaaaagagagacagcccgagggatcgagacctgaacatgtggtggtggttgcacagtcgccttttccagtttggagagacgttgtaagttgattgtatttctggttatctcggggcgatgctatg

SEQ ID NO: 7772 - DNA, 35 bp, Homo sapiens
  chr10:43600323-43600358
  binary
gcccccttcccgaggaaagcggctggcccggtccc

SEQ ID NO: 7773 - DNA, 136 bp, Homo sapiens
  chr10:43697752-43697888
  hyper
cgtctgccccctgtggttgaaagggcgacagcgctgaaaggggtgtgaccccgaggggaggcgacgcgctcccgcgccctagtccacaggcatgcacgaccccacccagcacagggcctagggcatggggactggc

SEQ ID NO: 7774 - DNA, 125 bp, Homo sapiens
  chr10:43698155-43698280
  hyper
aaaccagcggattccgcccacgttgccagcctaggccccccaccacccgctcccaccacgcccctaacccggacccaacccacagctccagcccagacctcaccccagcctggtgtggcgtcacg

SEQ ID NO: 7775 - DNA, 70 bp, Homo sapiens; identical to SEQ ID NO: 6381
  chr10:5538706-5538776
  hypo

SEQ ID NO: 7776 - DNA, 192 bp, Homo sapiens; identical to SEQ ID NO: 6382
  chr10:5538938-5539130
  hypo

SEQ ID NO: 7777 - DNA, 381 bp, Homo sapiens; identical to SEQ ID NO: 6383
  chr10:5540271-5540652
  hypo

SEQ ID NO: 7778 - DNA, 198 bp, Homo sapiens; identical to SEQ ID NO: 6384
  chr10:5541528-5541726
  hypo

SEQ ID NO: 7779 - DNA, 134 bp, Homo sapiens
  chr10:6003855-6003989
  hypo
tgtcaccacctttcatataacttgccctacgctcactgccaatgctccagggctccctgcacaggacgcaccaaggcatcctcagccaagtgcccacggtcgtgccagctcgggtcaaaggctgctgtcacatc

SEQ ID NO: 7780 - DNA, 298 bp, Homo sapiens
  chr10:6018666-6018964
  hyper
gcgacccgctttcttctcgaatacaccaagcgatcacagatctcttccccctttttctgcgagtgtagactccaggctggcccccactccccacccccatccggtcccgaccgcctctgctggtttcctgatcgcttaagaattggaagttgtttccaggtccccaggtgtgcaacttgcccgacgcgtttccccctgggacacagctcctccccaccctcccagctcccactgacataatttacttttgcctgggagtcgggaggagtagtttctcccggacccctccgaggaccgc

SEQ ID NO: 7781 - DNA, 667 bp, Homo sapiens
  chr10:6621854-6622521
  binary
cgcaggccccctttcgttcaggtgagaaggaaaagggagaagaaaggaggaagcgcccccaggccggcggcccccacccggctaaggtcgccagcatcccgcatcccgtgcgacctgcgtcccagaaacccagcggggaaattcttcccggtgcgctcttgcgcccgcttggttccatttcctactccgcctgctcacccggcagccctcaccccttcccggaggctctccgaggggcccgggtagcccttctcgccacgggtctcggcccctccagcccgctccctcccggcggcggcgcggggcgcggggccctacctggagcgagcacggcgccgctgctgcccggtggcgctgggactgcgcggggactgcgcggggactgcgcggggactggcggggctggcggggctggcggggctggcggggctggcgggcccggcgcactgcgggtgcgcctagaaggcggtgcccgccagggggcgctcgccagcctccccgccagcccggcctcccgggacccggcacctctagccagggacgcgcgctcggtcccccgccgtgcgcccccggtcccgcgcccaggctcccgcccctggcctccttaccagccacttgtcgcccagctgcgaactggagcgggaggcggcggccggagggcccagga

SEQ ID NO: 7782 - DNA, 87 bp, Homo sapiens
  chr10:6622706-6622793
  binary
gtaaacattgttccttttaaaatgacctaccccaggcatttgtttgggcacacttctgtcctggggtcatcgttcctaggtggcttc

SEQ ID NO: 7783 - DNA, 398 bp, Homo sapiens; identical to SEQ ID NO: 6751
  chr10:70184294-70184692
  hypo

SEQ ID NO: 7784 - DNA, 147 bp, Homo sapiens
  chr10:73846836-73846983
  hyper
cggcgtcgcctctggcgcatccgggcccatcccccacagcacccccaacgatctcggggtccagccacaccctccgcccgccctgcctcacccctgcttccccagcccccaacccggcccggccgagaggaaggagccagccccgcc

SEQ ID NO: 7785 - DNA, 164 bp, Homo sapiens
  chr10:73847427-73847591
  hyper
gatgccaccctcactgccggccccacccagacctgccggtgctgcagtgccccgtatgtgcagcctgcagcatcccagcggctggggcaggcccgggggcggctcgcacaacgcagctggggaccgggtcggggtccagcggcagccggggtccgggtcccccc

SEQ ID NO: 7786 - DNA, 62 bp, Homo sapiens
  chr10:74100516-74100578
  hypo
cgcgctgtccctggcgccctcctcactcacatcaccctggttgtccctgcggtcctgccttt

SEQ ID NO: 7787 - DNA, 74 bp, Homo sapiens
  chr10:75670652-75670726
  hyper
cggccaggtgcatgggaggaagcacggagaatttacaagcctctcgattcctcagtccagacgctgttgggtcc

SEQ ID NO: 7788 - DNA, 45 bp, Homo sapiens
  chr10:75670755-75670800
  hyper
tctttgtgagcgttgcggaagcacgcggggtccgggtcgctgagc

SEQ ID NO: 7789 - DNA, 102 bp, Homo sapiens; identical to SEQ ID NO: 6754
  chr10:76287784-76287886
  hypo

SEQ ID NO: 7790 - DNA, 433 bp, Homo sapiens
  chr10:79610504-79610937
  hypo
cgcctcatacacacgggcacgcggcgccagtgccttctacgcagtgtcttcatgacagccatacagaccaattctcctacactgagatgtgccaacctcgtgctttctagcaaggctgtggggcttcccttggaccgaggtggagccacatacacctctgaaatgatgattctctcaaggaagtatagaatccaaactaaaccccaaggcaaaaggttacctgagccaagcgtagaccaagaagaacaaactgccggcaggcaaaacagcaagaaaacaaagcacacagcagggtgtaggtaaaggccgggagaggccgcctgccctcaggtgggggaagttaccacgcaccccagggcagagaaggggctcaaacccttagagggccatcccctcgggcagcttcctgggagctttgttttgacacagcacc

SEQ ID NO: 7791 - DNA, 113 bp, Homo sapiens
  chr10:7985048-7985161
  hypo
cggttgtgatcctgctcagatcaaaggagtccaatcctgtggttccggttccctgtagctccgtgagactctgagaactccactcggcctccagcgctgcctttgccgttgcc

SEQ ID NO: 7792 - DNA, 115 bp, Homo sapiens
  chr10:7985194-7985309
  hypo
cttgcttggtttcttggcttctgtcttctgattctggctcctacgcatcacgttctgcttgctccttagcattgcaaactctgacattttagatgatacgtttgtttcctagttc

SEQ ID NO: 7793 - DNA, 226 bp, Homo sapiens; identical to SEQ ID NO: 6759
  chr10:80855265-80855491
  hypo

SEQ ID NO: 7794 - DNA, 124 bp, Homo sapiens
  chr10:8086048-8086172
  hyper
tccacctctgtccacaccccagttctcccgactccagggaccaagtgcctcggcctccccgccacgaaatggccacccccaagccctttgccccatgaaaatagcaacttcttcctacccaacc

SEQ ID NO: 7795 - DNA, 81 bp, Homo sapiens
  chr10:81023804-81023885
  hypo
cgaggaaaaattacatgcggaatggaaagcaggcgctcagggtggctcctgctggaatgagagctggagtgcaggctccgt

SEQ ID NO: 7796 - DNA, 69 bp, Homo sapiens
  chr10:81023914-81023983
  hypo
tctcaccttgcagatggagtgggactgttgacccaggccagcctggggactgcctcctcacctccctgc

SEQ ID NO: 7797 - DNA, 185 bp, Homo sapiens
  chr10:93572713-93572898
  hypo
cgtgtggacaatttgttttcatctaggttttgggcggaaagacgtagttgaatatttgcttcagaatggtgcaaatgtccaagcacgtgatgatgggggccttattcctcttcataatgcatgctcttttggtcatgctgaagtagtcaatctccttttgcgacatggtgcagaccccaatgctc

SEQ ID NO: 7798 - DNA, 57 bp, Homo sapiens
  chr10:93647662-93647719
  binary
tctctttcacttttcttcccttcgctaagacttttttatatttgtaagtggaggcgc

SEQ ID NO: 7799 - DNA, 231 bp, Homo sapiens
  chr10:98272415-98272646
  hyper
cgtgagcgtgagcacccctctgtccgtgctggaactgccccacactcatcagcttgctggaacatgcgcttggcccttcggaggctaacgcttcaacgactccagctcggaagccgctcccctcaggactcacgagccgatcagtggccccgaggaagcgggagctgcagcgcccgggcggcgattgcgcccgaaaggcccgtacgtcctggggcgccgcttcctggaggg

SEQ ID NO: 7800 - DNA, 420 bp, Homo sapiens
  chr10:98272768-98273188
  hyper
tgcccgctgtgacgcttttctttttaaaatctcccaagagtaaccacagatcttgggaaactttgcgcgaaacttaaaaatgctgtgaaatcggagccaggaactccatctgagcctcggagcgccgcgcccagtccagctcttctgctccggcccggagcgtctggcggtggccagtgctgcccactcgctgtcaggcggccctggcacccaccccggcccctgggcgccctctcggcctctggcacccgctctgattcgctttgggaacgcgccagctgtcgccccccggtgcgcaccgcaaacctggggccgggacatcccagcctcggagtggtttttaagcaattcctcggaggcattgtcttccgggggagccggggatctcaggggaggggaggggagacccgccccatagac

SEQ ID NO: 7801 - DNA, 83 bp, Homo sapiens
  chr11:11960229-11960312
  hypo
cgtaggcaataagtcgagtttttgttttcgtcatttttaagtgcggcaatgctgcatttagtgtctggtgacactagactagc

SEQ ID NO: 7802 - DNA, 326 bp, Homo sapiens
  chr11:121349234-121349560
  hypo
cgacttgcagatggcaaaaatgtttcccaggtacactgagaataaccttgcaatcaaattcatgttttctaggatactatcagtgtgtctgcttgcgtgcttatgcgtgcttgtatgcgtgtgtgtgcatgtacgtgcttgtgtgcgtgtgagtacctgtgtgcgtgtgggtacctgtgtgtgtgtgcttgtgtgcatgtgggtaactgtgtgtgtgcttgtgtgcgtgtgagtacttgtgtggatgtgcatgcttgtgtgcgcgtgagtacctttgtgtgtgtgcttgtgtgcgtgtagttacttgtgtgcgtatgggtacctgc

SEQ ID NO: 7803 - DNA, 264 bp, Homo sapiens
  chr11:1215132-1215396
  hypo
cgctccagccttgtcaagcgcccgctggatggagctctgtgcggacgctggccacgtgtgttctgatgacgtgagggtcttgtgcgccctgtgagatgagacggtggggggtcagggacagatgtgacctgttgggaggaaagccccagggccatggtgccaccacccgagccacccgtaaggctgcccctggggcctggcaggtgtgtgcagcggctggggtgacccccactacatcaccttcgacggcacctactacacctt

SEQ ID NO: 7804 - DNA, 305 bp, Homo sapiens
  chr11:1215429-1215734
  hypo
gattgtgcccgtgtatggccacttccgcgtgctcgtcgacaactacttctgcggtgcggaggacgggctctcctgcccgaggtccatcatcctggagtaccaccaggaccgcgtggtgctgacccgcaagccagtccacggggtgatgacaaacgaggtgggggcgcgcccggtgtgccgcggagggggtgggggacgcggctttcccggcaagagcctgagcagcggctgaccgcccgcccgcctgccttctgacttcccgtcgaccacgccctgcgtccagatcatcttcaacaacaaggtgg

SEQ ID NO: 7805 - DNA, 136 bp, Homo sapiens
  chr11:128391758-128391894
  binary
cggcctctggccgagagcttgggtgggggcctcggccgtcgccactcacccggggaggggaaaagctccagatcgactttttccgtcttgatgatggtgagagtcggcttgagatcgacggccgccttcatggtgc

SEQ ID NO: 7806 - DNA, 623 bp, Homo sapiens
  chr11:128392116-128392739
  binary
gcctcgcccgcgccgcgcccgctcctcctgcccggccctcgcccgctccctcctctccgccggcggctgcctcgttcgctctcgatctcccggccgctctccctccctctcgccctcccgcgctctcccctcctctttagggcgtttctcgcggcgccgcgtctcggccgctgggtccgcgcgccctgggccgggcgatgtccgcttgggggagcgaggggcggggcgtcggggcagggcggggagccgggggcggggccgagcaccgcggccaatctccgcccgcggcccaaagcgaaaggaagggctggcgagcgcggggccgggccgcgaccgcggaggagcagtgcgtggagccccgggcctcggagcccaggcaggggcgggaagggccgggagcgggtgtgcaggctgggtgcacaggccgcctccaccgtttcgggaaagtccgtctgattctccacgcattcttgagggcttggtcacccgctctcgccccctcccagtagcagcatagttttccaagtgcgtgtacatcattcattcacaaagactgacacacaggacgtgaggcatgtggatgaaggcgagcgtgcaggcaggcgcaggggattcgtgagccc

SEQ ID NO: 7807 - DNA, 67 bp, Homo sapiens
  chr11:130785392-130785459
  hypo
cgctcatccttctccgaagctcctggaccaaccctttcatggctgcctccatttcttcctcaaaggc

SEQ ID NO: 7808 - DNA, 161 bp, Homo sapiens; identical to SEQ ID NO: 5733
  chr11:133939437-133939598
  binary

SEQ ID NO: 7809 - DNA, 45 bp, Homo sapiens
  chr11:1464971-1465016
  hypo
gtgtgtgggtcggtgcccaggtgtgtggacgtgtgcacaggtgtc

SEQ ID NO: 7810 - DNA, 150 bp, Homo sapiens
  chr11:233062-233212
  hypo
gtgacgttgggcttgtagtttccagggtacagctccttggccaaagtgaaaaagggcttggggttgtgaaagaagaatgggagttcaaaaatggcctcggggtacgggagatcgtactgctggaggttgctgtacaggccactccccggc

SEQ ID NO: 7811 - DNA, 253 bp, Homo sapiens
  chr11:3145131-3145384
  hypo
cgttccacggactggcggtcctggcagcactgggcaccaggcttggccttaggcactgaggttagaaagtaaagatgccagtgtcctgctctttcagggagaggcagaccagccaccagcacgcagaggcgggaggagccaggggtcaggtgagcgctgcggttctgcgttctgtgcatggatgtaagcacgttagatcccacagctcaggtcatcgttgttattctcagcattgtacagaggaagagcctac

SEQ ID NO: 7812 - DNA, 171 bp, Homo sapiens
  chr11:31808842-31809013
  hypo
cgtgcccaagtgcacacatacagaccctccgctcccacgtcactccttttctcccattcccacctcttgcacctggcgtgcgacatccgggtctccaaagtctctgctgtctacacaacagaaccgtgggccggaactggctgcctgaccgtggtggaaattacagccagc

SEQ ID NO: 7813 - DNA, 48 bp, Homo sapiens; identical to SEQ ID NO: 6777
  chr11:34535248-34535296
  hypo

SEQ ID NO: 7814 - DNA, 57 bp, Homo sapiens
  chr11:35547041-35547098
  hyper
cggacgctactcacagtacctcttggcaaggacgagatgagaaggagctgaagaaaa

SEQ ID NO: 7815 - DNA, 209 bp, Homo sapiens
  chr11:35547127-35547336
  hyper
ctccatccttgccgcggctggtgcccgagcgtctactggggagggagaggagggacccagggaggccgggggcaggcgggttttacagggacctccccgagccccagctgagcgggagctcgggtttcagctcgccaggctctcccatcctcatctgaggggaaccaccttcagccagagcgacgtcagcccaaacctctcctctctgc

SEQ ID NO: 7816 - DNA, 103 bp, Homo sapiens
  chr11:3697491-3697594
  hypo
gccaagaggcgcaaagggactcgctgagggtctggtgttgagtcggaggttctatcaggaggatgatgcagactcagcaccacgcgcagcaggttggctacac

SEQ ID NO: 7817 - DNA, 162 bp, Homo sapiens
  chr11:455954-456116
  hypo
cgggccccaccccccgccttgctgcatgaccttcacagtgtcacttaccggccctgacttgcctgcgggcaccacgcacacggcatgaaggtgccctggcccggggcacggacacagccagagccaccgcgctcctggctgtcatcacgtcgttggctttgc

SEQ ID NO: 7818 - DNA, 151 bp, Homo sapiens
  chr11:46783074-46783225
  hypo
cggaggtccagactcactcaaacgaaataagaggtcagaggcagaacctaatgtgagtgaaaaactggctcacggctgtagcgcaagatgtgatctgacagatactagcatccacactatacacaaataagcactttttaaccaaaaactc

SEQ ID NO: 7819 - DNA, 87 bp, Homo sapiens; identical to SEQ ID NO: 6778
  chr11:47208495-47208582
  hyper

SEQ ID NO: 7820 - DNA, 46 bp, Homo sapiens
  chr11:57235458-57235504
  hypo
catttgtaccgctgccagctcagcagcctgcccggcaacatcttcc

SEQ ID NO: 7821 - DNA, 137 bp, Homo sapiens
  chr11:63325873-63326010
  hypo
cgggagacgccatagcgcagatggttcacgaagtgctcgcagttgtcactggtcagcgaataaggcaactcctgccccaccaactcctctgcccgcttgacgattttgttggaaggcagtggtgtgtatctgtcatc

SEQ ID NO: 7822 - DNA, 48 bp, Homo sapiens
  chr11:64054239-64054287
  hypo
cgagatactccccgcgccaaccgcctggggcccttgcccttctggctt

SEQ ID NO: 7823 - DNA, 550 bp, Homo sapiens
  chr11:64512349-64512899
  binary
cgcccccgcgccaggctgccccctcccccctccgcccctgcgcggagctccgcaccgccggctgcgccacccccaccgggggctccctctcgccccgcacgcggcggtccctgcggcagcttaacccctcccctgccgcgccgcccgggaggccagggccgcgggcggggggctgcgccactagctgccccgagggcgggcgaccggaggccccgccgcccgggacgcggaggggggaccgaaacgaagagcccctcccccaaccgcggacgccccagtgccccccgccctgcctgggtgtcgggcggaggaagccgggaggggcaggaagcggactgcggtggggaaggggcgccccgcccagcccccagctcgggttcctgttttcgagacaaaccgttcccatggggctaacccggcccgggaccgggcgtcttcctgcaggcagcgggtggcacaggcctagtggaggtcgggggcgtggggacagctggtccttgagatagtctgggggatgggctaggacaagatgggaatattttggggagag

SEQ ID NO: 7824 - DNA, 61 bp, Homo sapiens
  chr11:64513748-64513809
  hyper
ccatcaccgtcccgccgtgggacgcacctgccgagggtggaggataagggggtgactgcgc

SEQ ID NO: 7825 - DNA, 396 bp, Homo sapiens
  chr11:64875426-64875822
  hypo
cgcgccatccaggacgactgccaggtcatcacggcccgcctggcccagcagctgcggcagcgctttaggtgtggcccctctgccctgaccccagcgctcccgccagccccgagccccatctgtgcccggctcctgggccctcctggagctgtccccctgccctgtgtgtgctttgctttcctgctcctgccccatccaccggcagccccggccctgcccttcactacctctccctcgtgcagggagggcggctcaggcgccccggagcaggcagagtgcgtggagctgctgctggccctgggcgagcctgcggaggagctgtgcgaggagttcctggcgcacgcccgcggccggctggagaaggagctgagaaacctggaggccgagctggggccc

SEQ ID NO: 7826 - DNA, 189 bp, Homo sapiens
  chr11:64876158-64876347
  hypo
cgcctgggccaccacctgcagggtctccgggcggccttcctgggctgcctgacagacgtccgccaggcgctggcagcacctcgcgtggctgggaaggagggccctggcctggccgagttgctggccaatgtggccagctccatcctgagccacattaaggcctctctggcagcagtgcaccttttcacc

SEQ ID NO: 7827 - DNA, 33 bp, Homo sapiens
  chr11:65413830-65413863
  hypo
cgccacacaccacctacaggtgggcaccggagt

SEQ ID NO: 7828 - DNA, 188 bp, Homo sapiens
  chr11:65414113-65414301
  hypo
caagacctggccaccaacgaggtgaccactacgtcgctggactcggcttcacgcttcggcctgccctccctgggtgggaggcgccgggcggcccctcggggcccaggcgccgagctgcaggcagcgggctcactggtgtggggagtgcgcgcggcgcccggggcgcgggtcgccgccggggctcaggc

SEQ ID NO: 7829 - DNA, 262 bp, Homo sapiens; identical to SEQ ID NO: 6782
  chr11:65582723-65582985
  binary

SEQ ID NO: 7830 - DNA, 1101 bp, Homo sapiens
  chr11:66079395-66080496
  binary
cgaggcctcgcggtggctgtaagtccgtggggccgaggccaggtggcgccaaaggcccatcgacgccatctgcccggctgtccgggcccagtctccgggctcgcccagagaacccgaaatctggacaaacggaaaccgtaggtggaggaagaagagggctccagggccaggttcaagggcatcgtggtgagagatgaggggttcggaggactggtggatctgggcatatcgcgaaggtggtaagggacccaggggtggagtgggcggtgcttgcgccaagagggtgagcctgagtgtgggcggggcgtgcgataagaggctcgctcggtagcgctcttcgcagagccgtatttgtgcgctacgccgcagccagggcgctctgggtgggcgggactccagggcccccaggggcgtggcttgcatctttcgtgggcggccccgggggcggggctccgtgtaggtgaaccgctacctccgctcgatgtgtgaggtgtgacagtcctacgagggcgcagttcttccacttttgtgagcttgagagggggcggagcttgtagctggggacggagcctgaagaggaggttgaggggaacttcacacgtttccctggagggcggagtttacatcatcccccaacagagttaagacctctgagggattccctgcagtgtccagggctctgtgaggcgaagcttgcagttgtgttgggcggggcctgtagcgccgcgtgaagagaatgtgtaaactcggggcgaagttcatacctcctagaagccgagactaatagttccgccaatctgcgcgcgccgagcggaggaggtggggcttgtaggttgtgggcgggggactgggcggggccaagagggcagggggcgggcacaatcgctgctggaatctttgagttggcaggggcggggcttgtggctttgtgggcggggcctctggagagctcccgggggctctcttctgttctgcagcgagtaggcgtggctcgtagctcccaggtccgggctgataccgctggagtatgcagttcgccgccgcgcccgaatgaggcggggcctgcgagtaagtgggctgagcccgggctgggcgcaggcc

SEQ ID NO: 7831 - DNA, 141 bp, Homo sapiens
  chr11:66513646-66513787
  hypo
ttcttgttaactggtacaaatgaggatcttagttcccagatctccctgcctttaaaaagggggtaataattttccttgtgttgcctccctgtaaaagtgagaatctgtttgcatgaataataatgggagttggccgggcgc

SEQ ID NO: 7832 - DNA, 339 bp, Homo sapiens
  chr11:66626187-66626526
  hypo
tcctcccgagcccgggctttccccaacgggaccttagagattggggtgaccggcgctggggacgctgggggctacacctgcatcgccaccaaccctgctggtgaggccacagcccgagtagaactgcgggtgctggccttgccccatggtgggaacagcagtgccgaggggggccgccccgggccctcggacatcgccgcctccgctcgcactgctgccgagggtgaggggacgctggagtctgagccagccgtgcaggtgacggaggtgaccgccacctcagggctggtgagctggggtcccgggcggccagccgacccagtgtggatgttccaaatc

SEQ ID NO: 7833 - DNA, 120 bp, Homo sapiens
  chr11:67232283-67232403
  hyper
caacaacaggaagcccggcacgaagaagatggcgctggagacacctgcgggagggaccagagcccggtcagggcgagggggcggaggcttcgaggccttccgggctgccgctgactgccc

SEQ ID NO: 7834 - DNA, 127 bp, Homo sapiens
  chr11:67232464-67232591
  hyper
cgtggacccgtggacacaagacaggggtgtcctctgcctgtgggggcgggagggtcgctcacctggagagggggtcgcctccagtcccacgccgaccaggatcagcactgcacacagacggagccgc

SEQ ID NO: 7835 - DNA, 72 bp, Homo sapiens
  chr11:67462547-67462619
  hypo
cgctttgtcctacctggccactttcctcacgggaatttaggcccctcttagcattggcgtgccggtataaac

SEQ ID NO: 7836 - DNA, 394 bp, Homo sapiens
  chr11:67462833-67463227
  hypo
ctctgtgaacagagtttatctggtccccgaggcagtgcaatgcaagcctattcgccgttttccacgttgctgagggtccgggtttattcatcacaacaggtaagtccggattcccagtccctgaggccaccgcagtaaggcagtggggcgcctccccttggtgggggggcgggaatcagagaccccgacccgaaggagactgggtgatcccagacgagcccccaagactgttagaaataaatccttattccccgatgtcacaaagaagaatcagcagacgaaaagcttcctcagcaaggtgatttttaccttctgcagaaagagtgctgcccgtccgcaatcctgccacgatcgcatacaaaataaaaaaggcactagaatatttatcccttac

SEQ ID NO: 7837 - DNA, 72 bp, Homo sapiens
  chr11:68564274-68564346
  hypo
cgccgccccaccgtcctcgtcagacagcagcccgggcgggtggactcaccatggcataatagttgctgttca

SEQ ID NO: 7838 - DNA, 167 bp, Homo sapiens
  chr11:68564381-68564548
  hypo
tcctcccaccagtcgctcacctagtgggcgcaaacaccagacaaacccgcaggctcagcaggggccaggcaggctccctggcagcagcccagagccgcggggaagggcaggcagtgcttttggcagacatttcggcgtctaacaggggccattccagaacagggaac

SEQ ID NO: 7839 - DNA, 58 bp, Homo sapiens
  chr11:69516911-69516969
  hyper
cggctctgggtgggagtcagcgtccagcgtgccgaccaccccctttctctgcagtcct

SEQ ID NO: 7840 - DNA, 201 bp, Homo sapiens
  chr11:69517461-69517662
  hyper
gcgcatctgcgtctaagccacaccgtgctcctggtagattaaaaattaattctaaaaaaaaaatctctcctatcccaaatgcactgttttctgccttgcttgacaattgatttgtttttaaaggaaagttatgggtagatcctcttttttctttcccattctttttttcttcttttatactggagggagggaaacggaggc

SEQ ID NO: 7841 - DNA, 206 bp, Homo sapiens
  chr11:70016958-70017164
  hypo
cggggtgctgactagcactgggctctctctgcagtcatccagtttggcttcgtcaccctgtttgtcgcctccttccccctggccccactgtttgcgctgctgaacaacatcatcgagatccgcctggacgccaaaaagtttgtcactgagctccgaaggccggtagctgtcagagccaaagacatcggtgagtgaccccacgggcc

SEQ ID NO: 7842 - DNA, 522 bp, Homo sapiens; identical to SEQ ID NO: 6786
  chr11:71192127-71192649
  hypo

SEQ ID NO: 7843 - DNA, 169 bp, Homo sapiens; identical to SEQ ID NO: 6787
  chr11:71192889-71193058
  hypo

SEQ ID NO: 7844 - DNA, 162 bp, Homo sapiens
  chr11:74178245-74178407
  hyper
cgatcactgcgctcgggaggatcggggaggatccgggaggactagcttggtatttgcagcgcccacccctcccccactccccctcggttccacagtctcacggagagcgcgccgtggcccttggaagggaggcgggaagacccctcatttccaccccaggcc

SEQ ID NO: 7845 - DNA, 121 bp, Homo sapiens
  chr11:74178470-74178591
  hyper
cgtttgctcgctggacacggcgccctctgaccgagggtggcccaagcgctgcgaccctgtgcattccaccagccccgttccactccgcgggtgcccagcaccgcccagcgcgctctctggc

SEQ ID NO: 7846 - DNA, 211 bp, Homo sapiens
  chr11:75167782-75167993
  hypo
cggccgaggcggcccttaccttgtgcagccagtgcaggttcatctgctgccccacggcaatgtgacatagtgccaggacctgaggagggacccacagggtgattgtcaggcccgtgtgggcgggaaggctttgccagtttctcagacaccctgctccccactgcggctctgggcctgaccctgggcagaggcagcgaacctccctccaggc

SEQ ID NO: 7847 - DNA, 31 bp, Homo sapiens
  chr11:75852075-75852106
  hypo
cggaggccacgcgaatgtgcaccctagccaa

SEQ ID NO: 7848 - DNA, 76 bp, Homo sapiens
  chr11:76033216-76033292
  hyper
ggcccgtccgcaaccgaagaggaggcgaccgcagcctggaaaagaagagcccccagctgtttccttccacccgggc

SEQ ID NO: 7849 - DNA, 129 bp, Homo sapiens; identical to SEQ ID NO: 5736
  chr11:8615887-8616016
  binary

SEQ ID NO: 7850 - DNA, 70 bp, Homo sapiens
  chr11:89224244-89224314
  hyper
cgaattaagacaaaacttccacttccagcttcccacccgtgcacgctcagagaatgaatcaaaatcactg

SEQ ID NO: 7851 - DNA, 122 bp, Homo sapiens; identical to SEQ ID NO: 6797
  chr11:9405271-9405393
  hypo

SEQ ID NO: 7852 - DNA, 311 bp, Homo sapiens; identical to SEQ ID NO: 6799
  chr11:9554670-9554981
  hypo

SEQ ID NO: 7853 - DNA, 886 bp, Homo sapiens
  chr11:96122370-96123256
  binary
cgcaaagtggatcctgccagcatggtatccgggataactatattattcattaaaatccgttaacaatgaaggttaatgcagcaggaatgagtggtagacagtggaatagatcctctcaggaattaacacccggaagggtgactttcatgattacaaacctctttggcgggacgcaggaacccagcgcccgctagcccactagtccgtcactctgcctccaggagggaggggcacagtagctaggaaaccggaccctcaggccaagcttcgcgatgacgcgcgcaggacgacggaaacccccagaccccaaaagagctctgcaccgagaaaacaattacaagggtctggaaaggccagaaacccgagaaatcaccaaccgagctccctacatcagttccaagcacctccccaaggcggaaataacgggcaccgcgcccactgcagctcagctgaggagggttagaggcgcaaagggctgaggggcgttctccggcccacccaaagagcgcccgcgggaatttttctcttagtccgcgaggaggcacggcttcccccgcccctctcataaaccattagcaccgggagcgcgagcgagtcccagccgggagacagccccgcaccgccctcgcgctctcacctttcaaagcgcctccacctctgcctccgcctccgcccctgccccggcaaccagctcaggacaagcgatgctcctcccccccttccggggaccaagggaagtcccgcctctgggtggggcgaggggtggggccaggcggcgggagggatcatcttccgggagcgtggctaggggcggagcgactgccgcgcgatagtcagggagctgtgcgggtcctggttgcaagagaggtggggagaggggcctggc

SEQ ID NO: 7854 - DNA, 635 bp, Homo sapiens; identical to SEQ ID NO: 6395
  chr12:110352780-110353415
  hypo

SEQ ID NO: 7855 - DNA, 380 bp, Homo sapiens
  chr12:111402659-111403039
  hypo
cggaccccgagtggaaggtggttggtgtcccaaaggcaaattagggtgctggtatctgagcaggaaaaagagatatcaggaaggccaaacaacagacattccctgtgggcataaagttggtacttgcaaaacagcgccaatacctggatattcctgttaccagaaaaacaaagagctggatcgccttcccagtttctcggaaggacaccgtggtgtttctgagggaaggtcatcagggcccagaaaagtcgttttcttttcagcccccaccccgaccctggttccctgaaaaggttggaagagctccatcccggccctgtggtgatgccaggcgattatgtccagggcaccacgtctggactagttgaccgagagatctc

SEQ ID NO: 7856 - DNA, 321 bp, Homo sapiens
  chr12:111844290-111844611
  binary
cgtgttagggagagcgttggggtaactgaggccgtgggatgggggagagggcatcgctgacgcccccagcccaccctacggtagcctcgccggttgggggcggccctcccctcaacttgtgcctggggaggagcggtcaggggtcacccattgctaccctgaaagtgaaagtagtcaaactgaggctgtgagcacagatgagcccttgggtgtgggggcagcgggggaggatgcgccggcccctccccactccccattccgggccatgtggctaagagggtagcgccctgattcaggaagcccctctccccagttcctgca

SEQ ID NO: 7857 - DNA, 99 bp, Homo sapiens
  chr12:111844690-111844789
  hyper
tttctggtattgatcctctcacacctcttgcctggggttccctgggaatcccccgaccaaaaaacgtctggagtgggtgttggtcttctagatccgcac

SEQ ID NO: 7858 - DNA, 508 bp, Homo sapiens; identical to SEQ ID NO: 6805
  chr12:112204412-112204920
  hyper

SEQ ID NO: 7859 - DNA, 186 bp, Homo sapiens; identical to SEQ ID NO: 6806
  chr12:112204992-112205178
  hyper

SEQ ID NO: 7860 - DNA, 73 bp, Homo sapiens
  chr12:114290596-114290669
  hypo
cgcacagctgcaaagaggccgcttgatgtcacaggccacactaaccagcgtgcagcacgttcctcctctgcac

SEQ ID NO: 7861 - DNA, 146 bp, Homo sapiens
  chr12:114334084-114334230
  hypo
cgcttgccccagagcagggaaaaccaggcaaattctccggaatgcagcggccccatcacgtgaggtgcttagagctccagggaatttctgggctcgggggcatgtccgccttaaaggttcaggcccaggctgtccccacaggctcc

SEQ ID NO: 7862 - DNA, 169 bp, Homo sapiens
  chr12:116394813-116394982
  hypo
cgtttaacaccaaaataacacggtaataagtgaaaattgcatcttgataggatttgggcgtgcggtgaattccaaagcacgatttcctttttatactggcttgactgtaaatgacaagcggcaaagactgttttcaatatgtggcttatgcttctgcagtatgtcttac

SEQ ID NO: 7863 - DNA, 230 bp, Homo sapiens
  chr12:116443638-116443868
  hypo
cgaaatttttgtttatgtagctacggcaaactcaccccaagttcgtcgtcatcagaattatcaaagatgttgtctaagtcatgcagggaaggtgccaaatctgttacctgtgtaaggctactggagccagctctgccagcagcattatcctgccggacatctgtaggaaaggaggcaaaagacacagaataaacaactccaccaagcgcaaaggagtagggagaggacac

SEQ ID NO: 7864 - DNA, 58 bp, Homo sapiens
  chr12:116946548-116946606
  hyper
cgttccccctgccctgggacgtgcagggtccccgctgattcccgccccggggctcccc

SEQ ID NO: 7865 - DNA, 218 bp, Homo sapiens
  chr12:117466159-117466377
  hypo
cgtgtgccagggctcgagtcccacgtgctgccaactcaaacatagcctccttccccacccagctggccaccctggcctcagctccctcaggacgcctcagggatctcgctgcgcggtcctatacggtccctgcttagccagcttctgtgtgtccgccctcccagctccagccctgcaggccgtcttttccgtctccagccccttacctcttttcctcc

SEQ ID NO: 7866 - DNA, 46 bp, Homo sapiens
  chr12:120574393-120574439
  hypo
gtgatgctgaccacggagggcctcagggcgtcagccgaggtcaggc

SEQ ID NO: 7867 - DNA, 200 bp, Homo sapiens
  chr12:121205162-121205362
  hypo
cgaggatcatctgcagtctctctggttctcttacctacaaagtatccgatgagggtgcagtgaaagtaggagaccttctgcatgcgcccggagatgttggcaggtccaggggccccacaggagtccccactggcttgctttttgtagttgtcatagcgaaggacaaagcatagtaggagaccaggcataacgatgtctcc

SEQ ID NO: 7868 - DNA, 81 bp, Homo sapiens; identical to SEQ ID NO: 6808
  chr12:121328606-121328687
  hypo

SEQ ID NO: 7869 - DNA, 40 bp, Homo sapiens
  chr12:122192684-122192724
  hypo
cgtgaattttggaaggatgctattcaacccagtacacctt

SEQ ID NO: 7870 - DNA, 117 bp, Homo sapiens
  chr12:122192843-122192960
  hypo
ctcagtttcttgacagatacagtgagcgtgacaggagctacttggcagggcagcttggagggcaggagaagctgtgtctggagactggttagactggtgcctgtttaaatattagca

SEQ ID NO: 7871 - DNA, 45 bp, Homo sapiens
  chr12:122192989-122193034
  hypo
agactgggcatacgggaaaaaggctcacagcttcatagctagtgc

SEQ ID NO: 7872 - DNA, 67 bp, Homo sapiens
  chr12:122474899-122474966
  hypo
cgcacccgtccctaaagcttcataaaaattaagttggttttccgtgtttggaaatcaggaaatctcc

SEQ ID NO: 7873 - DNA, 286 bp, Homo sapiens
  chr12:124843509-124843795
  hypo
cggcttcgaacccaggcactggggctgcagaccatggccttaatccagactgctatgccacatggcctgcggcagagaagcaatgatgggtcctagatttcaggcctggggagatcctgtaaactcagcggggccccggggctcaggcctggcttcatggcatcttcctgctggcctctcgccctttgctgaaatctgtcctcagctctgaacctctccctgaggaccaatcctatggagagataaccggccaagaagttgagcagagacacaacttgggaatgac

SEQ ID NO: 7874 - DNA, 33 bp, Homo sapiens
  chr12:124989213-124989246
  hypo
cgcagtctgtccatcaatggactacgattcagc

SEQ ID NO: 7875 - DNA, 425 bp, Homo sapiens
  chr12:12618418-12618843
  hypo
cggccctgcggagaggacttgattaaacaaggtataatgtacttctctttcccatccacagatggatctgtctgtagaaactctgttcagcttcatgcaggagcgccagaaaagatacgccaagtatgccgagcagatccagaaagtgaacgagatgtccgccatcctccgccgcatacagatgggcatcgaccagactgtgcccctgctggacaggctcaacagcatgctgcccgagggcgagcggctggagcccttcagcatgaagcccgaccgcgagctcaggctgtagctgctgcccggcctgcctggggctgggagccccagacaccgacaccctgaggacgtgtggagctaaggtcatatcatctgaccaggtctggaggctggcgggaggctccctgaaagtgggtgcgaaggagtcc

SEQ ID NO: 7876 - DNA, 86 bp, Homo sapiens
  chr12:13215310-13215396
  hypo
tgaaaaaaactgggatttgagttaactgtagaactgaagccatctggaaaacttcctatgatgctgtggtgcttacttatgtgacc

SEQ ID NO: 7877 - DNA, 234 bp, Homo sapiens
  chr12:132249441-132249675
  hypo
cgctggcagtttgttttcgaagaaactgagttggccgtcttagctctaatgcgccacagtggaatgcattaatggcagctcactttgcacttggctggcagccccagggtaaaaggctcagcctgtcttcccagctcaggaaccaaactaggagatgccctcttgtgaggctgcctacccacagaaccattgggcccttgaaggtggtgtgtccccagctggttttccggctgc

SEQ ID NO: 7878 - DNA, 200 bp, Homo sapiens
  chr12:132250682-132250882
  hypo
cgcctcgcagctgctgcccgggaaaagctggcccaggcgtctaaggagtcaaaagagaaacagcttcaagcagaacgtaaaaggaaagcggcgttatttttacagaccctcaaaaatcctctgccggaagcagaagctgggaaaattgaggagagtcctttcagtgtcgaggtatagtaaaatcccacattggtatctgc

SEQ ID NO: 7879 - DNA, 109 bp, Homo sapiens
  chr12:132378083-132378192
  hypo
cacattctccaacttttctccgccttgatttcctcatctgtaaaacagggacataacagcaagtgcctcgtggaatcattgaatggatgcactaatcgctggaaagtgc

SEQ ID NO: 7880 - DNA, 246 bp, Homo sapiens
  chr12:132592879-132593125
  hypo
cggccacagatcgaggtttcaactggacttcaaacaaagcttcagtgcctagggccagatttgttctttccagccctgtgaggcctgaaattgcatcagcgagccaagtgtccccgtgcccctctgttagtggctgaggccgccagctgcatgggatgtgcaggcggtgatcaactttgcaaagcttaaacattattttcccttcttcctcccttccctttgaatattccctctcaggtaaaggtt

SEQ ID NO: 7881 - DNA, 180 bp, Homo sapiens
  chr12:133199822-133200002
  hypo
cgggcatcggcctcaggtcaccccacggcctgcacatgctgtgtggctcacaaatatccagctcatttttggagaaactggctcttctggttgagccgctgcttgggaaccagggccagagcttcccgtttctgacccctccaccactactcaaatgcccgcagctagcctcacagtgaa

SEQ ID NO: 7882 - DNA, 226 bp, Homo sapiens
  chr12:133200090-133200316
  hypo
cccatcactcctcattcctgagggttctccagattcgcttccaggaatgaagcctagtcagccagcctccctcctcccctgcttgccctaatttgatttgatctccactctggaggcctcagcactcctccatctgagcaggcatcaggtttctccaggcaggcggccccagcagcatccaggggccaaacacgtgcccagtggtacccagtccccgatctgaggc

SEQ ID NO: 7883 - DNA, 151 bp, Homo sapiens
  chr12:287260-287411
  hypo
cgtgtcctggaagcctgcctgcctgcctgcccgtctgcacaggtgtcttgatccagccctgcgtcttcgagcccctgtgccaccggtccccacggcccgccaggagtctctttgtacccactaggcttccctgatgaccatctgtctgtcc

SEQ ID NO: 7884 - DNA, 43 bp, Homo sapiens
  chr12:30948583-30948626
  hyper
cgacgcaggggacgcccacttgtctgacgcaggggacgtggct

SEQ ID NO: 7885 - DNA, 308 bp, Homo sapiens
  chr12:30948670-30948978
  hyper
tggcacaggctcctcggcagcattatgggcagctggtagagcggccacttctgagagccggatgggccttccgaggtcgggccgtgccccgctgggcagcgcagagggggtgtgtagggcacgcgacttggagccaggtccagacccatcctggctcctctcagggctccttcccctgcccccattccaccccagccctgctggctgtcccgcaggacccagcgccgcggtagccttctctgaactgcggctcaggcggaggtgtcactcctgcctccagcccaggagggcaggtcaggttatgcaac

SEQ ID NO: 7886 - DNA, 490 bp, Homo sapiens
  chr12:30948988-30949478
  hyper
cgatctccccccacctccaacccccttttctcccgggtccacaccgcagttcccaccgctccgggtgtcctccccagtgcgccgcgatttttgtgtccaagccccagagtccctctgagaccaacccccagccagcacagacttcctgccttcccagctcgggtgagtagccctgaaacgcccgcccccgccgccccgcggccgcagcatcctctcgatggccgcgcctccgggacgacgtggtcccctcgagtagtacaggagctgcaagagaggcgcgccggggccagcaagctctagaacagcaggagcggccccagttgggaccccgggacgacgagtggccggcaacgcggcgcccgcatggcccaagcagtgtccgggaggggtcggggccccggactaggggcgcagcgaggaccgcccggaggctttcccttgggcagctaagtccgagtcagctctactcggatttccagcttccagcccc

SEQ ID NO: 7887 - DNA, 74 bp, Homo sapiens
  chr12:3901132-3901206
  hypo
cgctttggtctttgattcttatctttgaaagacgatggcaaggataaaggagttgtgtgtgtgcgcgtgcgcgc

SEQ ID NO: 7888 - DNA, 235 bp, Homo sapiens; identical to SEQ ID NO: 6834
  chr12:417402-417637
  hypo

SEQ ID NO: 7889 - DNA, 86 bp, Homo sapiens; identical to SEQ ID NO: 5742
  chr12:4377809-4377895
  binary

SEQ ID NO: 7890 - DNA, 245 bp, Homo sapiens; identical to SEQ ID NO: 5743
  chr12:4378558-4378803
  binary

SEQ ID NO: 7891 - DNA, 247 bp, Homo sapiens
  chr12:4379920-4380167
  hyper
aagaaagtgtgcacttttgcctagaaggcaacatgcgttttcccgcgtgctaggtggagtgcattttaacaagacattagggttttaacacatggctggagtggcgaccaaaagggaaaactcagtttccagtccaagcctcctagagacattcctgccaacctccgcaccctctcacgccccaccccacgtgtgagagtctgcaaaaccaccggggattggattcgatggcgagcttcacgctcgg

SEQ ID NO: 7892 - DNA, 285 bp, Homo sapiens
  chr12:4380196-4380481
  binary
acaggggaacttcaagaggcgagcctgccacgcgggaagcgcccgaacttgcgggtctccatgaatgcagagggcgccgggaagggggggcatccggccgcgaccctctctgcccctcccattcgctgcccccctccccgctggaatttctctgtaaagcaagacggagtagggggagggggagagggaaggggcgagagggccctcggctcactcccgagacgtgaggactcgccacccaggcattctcctcggggtgggctgggccccgggacgaccacccgc

SEQ ID NO: 7893 - DNA, 401 bp, Homo sapiens
  chr12:4381033-4381434
  hyper
tcccctttctttacatataggagatgggatactcattcccgctgctattgataaggtcggaggcggccgggcctctccccagctttcgcccgccccagcgcccgctctccctccgccctcccttggcttccttttgatgtagtggggaacgcgtcctactaaaaaaaaaaaaaaaaaaaaaaaaaaaaagtaatctgcccggtaacaatcagcgcgcagtagcaggagccccagagctattggctatgcaaatagagggaggggagacggcgccccaaactcttcctcacccttttaaagcgatatcccctcctttcccccccaccaccccttccgccccaccctcgtttaaagaggctggctccggggcctgagttaatcgcttgcacctctagtttatt

SEQ ID NO: 7894 - DNA, 255 bp, Homo sapiens
  chr12:4384059-4384314
  hyper
ttgctttgcaaactccctttggaaaggctgggaaacgtcgcccgcttaccctcgcaccccattatcccggccaccccacttctaatcgtgccctctcccccaccccccacctcacgaagattacttacagtttggttttccagcttcctcggtgcggagatttgggtggggtaggaagggggggagggggtgtgtgtaggggggataccgggtcacccctgaaggagaggtgggagccccccgtgcctctttcca

SEQ ID NO: 7895 - DNA, 79 bp, Homo sapiens
  chr12:4384533-4384612
  hyper
tctaggatatttcctcgatttttaattattttttgaaaccatccccccctgctccgactccagctgccgaggctgcggc

SEQ ID NO: 7896 - DNA, 238 bp, Homo sapiens
  chr12:47628809-47629047
  hypo
tgcaaaggaaggagctaggctgtgcgccctgggcgtcatgatccttctgcgggcctccgaagtgcggcagctgcttcacaataagttcgtggtcatcctgggggactctgtgcatagggcagtatacaaggacctggtgcttctgctgcagaaggaccgcctgctcactcccgggcagcttagagcaaggggggagctgaacttcgaacaagatgagctggtggacggaggccagcgg

SEQ ID NO: 7897 - DNA, 142 bp, Homo sapiens
  chr12:47629208-47629350
  hypo
gaattcctgcctctgggacatctccaggtatggtccgaactcctggagaagctacctggagaacctggagaacctgttccagtgcctgggccaggtgctgcccgagtcttgcctcctggtgtggaacacggccatgcctgtg

SEQ ID NO: 7898 - DNA, 112 bp, Homo sapiens
  chr12:47629379-47629491
  hypo
gcccaagctccggcggcagaaggccaccttcctgaaaaacgaagtggtcaaagccaacttccacagcgccaccgaggcacgtaaacataacttcgatgtactggacttgcat

SEQ ID NO: 7899 - DNA, 243 bp, Homo sapiens
  chr12:47629544-47629787
  hypo
tggacgtgtgcaccgctgcctctcccagctgctgctggcccacgtggccgacgcctggggtgtggagctgccccaccgccaccccgtgggcgagtggatcaagaagaaaaaacctggcccgagagtcgaagggccgccccaggccaacagaaatcacccggccttacctctgtccccacccttaccttcccccacataccgccccctgcttgggttcccaccccagcgcttgccgctgctccc

SEQ ID NO: 7900 - DNA, 67 bp, Homo sapiens
  chr12:49297935-49298002
  hyper
gagctcagcctcactgatagccggggatctctcctgttcgagggctgagatctccggtcccacaacc

SEQ ID NO: 7901 - DNA, 61 bp, Homo sapiens
  chr12:49392537-49392598
  hyper
ggcagccatgtgaaggggtgtgtgtgagtgtgtgcgcgtgtgcacgtgcgtatatgttagg

SEQ ID NO: 7902 - DNA, 295 bp, Homo sapiens
  chr12:49392636-49392931
  hyper
cacactttaacagcgtctgccccatctcacctcctgccctttctcacacccacttctgttcccccaaacaacgggatgagtcaggccccagccctcgggagcgggcagaggtggaaggcgtgggaaagagaagggggaccagcagtgctcgctggtgcctgcggggaggtccggaccccactccccgccccaccactctcttcccctcacccctgcttcactcacgtgcggttctggaacccgcgagcccagtggctggcctggaagtccatgggctgtcgagaaggggcgcggc

SEQ ID NO: 7903 - DNA, 145 bp, Homo sapiens
  chr12:49735822-49735967
  hyper
cggagccagagaccgctgcccggtgcttcctcccatcttcttccatcccttccctcttgctccccctccctcctgcactccctccccggcggccgcggcctttattagggattccgcggctgtcggtcccgccatccatcctgtc

SEQ ID NO: 7904 - DNA, 710 bp, Homo sapiens
  chr12:49736083-49736793
  hyper
ataatcaccggccgcccgtcactcagccggccgcccagggagctcctgggcccggcccgggagagggcggggtgcggctgcagcctaggcgcccaggacagggcgagggcggacctgcggcaggagcgcctcctgcggggcagtggaggactgtggcctgaggcattggccgaagggtgggggattatggccccgggcactccccgaagggaaactggggctagcggcttggggcctcccagtggggaagagggaacaaaagctgcggagaccggaggcccggggtccagggcgccccctgctgggaagctgggaaccaagccttagaggtccggcaggtacagatggaaccaggcccagggcgacccctcctagggaaaccaagggtttctagcctggcgcgcctcctgccggctttgaatgacactgcgcttctatgcccgctccgttcagtgaaatccaaccaatccgcatccgctcaaaaaaggctccaagtcctggcgaacccgaggggagccgagagggagttcaaggagtccaggttttactgcagattctttggcgctagctcccagctgacaaatcaacatctcaatctgacaattagtggtcaagatgcggggtgaggggctcttacagccccggccgcttagccctcccggcgggaggcagaggggtgggcggtgctggcagtgatgaacgactccagg

SEQ ID NO: 7905 - DNA, 336 bp, Homo sapiens
  chr12:49736828-49737164
  hyper
actgacaggcgggtggcgggccgggcgggctgcgagtggacgtgccgggaaagaggccagtagcaggaggggactaaggcaagcgtttaacagtcccactgctccatctgctcccggtccttcgccttgaccctgggacttgacttccttgagctcggcctcccagttgttggagctggccctggctgggaagcaagggcggggacctaagccctcttctggggttaggtgatttaaggtctgagatgtcaaggaagggtattaggcaggtctcaagactaggcgattcggcctgacctctgagagattgtgcgtgactgtgcactcagagatggc

SEQ ID NO: 7906 - DNA, 37 bp, Homo sapiens; identical to SEQ ID NO: 6842
  chr12:51421646-51421683
  hypo

SEQ ID NO: 7907 - DNA, 54 bp, Homo sapiens; identical to SEQ ID NO: 6843
  chr12:52401605-52401659
  hyper

SEQ ID NO: 7908 - DNA, 122 bp, Homo sapiens
  chr12:54088960-54089082
  hyper
cagggcccggccggacgagatttactgggcctcgaacacggcgacagttcaaacctttgattaatcatgtttttctgcctaccccataatttagttgctctttttccctccctgcctttttt

SEQ ID NO: 7909 - DNA, 58 bp, Homo sapiens
  chr12:54144782-54144840
  binary
cgcgcagactgtccctgtggaggagaaaggcacatgagcagccaaagggacggacact

SEQ ID NO: 7910 - DNA, 156 bp, Homo sapiens; identical to SEQ ID NO: 6846
  chr12:54338511-54338667
  hyper

SEQ ID NO: 7911 - DNA, 65 bp, Homo sapiens
  chr12:54343505-54343570
  hyper
cgtgactaggtctttctgaccttgacatcacagggagcacagggaaggggggggaggggtggaaa

SEQ ID NO: 7912 - DNA, 61 bp, Homo sapiens
  chr12:54402812-54402873
  hyper
gccgccgccgccgccgcccgctcgccgcccgccgccgccgccgcccgcgccccagccccgg

SEQ ID NO: 7913 - DNA, 206 bp, Homo sapiens
  chr12:54422141-54422347
  hyper
ttcctgacatctggcttgcgattggctgggagggggtcagctgactttgtcattttgtctgtcctggattggagccgtccctataaccatctagttccgagtacaaactggagacagaaataaatattaaagaaatcatagaccgaccaggtaaaggcaaagggatgaattcctacttcactaacccttccttatcctgccacctc

SEQ ID NO: 7914 - DNA, 56 bp, Homo sapiens
  chr12:54422376-54422432
  hyper
cgccctcaattccaccgcctatgatccagtgaggcatttctcgacctatggagcgg

SEQ ID NO: 7915 - DNA, 404 bp, Homo sapiens
  chr12:54422525-54422929
  hyper
ctaattccttttaccaggagaaagacatgctctcaaactgcagacaaaacaccttaggacataacacacagacctcaatcgctcaggattttagttctgagcagggcaggactgcgccccaggaccagaaagccagtatccagatttacccctggatgcagcgaatgaattcgcacagtggtgagttttacagctccgagatataaattaaataaactgaactggctttatgaccggcttccctagaagaacgggcggagagagttttttatggccccataaaaacaatcacgctcgtctcctcaccgagacagggccccctcttctgccccctcagctcgcctctcgctcgcttgcaggggcctggcccccttggcccctgacggattggagggccccaaggc

SEQ ID NO: 7916 - DNA, 189 bp, Homo sapiens
  chr12:57619157-57619346
  hyper
gcttcctgggctggggcccccgctggggatggcagcagcagcggcggggcccgggcttgggggctccctcgggggcgcactggcggggccgcttgggggcgcgttgggagtgcctggggccaaagagtcacgcgctttcaattgccacgtggagtatgagaagacaaaccgcgcgcgcaagcaccgacc

SEQ ID NO: 7917 - DNA, 267 bp, Homo sapiens
  chr12:6344323-6344590
  hypo
cgcataacatttgttcgtggaggaagatgtgaaaatgccgtctctgcccctctctcgtctgcccattgtaggtgattaaggaagtccaggagttttacaaggacacctacaacaagctgaaaaccaaggatgagccccagcgggaaacgctgaaagccatccactatgcggtatgtcgccttggcaaagacaccctcctgcgctttctccggattgtgtctgcacacagggtgctgactgcaccagaccagtgcaaacattctaatc

SEQ ID NO: 7918 - DNA, 134 bp, Homo sapiens
  chr12:708894-709028
  binary
cggaggccctcccagccccacgactgcgcttggcctactgcctctcctcctcagcttggttggacctgcaccccagcacgcccggggggctcacattcctccccgagatgccgccactgattcaccatggtgcc

SEQ ID NO: 7919 - DNA, 182 bp, Homo sapiens
  chr12:709062-709244
  binary
ccgtgcactcaggatacctctgatgccaaggtttgagcagctctggcccagcccgcctccttctgcccagctgccagggccccgatactcagccctcccctgcctggtttctgagtctgaggaatgtgcccagaagcaaattggcgctgagattcacatttactcctttactccttccgaac

SEQ ID NO: 7920 - DNA, 40 bp, Homo sapiens; identical to SEQ ID NO: 6850
  chr12:90313473-90313513
  hypo

SEQ ID NO: 7921 - DNA, 77 bp, Homo sapiens
  chr13:111911450-111911527
  hypo
cgggctctggctcgcagatggcatctctagacctgcccggagccaaggagaactcaccgtcctgaaggaaaggacac

SEQ ID NO: 7922 - DNA, 234 bp, Homo sapiens
  chr13:113400167-113400401
  hypo
cgtgcagcggaactccagaaattctccgtcttgcaaaactcagcctctgggccgttaaactaggtgtccccacctcccctcccccaggccctggtgaccaccgttctgctttctctgtctgtgattttgaccactttagatacgtcatttcagtggactcatcctgtgtcgttttgtggcggaatcacgttctgttgtgtgtatacaccacgtttttcttgtccgttcacctgt

SEQ ID NO: 7923 - DNA, 101 bp, Homo sapiens
  chr13:113400733-113400834
  hypo
ccggctccccgcgtcctccccgggtaactggggctctggttccccacgtcctcaccggcacttggcactgtctagtgttttggtagcagccatcctgctcc

SEQ ID NO: 7924 - DNA, 129 bp, Homo sapiens
  chr13:113547249-113547378
  hyper
agaaattctgcagccaggcttggtccacgcaccgtcctcccggcccacacaccctcctcccggacctcagtctgtctctgtgtatcacatgcctgttcccagtgttctgacctcaggtgggcacggcgc

SEQ ID NO: 7925 - DNA, 288 bp, Homo sapiens
  chr13:113667314-113667602
  hypo
cggacggtgcccccacggtctgtgaggcaggcaggggattgaggacagtgcctcctggtttcctctcaggtcacagtcgctcctggtgagagagaaaaacttaccgtaaaatctgaacatccaactgcgcagtctaggctgccgtcggctgcaccagacacacattccagagaggtgtgcaccagtggaagtcaccttgccaggagcatgagatagtatttcatgctttactgattgactgtttctgtctttctcccacaaaagaagccatcgccgagacgtggttgc

SEQ ID NO: 7926 - DNA, 93 bp, Homo sapiens
  chr13:113887577-113887670
  hypo
cgagcgcgagaggagcggcgaggccgtggaccggagcctgttgcggagcctcctgggcatgctgtctgacctgcaggtgagtgctgcctgtgc

SEQ ID NO: 7927 - DNA, 45 bp, Homo sapiens; identical to SEQ ID NO: 6858
  chr13:113985425-113985470
  hypo

SEQ ID NO: 7928 - DNA, 163 bp, Homo sapiens
  chr13:114123291-114123454
  hypo
ctgtggctgagggcagaggccaccaacagggaagtgcctgggagcagaacaggctgggcgggaaagggacaatggagatggaaaagagagaaaagctgaggaggggggaggagcagtgccagacaatctcagacagcaaagccgacatttctgtctactacac

SEQ ID NO: 7929 - DNA, 677 bp, Homo sapiens
  chr13:114293940-114294617
  hypo
cgtagtgagctctggttggtggtaggtttttgtggtgctgccagccctctgggttctcagtccccgctgccagattcgacccacgctctggactccatcctgtcctgccccgggctctcttttttcctgttgctggttatgagtgaaagtcccggagggagggatctaatggttttacagtttgttccctctggggcactgctcctgatggaatgatgagtgagggagaggcagcgtgtggctctgctcagcctcctgtttctgtcgttatgggttccaggagacagggccagaagagaaccagacagagatggagtaagtgccagagcgttggcgtgctgtagtgcagacactcagcctccccgttctgtttgtgtgactgacaaaacccacacctgtggggcacagcctgtcatttgaccacaagccctgaggcggggggaggctgggtgggccgcctgcactgacggcgccatccgcctcctgccttgcagtgacctgaccaacggtgcagatgggatgctggccacaagctccaatgggtctcagtacagcggctccagggtggagactccggtgtcctacgtcggggaggacgacgaggaggacgatgacttcaacgagaatgacgaggacgactgacgtcctccccacttcagattcggcttcaggaaaac

SEQ ID NO: 7930 - DNA, 142 bp, Homo sapiens; identical to SEQ ID NO: 6867
  chr13:22243864-22244006
  binary

SEQ ID NO: 7931 - DNA, 282 bp, Homo sapiens
  chr13:30107122-30107404
  hypo
ccacaaagcacacacaacagaggagatgtgaggacaactgttagccaggtatttgtagtggagctccatgttgataacatcattgcaggagtcaccgacggtgcactggaatctggcagcagcagccagaccacagtgtatgctgagccagaagtgacggtcgactagtgctaagtgcgagaaggcttctagggcctacagaggaatgcacttcacatcctacccaatatacacaggtgtattctatcaaatatatatatccgaataaaaagttcgcaaaac

SEQ ID NO: 7932 - DNA, 64 bp, Homo sapiens
  chr13:44981967-44982031
  hypo
cggctgagtttgaagcattgagagaatatccaaccgcaagtgggtcacagagacctggcgatgc

SEQ ID NO: 7933 - DNA, 35 bp, Homo sapiens
  chr13:78271860-78271895
  hyper
cggtggtggctgccgcggccggaggcgagggcccg

SEQ ID NO: 7934 - DNA, 425 bp, Homo sapiens
  chr13:78272232-78272657
  binary
tgccgccgccgccgcccgccgcgccgccccccgctggcctgcagcctttgggtcctcggagccccccggccgccacggccaccgccgcggcctcagggggcctggggctcgggctggcgctgggcgcggggggcggtggcggcagcggtagtggcagcggcggtggctccagccccgcgttcccgggcaccttctgcctgcctagccccgcgccctccctgctttgcagcctggcgcagccacccgaggcgcccttcgtctacttcaagccggcagcaggcttcttcggcgcgggcggtggcgggccggagccggggggcgcggggacgccgccaggggcagctgcagcgccgccctcgccgccccccacgctgctggacgaggtggaattgctggatctggagagcgtagccgcctggcgggac

SEQ ID NO: 7935 - DNA, 148 bp, Homo sapiens; identical to SEQ ID NO: 6875
  chr13:95201113-95201261
  hyper

SEQ ID NO: 7936 - DNA, 288 bp, Homo sapiens; identical to SEQ ID NO: 6876
  chr13:95201339-95201627
  binary

SEQ ID NO: 7937 - DNA, 230 bp, Homo sapiens; identical to SEQ ID NO: 6877
  chr13:95201662-95201892
  binary

SEQ ID NO: 7938 - DNA, 73 bp, Homo sapiens; identical to SEQ ID NO: 6878
  chr13:96409644-96409717
  hypo

SEQ ID NO: 7939 - DNA, 97 bp, Homo sapiens; identical to SEQ ID NO: 6879
  chr13:99851706-99851803
  hypo

SEQ ID NO: 7940 - DNA, 206 bp, Homo sapiens
  chr14:100749240-100749446
  hypo
cggggcagttcttgcggcttgctttctcacacacaggactgggaactcccaggatttggtctcacaccagcaagaaatgcttctgtaacctttcagctccaaggtgggctcaggagcaagagggcgttttaaagagagcctcacccactgttcagaaagcacagcccagtgaaatgcccacgcagccggacctatgagcccatgtc

SEQ ID NO: 7941 - DNA, 137 bp, Homo sapiens
  chr14:100749475-100749612
  hypo
tggactcggaagaacttgaccaaatacactgagagctacttaggatttagccaaaagcaaaatgcagagcagagcttcctccctctggttggggccttggtgtctgatgttctgcagagcaaggttcagagtgaggc

SEQ ID NO: 7942 - DNA, 604 bp, Homo sapiens
  chr14:102939202-102939806
  hypo
cgaggctcccctgggctgaggaaggcgcttctcccgggctgctggcactgacgattgtttgctgagatcagaagtgaagacaagctctgctgccaggcgctcgccttgtgccaggctaatgcctgaagcacatctttccctcagtcctcacaacaacctgggaagtgactgcgtctttccccatttgacagaggagaaaaccctagctcagaggttcagaaagttgcctgaggcctcatagcgggcaggcggcaggggtgggacatagacccaggtgtgtgacacccgcctctgcctctcctgtggctctgaggtccaaggcctgggccaggaccaactgcaggatggcagcaagcaccaggttgtggcgacatgtcataggcttagtggcctcacacgtcgtattttaggacaaagcctacacatgcgaatctttaaatcgcagagggtcctgcaaatgagcccaggagtgaggggagatgggggttcactctgaggactggaacgtcagaagagttggttgaatctgaggattggagaacaagcggggtttatgtattttgattatgttctacatctttccactttgttttatttgttcttc

SEQ ID NO: 7943 - DNA, 121 bp, Homo sapiens
  chr14:104159197-104159318
  hypo
cgtgctgtcagtttgacactaaaacctgaagcactcggtgcagttgctcgggcctcacacagacacatcaggtttacatctgaaagtactgcctcccttccccatcacggaggccgtttga

SEQ ID NO: 7944 - DNA, 106 bp, Homo sapiens
  chr14:104159437-104159543
  hypo
tggcagtccctgcccctgtgctggtgctgagagttcgcgacagtggccaggcactgccctcccagttgtccagatccactaatcctcacagacaggccagtgcccc

SEQ ID NO: 7945 - DNA, 130 bp, Homo sapiens
  chr14:104159892-104160022
  hypo
cgaaataattgtctggccgactcgcgagctctgagtgccagccacactgacctggcccactgagagccagcagggctaggtaacctgtcttgggagtgtgagaccgccccgccctgccacgcccctcacc

SEQ ID NO: 7946 - DNA, 123 bp, Homo sapiens
  chr14:104160134-104160257
  hypo
tgttactcggcctgcagccccagtgccaggagccaccccgaccgcgacccggccaggctggctcagggaggccgaggtggcgctgaggtggcttcagcacgctggggattggctcctgctcac

SEQ ID NO: 7947 - DNA, 336 bp, Homo sapiens; identical to SEQ ID NO: 6889
  chr14:104202370-104202706
  hypo

SEQ ID NO: 7948 - DNA, 237 bp, Homo sapiens; identical to SEQ ID NO: 6890
  chr14:104618440-104618677
  hypo

SEQ ID NO: 7949 - DNA, 168 bp, Homo sapiens
  chr14:105240770-105240938
  hypo
cgagacccaccctcccgccttccaccacaggcgactgtgcttttaaagcaaaggccccatctgcaggagaatcgtccccaaacacagtgacctggaactaaccaagtggctggaccctggcccccttcacagtaaatacctcctgggccaagtccccagaacaggttc

SEQ ID NO: 7950 - DNA, 133 bp, Homo sapiens
  chr14:105241177-105241310
  hypo
tcacgtgcccaagaagacaggacatcgtcccctagagacagccccaggagtcgctacctggccccagcccttcagccccatctgggctcccactcactgtgaggaaggggtgcctggagttctgcaggacgcg

SEQ ID NO: 7951 - DNA, 227 bp, Homo sapiens
  chr14:105241428-105241655
  hypo
tccttcttgaggatcttcatggcgtagtagcggcctgtggccttctccttcaccaggatcaccttgccgaaagtgcccttgcccagcagcttcaggtactcaaactcgttcatggtctatgggcaggcaccagggtcagcaagcggcgctgccaacagtgcccagctggtcggcatgcgtggggtggcatgaggggccccagagtcggaggcagagccaggagaggc

SEQ ID NO: 7952 - DNA, 319 bp, Homo sapiens; identical to SEQ ID NO: 6898
  chr14:105546630-105546949
  hypo

SEQ ID NO: 7953 - DNA, 174 bp, Homo sapiens
  chr14:105739056-105739230
  hypo
cgcggcgtgccctccgtacggcagaccaggtagaggcaggcagcaatcacgtgggccatcttccggccgcgggtcaggtgcctgctcacggccatcttgaagaagttgaaggcggtgtccaggcagtgctggttcagctgcagctggttccccaggtggtggatgtggcgcctc

SEQ ID NO: 7954 - DNA, 53 bp, Homo sapiens
  chr14:38725469-38725522
  hyper
cccggtgcagccctgagttattctggggtcaggaacacagctggcgccgggta

SEQ ID NO: 7955 - DNA, 102 bp, Homo sapiens
  chr14:51410195-51410297
  hyper
cgggggagtgtgtgtcttcggggaggacgagtccagggcattgcctggccctgggccgcctttgcgaaagactcacggaattccaggagctacacccactca

SEQ ID NO: 7956 - DNA, 225 bp, Homo sapiens
  chr14:51410345-51410570
  binary
cctctgcaccacacttagccactcccagaggcctgagacttacgaccttttcccagctcggcgtttgtctcccctcccaaaataccaagctccagcaaggcaagatttttgtcccttttgtttagggctgagtgtccagggcagagaatagtgtccggcatacaggacaagaggcccccgtcacctcttgattaaatgctgagagtcaaagttccaaaaaagttt

SEQ ID NO: 7957 - DNA, 294 bp, Homo sapiens
  chr14:51410740-51411034
  binary
cacgtctcctctggacttcggggcaaggaccgggtgcaagggaccactctgaggggttctccacctcgtcccgcccggccgcggccggagactccgactccgggctggaccccggcccgccgtcccgcccccggttaccttggggcacttgtcgtagtagtgctgctgcgtgcggatccagcgccccaccaggtggtcgcgcaccgtgtgcgccagcgcgaagtagtagtcgcgggtggtggccacgttgcggtccttgaccagcgtgaagtgcaggtgccggttgaaactctt

SEQ ID NO: 7958 - DNA, 260 bp, Homo sapiens
  chr14:52327346-52327606
  hyper
cgctgctacacatactcacaacgctgccgccgcgctccgtgggcaactcctactactgctgggctgggctgggctgggctgggctgcgccggagctcgcctgcacagatcagctccggagaggggaaaaccacgctcctcggaccaagcctcgggagctaaggtaaatgaaacgttttccatgttgctcgtttttaattgagaaaaacgaccgtcgcttgtggttttaaggtccgatttctaagggatgatagagacatc

SEQ ID NO: 7959 - DNA, 297 bp, Homo sapiens
  chr14:55765714-55766011
  hypo
gttaatgcaggacattgctgaccagcaagaacttggggaggagatttcaacagcaatttcgaaacctgtagggtttggagaaaagtctgacgaggatgagctcatggcggaattagaagaactagaacaggaggaaccagacaagaatttgctggaagtcagtggccccgaaacagtccctctaccaaatgttccctctatagccctaccatcaaaacctgccaagaagaggaagacgacgacatgaaggatttggagaactgggctgggtccagcgcgggcaggatggatgtggtg

SEQ ID NO: 7960 - DNA, 55 bp, Homo sapiens
  chr14:55766084-55766139
  hypo
atggtctgcacctagtgggatgggtgggggcgggtagaggggggttgcggggcac

SEQ ID NO: 7961 - DNA, 62 bp, Homo sapiens
  chr14:60794412-60794474
  hyper
cgctcaagactcagacccggactgatgagctaagactgcttgcaagagggagtgggagtcgt

SEQ ID NO: 7962 - DNA, 69 bp, Homo sapiens; identical to SEQ ID NO: 6905
  chr14:61109043-61109112
  hyper

SEQ ID NO: 7963 - DNA, 62 bp, Homo sapiens; identical to SEQ ID NO: 6908
  chr14:73390972-73391034
  hypo

SEQ ID NO: 7964 - DNA, 307 bp, Homo sapiens
  chr14:88789656-88789963
  binary
ccccaccccggccgcggctcctcgcccccggcgacgccccccacttcccgctccccgaaagccattggatgtaggggtggcgcggcgcccgggcagcgcgcggcgagggcgaccctccccgcggcgcgccccagacgccgcgccccggcaagagggagcagggcgagcagcggaccgaggctcccagctgggaaggcgcgctgagcccccggcacccggctcggggcagcgggaggcggtcgcggacttgcccgcggggcggcgggaggcggtgggcggtggcggggaagccgcggaggggcgggga

SEQ ID NO: 7965 - DNA, 40 bp, Homo sapiens; identical to SEQ ID NO: 6914
  chr14:90849401-90849441
  hyper

SEQ ID NO: 7966 - DNA, 383 bp, Homo sapiens; identical to SEQ ID NO: 6915
  chr14:90849476-90849859
  binary

SEQ ID NO: 7967 - DNA, 54 bp, Homo sapiens; identical to SEQ ID NO: 6916
  chr14:90849897-90849951
  binary

SEQ ID NO: 7968 - DNA, 67 bp, Homo sapiens; identical to SEQ ID NO: 6917
  chr14:90850476-90850543
  hyper

SEQ ID NO: 7969 - DNA, 259 bp, Homo sapiens; identical to SEQ ID NO: 6918
  chr14:91757493-91757752
  hypo

SEQ ID NO: 7970 - DNA, 518 bp, Homo sapiens
  chr15:101459489-101460007
  binary
cgcgccgccctccccgcccgcccgcctcaggattgaggaagtgcgtctgggcccggccccggcgcggggggcagacggcggtgggacggccaggccccggccccgccagtgtgtccgcccggccccgcgtcccggagcgcccgcacccggccccgccgccgcctcaggtaagcgccgctcctgccggcgccccccggcggcctggctgcctcccggccccgcccggggaacccagagcccgcgcccggcgcccgcggggagcctcggcctctgcctgcccgcgggcccctgcgctccgggcggccgcgtggtcgggcacggggggccgttgcgcaggggccgcggcccgaggggcgcggagggcgtgtggggcgaccccggtctcacgtccccgctgcctcccgccgcgcccggagcccagccagcctgtgggaggggagcgcgcggggcccgagcagggaaccccgaaaccccgtccgggcagggtcgggaaagctgggaagcggaggcaagagaca

SEQ ID NO: 7971 - DNA, 50 bp, Homo sapiens
  chr15:101460335-101460385
  hyper
ggaaggccggggtcagcgaggagacgctggtggagaatctgagaaccccc

SEQ ID NO: 7972 - DNA, 124 bp, Homo sapiens
  chr15:102226045-102226169
  hypo
cgaagcgtgctatgtgctctcatgaaaaggtctgcttcgcttttaatactcaccagtgccctggacaattcatgggtttgagggcaaaagtgtccttttcaatctcaaaggtaaacatgttctc

SEQ ID NO: 7973 - DNA, 194 bp, Homo sapiens
  chr15:22876766-22876960
  hypo
cgcacgagcaccacagcctctggcatggctaaaataaaaagaccggcatgtcaaataattttcaaggatttagagcaactggaaattacaagatggtacaagcacttggggaaactatatggcattttcttacaaaggttaacatgtatctacccctgagaagcagcagttcacccttaggtatttatccaaga

SEQ ID NO: 7974 - DNA, 130 bp, Homo sapiens
  chr15:22877052-22877182
  hypo
tggatcaacactgaagtatatgcacgcagtggaatgcagttcagctgtgaaaacacagctcatccacataacgacataagagaattccaggaactttatgtcgaaaaaaaagccagacttaaaaggatcc

SEQ ID NO: 7975 - DNA, 136 bp, Homo sapiens
  chr15:31571220-31571356
  hypo
cggtgccccatccctggcatggtccccactccaccctgccccagcaggaggccagtttgtcctggatgggaagaaggcctcacgggcaggggaggctcccacgcatgccaccccttcggccgtgccctggggttcc

SEQ ID NO: 7976 - DNA, 103 bp, Homo sapiens
  chr15:40676583-40676686
  hypo
aagattgagctctgaagtaaataggcttttctccaaaggcttaatgggttgtttgttgtcttgtgttgccgcagaacacctgaatggtaatcctggcaccagc

SEQ ID NO: 7977 - DNA, 213 bp, Homo sapiens
  chr15:41805862-41806075
  hyper
acccgcggctccgaaccacaccagcagctgtccccagcagcccatccctgttgggtccacccggcaacaaaagcccttgcggtcgcggccacacccctgtcaacctaaagttgacagctcattttgccacggcagccctggccaccacttacaggggtgtgctgccgctggcgagacactccccggacctaaagctggtctggccacgcccac

SEQ ID NO: 7978 - DNA, 76 bp, Homo sapiens; identical to SEQ ID NO: 5756
  chr15:60289235-60289311
  binary

SEQ ID NO: 7979 - DNA, 76 bp, Homo sapiens
  chr15:63695768-63695844
  hypo
cgcagacgcgatcattcccaccattgcagacaatcctgttggaaagcatgggcctgaggctttgtttacctcgctc

SEQ ID NO: 7980 - DNA, 50 bp, Homo sapiens
  chr15:75250996-75251046
  hyper
cggccctcggtccctgctgttcagaaccgggatttaccctcttaccactt

SEQ ID NO: 7981 - DNA, 86 bp, Homo sapiens
  chr15:75251811-75251897
  hyper
gtgagggaggaaggatggggtgctgtgaattagggtaatgtggcaggcctggaggaagctggagtgggagagagcgggcagcgagc

SEQ ID NO: 7982 - DNA, 48 bp, Homo sapiens
  chr15:76197521-76197569
  hypo
tcccttcacctgcttcccttgaagcaactttttgttgtctgttttacc

SEQ ID NO: 7983 - DNA, 47 bp, Homo sapiens
  chr15:78236702-78236749
  hyper
cggccggcctgcgctgtcttacccgccccgtacccccgcccctgtct

SEQ ID NO: 7984 - DNA, 279 bp, Homo sapiens
  chr15:89438052-89438331
  hyper
cgccatctcccacccagggctctgccctccaccctccctacccttctggcctcgctgtccctggggcaagaaccccggtgagcgaggtctggaacccataggcatcagttgcctttgccccaggcgcccagagccggccagctgcggtccagaggcgcaggtccgccagccgcctcgcaggttgccctcagcccctcccaggactcccggggcccccggagcatccaacagatacccaggggcagggcctggggcgccgcggacggcactggaggcagc

SEQ ID NO: 7985 - DNA, 359 bp, Homo sapiens
  chr15:89438421-89438780
  hyper
ccgctcgggctctgctccctcacggtgggcacgagggtccggcgcccgcatccccgcgccgctccctccccacttgtgccccgggcgcccctcgcccgcgatcacagcccatctcagcccgggcctccgcagtgcccggcccacgcctcctgccccttccccggaccctgcccgggaggtgtggggacccgcagggcacccaaagcggtaagggaggaacccggcccgcacacagccccagaagcccagcgacccctaagccacgtaccgtccccaggcagctcctcgacggctagagctctcgggggccgcgagctgtcccggtccaaggcagcagtctgatttcggggaaattaaaa

SEQ ID NO: 7986 - DNA, 101 bp, Homo sapiens
  chr15:89438863-89438964
  hyper
caagggctgggctcgaagggaggagctgctgcaggcttgagcggtctccagactcgctgggaaccaccgcaaagagggtgtgcaagagttgaggccctcac

SEQ ID NO: 7987 - DNA, 106 bp, Homo sapiens; identical to SEQ ID NO: 6938
  chr15:90501638-90501744
  hypo

SEQ ID NO: 7988 - DNA, 85 bp, Homo sapiens
  chr16:114357-114442
  hypo
cgctgtgggaaggccctgcgggcagcccggggacccaagaggggcagagtgtggacacgcccgaagcgtacttgtcggctgctaa

SEQ ID NO: 7989 - DNA, 147 bp, Homo sapiens
  chr16:12132253-12132400
  hypo
cggggcagctcttctcaacaccccttcctggcacttgttcttgttggcattcggctttcaggtgtttggagaaccagaagcccttgcccgctttttgacttaaccccatgtttcaaagcagatcagtgtatatccctaaattaaatt

SEQ ID NO: 7990 - DNA, 376 bp, Homo sapiens
  chr16:12132450-12132826
  hypo
acattaattctggcagtggaagcggaaccctgctgggataattcttatcatcatcagcatcaccctgactagctttaaaaggattctgtagcagtaagcaatttgcagaattgaaaggtgaaaacacactttaaagcgttcatgtagattcaaggtcggagggaggtgactgcatttttcaagacaggctgcaggtgagagtcacttgactggaaatgtgatggacgtaccgacaatggtctggggtatttcgaaatacgttgttggccagctggcccagggtgttgttgtcgccagattccccgtcctggtttcttgagtgaggcggagaatggaaggaaggctgttttgtacagttgtgtggagtagactgatc

SEQ ID NO: 7991 - DNA, 96 bp, Homo sapiens
  chr16:12289463-12289559
  hypo
cgcccaagagattctgcagacctgtgctcgttttctcacgcaatttttcaaggccttacgttttcaatgttgccctgttcacttaattcgctaaac

SEQ ID NO: 7992 - DNA, 53 bp, Homo sapiens; identical to SEQ ID NO: 6945
  chr16:1472227-1472280
  hypo

SEQ ID NO: 7993 - DNA, 108 bp, Homo sapiens
  chr16:15129362-15129470
  hypo
cgctgcctccaacgccctcgggcagtcgcaccaagcagaggcttccaggtaagtgacgcctctgcaccgagttcaggtaacaggtttcccctgttgactgttacttgc

SEQ ID NO: 7994 - DNA, 301 bp, Homo sapiens
  chr16:1652282-1652583
  hypo
cggttcccatattttgatctttcatactctcgagcatggtcagaaagggtcaaggtctgaaaacagcgtcttgcgcgtgttgactcaccctgtccccagacagcaggcagtttccactggggctccaacggagcacggtgatgtcggctgtgtgtgtcaggggcatcgtgtgctgctccttgtcctgcttgttaaacaccgtcacttctccagtctcccagcccacagccagcaccagccgcgtcgggtgccagcacagggaagcaacccggaacggcctctcgacgtgtgtatctggcac

SEQ ID NO: 7995 - DNA, 422 bp, Homo sapiens
  chr16:1682411-1682833
  hypo
cggcttctgctcagagcgcagcttccagcaagcccgccggacctgctttctggcattttctcaccagccgcttggcctggggctcctcgccttgcagcgctttggctgattgtgtgctgtctaactcggtcaaaccaagttgccaggaagtggcccgtatcccatgctccagggttcttaccactgcttttctgagctatggtttgtgtgtttccagtggctctgagtgtgcgtgagttctgggtccctggctcacctgaagcctgtggtctccactgcaaatgatagcaccatggtccagcgaggggcttgggccgcaggcaccgtgcctggcgctggtcttcctgggggacggccagccttcccaggcctctcgccctctacactgggacccaggtctgcgtcggccctcgttcagtcac

SEQ ID NO: 7996 - DNA, 103 bp, Homo sapiens
  chr16:1704554-1704657
  hypo
cgatcacattgttctgtggccaccgtctctgtccagctccagagcattttcatgacgctagaagaggccctgtgcacctcagcactcactcctctattctcca

SEQ ID NO: 7997 - DNA, 38 bp, Homo sapiens
  chr16:1704800-1704838
  hypo
gttcacccatcatagcgcatcagtacttcattccttcc

SEQ ID NO: 7998 - DNA, 195 bp, Homo sapiens
  chr16:1730112-1730307
  hypo
cgatgtgggaccaggagtttaaactagtgctcagagcgaatccggtttctggttcctggtggccagagttttgcaccacccacatcagtggggggagggactgcatccccagccctgtcccagttgtgtgcatttagtacgtttcctttttgtttgtgctgcctggcactggctgcccggtaaatgatggtgttt

SEQ ID NO: 7999 - DNA, 105 bp, Homo sapiens
  chr16:1730761-1730866
  hypo
cttccttcaagctggaacatttctatttgtaaggaatttaatccaagtttatttctcactgcttctctctaagcctgaccagtcccctcatcctttctgaaactc

SEQ ID NO: 8000 - DNA, 728 bp, Homo sapiens
  chr16:1737575-1738303
  hypo
cggtaccactttgcccgttccacatggtctcatgcccagtggggagcccggccccttgcggttagtgagccagcctctactcctggtcacagtgtgtggtgccagccatcatggctccccatgccaggttcctgcttctcatggtccttctcacggttgttgggagttttcctatctctccagtgctcttggaagacggtttatggtatattatcaagggaagcctgaaagggaaactgctagttgtgttcaccacccaacgagatctggagtcctgccttctttctacacttagtcacacagacctagccccacagccctctagttgcagggcttgattgagaaaagtatgcagaggccgagagtgtgtgtgaccgaccacatcatagccatcgaatgtttatcaattcccattcagtgtttcagtgaatcttcagtagtctctgtgttctttgttagtcacctggtttagatgttccatgaattgttcttcctcttctagcaatgatgaccaacgtctatgaattgttaatatttaccggggactgtgctaagtgctttgcatgtgtatttttcatttggtgttcgctataactaggagtaggttgttttgctcctttcacagaggaggaaacaggcttggaaaaggtcactggcatgcataaatcccaagctagtcagtagcagagctagtcggtagcagaactagtccgtagcagagctagtcg

SEQ ID NO: 8001 - DNA, 118 bp, Homo sapiens
  chr16:19708387-19708505
  hypo
cgccagccagtttgcgagtccgtgcccagcaggtgccagcccgcgtgccctgtgccaaagcgcttttctcttgtagcccgcgggcctgggcgcccacagcacaacctgctccctgatg

SEQ ID NO: 8002 - DNA, 47 bp, Homo sapiens
  chr16:19708561-19708608
  hypo
ttgccaaggcaggctcaattttgcccggagtggggaggggaggtgcc

SEQ ID NO: 8003 - DNA, 280 bp, Homo sapiens
  chr16:2035689-2035969
  hypo
cggggagctgcagggtcagccctgttctgggagtgcctgtaccttggagcataagggcactcccaggtgtagttcacagcagtgccccagctctccttccttgacagcagacagggaactggcaggggcagtggagccgctgcgtcctctcattctttacctgctctccctacacaggctgtgcaggaaccacccagacacccgcacccgggcatgcttcacacagtggctgtgccacctgcacaatgaagtgaaccgcaagctgggcaagcctgacttc

SEQ ID NO: 8004 - DNA, 86 bp, Homo sapiens
  chr16:2040762-2040848
  hyper
cgtccctgggagggccctgctgctccttccctccggcaggggaggtggcagttgggtgccgagctctgggttttgtccaggtggca

SEQ ID NO: 8005 - DNA, 48 bp, Homo sapiens
  chr16:2042503-2042551
  binary
cgggacctcgcgccacgcggcgagcccaggcgaggcgccccaagcctc

SEQ ID NO: 8006 - DNA, 73 bp, Homo sapiens; identical to SEQ ID NO: 6951
  chr16:2278311-2278384
  hypo

SEQ ID NO: 8007 - DNA, 106 bp, Homo sapiens
  chr16:23497832-23497938
  hypo
cggcagcgggatttctggttccaatcaccaccttgctgcccttgagggagactatggctgttccccagagttcagggctaggagccactctttctcccaggcaacc

SEQ ID NO: 8008 - DNA, 275 bp, Homo sapiens
  chr16:2391769-2392044
  hyper
cgggagtggggaggtgggtcggggtgtccctgggccggaccgggtcgtgggactgggtcgccccaggcaggagagcctgggaggggcgggcccccttggcgtggcagggagaggtggagtgagggactcccgggctccagcatgagggcgggcgccgcgcggggccgacagttgccgcgggccggggccaatgggtccccgagcgccgccagcggccggaccacagtgaggtgcgtccgtggtcccggcgccccgggtgagggagggctgctgcc

SEQ ID NO: 8009 - DNA, 273 bp, Homo sapiens
  chr16:2546133-2546406
  hypo
cgagcacagcggcgctatggactctccaggatacaactgcttcgtggacaaagacaagatggacgctgccatccaggacctggggcccaaggagctgagctgcactgaactgcaggaactgaagcagctggcgcgccagggctactgggcccaaagccacgccctgcggggaaaggtgtaccagcgcctgatccgggacattccctgccgcacggtcacgcctgacgccagcgtgtacagcgacatcgtgggcaagatcgtgggcaagcacag

SEQ ID NO: 8010 - DNA, 532 bp, Homo sapiens
  chr16:2546506-2547038
  hypo
tgcctggccaaccagttccccgacatctccttctgccccgccctgccggccgtggtggccctgctgctgcactacagcatcgacgaggccgagtgcttcgagaaggcctgccgcatcctggcctgcaatgaccccggcaggaggctgatcgaccagagcttcctggcctttgagtcgtcctgcatgacgtttggggacctggtgaacaagtactgccaggcggcccacaagctgatggtggccgtgtcggaggatgtcctgcaggtctatgcggactggcagcgctggctgtttggggagctgcccctctgctacttcgcccgggtctttgacgtcttcctggtggagggctacaaggtgctgtaccgcgtggcgctggccatcctcaagttcttccacaaggtgagggccgggcagccgctggagtcggacagcgtgaagcaggacatccgcacgttcgtcagagacatcgcgaagacggtgtcccctgagaagctgctggagaaagcgttcgccatccgcctcttctccc

SEQ ID NO: 8011 - DNA, 50 bp, Homo sapiens; identical to SEQ ID NO: 6954
  chr16:2770043-2770093
  hypo

SEQ ID NO: 8012 - DNA, 168 bp, Homo sapiens
  chr16:27750033-27750201
  hypo
gagtccagaagttacctacaggctgccttgaggcagtggtcctcacacggcatcctcctggctcccttccaactgcagctgccgtgaacatgggacagtccccgcatgtggacagtgccctgcctcaggtgctcgtggggtgctctgccgtgggagcacactcagctc

SEQ ID NO: 8013 - DNA, 173 bp, Homo sapiens
  chr16:2806405-2806578
  hypo
gcaccaacggctacgtccagcgcaacctgtccctggtgcggggccgccggggtgagcggcctgactacaagggagaggaggaactgcggcgcctggaggctgccctggtgaagcggcctaatcctgacatcctggaccacgagcgcaagcggcgcgtcgagctgcgatgcctc

SEQ ID NO: 8014 - DNA, 31 bp, Homo sapiens
  chr16:29153254-29153285
  hypo
gtggaataatcctccgtggcacgagggggtg

SEQ ID NO: 8015 - DNA, 55 bp, Homo sapiens
  chr16:29153320-29153375
  hypo
atcctccgtggcatgagggggcggtggaataatcctccgtggcacgagggggcag

SEQ ID NO: 8016 - DNA, 173 bp, Homo sapiens
  chr16:29857096-29857269
  hypo
cggtttggttggtggccgctgcccttggcgctcctgttcctgctctggccccatgccagcctctcacctgcgctccgtctcctccaggcatgaggctcagagactggagcaggaagcccgcggccggcttgagcggcagaagatcctggaccagtcagaagccgagaaagctc

SEQ ID NO: 8017 - DNA, 671 bp, Homo sapiens
  chr16:30566776-30567447
  hypo
cgcccgcagtccgggcacgggtagggcttctcgccggtgtgggtgcgcacgtggcgccgcaggtccgaggggtaggcgaaggcgcggccacagtccgggcaggggaagggggtctcgccgctgtgcacgcgccggtgctggtagagggcagagctctggctgaagcggcggccacagtcggcgcagccatagggtttctcgccggtgtggacgcgcaggtgcgaagtcagcgccgagcgctgcgtgaaggcccggccacactccagacagcggtggggccgctccccacgatggatggcccggtgtttgctcagggaggaagcgtggccgaagcccttgccgcagtcagtgcagtggaagggcttctcgccagtgtgactgtagacgtgctccaccagtgtggagcgccaggcaaagctcttcccgcacacgtagcagccatgacgctggtcagctcgggggacaggggggtgggcacagagggaggggcgtccccggtgcggtgccttggacagctgctcccaaccataagggggcccggccgagggggcttggggagacttcagcccaggagacccggcggccacagggtcgggcttctccagggctcccgtcccttccctttgtctttcctttttcttgtttctggaatctgctgagagataaagagg

SEQ ID NO: 8018 - DNA, 105 bp, Homo sapiens
  chr16:30567509-30567614
  hypo
gcctgctggatccccggctgctcctgggagatggaggagtgacacctgttcctcggctgcagagccagacagagccgggagggagagaacagcccattccgcctc

SEQ ID NO: 8019 - DNA, 189 bp, Homo sapiens
  chr16:30620879-30621068
  hyper
cggatctagagcagccggttcccagtcatcggtgtttcgttccaaccaggagatgagggctggtttgggacctgcgcaccctggggaaagagaacaaatcagaaggccagctcctagatcacgccgagtagtatctccccgacggcacctcctgctaagcccctgcccacctcccctgacaacctggtc

SEQ ID NO: 8020 - DNA, 891 bp, Homo sapiens
  chr16:30621123-30622014
  hyper
cgcgccccgcggcagcggatggggccggcctcaccgagcgcgcccaggtgaccgtaggtctcccgcatcacgtcccggtacagggccctctgcgcgggccgcaggcagccccactcctccggggagaagtacacggccacgtccacgaacttcagagccctcggcctcctgccccttttccgactgggtctggcctttcctggtccctgcgcagggagcggagccgaaggtggcgccatgggacccgagaagccggcgccacggccttccgtgtccaggcctcggccctcgggcgctggcggcccctgggatcgaggagcccctgccggaccagggctgagcgtggccggggaggcccggagggaatcggaattggtcgcccgcggggctaacggaaaccttttgctgttattcaggaaactcctgcccgaacttgggtgaaaggcaccggaagatgccttcggggaaaatggcggcgctgctaccgcaccgcctttgcctggaacacaggcagcttccagctatcgattttattgaccggagcgccatgccggcttcctaacctctttgccctcaagtgtaatggcgctgcgattgggcttcacgccgtcttttttcccctccccaatacgcgcgttcattggacgagagccgaagatcgagcgttctgattgggtgctagcaaaggcggtccgtttgaacgaagccaagagctgcataagggcaggaagctggactgctaggatcaggcgactacaaggagttgtgaagcgacttgcaccgacctgggggcagcaagaggccccggggctgctttccgctgttcgactctggcaggctcagccaatcactgaaggagggaacgatttgagcgatggagccactctggcc

SEQ ID NO: 8021 - DNA, 103 bp, Homo sapiens
  chr16:3078252-3078355
  hyper
cgatcaccacctgcatgtcgtcctgcgggaggccgtggtcggctcagcgccggtcccgccccttgccccgccccgcacacgggccccgcccctcacctgccag

SEQ ID NO: 8022 - DNA, 335 bp, Homo sapiens
  chr16:3078384-3078719
  hyper
ctggcggatggcgcgcagcagctcccgagacagggagtctcgctccagcgagacgcggttgagctgcagggacagctccagggccctaggcgggcaggagcagaagacgcgtttgagggcgctagggcctcagggagccggggtggcgggggacttctgtacccgggcgggaggagggctgcaaacacctagatcaaggaggtcagggggcccctgggtgggagtggggatcattataacccgtatcagaagaggaatcaggagcccaggagggcccagagggcgctggggcggtggtcaatggcttgaggcttacttgttcacggcctcgtccc

SEQ ID NO: 8023 - DNA, 201 bp, Homo sapiens
  chr16:31138407-31138608
  hypo
cggtaagtggggctgggaagctgcctgcaggtcccccgtctccccttgccgaggagcccctgctgagccgtgcactgtgcctcactcccaccctgcctgcagatcaccaaggtgaagtatgtggacaagatccacatcgggaactacgaaattgatgcctggtatttctcaccattccccgaagactatgggaaacagccc

SEQ ID NO: 8024 - DNA, 314 bp, Homo sapiens
  chr16:3193333-3193647
  hypo
cgacccctccttccacccatgctggttccttctctttcacctgctagtggcctcagggcccctggctgaggggaggcgggggccggtggacaagacgctctggtcccttggtaacaggtgtgcatgtgccagccctctctgcccctaggcctttcttagccaaccttccatgcacacatcatcctgcggtcactgtcatggtctccgtttcccgtaagaagcaagcaaggtctcgctgtggacaaggctgattccagttggtgatttttacctctgggggcctggtgctgtgtgcatgcgtgtggcgggtggcc

SEQ ID NO: 8025 - DNA, 212 bp, Homo sapiens; identical to SEQ ID NO: 5982
  chr16:3222239-3222451
  hyper

SEQ ID NO: 8026 - DNA, 97 bp, Homo sapiens; identical to SEQ ID NO: 6960
  chr16:3537877-3537974
  hypo

SEQ ID NO: 8027 - DNA, 179 bp, Homo sapiens
  chr16:3811586-3811765
  hypo
cgcagacaccgcctcctctccagggcacgtggctgcttcagacctctgacagcagcctgaggtccgggcaaccaggtaaaaaccccgacgcagcactccccacgcacacggtccccagcacttgaaggtgcaaaggcctggtccagggtgcagacgtgcccttcacagtgggaagcgtc

SEQ ID NO: 8028 - DNA, 263 bp, Homo sapiens
  chr16:3821348-3821611
  hypo
cgtgagccaccgcgcccagccaaatgtatgggaatttaatcacattttcttgggagtgttctgcttgtgaaaattcatcgagctatacacttgtaatgggcactcctcaataacggtaaaactacacacgtttcttatagtctgatttatataattaaaacaaccattgaaacttatggcttaaacacacacatctacagcagtcccctcatatccactcggatacattccaagacccccagtcttggaacgcctgaaactgc

SEQ ID NO: 8029 - DNA, 49 bp, Homo sapiens; identical to SEQ ID NO: 5984
  chr16:4363872-4363921
  hyper

SEQ ID NO: 8030 - DNA, 158 bp, Homo sapiens; identical to SEQ ID NO: 5985
  chr16:4364080-4364238
  hyper

SEQ ID NO: 8031 - DNA, 59 bp, Homo sapiens
  chr16:4719497-4719556
  hypo
cgacgggtccctgtcttgggtgagcatatatgttttgcgtgcccgccatgtacagggac

SEQ ID NO: 8032 - DNA, 105 bp, Homo sapiens
  chr16:4723492-4723597
  hypo
cggcagccctcggacgacgagaacagcgacaacagcaacgagtgtgtggtgtgcctgtccgacctgcgggacacgctgatcctgccctgccgccacctgtgcctc

SEQ ID NO: 8033 - DNA, 256 bp, Homo sapiens
  chr16:4787730-4787986
  hypo
cgggggtggctaggccctcagggctctgcctgctgccttgtcctccaaaagccctctcatttgtccacagtcggactatggggaagaggagctgttcatcttccagcgaaaccaaacctccctgattccagacctgtcggaggagctggctgaagatcctgccgatggcgacaagtccagggcctgggtcgctgcagctgaagagtcccttcccgaggtctgtgggacacagaagagtatacgcctgtgtgtgtgc

SEQ ID NO: 8034 - DNA, 161 bp, Homo sapiens
  chr16:4845976-4846137
  hypo
cgtcgcccactgctgctgctgcagctcccccgggccccgcagggaaagccccaggaaggtgagcccctggaaggtgagccctgccggcctctgggacctgcacggaactgtactgggggtggaggcggaaggtgaggggagtggcgggaagggtgctcatc

SEQ ID NO: 8035 - DNA, 119 bp, Homo sapiens
  chr16:4920116-4920235
  hypo
cgttggctcctagctttcctctccacgtacggtgagctgatgaagacaggagttgcagtgagctgcagccggtggtgactgtgttttgttcttcagcatagaggcgcagactcgggagc

SEQ ID NO: 8036 - DNA, 201 bp, Homo sapiens
  chr16:4920289-4920490
  hypo
gcagcaaggatgccctgctcaagcgtgctcggaaacttcacctctatgaacaggtgggtgactctagagtgaagccctttggctttggggtcctggcggaggggtgactgagtcttaagcaatgatgcgtctgctgccccactgcctccttgtgatcaccccatcatgcgtcctgagcgtaagagcgatgtgtaaacctgc

SEQ ID NO: 8037 - DNA, 314 bp, Homo sapiens
  chr16:4920526-4920840
  hypo
tgaaggagcctctccagaagctcaaggaagccattggcagggcgatgccagagcagatggccaagtaccaggacgaatgccaggcacacacgcaggcaaaggttgccaagtaagtttgtcctggcgcttgcaggtgcaaccctcccgtcttgcctcttcccctcccgtttctcggtgtgtactgccgtttcccaaggagcctcttggctcttctttggccttttctccttctctgtgaagtcccagtagtgcagagtgaggggagaggcggtgggcaggagcaccttggggccccatgtaattctattcacccc

SEQ ID NO: 8038 - DNA, 116 bp, Homo sapiens
  chr16:54128713-54128829
  hypo
ggtagagcatagaagtttagtctcatgagatgactccattcctaagggaatctagaggctttctgcggagcaccgtgacatagatcatatcatcctcctgcttaaaaccctccggc

SEQ ID NO: 8039 - DNA, 48 bp, Homo sapiens
  chr16:56666592-56666640
  binary
agcagtcgctccatttatcgcttgagatctccagccttaccgcggctc

SEQ ID NO: 8040 - DNA, 165 bp, Homo sapiens
  chr16:56671950-56672115
  hyper
cgagagtgagaggccgacccgtgttcccgtgttactgtgtacggagtagtgggtccgagggacctaggtgtggacagggacaggcaaggcgacagcgaggagaaacgaaaatcacatcggtggcggttgctctgcacacaactcgctcgctaccgcacgctccac

SEQ ID NO: 8041 - DNA, 123 bp, Homo sapiens
  chr16:56703438-56703561
  hyper
cgggagtagcaggtaatctcagggaactgggcaggcccggcagggtgaaacaagcagctcacccgggtgcacagcccctcccgcgggagccgctgcgaaagggccgtccccgcggtgtgcacc

SEQ ID NO: 8042 - DNA, 216 bp, Homo sapiens
  chr16:56703621-56703837
  hyper
cgcgggcggctcggactcagtgggtcgggtgcaagggtggggcagggtctctgcacccggctccctcccctgactagaaaaggagctgccaactgttgcgctccaccacgccctccacgtgttccactgcctcttctcttctcgcttgggaactccagtctcacctcggcttgcaatggaccccaactgctcctgcgaggctggtaaggaacgccc

SEQ ID NO: 8043 - DNA, 61 bp, Homo sapiens
  chr16:56709754-56709815
  hyper
cgcgaccacctgggaatgggaaatggccctcagggtggcaggggcggcgcgtacctctggc

SEQ ID NO: 8044 - DNA, 783 bp, Homo sapiens
  chr16:67204024-67204807
  hyper
cgcggggccgctgcaatctctgggaagcgggggcttctgggtcgcgctcagctctgcaatgcatgcgttctgtgatcctggtgagttggtatccttctctgaacttcctctgtgacaggcagagaagaggggtcgatgacaagatagatggaaagcacctggaaattggcaggccctgagtgggcgctggacgtgtggggccgcgggccgaactgccccctcctggcctcatctcctggtgcgccccgggtggggagggaaagctgactacatgcacgtccccagccagcgcgcggcctccgcggtgtggctcctagtgcccggggaagaaccctcaccctccctattcccagcagccctggccgccccgcccccgccgcagctgctgcacccacccccaccctgcccggccctttctgcaccgtcatctcctgccccgccgaggcttgacccgtgagtggggacgcccaaaacgggccagaccgggagccccactcccggctgtgggagggaagggaaaccgagattgggcagaatcagcgccccaccacccgctgcggcgctcgggggtcgggggggcggggtgggtaggactgtgggccccgccctgccgcaggactctcaagctctgggactgggtggagggaggtaaggggcggggggggaaaatccgtgcagtcgcacatgcgcaaaggctcttcactgtcccaagaccctggcttcctggccaaagagcccgcgcagcgaggtggggttgggggctgggacccagctccgtgcccc

SEQ ID NO: 8045 - DNA, 62 bp, Homo sapiens
  chr16:67472428-67472490
  hypo
cgctagaagatagggatgtagttgtcgattttggcgcggtggcgctgggcgatacattcagc

SEQ ID NO: 8046 - DNA, 256 bp, Homo sapiens
  chr16:67678786-67679042
  binary
ggcggggtggaagccgggggcaaggacccgctggaggcccgccacacccgcgaccctcccggccacgccactgcccaccccgacgtctaccctggcggagaagctcctgggcgacggggcgggcgggcaggtgggactcggcccccctcccacaaccccgctcccgggcaagctctcgagccgcgaggccggggcggggaggggccgggccgggggcggcctggcaggaagcggcgcgcaccttccgccgccggag

SEQ ID NO: 8047 - DNA, 134 bp, Homo sapiens
  chr16:68118915-68119049
  binary
agtgcttcagcaccccttcctcgacatgagctccgcccaatgaggagaagggtcttctgcattggccggtggtggtcccctatccaattagagaggctaacggccttctctcgtctggtttagaaggaatcgcc

SEQ ID NO: 8048 - DNA, 395 bp, Homo sapiens
  chr16:70433888-70434283
  hypo
cgcccctcttctctcgactgtggattatcgatgaggtattgctgggtccactcaatgaaccatgaacagtcctgtcagctccgccgttgggggagaacctggctgtgtcaggaggtgtggttgctgggcttggtcctgcccccggacagccctgagggcagttgtctacatccatctgtacattatggacaaagtgaatgccagcgtccctggtagcactgacagcctgaggccccatgctgcccttgcaggcaagaacagggagaaaaggccacttgtaggcagtttgggtctcagccataaggaaaggagctcagatccatgccaagcgtgagggagccacaccaggtgagaggaacgctgagaagggaacccctgagcactggctgtgtgcc

SEQ ID NO: 8049 - DNA, 256 bp, Homo sapiens
  chr16:740914-741170
  hypo
ttaagtctcaatttcagtattttaatgccatcacctattttaatccccaggtccatcatgacatctggtcatccctagacaagttccgagtgcccccagtcttcccctccttcctcactcctcgacctcgggagcagcctcccaacggctttcctgggtccgtctttcccctttgatcagaaacccgcacagaagtcaggcaccaggtcttctgcctgaggcctctggcagctcccactatgctgtgaatgaaccc

SEQ ID NO: 8050 - DNA, 222 bp, Homo sapiens
  chr16:75222813-75223035
  hypo
cgtagccagttgtacccgtgacattttgatggcccatatgggaagtgctcgcggactgcttagggagtcctcccctcctctctccctttcttctccaactccagcctctcagtggacagcgcccaagcctggagacaactgaaggtccccagccaggtctactccctagtggaccagaaggtcccggtggagagatgcctgaccacccgaccaccgaccacc

SEQ ID NO: 8051 - DNA, 78 bp, Homo sapiens
  chr16:81632835-81632913
  hypo
cggggcaaggagaggtcatattacctgagggaaaccaggggagggagagtgtgaacggcatttgagatttcttctggg

SEQ ID NO: 8052 - DNA, 116 bp, Homo sapiens
  chr16:84328207-84328323
  hyper
cgccccagcctgcaaggaagtgctcattatggagagtggagagtgacaggccactcccggccacgtctccaagcaagccggtgccccctcctcctgctgccaccgcccactgagct

SEQ ID NO: 8053 - DNA, 127 bp, Homo sapiens
  chr16:845724-845851
  hypo
cgctggtgtccggcatcgcgccagccacgcgcagccgggccacgccccaggccctgctcctcgatgccctctgcctgctcctggacattcttgcacccaagctccgccccgtgagtgccgtccccgg

SEQ ID NO: 8054 - DNA, 69 bp, Homo sapiens
  chr16:84780671-84780740
  hypo
agaatcttgtgggaccatcatacgtgcggctcattgttgaccgaaatgttacgccgcgcgtgactgtac

SEQ ID NO: 8055 - DNA, 591 bp, Homo sapiens
  chr16:84822987-84823578
  hypo
cgcgggaggtgatggaacacaaaaccatgagccatggctttgctggggaatgctgtggatctggtgtgtgatagagagagagtgtgtgtgcgtgtgtgtgtgtgtatggcaaagtgcacaaatcgcacgtgtacacctcagtggctttttacacatttagacgtgtgtaagtgtatagagcatttccacaccccagaggccccgagctcactccctcccgctctccccatccctgacgctaacctgatgcctgttgtcgtacatcagcttctcaacctcggcactattgattgccatttggggccaataattctagggggtggtggctgtggtgggcactgtaggatgtttcctgtgtccctggccctgacctactagatactagatgcacccaccctctccatcgtgacaaccaaacgtctccagacattgctaaatacaccctggggacacagtcaccctggctgagaaccagagcgtgggtcactgtgacttccgcgcttcctctccatggcatcgcacggtgccatgtgtcctgccctccgtgttcttctctctacgctgcttctctgaaatccctccagcggtggc

SEQ ID NO: 8056 - DNA, 177 bp, Homo sapiens
  chr16:85009963-85010140
  hypo
cgggccaccttttctgggtctcgtgggcagtcgcctaaatcggaagcccacaaagggattcatccagaggagtgaggggggccccccaaagacggacttcatcccttcccatcgcagcctccgctcccatgtgggcttctcacttttcaatcgctcgatctcctggaagcagaaaga

SEQ ID NO: 8057 - DNA, 233 bp, Homo sapiens
  chr16:85010169-85010402
  hypo
cggcagaccccaccaagcctcagaatcacaccgtgctcaagcacagtgtgggctcgatggagggtaggtgagtgaactctccttcccagctctgccccgatccagaccccgtggcctctgtgagcccagcccggctgcagccacgtggccagcccagactaccacaatggccctcccagccaggcaccaacatttgtcgctcgttagttactgtgtacagacatttactgagc

SEQ ID NO: 8058 - DNA, 167 bp, Homo sapiens
  chr16:85328796-85328963
  hypo
cgcttcccagggcctccgcacacaccggtccaccttctgcctgaggatggcctgtgctgggcatttcctgggaatggaatcctgcagtacaagctcttttgtggcttctctcactcgggaccagcctggggcgaaaccctgtctctactaaaaatacaaacaaatca

SEQ ID NO: 8059 - DNA, 121 bp, Homo sapiens
  chr16:85328994-85329115
  hypo
gtcagcacatcagcccttttatggctgagtgattattccaccgtgcgcgtagaccgcgtcctttttgcccatccaccgccgatggccgtttgggctgtctccacctttcggctgctgtcac

SEQ ID NO: 8060 - DNA, 209 bp, Homo sapiens
  chr16:85699437-85699646
  hypo
cggttacttaaatgttccccgggtcttggttctttgcgctaggtctttgttaagtgtaagctctagagaccaggatctgcgtgctggacactcagcctgttaacttgcatttcttaatattttccttcactttgtctctaaaagaaccagccacgcagcaagcctctctggatgtggagaagccggttggtgttgctgcttccttgtct

SEQ ID NO: 8061 - DNA, 178 bp, Homo sapiens; identical to SEQ ID NO: 5759
  chr16:85932121-85932299
  binary

SEQ ID NO: 8062 - DNA, 465 bp, Homo sapiens
  chr16:87417704-87418169
  binary
cggcgaccacttcgcgccgcggcttttgtggagataggggtcgcccctcgcgcccgtgcgtcccgcttccggcgcccgaaactgtgccgcgccggccggtgagtagaaagatgcgccttacagcctccaaatacagaggcagcagccagaaccccaaagggcgcctagaagcccttttgtccattgaaacaacgcgcgttccatcgtctccgccttatggtaaccaaaaggcccgagctgcggagctctgcagggaccttcggggatcccgagctccctgcggaagccccggggagggcttggaggggcggcggccggcgcggcccaagagatccggggatgcgcgcccggtctggaaagggaggccctgccatgcggcgccgcccaaagggcgcctgttcctgcagctgctgggagccgcgcacgcctgctccagctgggctccgccgaggccgctgagcgggg

SEQ ID NO: 8063 - DNA, 50 bp, Homo sapiens
  chr16:87418200-87418250
  binary
aaggcgtcctctcacctgagcagccgcgcacgtcgccgtgggctcgcctc

SEQ ID NO: 8064 - DNA, 496 bp, Homo sapiens
  chr16:87738520-87739016
  hypo
cgcgcatgggcggcagggggagcatggagaacaagacgattcatcctttaaaatcccacaaagccctgcgaggaggagctgtggccctgctgccaagcgggccggccagagtgcctcccctggtacgcccgcccaccctgcagtcaggggtctgggggccgtgtgggagggccgcagccgagggaaaggcttcctaacagccagcagctcaccacagcgaggaactgggcaagaacgtggcaccgagtacggcgtgtcccagccgcgccgcgccagcagctcccgggagacagaggccctgggctttcgtgccggccgctcacgccctacggtggctatctggccaccaagtagttcggtaaactgggccccggcagacagagcagaccacaggcccgtggggcaggcagagctccgcccaggaatccaccaccctgtgttgtgttccgcgtctcccacggttccacactgaaggggccctgttttcatcacggcc

SEQ ID NO: 8065 - DNA, 268 bp, Homo sapiens
  chr16:88101544-88101812
  hypo
gtcaatgccccctccgtccccaacagacccgccctccccccactgtctgcctccttgtgtcgtcagtccgtgacacgccacgtgtgtgatgaggaggtgcttggagtggcactgctctgcgtgtggccacgcacttcgtttccattttcacacgtagttcagagctgggtgtccgacagaggtgcccgaggtggaaagcgtcgtgcactcgtcccacctgtggcccctgcagagctccggctgtgtggcacgggctcctgagagctgg

SEQ ID NO: 8066 - DNA, 343 bp, Homo sapiens
  chr16:88101969-88102312
  hypo
agtcaagtccctgcaccgcgcagaccattgcctggtgttcaggagttttcaaggcctcggcctggtgggaatagttgagaaacgctggttcaggcagcttgctttattcacagccctgagacacctctgggacagcccctgaggatatttttcccggaactttctcggggccaggagtgtgcctgtgctgtgatgagtgggaaacgcagtttgtgcagggcctcacagaagagcccactggtgcgggtgctggctgcctcctccagtgggcgccagctcggggtctgtggcaggaacgtgggtggctgcggatccacccaggacagagtgactgcctgggcgc

SEQ ID NO: 8067 - DNA, 171 bp, Homo sapiens
  chr16:88106152-88106323
  hypo
cggagagctccctgccccactcgttgaaggtctcagctcggggcagagccagtacctcgggctgctgtggccctagcgtccacgaaaacaaagcgcagggctgctgtgctctgtggatggcccagcgggcccaggccagcatctccatacctcgcaggcagaagcccccga

SEQ ID NO: 8068 - DNA, 96 bp, Homo sapiens
  chr16:88106398-88106494
  hypo
ctgaacactggaggcagaaggtggccctgcatccgggagcagtcttggccccgcagcctccgtgccacctgctttgggaacgtgcccagcggggac

SEQ ID NO: 8069 - DNA, 328 bp, Homo sapiens
  chr16:88111298-88111626
  hypo
cgggcctggactgcttcacctacaccgttgtggcagttgcgttaggggcttgggaagggcctacgtgaagccgtgttcgctgacttagagcggggcctctctgggctttctctgggaggagttccgcgttgccatccagacggtcgtagctccagcctgctccaccccgtcaggatcctgggctgggtccccttgggggtgagggtctgggatgagctgctctcgaaagggggatggcgctcatgggttctgcgtctccatcgtggtggggccgcctctgaagatggccaccacaaggagccgggccgaggcctcccaggaggtcacc

SEQ ID NO: 8070 - DNA, 47 bp, Homo sapiens
  chr16:88826974-88827021
  hypo
cgaggggaacgacccgcctttaaggcagcaggacccagggagcccag

SEQ ID NO: 8071 - DNA, 252 bp, Homo sapiens
  chr16:88827070-88827322
  hypo
caggaagcccaggacaggcagggtcccaagcggagacacccgcctttgacgcagcagcacccagggggcccgggacaggcaggggcccgaggggagccacccgccttcgacgcagcaggaggtaaacggaatgttcctcacctacttggagcccggccagcagcctggggcactgaggagcttctggaccatttaattagctcggtgtccaggtttaattagctcagtgtccaggaaactcagttttatggc

SEQ ID NO: 8072 - DNA, 235 bp, Homo sapiens
  chr16:88910584-88910819
  hypo
cgggtgagcacagggcaggaagcacggaggctggggtgatgccaggaggccggggtgatgccaggtgtgatggcaccagcacagcaaatgcccacggcaaactccggaggtgagtggcagcggcggtgttcactgaaaacttcttcaaattttacagtgtgtattgttggaaaaaagtgcttttaaacaggcagtgggccaggactttgctctagaaggagaaggggagggcacc

SEQ ID NO: 8073 - DNA, 188 bp, Homo sapiens
  chr16:88994153-88994341
  hypo
cgtccgcccgtgcggacacccgggagccaacactgacccgaagacaggtcagccagacttcccacctgctccctcaggaggtgggatccggtcccctcctgctgggctgcacgggccacgatggaaaggcgcctcgtgacacgctgcggtcagctcagaaaagccgcagatgctgacacgggcaaccc

SEQ ID NO: 8074 - DNA, 91 bp, Homo sapiens
  chr16:89220237-89220328
  hypo
cgcccaaggcctgcacgcaccatggcttctgtggtaccagtgataacaccatgccgggcacctcctgcagtcaccacccctgggctgctag

SEQ ID NO: 8075 - DNA, 79 bp, Homo sapiens; identical to SEQ ID NO: 6989
  chr16:89254530-89254609
  hypo

SEQ ID NO: 8076 - DNA, 144 bp, Homo sapiens; identical to SEQ ID NO: 6990
  chr16:89254764-89254908
  hypo

SEQ ID NO: 8077 - DNA, 99 bp, Homo sapiens
  chr16:89641257-89641356
  hyper
cgccggcggggccctgagcctcctcgccctgtcggcggcggtcccctctgaccgcagggtcttcttctagagtcctgatcgccgaggctgagcggaggc

SEQ ID NO: 8078 - DNA, 123 bp, Homo sapiens
  chr16:89641704-89641827
  hyper
agccccagacgagcgcggcgcctgcacacaacaggcgcccactaaatgcttgttgatggaggtggcgagtacccgaaaccagcggagcctggaaatgggatcctagagatccgggaagggcgc

SEQ ID NO: 8079 - DNA, 489 bp, Homo sapiens
  chr16:89900815-89901304
  hypo
acctgcccgcactcgcggttggccatcgtagaagcctggataagcatagcccgtgtgaatctgtgaacctgcccgcactcgcggttggccatcgtagaagtgtggataagcatagcccatgtgaatctgtgaacctgcccgcattcgcggttggccgtcgtagaaggccccataagcatagcccgtgtgaatctgtgaacctgcccgcactcgcggttggccgttgtagaagcctggataagcatagcccgtgtgaatctgtgaacctgcccgcactcgcggttggccgtcgtagaagcctggataagcatagcccgtgtgaatctgtgaacctgcccgcactcgcggttggccatcgtagaagtgtggataagcatagcccatgtgaatctgtgaacctgcccgcattcgcggttggccgtcgtagaaggccccataagcatagcccgtgtgaatctgtgaacctgcccgcactcgcagctggccgtc

SEQ ID NO: 8080 - DNA, 295 bp, Homo sapiens
  chr16:94400-94695
  hypo
cgtaaggcattttggttgtacactccgtttaaccctgaggctgctgaaaatcagcacatggtgaatacgacatttgtaaggcaggcccaaggagatatcgggcataaattacagaagttggaagctccgcaggcgtgaatgctactcagcttattaaagtggctaccaaggtgtacattaacggagatcaggaggctgatcagaggcttaagaaaggctaatttactagcagcagcgcttacaggaagagaagctagctttgcaagaaggcatggacgcgggcgtgaatgcagtc

SEQ ID NO: 8081 - DNA, 104 bp, Homo sapiens; identical to SEQ ID NO: 6998
  chr17:16282523-16282627
  hypo

SEQ ID NO: 8082 - DNA, 232 bp, Homo sapiens; identical to SEQ ID NO: 6465
  chr17:21104115-21104347
  hypo

SEQ ID NO: 8083 - DNA, 49 bp, Homo sapiens
  chr17:26961722-26961771
  hypo
cggcgcatgggtgtgttgccatagagacgacgggaacgctggatgtaga

SEQ ID NO: 8084 - DNA, 356 bp, Homo sapiens
  chr17:27038294-27038650
  hyper
cgatagccgagcgttccagctctggctggaaccagacttcccgcccatcccgcgggcgacccagcagggcctcaggaccccagtcctcaatcattggcccgcggctcgacgcgagcccgcccccggccctagctccgccccggccctagctccgccccggcccagcactgggccccgcctctctcgttggtttgcccgtctccctcgtcggtttgccggcttcccgcgtgcgccgctcggggtctgcgagccgggccgcgccctctgcccagcccctgccccgcccctcttaccgcggcatctgctctcatcccacgagcgggccttgggctcggtcttttccttagtccatcttt

SEQ ID NO: 8085 - DNA, 57 bp, Homo sapiens
  chr17:27893139-27893196
  binary
cgctcgtagggccagggcaggccggcctcgaaccactctcggcagcgcagcacgggc

SEQ ID NO: 8086 - DNA, 387 bp, Homo sapiens
  chr17:27893344-27893731
  binary
cggacgggtccccgaaaggctgcagccgggggctgaccagtgggcaaccgtggtggccgcggcgatggaagatgaccgggtagtagccgcgctccagggcgagcaagcaaaggccgagcacgttgcgggtgaggcgaccccacgcattggggatcaccagaagcaccgcaggaaggcccccggcgctggtgatccggcggccccgaacacaaggtcctaccacccagtccagggccactagcccatcgtccgccaactgcaggtactcccgggccagctcaggcccaggcgctacgggcaggacgaagtggcagagggtctgcaggtggggcccggagaaccaggagcgcgggccggcctccagcgcctctgagcgccgcagggcgc

SEQ ID NO: 8087 - DNA, 53 bp, Homo sapiens; identical to SEQ ID NO: 7010
  chr17:27940911-27940964
  hyper

SEQ ID NO: 8088 - DNA, 280 bp, Homo sapiens
  chr17:30347571-30347851
  hypo
cgcttattccctggcagcccctacctaatagggtggtgaattaattatcaaacatgcgacagtttagcgaaaacggcaacattttggaataaatgactgtaacgcgcgtcctgcctgccaccctaactggcgcccattttgcaggtcagttgctctcccctgaaggaagagtattctcggatttcacctcagaggaggaagaattcaggctgccagaactggactagcacttctgaagatcccaaggccaggtcccgtgacttccttgggaagctctgcc

SEQ ID NO: 8089 - DNA, 171 bp, Homo sapiens
  chr17:33213953-33214124
  hyper
cggggcccgtgcaccccgggtagcaagagccacgtgaacacatttgggttagtgtgtcaataagattagcaggaaagaaaaaggagaagttgtcagcatgtgagacataaaggtgtaaagcttttatcagtattgccaaatggcttcagtctccccgacctagatcccatc

SEQ ID NO: 8090 - DNA, 122 bp, Homo sapiens
  chr17:35078956-35079078
  hyper
ctccctcgccagcccgccagctccctaaggttttgtggttttttgtcaccaccacacctcagtgttgagctaagtgaggacgtccccccagcaaatgtattggacggaaggaaacggtgtgc

SEQ ID NO: 8091 - DNA, 130 bp, Homo sapiens
  chr17:35545278-35545408
  hypo
cgtttgtcaggaagaggcggatgggaattgcttttccagttggcgtcaggcgaatgttgattttcagttctgcctggaggacgcgcaatttccacaggcgacttccataccgcattaccatgctccgcac

SEQ ID NO: 8092 - DNA, 146 bp, Homo sapiens
  chr17:36714786-36714932
  hyper
cgaaggggtgggatggcgaagggcaggggcgggatggcgaagggcaggggcagagggctaagttctggggaagaacagaggcaggaggagaacggatggggatcgtggagaggggagcgttaaaatgggccatgcaaagggggagc

SEQ ID NO: 8093 - DNA, 446 bp, Homo sapiens
  chr17:36715092-36715538
  hyper
tccatcatcccggaatggggacgggactggaatgaaggactcaagcgctggcatttgatagagcttctatggctgggacaggaagactaagttgatgatcgatccaaccctgttccaagcctgaatggcgggggtgggcaagatcttacccgttgcccagatggcaattctctgccccctccccagcctgtctctgctaattatcctcacctgacggcccctgggcctgcttgaggagcggactcggcgatgccaagctcctgacaggtgggaccatctgccaagcagggccggggagactgttggggctcaggagggaggagctgagaggacttgggggaagggctctcgctgactcagggaaagggatgcagggcaggaaggaactggaactgccccgagggatactgacgacggaggggctcagtgggtgactggggctccag

SEQ ID NO: 8094 - DNA, 241 bp, Homo sapiens
  chr17:36716048-36716289
  hyper
tgagcctgggaaggactgggctgggacaaagtcctccctactctccgaccccacacagtagccagagaagcccgtggctctacctgccccaagtggtcagccctaacggtggggaccaaagtgccaggaaaaagacctcttgggctaaggccagtgatgtagctattgcttaatccccactttatagattagaaaacaggctcggagagaacaaggatgggggagggggaggttcactcac

SEQ ID NO: 8095 - DNA, 55 bp, Homo sapiens
  chr17:37365986-37366041
  hyper
cgggggctgtaaaccggaaccggtggaggagggggcgctcatcaggaaaggcagc

SEQ ID NO: 8096 - DNA, 122 bp, Homo sapiens
  chr17:37760007-37760129
  hyper
cgtgagaaaccggtccggctttgcatctcatttacataaatatttattaatcgtcattaaactgaacagaaacacgcaatgcacttcgggtgtccgacgggagtttcatcttcgctacaaga

SEQ ID NO: 8097 - DNA, 99 bp, Homo sapiens
  chr17:37881018-37881117
  hypo
cccgccttctgggcatctgcctgacatccacggtgcagctggtgacacagcttatgccctatggctgcctcttagaccatgtccgggaaaaccgcggac

SEQ ID NO: 8098 - DNA, 37 bp, Homo sapiens
  chr17:40332770-40332807
  binary
cgcacctccattctctcccctcgcctcgggtctcacc

SEQ ID NO: 8099 - DNA, 405 bp, Homo sapiens
  chr17:41984572-41984977
  hyper
ctcaccaccttggtgcctgaagccactttggagcccctaccgcaggggcggggaccagtgtcaatgggcagcggggcttggttctcccaaccagcaccccagaaagagggcccaggggcgggggcgggtggacagggagggaacgggcctgggtgaaaggggcctgtggagtttaaacccagtgaatagggtcctaagtgccgtgtcaggacgaaaagaaggcggaggtcttgggataggagctggcccgggggccgggggacgcctacctgcgccccgggaagcccctagctccgggcggctccagcgcagccgggcgctcagcgtttattgcttgtcaatcgctagcccggctcttaaagcggcaaggcctctccgcgagggggcggaggtccggaggagagg

SEQ ID NO: 8100 - DNA, 265 bp, Homo sapiens
  chr17:41985015-41985280
  hyper
gaagtagtctttcccagcagctggtacgggggcagccaggtagtggtttgggagacaccgcacagaccacgacgccctgctggagtcccactgggaagggttagggaggcaggactggtaccagtacccgctggtgcccctcggctcccaaggatcccttaaaggggcgatggtaaaagtgcctaatgagaccggcttgattactccgcccacccatcttggcttagaccggcgttctagttccaggcgtgcctcacttttcctc

SEQ ID NO: 8101 - DNA, 231 bp, Homo sapiens
  chr17:42081919-42082150
  hyper
cggaccccgccccgaccaggtccagccccgcccaacggcaagttaagagccccccagtgccagacgctccagacagactgccactcttggggggcaagagttggttgtcgtcatggcgacggcgctgatggctgtggttctgcgggcagctgctgtagccccgaggctgagaggccggggaggcactgggggcgcccgaaggctgagctgtggcgcgcggcggcgggcggc

SEQ ID NO: 8102 - DNA, 268 bp, Homo sapiens
  chr17:42091861-42092129
  hyper
cccccatgtcgaaatacaggtaaggcactgggatgtcgggcttcctgcgagccgggagtggggaagcaacgaggacagaatgaagcggtgggggaagaagcttgagaccccttgagttcccacaggctccactgctcccccaaaccagactcccctcccatgggcaggaccgccctaccagatttggtccgacacccagaccagaacccctcccagggaggtcccaattcctcccagttcaagggtcccgacttctagcccccaattt

SEQ ID NO: 8103 - DNA, 170 bp, Homo sapiens
  chr17:42092357-42092527
  binary
cagagaagcaggcgcggggatgggacacgcagcttccgggtcaagcgctttttctttttcctcccggaaacaacggtgtcattctctagttccggatctaaggtgacccagttgcgaagtccagccttctcgtctgctcatggagccttcagggccatatttgtccctgc

SEQ ID NO: 8104 - DNA, 61 bp, Homo sapiens
  chr17:4236565-4236626
  hypo
cgttcacatcaaaagtaatgtaaagaatgtgtgtatctcagccatcattttaaaagaagag

SEQ ID NO: 8105 - DNA, 198 bp, Homo sapiens
  chr17:42988798-42988996
  hyper
cgcatctgcctctccagggactcgttctgtgggatggagccggccggtcccgcggagccccgacccgacttggggaggtttcgaggcccggcccccggccccaggccccgcctctagcccgggggtaacgttcaggccccgccctcgacccaggtcctcgtccctggcccttctcccctggcatctcctggggtggcc

SEQ ID NO: 8106 - DNA, 89 bp, Homo sapiens
  chr17:42989016-42989105
  hyper
cgtcctgccctggccgcgctcaccgtgccgcgcagagactccaggtcgcaggtcaaggactgcaactggcgccggtagtcgttggcttc

SEQ ID NO: 8107 - DNA, 37 bp, Homo sapiens
  chr17:4446272-4446309
  hypo
cgcagccctcagcagtgttgcccttcaagacccggag

SEQ ID NO: 8108 - DNA, 138 bp, Homo sapiens
  chr17:4446376-4446514
  hypo
accaaccgctccacctgggcgtgcagggcccctgcgcgctcacccaagtcgtggcagtagcgccgggcacggcacaggtggtgcctgtgggtggtgaggacgagagctggtcagaacattctcggtccaccctgctcc

SEQ ID NO: 8109 - DNA, 107 bp, Homo sapiens
  chr17:46006406-46006513
  hypo
cgatccacactgggaccaaggtaggaccttgccctcctgaccctcggcaaacccaagccacatgcccaaaaggggccgcggccacatatacctcatgacactggcac

SEQ ID NO: 8110 - DNA, 182 bp, Homo sapiens
  chr17:46659093-46659275
  binary
cggcagagccaccgcgggtttgggtatccttgatcctggcgcccaagagcagagatttttctcctctgcgccctggaagtcaccacctgccaatcccaccaaggcgccgcacccccctcacccctccagccgcctgagatggagaacagggtttatgggcgactcccaggacgggtttcacc

SEQ ID NO: 8111 - DNA, 46 bp, Homo sapiens
  chr17:46659384-46659430
  binary
cgctcccgggtctttccgtggcttcccagccgccttctcctggcag

SEQ ID NO: 8112 - DNA, 170 bp, Homo sapiens
  chr17:46724200-46724370
  binary
ggcgaggacagggtccgggagggggataggcgagagcgcttcctgcctccgcccgggcggggctcggccgtctcacctgcccccacccacggcgccgtcggatcccagagcggctggtgaggagatgggcctggcgcgccgcggggaggccagaggcgcggaggagcagc

SEQ ID NO: 8113 - DNA, 349 bp, Homo sapiens
  chr17:46806440-46806789
  hyper
cgtccggggggaggggaggcgtggtgggcggaggaagaggggacgaggagccgggccccacctccttctcctcctctccctccctagctttctgtctcctgcgctttgacaggtttaacgagagaataaaaagctctctctataaagtgtccatctcctgggggggaaggggagtcgggggtggggctgggaggccgctcccggcctcagaggagaacccgggaatgcgcctgtgtaagaggaggctgggaaatgggggttaataggtatttctggcagcccctggctttgggtcctgggtactagcaccccagttcattcccggtacccttcctgtcccagatgtcct

SEQ ID NO: 8114 - DNA, 82 bp, Homo sapiens
  chr17:46826849-46826931
  hyper
cggaattccgaccttattgaaaaaaatgaggagaggtttgttttgtttcttaatcatttcttcgccatctctgactctcttt

SEQ ID NO: 8115 - DNA, 325 bp, Homo sapiens
  chr17:46829655-46829980
  hyper
acctgggacaaggtagtggctgggttaggggctggggtgtgtcttggagcccccaggtgacaggagagggaggaagggagtgactggtgaaacattaaccccctcagggttctgaagggaaggggaacatccttagaggacacagggagaagacaaacgtcccttcatcctgagattcacttggaaatcccctgaacttccaactcctggctgatgaaacggagcaagttgtctctgccttatggcctccatcaccaagcctgaaggagagtctctcagcccggtttgggagtaaacccaaaaccgttcattcgtcagggaatgc

SEQ ID NO: 8116 - DNA, 45 bp, Homo sapiens
  chr17:46830655-46830700
  hyper
ggcacagcttccagattccagtttgttaagaatcacctgaaggac

SEQ ID NO: 8117 - DNA, 507 bp, Homo sapiens
  chr17:46831220-46831727
  hyper
cgctgcagagccccgtgcttagtgaccaaaataatgtcccgcctgcctcatcttcctctcggatttttgccaaggccaaactgcgcgtgtcccagaaaaaaaccctcggacacttggcctctgccctgtctcagccgagtgactaggatgactgggaagtgaatcacaggaaaatcacccaagcccactcttctccacagccggtgagcagaaggaaggaagcaaagaaggaagggaggaagggaagaagggagagttcagttccctttcgtcgttcacacagtggtcctccacaccaggaaacctaagggctctgtggagggccaggtgccgtggcagcaacactcctcagggcctgtttcagcaccccatttacgtggcacatgaaaaattcaggatgaacgccctggctgaaagctcttcctgggtttgggacatcagaagaccttcccgggatgggctcttgtctctgcagtagctatgacctgcacataaacctgtttccta

SEQ ID NO: 8118 - DNA, 55 bp, Homo sapiens
  chr17:46832887-46832942
  hyper
gagcccaataaacggttcctctttccttctccggtcctttcccttccaacagagc

SEQ ID NO: 8119 - DNA, 163 bp, Homo sapiens
  chr17:47657789-47657952
  hypo
cgcaggacatttgcttgagacccaagtggcagggatccaaccgcccttggcgctgatgtttgctgagggctcagggcttccctctccagccccggttccaagctgtctgatcccccacgaggaaacttgagcaaacaccctgggctcggtgctggaggagggc

SEQ ID NO: 8120 - DNA, 197 bp, Homo sapiens; identical to SEQ ID NO: 7018
  chr17:48619736-48619933
  hyper

SEQ ID NO: 8121 - DNA, 80 bp, Homo sapiens
  chr17:58498618-58498698
  hyper
cgacaacaataacaacaagacgtttgctgaacatgctggcatagaggacaagttaaaaagtttctggactcaaagggtgc

SEQ ID NO: 8122 - DNA, 132 bp, Homo sapiens
  chr17:59532387-59532519
  hyper
ttcgcacgtggcccgaggcgggtgctggcgctggccatgtccagcgagtctcactccctgcaggctgtggccgaagactggtccgcctgtcaaccttatctttatgggtttttcccaacccagactggcccc

SEQ ID NO: 8123 - DNA, 103 bp, Homo sapiens
  chr17:60766832-60766935
  hypo
cggggtgagggaagcagagcccagcctgaaccctgaccccttccctgtagacccctccctgagcccgtccccagcagcgctgccccccgccccgggcactgag

SEQ ID NO: 8124 - DNA, 224 bp, Homo sapiens
  chr17:60767107-60767331
  hypo
tggctggcgaggaggtgggctcccgacacttttgccctgggccccagccttgcccgggttcccctccctgccccttcctgcccccgccttatccgcaccctatcctgactattcccttcctcccaccccatggccccccatgcccagggctctcggcggtactcctgggtctcagaggagccgctgaactacgtgggctggcaggacggggagccgcagcagcc

SEQ ID NO: 8125 - DNA, 112 bp, Homo sapiens; identical to SEQ ID NO: 7021
  chr17:61777761-61777873
  binary

SEQ ID NO: 8126 - DNA, 76 bp, Homo sapiens; identical to SEQ ID NO: 7022
  chr17:61778423-61778499
  binary

SEQ ID NO: 8127 - DNA, 57 bp, Homo sapiens; identical to SEQ ID NO: 7023
  chr17:66913081-66913138
  hypo

SEQ ID NO: 8128 - DNA, 184 bp, Homo sapiens
  chr17:72367880-72368064
  hypo
cgcagtggccctggcgcgccttgccaccaggaccaggaggccctcctactactaccttctggcgctcacagcctcggatatcatcatccaggtggtcatcgtgttcgcgggcttcctcctgcagggagcagtgctggcccgccaggtgccccaggctgtggtgcgcacggccaacatcctggag

SEQ ID NO: 8129 - DNA, 345 bp, Homo sapiens
  chr17:72368130-72368475
  hypo
tgccaccccctgcaccatcgggccgcctcgtccccaggccggacccgccgggccattgctgctgtcctgagtgctgccctgttgaccggcatccccttctactggtggctggacatgtggagagacaccgactcacccagaacactggacgaggtcctcaagtgggctcactgtctcactgtctatttcatcccttgtggcgtgttcctggtcaccaactcggccatcatccaccggctacggaggaggggccggagtgggctgcagccccgggtgggcaagagcacagccatcctcctgggcatcaccacactgttcaccctcctgtgggcgccccgggtcttc

SEQ ID NO: 8130 - DNA, 65 bp, Homo sapiens
  chr17:73073967-73074032
  binary
ggctagagttcccccaggcactggggacagtcccgtggccttgtgggtgggggattcctgactgc

SEQ ID NO: 8131 - DNA, 127 bp, Homo sapiens
  chr17:73100161-73100288
  hypo
cgccctgcagaagaaggagcaaggcaagcaggctgtcgcggcggatgccctggagcgggatcttttcttggaagccaaagacggtcctgggaagcaacggtcccctgagatcatgtatgtaaccagc

SEQ ID NO: 8132 - DNA, 141 bp, Homo sapiens
  chr17:73242514-73242655
  hypo
cgctatggggacacgaggaatggcgtgggcaggtgaagggctgcggtttccacctccggagagtgaaggacctaccgtcagggcctggagcgcctcccattcctgtggggactggatcttgtgggccagcagtcggacggc

SEQ ID NO: 8133 - DNA, 81 bp, Homo sapiens; identical to SEQ ID NO: 7025
  chr17:73584287-73584368
  binary

SEQ ID NO: 8134 - DNA, 170 bp, Homo sapiens; identical to SEQ ID NO: 7026
  chr17:73584951-73585121
  binary

SEQ ID NO: 8135 - DNA, 307 bp, Homo sapiens
  chr17:74269555-74269862
  hypo
cggctgtctctgcagcagcccactcaagggagagaagcggagggcggcaaacagaaacctgcccagccggctgcaggggttcgcctccagccattggcactgcttccccggaatcccacgccaggggtcaggaaccaccctgagccagcagcaagagcgcagcaggcagctgccaccctcacccccagagtgctggacactgacagcacgggccccagcaccccaggctagaaggcaggtctagagccagaaggcagggcacccccaatctagctgaggccaggagagagctggtggggtgagcacc

SEQ ID NO: 8136 - DNA, 92 bp, Homo sapiens
  chr17:74965156-74965248
  hyper
cgcagccggcctcggctgtttaccaggcacccgttacgctaattgaaatgtgccaaatagctgcccggggcggggccgagcggagcagcggg

SEQ ID NO: 8137 - DNA, 514 bp, Homo sapiens
  chr17:76425233-76425747
  hypo
cgggggccagcaggacgtctccctccagcatctccgtccggatgtattcagccaggtaggtcctgcacagccgacggtcccagtcatctgtgatgtggccgccatacatgatttcaccaaaaaggtagcggagatcgtcccagggcacctgaggaaggatgacagcgggtaggggaaagtgcccctgtgccccttctctgccatgagagggtcaggctcaggcaggcagggcgtgggaacccagccattggtgctgtgtccttctcgccctccaggtcagcctcctggccatttaccttcagggtcaccaggccccagggccacctttctttccattccgcgccaccagacgccaatgtccggcccctttggcttctctcacaaggggctgtgtggcacctccctccaccttggacagcgcttccacagccggcatgctctgcacctcccgtggggcaggtgtttctgctgtgcctcactgtgcctcagaggccacagggctgaatcggaactc

SEQ ID NO: 8138 - DNA, 50 bp, Homo sapiens
  chr17:77808028-77808078
  hypo
tcatccaggtctgagtctagcaggatgacctcgggctgcgggagggcggc

SEQ ID NO: 8139 - DNA, 117 bp, Homo sapiens
  chr17:78143796-78143913
  hypo
cgttcagttcagccagagattgggccacattcagtcctcgcttccctgggagggggaaggtaagtgcgcgcagtccatccggcgaagagcaggtcagcctacggagggctcagccta

SEQ ID NO: 8140 - DNA, 566 bp, Homo sapiens
  chr17:78271713-78272279
  hypo
cgctgccttgatgacagagtgagactctgtctctaaacaatgaaaataaattttacaagttgctttatatttagatttactgttgccagatggcctgggttcaaaccccagctctgtcagtcaggaccctgcgttgactacttagccaggacccctgcttctgagatccctcccctgtcctgggagtttgttgtggggattcggtgagggcctgcaaaggagctgacgccctaggctgggggctgagggaagccctgtctcctgcgtgagttaaactctgctcagccacgcgcggtgctcctcttgctctgtgtgcacggtgcttgcttcctgttgggactccagactcccagggagatgactccctggccagctcagctcactgcgggatctttattcccttccagctggcggctgtacctggtgaacctgtgccaaagatgcatggacacaaggacgtacacctggctgggcgccctgcctgtcctgcactgctgtatggagctggccccgcggcacaaggatgcctggagacagcctgaggacacctgggccgctctggaggg

SEQ ID NO: 8141 - DNA, 77 bp, Homo sapiens
  chr17:78272313-78272390
  hypo
gatacgtaagtcgtagagttgtgcttatctacatgaatctgggaagactgactcctacattgtgcacccggagtccc

SEQ ID NO: 8142 - DNA, 162 bp, Homo sapiens
  chr17:78590602-78590764
  hypo
cgaagaccaattatttgttggtttttaaggaccagagttcccaggagtaagtgaaacacgactcgatctcttaagtgtgcccaatactgccagcacaacattcctcacaccggtccagcttgctagttaccttggatactcgcccaagcttcagctgactgc

SEQ ID NO: 8143 - DNA, 398 bp, Homo sapiens
  chr17:79873436-79873834
  hypo
cgtgctgccgctgcccagcctatgtgggaggccatgcctggcccgcttacctaacgcttctccctttctgaagcagtgtccacactccattagggccccggtagtctgggatagacgctgcctgcatgtcgagaaaaaaggtaagccaagtcaaaaggcaccactgtaggtactggcagaattcccagaaacggaaagccactgtcactcctgccgcattccgggctggcctgcatgttggcctctattcattccacaggctgacctgcctgagcccatatggagtgtaccccaattcggctcctcccttctacctggacttccgtttcccgcctggcctggctcatccttccaggctgcacgcagccctgcctgcctccggaagcctctctggcacc

SEQ ID NO: 8144 - DNA, 221 bp, Homo sapiens
  chr17:80186335-80186556
  binary
cgcaggccgcgggccgctcccctagccaggaagagccgccgtccgcaccgggaccggagaggaagcggaggtctgaagggggacaggtcggacgtggcctcagagagggaggatgtgggccccggagctgagccaggcggccggaaccccacgggacccgcgcgcacctccccaccaaaggggccccggcgttggggggcgaggggtcgctgccctggagg

SEQ ID NO: 8145 - DNA, 517 bp, Homo sapiens
  chr17:80186618-80187135
  binary
gcgaagcgagcctggactccgggggaggcgaggccgggaagacccagtcccgaggagcagagggggcgggccagctccgggccgggggcgccgacggggccggttccggttgggggggtccctgggcccggcggggttgcgggacgcgccgtcggggagctgcggcccgggagcccgtccggaggcggcgcggggtccgggcggggcgcgcaggggcggcgccaggcggtgacgtgcgcgggggacgtgccgcgccagcgacccgagcacttaaagtcgcccccggcgcggagcggaccggcagaggcgggcagaggcggcgagaggcggcgagaggcgggctgaggcggcccagcggcggcaggtaggcgcggccgcgatgctcgcgcgcgggccggggcccaggagctcccccgtgccgggcaagggggcgacctcggggtccgcgctctcacccccaccccgcccactttgtccatcaggtccgggggcgcccggggcatggactagccttctc

SEQ ID NO: 8146 - DNA, 230 bp, Homo sapiens
  chr17:80394871-80395101
  hypo
cgactgggacccgggccggccgcatacactctggagtctcctacactgagacccgggcctggctgtctcaggcggctcccatgttggctctgggtacagccccgggaggcgtgtccagggccgtgttggccgcctcccctggagccactcacctgtttgctttctcacccagtcctcctcatgcagaagtaccggcggtgcggctttccgcagctgtgggcagccagtgc

SEQ ID NO: 8147 - DNA, 82 bp, Homo sapiens
  chr17:80395146-80395228
  hypo
gcaccacctcaggaaccacgtgcagtggctgcaggtggcgggcagcgggcccacggactcactgcagggcatcatcctgacc

SEQ ID NO: 8148 - DNA, 69 bp, Homo sapiens; identical to SEQ ID NO: 7045
  chr17:8055823-8055892
  hyper

SEQ ID NO: 8149 - DNA, 33 bp, Homo sapiens; identical to SEQ ID NO: 6493
  chr17:80797632-80797665
  hypo

SEQ ID NO: 8150 - DNA, 273 bp, Homo sapiens
  chr17:8104639-8104912
  hypo
ctgtccaccacttagaggggcatttttggtgatatctatagaccgtttacctgcgtgtacccagcattaccacgtctttctctagatgctggtactctccattgccatgtctttcttcagatgtcccctagaggacaactagagaccatcacaaaggtgcacaggaggcactcaaaagacactggccacagtgcaaagcattggaaataatctgcatgtgcatccagtagaagagctttaaaaaaaaccctagggatatccttattaaaaatt

SEQ ID NO: 8151 - DNA, 144 bp, Homo sapiens
  chr17:8384370-8384514
  hypo
cgttggcgcaccccacggctcccccctgcggtgtgcagggctcagcaggactggcacgggtgcagtgcccgttagtgcacaccacggctcccacctgcggtgtgcagggctcggcaggactggcacggggtaccatggctgagg

SEQ ID NO: 8152 - DNA, 110 bp, Homo sapiens
  chr18:13135194-13135304
  hypo
agggctgccagcaccctgtcatctctcaggttttagctcagggctgctgtccagcacccgctcttgcttggatactttcggtggtgtggctgctggttactgtattgcac

SEQ ID NO: 8153 - DNA, 36 bp, Homo sapiens
  chr18:13425955-13425991
  hypo
cgagggcaggacggtggaccacagtgaccctgtggg

SEQ ID NO: 8154 - DNA, 52 bp, Homo sapiens
  chr18:13826252-13826304
  hypo
cgccggcatctgggctttctgcacgggctgcggcattgtcttcatcctgtac

SEQ ID NO: 8155 - DNA, 79 bp, Homo sapiens
  chr18:13826592-13826671
  hypo
ttcaatatgtacctcatactcatcatgtgtaattccgtgatggaccctctcatatatgccttccgcagccaagagatgc

SEQ ID NO: 8156 - DNA, 216 bp, Homo sapiens
  chr18:196827-197043
  hypo
cgtacttactggaacatagttcgaaatataaacatcagtcttctctagttcatgccacggctgtctcttgcctggagccgcacagtagtcttaactgatatctggcttctgcctttgcccctttgcagtttctctacacagcccgcaatgtcctttttaaaatgacgataggattatgttggccccttgttcagtactccctagtgattttctacc

SEQ ID NO: 8157 - DNA, 238 bp, Homo sapiens
  chr18:2848166-2848404
  binary
gcgggggcgtaggagaggatgaacaaagctcccactcccacttctgttttctccctttcaatgtttgtttgtaacataaggcagctgaatctaattggatccatattgtgtgttctggggcacacagaagattccaaaatgtatactgctaaagactattccgtataggattcgctgagaggtttggctaagtagtgttctaaaacgagtgagttctgtccgtatgtccccataaaac

SEQ ID NO: 8158 - DNA, 52 bp, Homo sapiens
  chr18:46142611-46142663
  hypo
tgacttctcctgcaggtggctccttttcagccctctctggacatcggcggtt

SEQ ID NO: 8159 - DNA, 53 bp, Homo sapiens
  chr18:53257322-53257375
  binary
acacaaaagtgtagtttcggcacaaatttacaaattaaactccacagacttcc

SEQ ID NO: 8160 - DNA, 45 bp, Homo sapiens
  chr18:53446783-53446828
  hyper
cgacttaacgtttcaggaatatgaattctatgttcagaaaatttc

SEQ ID NO: 8161 - DNA, 84 bp, Homo sapiens; identical to SEQ ID NO: 7065
  chr18:54483312-54483396
  hypo

SEQ ID NO: 8162 - DNA, 115 bp, Homo sapiens
  chr18:55850987-55851102
  hypo
aagactttttgttatcctgaacattgcaggtggaaacatgattaattttgaattatttttgtttaacttctaccctctttcctatttacagcctattttgtttattttaacttcc

SEQ ID NO: 8163 - DNA, 98 bp, Homo sapiens
  chr18:60110139-60110237
  hypo
cggcaccaccgtgtaccctggcatcgccgacaggatgcaggagatcaccggcctggctccaagcacgatgaagatcaagatcattgctccttctgagc

SEQ ID NO: 8164 - DNA, 73 bp, Homo sapiens
  chr18:72632559-72632632
  hypo
cgggaccaacgtcccggtggagttccggaaccatttgaaggaacagcatcctgacatcgaaaacccggacctc

SEQ ID NO: 8165 - DNA, 133 bp, Homo sapiens; identical to SEQ ID NO: 7069
  chr18:74113780-74113913
  hypo

SEQ ID NO: 8166 - DNA, 61 bp, Homo sapiens; identical to SEQ ID NO: 7070
  chr18:74113942-74114003
  hypo

SEQ ID NO: 8167 - DNA, 297 bp, Homo sapiens
  chr18:74569886-74570183
  hypo
cgatgtttggttactatggattcagtacactttttacgtttcttaagtattttaagattctaatgatattgtgtagggaggtcttttggccatatgttgtgttacgtgcctgtaggaaagcgatgcatttgtgtgtgttagttttccctgccatcctccctgattctctatgcagcctcatctacacataataatcgggtagtaagtttttggttctgtgttgttgcaactagcatatgcgcagtttttaaaaaaaaatcacccttatatcatttattcgttttcatagtatgtagc

SEQ ID NO: 8168 - DNA, 241 bp, Homo sapiens
  chr18:75873544-75873785
  hypo
cgtacatgtggaagtctccgattctctgacagcgctgtctaccagggatcagctgccgagcttgagtgacatggtgctgtcaccacggcagccatcccaccggcaggcgccagccttaccgtaccgtgtattgaagtgacacacaaatatgtatctggacgtgggtatgtggtgaggccgcagttgtgggaaaggtggagaagtccgatgagctggaggatctggcaggggagggatgtac

SEQ ID NO: 8169 - DNA, 138 bp, Homo sapiens
  chr18:76685353-76685491
  hypo
cgcaagagggcgtgaagccacgcggtcgcacacctggtaccgcgcacagtgagaaaggagggcaagtgcgctgagacccaggagggagggcagccctcccctgcgctgctgaggctcgtttctttcaatgtgtccctg

SEQ ID NO: 8170 - DNA, 299 bp, Homo sapiens
  chr18:76685836-76686135
  hypo
ccagcactcccacccctcgatgtgtgcccaggtcgaaggaaggcttgccacccgaaggcctgcacgggaaagctcacagcagcgttctccaaacagccaaaacgcggaagcaaccccgatgtgcgtgggctggtgaatgcaggcccagcgcggagtgcgcacagcccggaacggcattcagccaagaaaagacccacagccgggaacagcatattcagccaagaaaagaaagggcggcctggggcgctctgcaccgcgggtgagccgtgagaacacggcgctccgggagagaagccagc

SEQ ID NO: 8171 - DNA, 102 bp, Homo sapiens
  chr18:76686279-76686381
  hypo
gccatgagaaggttctagaattagatggtggcgatggttgctccacgctgccatgggggcagctgagggaaaggaggtgggatcggggctcggccagctctc

SEQ ID NO: 8172 - DNA, 63 bp, Homo sapiens
  chr18:77153122-77153185
  hyper
cgctgtgggccagaatgcaaaactgcaggaacagaacattcgcaggaacagaacacagtcgta

SEQ ID NO: 8173 - DNA, 34 bp, Homo sapiens
  chr18:77153516-77153550
  hyper
aaatattggacggggtggatgaacacccaagtgc

SEQ ID NO: 8174 - DNA, 266 bp, Homo sapiens; identical to SEQ ID NO: 6497
  chr18:77542640-77542906
  hypo

SEQ ID NO: 8175 - DNA, 271 bp, Homo sapiens; identical to SEQ ID NO: 6498
  chr18:77542951-77543222
  hypo

SEQ ID NO: 8176 - DNA, 113 bp, Homo sapiens
  chr18:77616298-77616411
  hypo
cgtcagagccacgatgctccgcagtaataacgcaggtgactctctgtcccttagggtgaaactggatgttcattttccaggtcgaagccgctggtctcagctgtgttttcacc

SEQ ID NO: 8177 - DNA, 154 bp, Homo sapiens
  chr18:8612051-8612205
  hypo
cgtttgttgagcacctactgtgtgttgggtgttatgctacccagtggggattcagtggtaaacaggacatcgactctgtccagaagtggatcggagcttctgggagctgcgtgaccgcttgtcagggcagtgacagatgtgtatgggtatttgg

SEQ ID NO: 8178 - DNA, 489 bp, Homo sapiens
  chr18:8625474-8625963
  hypo
cggctgtactgctgattccacgggatgtgagcccccactaatgcctactagaaatgaatccaggcccctttctcaaatcacaattggaatgagagactcaaccagctgtgttataactgcactcagcactaagagctttctgttagctattaacctgttaacagcccgcaggtgctagcgacctgtctgtggaagaagggataagatctggtctggtggtctggcggtggcttaaaagtagccccattgaggtgctctgagaatgccgttttgttttgaatgctacagctgcggtgtactcagcttactaactcctcttggcaggtcaccctcagctctgattgtttgtccaccatgtgtgtgtttgctttcatctgcgttaattgctgcttcatctgtggcatcatcggtcacctaatgcttgaatgttagtgccatgtcttcattcttcatccgtgtccctgtctgggccgcagctgcagccaagcc

SEQ ID NO: 8179 - DNA, 229 bp, Homo sapiens
  chr19:1004547-1004776
  hypo
cgcacgggccccgtgtgggtgacaggcagctcccaggtacacatgtctcggcactttaaggtgtggagccttcgccgggacccacggggcgccccggcctgggccacggtgggcagctggcgggacggccagctggacttggaaccgggaggtgcctctgcacggcccccgcccccacagggtgcccaggtctggcccaagctgcgtgtggtaacgctgttggaacacc

SEQ ID NO: 8180 - DNA, 279 bp, Homo sapiens; identical to SEQ ID NO: 7074
  chr19:1005441-1005720
  hypo

SEQ ID NO: 8181 - DNA, 212 bp, Homo sapiens
  chr19:10197461-10197673
  binary
cgtaaagggatgaaaggcggggggggggcggcggaggccaaaaccaagggtcaagttcgggccgggagaacggtgcctagagatgggggagggatgatcccgtttccccttcccccaccggaacccccctgtctccatcccagctggagaagagcgtccggcgcctccgggagaagtttcatgggaaggtatcctccaagaaggcgggggct

SEQ ID NO: 8182 - DNA, 128 bp, Homo sapiens
  chr19:1030225-1030353
  hypo
ctggaatggccgggtgcagaaaggtggcagggaatcggtggcaaggagccaggtgcgtgactagaggcggtcagcctcgggggcagctccttcgggagttgctaagaagcaggatgggggccgggcgc

SEQ ID NO: 8183 - DNA, 154 bp, Homo sapiens
  chr19:11008216-11008370
  hypo
cgactgcagtgtggcaggccagcgagtagccccaggctgggtccaggggtggccaaagcgtaacactcagtccgggtttgtgttctttacgttccccgttggagactccacctggagatcccagtccctttccttttactgcagggtaaagaaa

SEQ ID NO: 8184 - DNA, 164 bp, Homo sapiens
  chr19:11529251-11529415
  hyper
cgcccactgcacctggcggcctgtgctcggctctccagctccgccctcaactggtcgcttccggccccgcgccacccaccaaaccccctcctcacctggctgcccccggggccctccgccgggctcctgcgctgactgcgctgccgccgcagggagacactgta

SEQ ID NO: 8185 - DNA, 339 bp, Homo sapiens
  chr19:1166870-1167209
  hypo
cggcctcaggccacaaggtctccccacctggctccttggggagtgccaagcgttgccagcagccgggctatgctgatcccagacaagtggctcgaccggtcaccactgtccttgagcttaagtccagccttggtgacaaaaatgtcacaaggacctgcatccgagccctgagggcatcaggtcctggaggaggaggaagagtcccttctggcttcgggctgggcttgaggacggcagctccaagaccgcttagagcgagacttcagcgctgactgctggagctacgcaccctgtcctgacaatggccgcacagttaggcgctgctccacgcctggagga

SEQ ID NO: 8186 - DNA, 190 bp, Homo sapiens
  chr19:13213427-13213617
  binary
cgtcaggccaggctctgctgtctcgcgagggtccggcctcaatgctccaggccccggcgttgggccgcgcctcctcgtgggcctcggaaggccaggatagccgaggtctccgcgtaggtcccccccagggaaagtgagcggctcccgggccggcccgccttctccccgcccccggcggcccggtttcctc

SEQ ID NO: 8187 - DNA, 112 bp, Homo sapiens
  chr19:13213834-13213946
  binary
tgtagggaccccgggcctctggggacccgggccccagggcagccggggagggaggtgcctggatgcacgcagggggtaaactgaggcagggaagctgcctcctcttatgtcc

SEQ ID NO: 8188 - DNA, 303 bp, Homo sapiens
  chr19:1393952-1394255
  hypo
cgtggtcccacgagggccatccccccgggcgttcaccttgacagtggtccacggtaggcaggcttggaggtggcgctcatgtgggacaggggacagagtcctgttcttggccaccctgtgctgcgtgcggcattagctcatgcgcagagagcccagccctgagtcccgagtctgggggtttgggcaagcgagaggcacatcctggtgcctctcaaaagtggaggaacaggctctgactttggattccgcttccctggaaagggcgttgatttgttcagcgttctgcacggttcaggtcacccc

SEQ ID NO: 8189 - DNA, 224 bp, Homo sapiens
  chr19:13983612-13983836
  hyper
cgagagagggcgccccactccagctccagacagaggggtgggaacgtgaccccgacccggggcgggtgagagggcgggctctggggaaagggctctagaaggtgccgggaggcgggaggggggcttcgggagggcgagttagccgggatcgggcttgaggggccctacgaaattcggtttgggggcgtgcccggtcggggcggaccttagtggggggttgggct

SEQ ID NO: 8190 - DNA, 434 bp, Homo sapiens
  chr19:13983865-13984299
  hyper
tctatagagcaggcttttgtggagggctctaagggggcgggccctaagggagctgggctctttgaggactggcttaggggtttggcggtgggctccgtgggagtctatatgggcgggttttagagggagtgtgttctggggaacaggtcaaaagcgacggggctctaaggggcagggcctgggctggggccttggctggtggctccagactgtgggtggggctctcgggggcggggctctcgggggcgcgtcctcgggggctcggccgggttccgttgccaccaccgtgaggggtgtggtgggggggtggttcacgcagctcggcacacttgggggtccctcatctaccttggggttatgccaggcggttattttgggcctcagtattcccctcggtgaaatgccaggggccaggaaattacttatttttttgc

SEQ ID NO: 8191 - DNA, 152 bp, Homo sapiens
  chr19:14181154-14181306
  hypo
cgcgtccgccgattcctcctccttggtcgccgcgtccttggctggcgtcagaaaaatggctacaaacttcctagcacatgagaagatctggtttgacaagttcaaatatgacgacgcagaaaggagattctatcagcagatgaacaggcctg

SEQ ID NO: 8192 - DNA, 179 bp, Homo sapiens
  chr19:14181846-14182025
  hypo
tggaggcctgtgtgcgctctatcgagctggacgggctggtctgggggacctccaagctgatgcccgtgggctacggtatccggaagctacagattcagtgtgtggtggaggacgacaaggtggggacttacttgctggaggaggagatcactaaatttgaggagcacgtgcagagtgtc

SEQ ID NO: 8193 - DNA, 33 bp, Homo sapiens
  chr19:14584167-14584200
  hyper
cgaggggccggtgcgcccctcaccagcattggg

SEQ ID NO: 8194 - DNA, 179 bp, Homo sapiens
  chr19:14663747-14663926
  hypo
cgggcgagatcagcgtcgctctgggtgggccagtgctcctcggaggccctgagggcacaaccgcagggatgggtgtaggctgtgggtaccactgagaatggggggcaggcccagggctgagacccaggttctccaacttcccactgtgtttgtcttgtgccatattcatcctctatgaa

SEQ ID NO: 8195 - DNA, 267 bp, Homo sapiens
  chr19:14664561-14664828
  hypo
gatcgggccaggcctccgacctctatgctgggcattggctggacagggagctcaggcgatgagtgcagcagcgcttgtgcccggcgcggggatggtgagtgcctggctggccagctgcaggacctgtcaggccctttgtgtctttacctggggccctggttgcactgaccagggctcgcacccccagccaggcctcttgtgccccagactcgggagatgcttcctaccaggaagtgcagtcccctgcggggtccgagagagcctgcc

SEQ ID NO: 8196 - DNA, 132 bp, Homo sapiens
  chr19:15364865-15364997
  hypo
cgtctctgggctctagcatcctggacacaggaccgagctagtgccaggcacaggtgggaagagtttggtaagacacgtagaacacaagtcacctaacctgtttcggagtcttcgctgtcagaggagctggac

SEQ ID NO: 8197 - DNA, 247 bp, Homo sapiens
  chr19:15512036-15512283
  hypo
cgggagccgcccgggaaggcgcccccacctcgcatgccctggaacatgccgtactcggggatgatgttctgggagaagagggagggcagccgagaggcaccagacatgcactggccccgggcccccatggggtcttcccacatgcgcccatagcctgaggccattggccggccgctccgggcatcccgggcccagccctgtgccctgggaccgaaggtgtcgttgccacgcatgcggaactggtcgc

SEQ ID NO: 8198 - DNA, 99 bp, Homo sapiens
  chr19:15531296-15531395
  hypo
cgtcttctgcgccctgcaggttcgttccttcatcgcacttgccacagtcatcattgtaccgatttgatttcgttcacatccaacaccctcagagaccac

SEQ ID NO: 8199 - DNA, 121 bp, Homo sapiens
  chr19:1565953-1566074
  hypo
cagccacagcctccaccacctggaggctcaggctcgtgcctttggtcacttggtccccaggcctcggcttggacgcctgtctccacaggctcccagacactccgcacagggcagctgtccc

SEQ ID NO: 8200 - DNA, 106 bp, Homo sapiens; identical to SEQ ID NO: 7078
  chr19:15695669-15695775
  binary

SEQ ID NO: 8201 - DNA, 162 bp, Homo sapiens; identical to SEQ ID NO: 7079
  chr19:16186802-16186964
  hyper

SEQ ID NO: 8202 - DNA, 621 bp, Homo sapiens; identical to SEQ ID NO: 7080
  chr19:16187000-16187621
  binary

SEQ ID NO: 8203 - DNA, 634 bp, Homo sapiens; identical to SEQ ID NO: 7081
  chr19:16187640-16188274
  binary

SEQ ID NO: 8204 - DNA, 113 bp, Homo sapiens
  chr19:16472546-16472659
  hypo
cggaagggagtggggtggcccggaggcggaggactcaacttacagaggtgaagtctgcaaagcccgaggcagaggccttagaaggtttagctgcagaggaggggacaaatggg

SEQ ID NO: 8205 - DNA, 112 bp, Homo sapiens
  chr19:16472777-16472889
  hypo
ttacaggtgtacttttacctggaaagtttaggagaaaaaaaaaaggagaaagaaagaaatatgagttactcacccggacagagcagaatgctggtgggcacaagcccggggc

SEQ ID NO: 8206 - DNA, 67 bp, Homo sapiens
  chr19:16638602-16638669
  hypo
cgtgccttgcagcgttaaactcccctgcactcgcaggacaatggtgatctatactacagagaagccc

SEQ ID NO: 8207 - DNA, 268 bp, Homo sapiens
  chr19:16681297-16681565
  hypo
cggctgagacaacaagcgcccaacttccacttaagaatacgggataaagctgtctccggctaaagccatggctattcttgccccaagccaggaaataccctggcttggcatcttgaacagaatttggactgtgcccaaagcatcctccttatgcagccctgagtcctgtgtgccactttcgcttccgttcccagaccatcacaacttctggctgttttaatttctaagactttgctggattttgccaagatcgaactccttggatcgc

SEQ ID NO: 8208 - DNA, 31 bp, Homo sapiens
  chr19:17007056-17007087
  hyper
cgtcctgctgtaaaggccccggggccacaga

SEQ ID NO: 8209 - DNA, 215 bp, Homo sapiens
  chr19:17008145-17008360
  hyper
cgccgctcgaccccgccctcaccacactgaccaccctcaacccattgcgcccagtccccaccacagtgaccacaccctcactggctcggccctgcccccagtatactgaccattccccagccacttcccttccgcacttaccactcccccagccacgcccctccccgctgaccgctcctccagccccgcctcccccgtacaggcagagcgcccgc

SEQ ID NO: 8210 - DNA, 31 bp, Homo sapiens
  chr19:17008820-17008851
  hyper
gggcgcaggctcgacccgggccaggaggccc

SEQ ID NO: 8211 - DNA, 247 bp, Homo sapiens
  chr19:17264714-17264961
  hypo
cgcagagtagctattacttggcctccaaaaacaactattttcctcccaattttgacctgtaggaactaccatgtgttttattatttgttacttggggtcagcgaggaagagcgccaagaatttcagctcaagcagcctgaagattatttctacctcaaccaggtaaacagcctcaagcccgagccacaaacgccacctctgttcccggcctcaagctgtttatgtatagccgggaagtcagaggcag

SEQ ID NO: 8212 - DNA, 133 bp, Homo sapiens
  chr19:17958343-17958476
  hyper
cggcatcccctgtttataatcctcaacgttctgcatcctggtatggtcgggtaccctgtgtctggaccgggaaggcctggagggtaggggctgggaactccgccccccaatccctccttcccaatccctcctc

SEQ ID NO: 8213 - DNA, 88 bp, Homo sapiens; identical to SEQ ID NO: 7083
  chr19:1807818-1807906
  hypo

SEQ ID NO: 8214 - DNA, 95 bp, Homo sapiens
  chr19:18103606-18103701
  hypo
cggcatagttttctgaatgaaacaccgcctccggtggtggtgagaggacaggtgtgcccctgaggggctggcacagaaccctcagaggctgggca

SEQ ID NO: 8215 - DNA, 50 bp, Homo sapiens
  chr19:18103924-18103974
  hypo
gtcacagacagggggtacacccggggcatgccaaccccagcctcagaggc

SEQ ID NO: 8216 - DNA, 41 bp, Homo sapiens; identical to SEQ ID NO: 7089
  chr19:18241264-18241305
  hypo

SEQ ID NO: 8217 - DNA, 124 bp, Homo sapiens; identical to SEQ ID NO: 7090
  chr19:18241355-18241479
  hypo

SEQ ID NO: 8218 - DNA, 109 bp, Homo sapiens; identical to SEQ ID NO: 7091
  chr19:1857456-1857565
  hyper

SEQ ID NO: 8219 - DNA, 160 bp, Homo sapiens
  chr19:18808024-18808184
  hypo
ggggttcttgcacggagggattcagaagcacttggcaccggggggagcagcctcatcggtgtccagccagggccacacagtcagcctcagcccccacctcgcttccttctgggcgagcttagacctgggaggcctctttttttttggagtgccgtggtgc

SEQ ID NO: 8220 - DNA, 322 bp, Homo sapiens
  chr19:19391586-19391908
  hypo
cttcaggggaggcagccaaccatcctcagagcagctgacatttaatttggcatcagctgtggaacttggcaggctccagtaacactgacacatagaaagatgctgcaacagccccatccgggtggcagaaaccaccacccctcgggcggtgcggtgcttcccgggggagaaggtgagcaaaggggtgcagcgggccctctgggaagggaaaagatttgggtccttccagctcatcaacactcgggctttgccgctaagaatggcccacatttgcactcttagtccttccttggtttacagggcactgagggatgtgggggag

SEQ ID NO: 8221 - DNA, 91 bp, Homo sapiens
  chr19:19729161-19729252
  binary
cgttccgtttgaaccccatacatcccttcgtcctcgggacccccctccagccctcctcaagcgcccctcgtcagtctggcctccacgcccc

SEQ ID NO: 8222 - DNA, 136 bp, Homo sapiens
  chr19:19729395-19729531
  binary
gcggggcggggggcgatggcgcggggcgcggcggggcggccatgagcggcagggccgggcgggcgctgtgagggtgccgtcgagcctggagcactaccactggcgccgcagccaaccgccgctgcctgagcgccgc

SEQ ID NO: 8223 - DNA, 147 bp, Homo sapiens
  chr19:19729585-19729732
  binary
cgtgtattgcaccgcctacagacacgccccttcatctccgtcagccaaccggcgccacgcaccgcccccgggactcgccccgaacttccccctctccgggcttggactgggtttggggttgccgaggcaacggcacttctcataagc

SEQ ID NO: 8224 - DNA, 233 bp, Homo sapiens; identical to SEQ ID NO: 6516
  chr19:1978023-1978256
  hypo

SEQ ID NO: 8225 - DNA, 116 bp, Homo sapiens; identical to SEQ ID NO: 5770
  chr19:1979018-1979134
  binary

SEQ ID NO: 8226 - DNA, 50 bp, Homo sapiens
  chr19:2302510-2302560
  hyper
cgcgaagccggagctggggttggcgaccgagaaccttcctgcctcccctc

SEQ ID NO: 8227 - DNA, 112 bp, Homo sapiens
  chr19:2302951-2303063
  hyper
cagcggcttccacgcagacgcccgcagcaccacagcctgtgcacggcgcatccacgccctgttacaaatgttccattcaacgccttctagcacattcacagatcgtccgccc

SEQ ID NO: 8228 - DNA, 68 bp, Homo sapiens
  chr19:23598868-23598936
  hyper
ccgccaaatgccggatgccacgccctcctctccaactgtgccactgattcgataaagcaccagcactc

SEQ ID NO: 8229 - DNA, 61 bp, Homo sapiens
  chr19:30718934-30718995
  binary
ggtggggtgtgcgtgcgtgcgtgtgtatgtgcgtgcgtgtgtgtgtgtggaaggggtggtg

SEQ ID NO: 8230 - DNA, 38 bp, Homo sapiens
  chr19:32849484-32849522
  hypo
cgcaggagctcaaatagagccgcaagcaaagccctttc

SEQ ID NO: 8231 - DNA, 158 bp, Homo sapiens; identical to SEQ ID NO: 7101
  chr19:32850587-32850745
  hypo

SEQ ID NO: 8232 - DNA, 58 bp, Homo sapiens
  chr19:36222534-36222592
  hypo
gcagttccccatggcgtgcaaagcctgcagcagaggcagagaggagatggcaaggagc

SEQ ID NO: 8233 - DNA, 134 bp, Homo sapiens
  chr19:38481217-38481351
  hypo
ttgctcagctagtcagcccacagcgagaaccccgccccagtctgggctaacgtgtcctctgctgccagcagcccagtagggttctttgctggagtctggtttttccttgacttgtagctggcaagtgcttacac

SEQ ID NO: 8234 - DNA, 296 bp, Homo sapiens
  chr19:38701255-38701551
  hyper
atgtctgggtctgggatgacacctcctgacacccccgttccccaccccagcctcaggaggggccaacccaccgtcctcttcccagcccttcccttcccccggcccggctcccgcctccctcccggctgcgcccgctgcagctgcagcagcccgttgccagggcaaccacagctggctgggcgggagcccctccaccccatcccccttctcctcctttctggcaaagcagggcggagctgggacaaagccggggagaggcagggtgcaggcaggggaagaaggaggtggatggaggt

SEQ ID NO: 8235 - DNA, 31 bp, Homo sapiens
  chr19:38702212-38702243
  hyper
aaattggggttggggcgcccggcggggggcc

SEQ ID NO: 8236 - DNA, 324 bp, Homo sapiens
  chr19:38781936-38782260
  hypo
cgagactgcagtggggcagacactattaaatttgctggcacagctctgagtaccccctcgcttccaccctgacttcatcccgcagtagctctcagccctcccagcccctgcagggccacgtctttctctattgccggtcagcgtgtgtgtgcacaaagcccctaaggtttcatgtgtacacaccggtgctaagtgttttttacacccttgtgcatctctcggcctggggctcctgtgcaggttgccctgagagttgggtttttagttcaaaaagaaggaacacagatgactactctgctggcgacacggccactctgctggcac

SEQ ID NO: 8237 - DNA, 169 bp, Homo sapiens; identical to SEQ ID NO: 7105
  chr19:38873767-38873936
  hypo

SEQ ID NO: 8238 - DNA, 203 bp, Homo sapiens
  chr19:39212200-39212403
  hypo
cgggactacgagacggccacactatcggacatcaaagccctcattcgcaagcacgaggccttcgagagcgacctggctgcgcaccaggaccgcgtggagcagatcgccgccattgcccaggagctcaagtacgtgcgggctcaggacactatcatcacctggctctcaccacagcctgcccagactggtggcggcagcacgcc

SEQ ID NO: 8239 - DNA, 138 bp, Homo sapiens
  chr19:39642872-39643010
  hypo
cgtgatgaaatcttgagccatcccactctgtcccgcccgggacgtgaatcacctttcttaccccacatatccatggtgtatgtgctacccatctgtggctactcagtagctttctcggttctcacatccactgttgcc

SEQ ID NO: 8240 - DNA, 485 bp, Homo sapiens
  chr19:39646243-39646728
  hypo
actggaggtgggatttgaaggggagggaggggtgctgtggagcatctttttcttctgttcctgaacgggggttctgatcacatcagcctcatgcttggagcagctggttaagggcacagacaccgggacagacatccagcctgggagtcccagcgcctgacctcccctcgggcatcaagtcactccgcctctccgcgcctcagtttcctccatgatgaaaggggcctgctgaaggacctgtctcatttagggcagcagtgaggcaaagccccggagcccatgcctgtgccaagagcagggcctggcccagaatatggccttgtcacgttgagctgccttttttcagcagggttagtttcatcctggtgaggcggcgccagcatggcgttccaccttcttggcctcctctccctcctccctttcctgccatccacacctcccggccctattctcacacctcaggatggcgatatgggggcttcacc

SEQ ID NO: 8241 - DNA, 54 bp, Homo sapiens
  chr19:403809-403863
  hypo
ccgtcccaggccctgactggggctcaccaggccgcggtcaggaggccgggctac

SEQ ID NO: 8242 - DNA, 314 bp, Homo sapiens
  chr19:4042909-4043223
  hypo
cgcgccaggggctatgggtcaccttccccgcaagaggggcctctggacctgggtactcctcggacactcacccccaccccggtgctctgggtcaccatccacacccagcctctctgccacgcgacagacggaccccagagagatgggcctggcttccaaggccgggcaggaagagcaggaagggtcggggacctggggcttctctccttgggacccaggatccggtcaccctgggcccaaaggtgtggtgtggacgaggtgctcaacccacccagtctcttcagggccaaaaggggaaaagggggacccccccc

SEQ ID NO: 8243 - DNA, 344 bp, Homo sapiens
  chr19:4043330-4043674
  hypo
tttttttttttatgtacaagaaaaatgaatttttttgttttttcatcttttgtgtttttgtttgttttttattacttttaaagcttctccctccccactcccaaaaagtgcatttttatcagttttttttttttttaaatctcccacactttataaagactctcaatacagtctctggaatgtctatctgtctgtgctctgtaccctgagggcgccgccccgccccccattcaccaggcctggcccctccaaagtccaaggcacctcgattctgggcctggggtggggtggggggcgggacctgggcatcggatcctggtccacagcctccaggcagccccggc

SEQ ID NO: 8244 - DNA, 311 bp, Homo sapiens
  chr19:407832-408143
  hypo
ccacctgggccagagccccgtgctcactgtggaacagagactccttgcgcctcgtgtgggggctctcagccagcatggcgaagccgtaggacgtctgggccttgggcaccgagggcagggacatggcaccctgggcctgggggtcggcgtcagtggcctcctcggacagccagtcctcggcactctcgatctggatcacgtgccgggtggctgccttcagcaggctcttgctctcggctgccagcttggcaggcagccgggggctccgtggggtctggcggggggccgcagaggccaggttctgttccgac

SEQ ID NO: 8245 - DNA, 294 bp, Homo sapiens
  chr19:40829211-40829505
  hypo
ctctacagccatccttggaggtgggtctatacagatgaggaggctgaagtacaaaggacttaagtgacatggccaaagccacgcagtcaggcccctgtgggcttcagggtgtactctgagctacacaccaggcctggggcctgtgggactgcgggccgcggcaggaagtacaggctgcatcatgggcacagtgaagagcctctgcagggcttccagtgaggggacgggccctgtcctgtgggccgcacacactgctgctgtggggataggggctggggtccatggtaactgtgc

SEQ ID NO: 8246 - DNA, 571 bp, Homo sapiens
  chr19:4094519-4095090
  hypo
cgggaggcggtggaggagacaagacagggcagtcagctggtggccccggggcacccgcgtgtgggccgtggtcggagggggcctggatctctccgaccagagagagtggcacagagtggctgctctgttctgcctcctggcagaggacgagggatccacctctgcactttggtgccaggggcaggacaccccccagcgggagggtgagagggaaagagggtgggaaaccccgcctggtgggtcagaagcctggacgcaaccccagctaactgtctaataaaaccccaggcccggggcaacatcgccggagcgcacgccaagggcccggggcaactccggcaccaggagtgcggtgccgttccacggcgtcccgagctcacacacatggaccggccctgtgggcagcggggtgtccgcagctccttccccgtggtctgcggcacatgcctgtgaagcccacgccacaggtgctgctgggtgcttgggggcaggagaatggagtggggctggcgaccctcccagaacctgcgggcggatcccggggagcccacagtcagcacaccaggggtcc

SEQ ID NO: 8247 - DNA, 260 bp, Homo sapiens
  chr19:42349033-42349293
  hypo
atgcttgaagttcattggtctttgtgagacagggtaagaaaagcagcgcgagcttggcggttcctctggccactttctcacagtgtctttgggcgtcttcttgactgaatctgactccattggaggctgtggtaaccgtgaactagctgcacgaacacggtccctcctgcctttccgtcctcctccctcttagccggactccctaacccaggcatcccctctcctccccctcgcgcccctcccgccctcgcgccccctct

SEQ ID NO: 8248 - DNA, 68 bp, Homo sapiens; identical to SEQ ID NO: 6053
  chr19:44711963-44712031
  hyper

SEQ ID NO: 8249 - DNA, 84 bp, Homo sapiens
  chr19:45570303-45570387
  hypo
cgggaagttagcaagcgggtgtctagtgagggagaggtgacgtgggccaggcagggctcatgatggcaggactgcccttaggct

SEQ ID NO: 8250 - DNA, 220 bp, Homo sapiens
  chr19:45570493-45570713
  hypo
gggccttgcaggaaggaggactgtggatccggacccagggtggggtgcggttggggtccctggagcctcacagtcctcctcccgccctgctgcatccccaggagccgctcccactcaggggaccgctacaggcggggcggccggggcctcaggcaccacagcagtagccgcagccgcagcagctggtccctcagcccgtcccgcagtcgcagcctgactc

SEQ ID NO: 8251 - DNA, 74 bp, Homo sapiens
  chr19:45574700-45574774
  hypo
ggggaagcctcctgccccacctcatgcaccccaagaaagccagagtccagacgggtgtaaataaaagggaaaat

SEQ ID NO: 8252 - DNA, 48 bp, Homo sapiens
  chr19:45574888-45574936
  hypo
ctgccgcaggtgtttgtccagggtggctcgcaggccgaagggcacatg

SEQ ID NO: 8253 - DNA, 472 bp, Homo sapiens
  chr19:45575156-45575628
  hypo
gacttgggcatctttttgggtgatgccttctggctgtttgcagggtcagttctttgttccgtggtgatggctccccaagtgtctccaccagggccggcttgagccccactgccaggagccccgggttcctggacacctgctgtggcggcggctccagccccctcaccaccgctgcatggaagggtgctggtgggggcagcagcatggacagccggctccggaggggctgcagaggcctgctcctggctggtgtcggccatgagggggctctggggcggcacctgccggtgggtcttcttgtggcggttgagcttgctgctctgggcgcaggcgtagggacactggtcgcaagcatagggccgctcgcctgtgtgtgagcgcatgtgcactttgaggttgctgaaggagctgagggtcttcttgcacacaggacaggtggggctccgccgggtgaggccgctgccacttgcac

SEQ ID NO: 8254 - DNA, 80 bp, Homo sapiens
  chr19:45627047-45627127
  hypo
gagtagcttcttgcagctttgaggccctggcatccctctcccctgcctgcaggcttccttgttcactgggccaagtcccc

SEQ ID NO: 8255 - DNA, 173 bp, Homo sapiens
  chr19:46180187-46180360
  hyper
cggtctggcccctccctaggccctcgctgcctgccgcacggcccagatcgtgacccagtactgcgtgggtgccaactacacgtggctgctggtggagggcgtctacctgcacagtctcctggtgctcgtgggaggctccgaggagggccacttccgctactacctgctcctcg

SEQ ID NO: 8256 - DNA, 79 bp, Homo sapiens
  chr19:46180559-46180638
  hyper
gcggggtcggggtctgcacaggggcccccgcgcttttcgtcattccctgggtgatcgtcaggtacctgtacgagaacac

SEQ ID NO: 8257 - DNA, 59 bp, Homo sapiens
  chr19:46321120-46321179
  hypo
cgggctccctccggggtcagacgggggaaggggagggcaagcaggctagaagctgctgt

SEQ ID NO: 8258 - DNA, 110 bp, Homo sapiens
  chr19:46321422-46321532
  hypo
tgggcctgtcctctctgcccagctgccccctgggaggtgggagtcccggcctctgctgtctgcccatgtgaggggaagacttctaaagccctgacttctaaagcccctgc

SEQ ID NO: 8259 - DNA, 70 bp, Homo sapiens
  chr19:46907118-46907188
  hyper
cgtgaggattggaggagccacgtggaaaatgctgctgcccggagcccaggtggctgcgctggccagggag

SEQ ID NO: 8260 - DNA, 250 bp, Homo sapiens
  chr19:46907822-46908072
  hyper
tttgcagtcatcgtaaacggggcggcatggaaagccctcactgagaaggtgccaaagaccccaaggaggtgaggggttgcggccggcagatgcctggggaaagcgcatgaccggaagcgcaggaagagccaggttaaaagccccaagccagagtgtgataatatggggctgttaatgtgtgactactgcccctcccgtgccaggctcggtgctggcgtaggggaggcagtggggccaaagaaggccacct

SEQ ID NO: 8261 - DNA, 57 bp, Homo sapiens; identical to SEQ ID NO: 6054
  chr19:46929939-46929996
  hyper

SEQ ID NO: 8262 - DNA, 75 bp, Homo sapiens
  chr19:46992624-46992699
  hyper
cggccctcctcgggccccctgcttgccggacttttgtcccccagcaggtctcaccccctaatgcatggatttcgt

SEQ ID NO: 8263 - DNA, 112 bp, Homo sapiens
  chr19:47646754-47646866
  hypo
cgggcctctcgggtgcttcttgtcggcttgaaaggacttggggctgaaattgccaagaatctcatcttggcaggagtgaaaggactgaccatgctggatcacgaacaggtgc

SEQ ID NO: 8264 - DNA, 83 bp, Homo sapiens
  chr19:47676020-47676103
  binary
cgccaaaaaaaaaaaagagaaaagaaaaaaagcacatatcttcacggatgacagagttctctaggacttgctctgtgccgggc

SEQ ID NO: 8265 - DNA, 205 bp, Homo sapiens
  chr19:47881084-47881289
  hypo
cggtggaggctgaggccgaactcagatcatggatgcccttgcatgggcaccggcagcagagccatgggccccatggcagccactgccctgcccctagtgctcctcgagcgtctttgtgatcctaggcctggcctcggagtcctcacgcagccctgtgggtctccctttatagaggggactgaagctcaggcaggggcggggatac

SEQ ID NO: 8266 - DNA, 64 bp, Homo sapiens
  chr19:47881711-47881775
  hypo
cgagggacagaggattggcgaccagccgggccgcaggaagcggaacagacctgctacctgaggc

SEQ ID NO: 8267 - DNA, 215 bp, Homo sapiens
  chr19:48003714-48003929
  hypo
aggaagagagccagttctaaagtcaacgctcactctgcctcaggcacgcccctgccagcctatcacatgtcggccactggaaaaaccagagccgccaggaaacctgaggaatcaatgcagggtgctaggatggcgctccggacagccagcccgtgtggcccgcagaggccctcaccttgggggtcggctttcttgaatgcgttgccagcgtccac

SEQ ID NO: 8268 - DNA, 202 bp, Homo sapiens
  chr19:48012665-48012867
  hypo
cgccagctcatcgtgtgccagcctgcgtttccttatgtgtaactaggcataagactccacaccttgcagggctgctgaagcacgagcaatcttgcaggcagcaccccacggcgtgcccagcagagagctggccacaccacgggcgttcagtaaacgagagcatccctctcatcaggccccgcagaggaccgattccaggcac

SEQ ID NO: 8269 - DNA, 345 bp, Homo sapiens; identical to SEQ ID NO: 7123
  chr19:48150921-48151266
  hypo

SEQ ID NO: 8270 - DNA, 94 bp, Homo sapiens
  chr19:49127280-49127374
  hyper
cgcgtgttagagtctctgtctttgcagctaaagacctcctccctcacgccccttttcttttgtgaattcaatggatgagacaggcccactctcc

SEQ ID NO: 8271 - DNA, 550 bp, Homo sapiens
  chr19:49467064-49467614
  binary
cgatttgggtctgagccaggtctagttctgagggtcccaccaaaaaagtcggggagtgccaaggggatgaggtcagcgagtggccccacccccatccgtccccgcgggggccccttcccgcgctgagctcagcatgactcagcagtcgctgcctgcaacaaggaccccagataccggcctggcggggcatctgcagatcccctcggtcaggggctgccccgcctgggctgttcggagcagctcctctgtagggcagggcctgacctcaccccacaccccagtggcttcagctccctgcccagcgcacgggctgcctccatcagggcacttaagtagagtcaaggtttgcgccgactccgtctcccagaaatcaacgtggaccaggcccacttaaaaaatatgcattagtcgaagacagacgtctcgtccataggtccccagactgtttgtccacaacgcagggcttctctttgtgggcctgaaggagcacacgtcaggcaagacacgagggcaacttcagagacactgttcagggccacggagaattctc

SEQ ID NO: 8272 - DNA, 224 bp, Homo sapiens
  chr19:49600463-49600687
  hypo
cgagggttcggggaaggagcctggtagttcaagtgcccggggtgagaggtgaagtctgccttggcccttcgccactttaacacctccctttttctgtgtctcgagtttgttctgttttacttccatttgcaaaatagtaataaataaatatcagtgtccagcactgtgtctgggccatagtacgtgttcagtaaattatatgtctaatgttccattattggaac

SEQ ID NO: 8273 - DNA, 169 bp, Homo sapiens
  chr19:5023047-5023216
  hypo
cgcgggtgggactgagtgaaggaccctgagctgggagatgaccctggatgatctggggagcccgatgtcctcaccgggtcctcatgagaggaggcaggagggtgagagtcagagagaggctggaagaggctgtgctgtggctgcggaggtggaggaagggccttgagct

SEQ ID NO: 8274 - DNA, 450 bp, Homo sapiens
  chr19:5023245-5023695
  hypo
tggagtaggacgaagcagagaacgttctcgtgccaaggttttctctttcctgcctgagggccctttatgtagatcagaccagagacaagtgaatcccggtcttgccaggggaggcatttggagctgctcgtgggacgtggtgatgcggtgccaggccacatgcccggggctggggccgagtggcgttctcgtgctgcctctgtggccaggtttcacttgggaacctggctgcatcgcgggttcctcctgggccttctggtggcttggggctcctctgtcctcggtccctgctgggaaccgtgctttggcagcaggaaccagcgagatggcagcacaggggctggaggccggctgggactcactggggccgcatggggcttcacctgatgcccagccctcctgggacagggaccagtgggagcaggaggtgggacaagaggacgagggctc

SEQ ID NO: 8275 - DNA, 253 bp, Homo sapiens
  chr19:50306223-50306476
  hypo
cggccctcccattccggaagccgatgagttgctgaataagtgagtcctgggagtggtgggggaggggaacgggacaggtgcggagcccaggccaggtgcagacaggcacccccgtcatcttgcgccccctgccccctcaggtttgtgtgtaagaacaacggggtcctgttcgagaaccagctgctgcagatcggagtcaagtcagagttccgacagaacctgggtgtgtcccgggggactgtgggaatgggtc

SEQ ID NO: 8276 - DNA, 78 bp, Homo sapiens; identical to SEQ ID NO: 7126
  chr19:50320125-50320203
  hypo

SEQ ID NO: 8277 - DNA, 67 bp, Homo sapiens
  chr19:50365162-50365229
  hypo
agatcggcagacccagggggagagaagaccccgagcggggacggggaggcaatgatggaggaaagcc

SEQ ID NO: 8278 - DNA, 371 bp, Homo sapiens
  chr19:5037624-5037995
  hypo
ttaactctaaattagtgtttctcttcgcttggcactgtggacttggggccgcatcgttctctggggtggcgccatcctgggcattgcagggtgctgagcagcttccctggcctccatctacctcatgccaggagcaccctcagtcgtgaaagccacagacatccccagacatggccaggtgtcccctgggggacaagaccccccctcagttgagagccacctgctcgctgcggctgctgctgctgttactgcttttgctaaagaaacctgtgcatgccggccacggaggcagcaccttcctgtcgttaacaggcacctggaggataagtgttttcattgccaagcaaaacagtttcttcactgatgtgatc

SEQ ID NO: 8279 - DNA, 154 bp, Homo sapiens
  chr19:5038238-5038392
  hypo
cggagcggctgggagggcctgcacagaagggtgcctggcacccagaaggcccgtggtgcccaccggcagtctagaatctggtcttgtcggcccataggctcacccccaccagaggagggaacatgaggctggggacaaggccaggagcccaggg

SEQ ID NO: 8280 - DNA, 122 bp, Homo sapiens
  chr19:5038421-5038543
  hypo
cctcagctcctggatgtctccagaaagagccggcgctaacctggactgtcctttccttgggaccagccttgtctcggtttaactctaaattagtgaaggcaccgggttccggctgcagtgcc

SEQ ID NO: 8281 - DNA, 412 bp, Homo sapiens
  chr19:50832540-50832952
  hyper
cgagtcggggccgccaatgagacggagcgattggctctttctaagagagcagggaggaggggcggggcggggcgtcaagggaggcgggaccggttactactaattgtgttcggcagcactggtagccaggggaaggcggggctagatacgatagagagagaccttactgaactgaaaaaagtgcgggcggggtagagggaggaggggacacatccaagctatttaaagacgcccgactggcctggaggggcggggccaccatgagagaggccgtcctgattgggctgagaaaggggcggagagaaacaaaacagatcgcacgccctcacctaaaacaccgctaggcaggacctggtggggaggagcattgcttggaagagacagggccgcagaaagtagaaacggtccagat

SEQ ID NO: 8282 - DNA, 192 bp, Homo sapiens
  chr19:50833042-50833234
  hyper
cttagactcggtgagaaggtgttgaaacttgagagagtcctggaaacccgagagggtctggataggcctaagggagggagcggggctgaggctccaaggcgggcctggttagtcggggctgggcccggagaatgagtgtccggatggatgagtggtactgaggaaggtgagtggggtcgacaaatagaaaac

SEQ ID NO: 8283 - DNA, 446 bp, Homo sapiens
  chr19:50833970-50834416
  binary
aatataggcaggaccgataaaaaatggggtgggctaggagtctcagaggtcgggttctggggaagaatggagtgaggggcggggccagaaaaaggggaccgcctcggagcgggccgtccccgccccctgggcggtcgtaggctccgagaggcagagcgcaggctcagggggctggggcggggccagcggctgcggctggggctgcggagggaggaggcggcgcctgcgggagcgaagggggcgggtcagggggctgcgggcgccctcgggcagcacagtttctggcccgccgcttcctgctgcaggtgcggcggctgattcgtatcgcctcccaaccccatcccacccccgctcccgtttctgggtttcttggcgtctctttttctcccttcttgagtatttgtgccgccgtctctgttcccacccctctgagtctccgacccctc

SEQ ID NO: 8284 - DNA, 119 bp, Homo sapiens; identical to SEQ ID NO: 7128
  chr19:52715152-52715271
  binary

SEQ ID NO: 8285 - DNA, 99 bp, Homo sapiens; identical to SEQ ID NO: 7131
  chr19:549193-549292
  hypo

SEQ ID NO: 8286 - DNA, 120 bp, Homo sapiens
  chr19:56602205-56602325
  hypo
cgcttatgctcaggcctccctccagacgcactgtatgagaaagtgccgggccgggcctgtgcttcagcaagccccccaggtgattctgatgccagctccagtgtgagaatcactattcca

SEQ ID NO: 8287 - DNA, 54 bp, Homo sapiens
  chr19:58964127-58964181
  hypo
cgtgcggagttacagcttgagggtaaagaaaaccggctggggtgcctgaggcta

SEQ ID NO: 8288 - DNA, 259 bp, Homo sapiens
  chr19:5897319-5897578
  hypo
cggccggcagacggagactcatccacgtggtggacacaagaacaggcctgagacctcagttctgcggctgcttccagcctcacaccgccagctcagcggcgccccccacgggccctggcaccagggccccagctccaggttcccatcaatggctctattctcctgtggggcccggggctcctgggcctaatcccccttggcagtggctctgcttccctgcctggctgccaacgcctcctccttgccactctcgaccccc

SEQ ID NO: 8289 - DNA, 538 bp, Homo sapiens
  chr19:59049765-59050303
  hyper
gggctggagggggcgggccggctagcgaggcgtggccctatgaaggggcaggctgggcgtggaggcggtgactatgccgcggatggggtgggcccagatctggggggccgcgcgcccgggctggaacaaaggcagaggcggggacaaagccccgcggcccccagtccccatcaggaacaaaggccacacccggcccagcggtcgacgcgcccgtgctgcagccacgtgcggacacctgggagcggggcccggggaggcagtgccccgttaccctcacgccccgcccggctagccacctttacctgtgcgcgccttgggagtggcgaatgggtttcatggttgttcgcgccagtcctcgcggcctccaaacatcctccggaagctgccacctaccccgcccccagccgttgtcacctggaccggagacctcacgaccccaggggcaccgcacagggggctgaggcccacccccccggggccagcctcaatgcacccacccaccacgttttcaacgcgctgatagtccctaggcgggttc

SEQ ID NO: 8290 - DNA, 292 bp, Homo sapiens
  chr19:5915130-5915422
  hypo
ttcgactcctctgagaaggacgggcaggtgggtggctgcgcggggggccccctccccaggcagttcctcggccgtgccccctcacggccctctgttcccaggtcacactggcggaattccaggactactacagcggcgtgagtgcctccatgaacacggatgaggagttcgtggccatgatgaccagtgcctggcagctgtgagcagctccggctcagccctgctgccctggcctgtcactccccacccctgccggagacctcccttccctgggccccttctctcctgggca

SEQ ID NO: 8291 - DNA, 406 bp, Homo sapiens
  chr19:5915520-5915926
  hypo
ggtcctaacaggagtcactggctcaggaccccagggagaaacgctctccccacccacgccatgctgaccagagatcttgcagcccctgtggatgcccccgccgaggtcccccgatccccgcacccggactgctgctccctgcccctcccttgcgggtcccccaggaagccaggtgaccccaggtgggaggctgtgtgtggaggccatcctggaaggaagtttagacctgcccaggtgtggagcgaggggcacaggggcatcctaacctcagaaactgaaataaagcctttgaaaaaaaaatctgtaaaacatcaacccccaatcagaagatggcaaatggggaataaaaatagcaggtaacatgtccagcgggcccagtatctacattctggtgagcggcccgagg

SEQ ID NO: 8292 - DNA, 324 bp, Homo sapiens
  chr19:5915969-5916293
  hypo
ggggtgggggtaaagtgcgggtggtggtggagagaacagggctgtggctggaccccagcactggtgacacgctgggtgggagcatgaggccccaggctgctggaggtcctcgcccggggaggtggaggccgttcctggtcaggggcttcctgaggcccctggggcatgcagaggccagggttttagttaaaagtttaatgtagttcccaaatacatttcatatgacaatcttacataaatgttccaaaacacatgggcgttatctcgttgtactcgtcactagctggctaaggcttaaagcagagacgtgtgactgggtctctc

SEQ ID NO: 8293 - DNA, 385 bp, Homo sapiens; identical to SEQ ID NO: 7143
  chr19:7267319-7267704
  hypo

SEQ ID NO: 8294 - DNA, 206 bp, Homo sapiens; identical to SEQ ID NO: 7144
  chr19:7267747-7267953
  hypo

SEQ ID NO: 8295 - DNA, 271 bp, Homo sapiens
  chr19:7685308-7685579
  hypo
cgtctgccagaacgcgccggtcgtctgcgtggggggcagggcaggggtgggtgtgtgtgcccgtgagctggctgactccgccgcagcccccaaccctgatacccgtccctccccacagccctacccgggggtcacagatctgggagcagaagctgtagatggcccgggcgcggtcaatctccccgagcttgcactccatgtctgcaaaccgcaggcacatctcacgcgcgtgctcgtccgacagcacctggacaccggggttggggaggcc

SEQ ID NO: 8296 - DNA, 159 bp, Homo sapiens; identical to SEQ ID NO: 6528
  chr19:883424-883583
  hypo

SEQ ID NO: 8297 - DNA, 544 bp, Homo sapiens; identical to SEQ ID NO: 7154
  chr19:884311-884855
  hypo

SEQ ID NO: 8298 - DNA, 50 bp, Homo sapiens
  chr19:957401-957451
  hypo
tcctcacctgcaaagcagagccagttctcggaacaaatgcgctcccgtcc

SEQ ID NO: 8299 - DNA, 213 bp, Homo sapiens
  chr2:10587836-10588049
  binary
cggggcccgctcgtctgtaccaaggcgagcccgggctctgcgcccctgcacctgctgcgcggccgccagggcctccccaacggctccccggccagcgcgcggccgccgaagggttgggaaagaggccggcgcggggccgcagggtctccgggtgggtctcccctaggcccctccagccccgagctgtgaagacgggggcagaacgaggcgccc

SEQ ID NO: 8300 - DNA, 297 bp, Homo sapiens
  chr2:10588876-10589173
  binary
cgttcagtacctcgtgcccgagagcggaaaagggaaatcgcgagcggaggaccgatgtgctggccacgtgggccccgccgggccgactccggaccctgctgccgcccattcctccggtgcaagggacctggaagtgatcccggtgccgctctgctcccaccagctagggagcagaggcgcgggagggaaggggcgtcccgggggtcgccagcacgctgcgggcagggctggcagccgcctccacgcccccgcgctggaagcctcgtctttgtaacatcgaggtatcctgtaactaga

SEQ ID NO: 8301 - DNA, 197 bp, Homo sapiens
  chr2:10589298-10589495
  hyper
agtaactaggtatctttaagggcggctccctggcgcgctctgagagttacggaagtcccaaaatgctttgaccgaaaacgtctaaacagtgaatacataaagcaaaaagccgcgtgggaaattcgagtccctaggagcgcccaggggacgcctctggaggtggactgccactcactccaggccacgctggaatgccc

SEQ ID NO: 8302 - DNA, 55 bp, Homo sapiens; identical to SEQ ID NO: 7167
  chr2:10600813-10600868
  hypo

SEQ ID NO: 8303 - DNA, 31 bp, Homo sapiens; identical to SEQ ID NO: 6084
  chr2:118981062-118981093
  hyper

SEQ ID NO: 8304 - DNA, 122 bp, Homo sapiens
  chr2:127863367-127863489
  binary
cggcggccgcgcagcgggtgggagagggggcaggcctggccgcggggcactggggggccaccctggcagaaacacagattctgcaatctcagatttcagagttggagtcgtcaggggaagtg

SEQ ID NO: 8305 - DNA, 427 bp, Homo sapiens
  chr2:127863878-127864305
  binary
aatccctccttcggcccacggagaacgaaagtggagaagcagtgggaaggaaggaactgtgggtgccggttcgagaagcagccttgggagtccgggggaatagtgtccccaggggcagagggacatactccctctcgccccgagcgccggcccagcctaggttgcctgcatgggcctggagagctgagggtcaccacctggcctcccagcctcccggcccttggcctccaaagcggggtagcctggagcgcgcgcctgagaagagcctggagcagggccggccactgctgtgcagccgagccacgaaggtgcaaagcggggccctgtcctgccccggccgggtgtggggagacagaggacgcaaacctaagagggcacccagagcgccggggaacgcagcctggggacctcgaagcccctcgaaagc

SEQ ID NO: 8306 - DNA, 63 bp, Homo sapiens
  chr2:172964685-172964748
  hyper
cgctcctgggggagcgcggtgggggtaagataagggatgggggctccgagggctgggaactgc

SEQ ID NO: 8307 - DNA, 86 bp, Homo sapiens; identical to SEQ ID NO: 6097
  chr2:173099596-173099682
  hyper

SEQ ID NO: 8308 - DNA, 42 bp, Homo sapiens; identical to SEQ ID NO: 7183
  chr2:175190730-175190772
  hyper

SEQ ID NO: 8309 - DNA, 34 bp, Homo sapiens; identical to SEQ ID NO: 6099
  chr2:182323095-182323129
  hyper

SEQ ID NO: 8310 - DNA, 72 bp, Homo sapiens; identical to SEQ ID NO: 6100
  chr2:182818959-182819031
  hyper

SEQ ID NO: 8311 - DNA, 34 bp, Homo sapiens
  chr2:19557652-19557686
  hyper
cgcggtcggctgcggctgtggccattcactccct

SEQ ID NO: 8312 - DNA, 235 bp, Homo sapiens
  chr2:19557727-19557962
  hyper
ggagcgcgtctcaggaaagtttgtgcccgctgaagttgctctggtttcttaaagggggcccacagattgactttcaaagtccgtgggcacctcgcccgtgattccgcagagccgggcgggctggccgcagtagcggaggcccgccccccttaatccccagcggtcagaggccgaggaccccgcgcaggaagtcctgaggcagcacccccaaccaccctgctctcactttcacaaa

SEQ ID NO: 8313 - DNA, 341 bp, Homo sapiens
  chr2:19558041-19558382
  hyper
aacctgggagtcctgcccgcattcgctttgctgagcccaggcgcccaggactgcaattaccttgttccgcagaggtcctggggctgagcacgtctctggggctttagctgaaggggactggggaagccggaggccctggagcccacaggcgcccctggagctctagtgtcccgactcctctcctgccgcggggactccaagcgccggacacgcgggagcgagcgctcagcagccccggatcctgcacgccggggacggtgagcctcgctcgcggctccctcgctgggtctgaaccaggagcagctgagaacgtgccggggagaggccgagctccgactcac

SEQ ID NO: 8314 - DNA, 235 bp, Homo sapiens
  chr2:20574714-20574949
  hypo
cggatgaaaagacagtcatttggcagcgaggagcaagcgacgggcctcatcctcactctcgcccggcttgtcctgggccctcctgcggccctaggaattgcctgagggacaaacaaagtggacaaagtcgctgacagacctgagttactgccttggtcctggtgaccctgctccaggcagtccatctctgtctgcgatccattgatcctggcgccactcctggtgcttcattatc

SEQ ID NO: 8315 - DNA, 68 bp, Homo sapiens
  chr2:216179503-216179571
  hypo
cgcacccgaggccaagattttgtaggggtggaaaggtgtgatcctttgctctccatcgtaaacgtcac

SEQ ID NO: 8316 - DNA, 129 bp, Homo sapiens
  chr2:219735657-219735786
  hyper
cgctgcgggctgagtggggctggtcctcctcccttccaccccaagcccttttttgggttacacccctgacctgctattctctgctttccagggctgtgggcagccccttggttatggaccctaccagca

SEQ ID NO: 8317 - DNA, 208 bp, Homo sapiens
  chr2:219762346-219762554
  hyper
cgcccgcccctgcgccgcccgcccgtcctccgccaggccgggtctgcgccgccaattgcagcagcacgcagcagctgattacccctaccggagcctggggagcggccaggggtggggacagcgggcaggtcaagggggcagggtccctggggttgtccctggccccggggtccttcactggagcttctgattctagcgcagcttctcc

SEQ ID NO: 8318 - DNA, 169 bp, Homo sapiens
  chr2:219763161-219763330
  hyper
cgggccttggggcgcgtagccccagttaattgggtgggtctcgggttcaactcatccgctgccctttgacttgggaaccacccgccctctgcctcgcacggcgcccaaatccgacttcacgggcccattgctttccgccggccgcggccttgctggccctctttcctcc

SEQ ID NO: 8319 - DNA, 394 bp, Homo sapiens
  chr2:220348591-220348985
  hyper
cggagccccggggccggcaccgccgagcgggggcgcccctcgagatccccgtggccaggcttggggcccgtaggctacaggagtctccttccctgtctgccctcagcgaggcccagccatccagccctgcacggcccagcgcccccaaacccagtacccctaagtctgcagaaccttctgccaccacacctagtgatgctccgcagccccccgcaccccagcctgcccaagacaaggctccagagcccaggccagaaccagtccgagcctccaagcctgcaccacccccccaggccctgcaaaccctagcgctgcccctcacaccctatgctcagatcattcagtccctccagctgtcaggccacgcccagggcccctcgcagggccctgccgc

SEQ ID NO: 8320 - DNA, 38 bp, Homo sapiens; identical to SEQ ID NO: 7193
  chr2:223753603-223753641
  hypo

SEQ ID NO: 8321 - DNA, 131 bp, Homo sapiens
  chr2:231676894-231677025
  hypo
cgtagcctttcctagcactgggacctgaaaccggtttctctccttggcgttcttaaaggagagtcaagttacagtatcatgtagtggacagtcattgccgtggcattgcagtaaataaaatgctcaactcc

SEQ ID NO: 8322 - DNA, 221 bp, Homo sapiens
  chr2:233740556-233740777
  hyper
cgctaccggcaacttgcttaacctagaggtggggggtgacgtccctgtcggccccgtcacctggggccccagcacctctccttggctttgcagacgatgttccacaggagcccgtgcccacgctgtggaacgagccggccgagctgccgtcgggagaaggccccgtggagagcaccagccccggccgggagcccgtggacaccggtcccccagcccccacc

SEQ ID NO: 8323 - DNA, 168 bp, Homo sapiens
  chr2:233741586-233741754
  hyper
ctgcctcccatcccgctccgctggggttcagagcgttccgtgaggaggtaagcgctagggcaggagaggccgacagagaccccggggcccgccgctccttgaggccggggttggggagggcaggggccgtcggctctcccagccagaggccgcgtggttttgggggac

SEQ ID NO: 8324 - DNA, 216 bp, Homo sapiens
  chr2:236452983-236453199
  hypo
cgttgcttacgaggttctgagtcccgcagggactggctttcttcctctgtaggagtttcctaccatgtaagttttagaaggaaaggatactctttggggcctcagcggtccccttaggctgagcatctgaaccttcccgtggtccgtgtggctggaaggaggcttccatcgctggaaatccatttctcaaggcgaggagccagccgggccgaccac

SEQ ID NO: 8325 - DNA, 288 bp, Homo sapiens
  chr2:240226690-240226978
  hypo
cgcgctttcttccagccggcctggggcatgtcaggaggcagggcctgtactgcaggctctgtgttcttagacagcctttgcagggggcagaggtgcccactgccacatgggcacacacaggaggctcaccacgtttcttcaaatgcagatgacaaagcagcttgagtaacacaaatacggccacactcatctgaggattgctgctgtgttttctaactgcatggccatgaccaagcagtcggttttcatccaggttggtagtcaggtttctgaaagcgatggcagtcg

SEQ ID NO: 8326 - DNA, 154 bp, Homo sapiens
  chr2:240227007-240227161
  hypo
gcacaccttcaccctcgttacattttctggacaatggtagggaacattccttactccgctggcctgtcagcttggctaagcctggtgcaagtggctcgctgtgggtccgcggctccattacgggggagtctgggtcatctgtgagcccaacagc

SEQ ID NO: 8327 - DNA, 339 bp, Homo sapiens
  chr2:240700344-240700683
  hypo
cgccagcatcccctcggggcctgggaacagcactgcgagccggccgcacctgtgctggaaatcgccctcaggctgccgagtaattagttccacggttggatgcaggcccgtgctgtgacttgaagtcagtcggcgtggaacacatttcccatgtcgaggctgggcctgaccacccttctcacggtaaaggaggaagaaaattgcttctttgatggcatttgtgataggctggaaagcgcacagtggagtgagccaggaggcgctggctgggttcccacactggccgccgtcagcacccatcttgggagggaaaaaggagggaccacctcgtgtccccac

SEQ ID NO: 8328 - DNA, 100 bp, Homo sapiens
  chr2:240928864-240928964
  hypo
cgcggatatggatcgtgctcttcccagtccactgacattgggatttgcagtgcaggctgcaactcacccgctggttcccagcgaaacttacacacgcctc

SEQ ID NO: 8329 - DNA, 206 bp, Homo sapiens
  chr2:241771771-241771977
  hyper
ccgctccgctgtaggccccgcctgctataggccccgccccgctgtaggccccgcctgctataggccccgcctgctgtaggccccgcctgctataggccccgctccgctgtaggccccaccccgcaggaaacctcgccccgctggtggcgcgccctggttgccgtggcaacctcctccctccgccgccgggttgccggcttcgctag

SEQ ID NO: 8330 - DNA, 131 bp, Homo sapiens; identical to SEQ ID NO: 6539
  chr2:242277184-242277315
  hypo

SEQ ID NO: 8331 - DNA, 567 bp, Homo sapiens
  chr2:242616820-242617387
  hypo
cgttccgggaaacgaaaagctgcgtgaccagcatcatctgcaggcacagccagtcgggctggggcgagaccctcggccctgctctggaggaggagctcaagggactgaagctccgcgggccgtggccacaagcgacagtgctggcgcccgacgtgccagaagccctggctgccgcctggaaagaggccacgtgggcagcggtgggcacgggcgactggagtctgggagagaggtaggggctgcggtcgggaggagcagaggcggccagcctgcgagtccactgggaggggagagtccagcgtcctgggagcagagccagacctgggactgctgagattgaaggaggcaggactgaagggagaggcagcacacagcaccctcctgaacttagatggccaggtgctgctgcagggcccatgcccagcgagaggccgcaccagaggacacagtggcaggaacaggctggcgctcgtgtctgaagaggggctgaggatgtggaggattgcgcagactctcacctgacccaccagacaaagcgccaaatgtcaacatttagcaaaactcatc

SEQ ID NO: 8332 - DNA, 131 bp, Homo sapiens
  chr2:242617764-242617895
  hypo
cggaaacggcagcagctttgctgacacaactgtgccagccaccacggtgtcatcctgagccacttctccacgcttcctagtgtgcaattctgggattctcaccttccagttcaaagtcgtgtctttcatga

SEQ ID NO: 8333 - DNA, 531 bp, Homo sapiens
  chr2:242617924-242618455
  hypo
tggaaagccccgttctcatagcgctcatggccaaacgctccccgcttggcagcatccgccagctgtaactggaggaacaggaccaggtcgggtttgggaaggcccacgtctggctgtttacaccaatctagggaaaaattctgccaagaaagaacccaacagttaaagcttagtgtagtctaggtttttgtttcgaaagtcgtaaaaacaggaaaaaatgaggggacatttggtgaggtaccaagatgtgagactgtttatattgtggctcgtttaatttttagaacctcaaacgtgtcggtttctccagtgtcacctttgtttttcctttgtaaacagacaagtggacagaaaagtaggtagatagaacggctgccagtccccgccacccacagcccaggccccatggaggccctcccagcacagctacaggcctgctggccaggagcaaacagtctatgtacagaacccctggagacccccggcctagaacgcctgcagcacagagcagctgggtccggacacaggcac

SEQ ID NO: 8334 - DNA, 288 bp, Homo sapiens
  chr2:25354461-25354749
  hyper
cggagtccgttttcctcgggagaagtccgccaggaagttgggagcgcagaggaagcccaggctggaagggggcgtgaccctgccctgcctgcgcgcggtgcacagaggaggagggtgccagccttggatctcgggtgtcccgccccaccgctctcagggcccacagtactggagatgttcaacacgctgctgaggcagctgcggctcagcatcgactacgcgctgaccgggagctacgacggggcggtcagcctcggcaccaagatcatcaaggagcacgaggagcgc

SEQ ID NO: 8335 - DNA, 44 bp, Homo sapiens
  chr2:25354957-25355001
  hyper
ggttggagagggagggaccgcactggggcgaagggcatccaacc

SEQ ID NO: 8336 - DNA, 116 bp, Homo sapiens
  chr2:26524687-26524803
  hypo
cgaaagggaatggcagtcggagtcgtaactcagctgggctcttagcatcggccggtaacacacttatccaagagactggacttggtggccttaggttggccccactgcctcagggc

SEQ ID NO: 8337 - DNA, 116 bp, Homo sapiens
  chr2:27433190-27433306
  hypo
cgctatggtctcgcatctctccagaaagagggcggccaaaagcaagagctagctgttgtttcactacaactataacatgccaaggcacaaacagcagattgtgggacccccccccc

SEQ ID NO: 8338 - DNA, 89 bp, Homo sapiens
  chr2:27473102-27473191
  hyper
cggaggggaaaagggtcttcccgtcctgaccccagtcctgagactccctgcaaagacttccggctgcctctgccgctgcggtggcgtat

SEQ ID NO: 8339 - DNA, 59 bp, Homo sapiens
  chr2:27938267-27938326
  binary
cgtgctggactctttcaccctgcacgggggagaagccctcctcccgggagcctgtttgg

SEQ ID NO: 8340 - DNA, 38 bp, Homo sapiens; identical to SEQ ID NO: 7206
  chr2:30453530-30453568
  binary

SEQ ID NO: 8341 - DNA, 462 bp, Homo sapiens
  chr2:30454942-30455404
  hyper
cggagagctgcaggaggcgcgcgccccacttggcgcaggggggctcctgctcttcccgggcccctcctctttttctttttgtttgcatgcaagtctcaacgtcgaggccggcagcagcggggctgagctggtgcggccgcagggtttgcagagctccgggggggtggggggcgggaaacgctctccccacacgtaaccccactaaagccacaagcagcagggcacgcgctgcagcctctcaacccctgccctctccaccgcccctaaaaaccgacgcacattggtgggggccgggactgggaggagccgccttcgccgtgctgaaggggaaggagcccgggccgggcgcggggcgtcggaggtttgccccggactggggatcggagccgggagggatgcagagagaggcaggcccctgactgctgggacttccttgctggcagtttcttccttcctgctctg

SEQ ID NO: 8342 - DNA, 131 bp, Homo sapiens
  chr2:314855-314986
  hypo
cgggccccgccgcagggctgtgaggccgccgtgggactggttccaccgacactggaggccaggcgtgggccctccgtaaagtcccccgtgtgggattacgggacaggcggcggaaccccagtttaaccctg

SEQ ID NO: 8343 - DNA, 189 bp, Homo sapiens
  chr2:315015-315204
  hypo
tagaaggacctgagatggattcggttcgcggggaacggaggtgccctagctcccgttcacgaccgcatcttaaaaagcaaagtgagccagtttttcgcaaagatgatttcactggatttccgcgtttagcgtcacgatatgggggcctccgagcgcctctctgggcttccacacaatgggccacatcac

SEQ ID NO: 8344 - DNA, 284 bp, Homo sapiens
  chr2:37035304-37035588
  hypo
cggagaagcataaatgtgaagctgacaccagagatttaatttctccctatgaatttgcttagcagacagctttccactaacgcaggcagggactcagctgagggagtaggactgagtccagcgataacccgggggcttcgcctcagtgagtggccgctgggtgaaccgagatggaagaacacggtaggagggctagtgcagaaaacaagggcctgcttgcttcttcacctgccccgggggatcaagcctaatggtgacactggaggatttgaccctgacgtggc

SEQ ID NO: 8345 - DNA, 125 bp, Homo sapiens
  chr2:37287740-37287865
  hypo
cgaccttccaaagttacctgccaggtaaaagaatcgcctcgggccttctcagcttccaattcctttaaggaacgtgggaaaacatttcgccacaataacaacatcttgggcagatggtaacgaac

SEQ ID NO: 8346 - DNA, 64 bp, Homo sapiens; identical to SEQ ID NO: 7212
  chr2:43019535-43019599
  hyper

SEQ ID NO: 8347 - DNA, 72 bp, Homo sapiens
  chr2:44497628-44497700
  hypo
cgcagcaaagaaagaatgaagcaacaaaagaacgaaagcagctctctcggctttcggctcggaggaggccaa

SEQ ID NO: 8348 - DNA, 61 bp, Homo sapiens
  chr2:56149749-56149810
  hyper
cggtagccaacgaacgaggcagcaaagacgtaaaaactgctgtagaattgcatttcacgtt

SEQ ID NO: 8349 - DNA, 90 bp, Homo sapiens
  chr2:56150447-56150537
  hyper
gtcccctttcttaacagcaagctaacgcggcggtcccctggagctgctcagcgtcccagcttctaaccagctcctatggaatccaggtgc

SEQ ID NO: 8350 - DNA, 259 bp, Homo sapiens
  chr2:5866211-5866470
  hyper
ggaaggtgtgtgtcacagtccctaatggatcagctaccaatcattagccaagtccttctcttacttttctcctcggagagaaccaagcttagacaatagcatggctttcgaggtgggaaggacctcatgaaggagacggaaaagagtgactgcagatcttacatgtaggatctggcggagctcagcttaaagccgttgccacccagccatgggcattttctccacattttgcaggcatcctacaactgaaaactgggtc

SEQ ID NO: 8351 - DNA, 224 bp, Homo sapiens
  chr2:70224820-70225044
  hypo
cgatggcactgaaccacagatgagcaacagaatgacctggggaggcatttaaaatctagatcctgactcagttgatctggccgggtcaagcatgtgtatttttgcaaaagtgccccaggtgattctgacacatactcctagttaagaaccacggttacggccgcctcttcctcatcgttattaataacaagagaaacaacaattgacattttttgtgcacttac

SEQ ID NO: 8352 - DNA, 413 bp, Homo sapiens
  chr2:74729488-74729901
  hyper
cggattgccggcccggacattccactgaattctgtgaatgtgtagcagggttggaggaccctcggaataacccccttggggaggtggacaaggacaatctcagcgaagagcttgctcccctcctccccacccttaggaaacgtccgtgaaccggagtgagagggcagtgggagttcagggagcaaagtccaggcggaggagcgtgaggcggggcttccgtccgtcccgcacacttctgggattgttttctctttcagaaagcgctactgcggagtgaaccggtccttatatcttagtttcgtgactttgggggcggcaggcctgtgagttgttttccgccctggacgctgttttgcaaagatctctgcgcgcccaccgccaccctcccgggcgtgcgggccgggaagcagcca

SEQ ID NO: 8353 - DNA, 239 bp, Homo sapiens
  chr2:74729933-74730172
  hyper
ttttctccccccaactccccaagactcacttctagggaagtcctttttcccatcaagccctgggaaagactggccaggctgagagagggacccgtcctcctctgtgccaaaggcgggagcaaatcctggtgctgtcgcctttggatgtgagtcctggaaatggcgggggtgaggaaggtgggcaggggcaaggtttggccctcaggcgagaaccgacgccttgtcccggaagcgcagca

SEQ ID NO: 8354 - DNA, 79 bp, Homo sapiens
  chr2:74730644-74730723
  hyper
gcagggccttccagggagtcccagtcagactgctccccagctcccgcagctgctcggtccctgcaaagcccccgggagc

SEQ ID NO: 8355 - DNA, 236 bp, Homo sapiens; identical to SEQ ID NO: 5803
  chr2:74781700-74781936
  binary

SEQ ID NO: 8356 - DNA, 123 bp, Homo sapiens; identical to SEQ ID NO: 6112
  chr2:74782349-74782472
  hyper

SEQ ID NO: 8357 - DNA, 61 bp, Homo sapiens
  chr2:85280346-85280407
  hypo
caagagctccttctgtccactttagtgcgtgaagagagctcatcctcagatgaggatgatc

SEQ ID NO: 8358 - DNA, 174 bp, Homo sapiens
  chr2:8713195-8713369
  hypo
cgcctagatgccaacgtcgggttctaccgctgactagctgcgtcttggccatgttatttcacttctttgtgcctcagtttcctcactggtaaaatggaaagaacaagaagaataatgtctacattatgagagcgttatgccatttcagtgaggtgatacttgtgccagctccgc

SEQ ID NO: 8359 - DNA, 58 bp, Homo sapiens; identical to SEQ ID NO: 6542
  chr2:95941852-95941910
  hypo

SEQ ID NO: 8360 - DNA, 59 bp, Homo sapiens; identical to SEQ ID NO: 7233
  chr2:96991316-96991375
  hyper

SEQ ID NO: 8361 - DNA, 77 bp, Homo sapiens
  chr2:97427378-97427455
  hypo
cgcatcgtgcagaactgtggcaccgagaaggagaggcgctatgcccgcaagattgagcccatccggcgcaagggcaa

SEQ ID NO: 8362 - DNA, 263 bp, Homo sapiens
  chr2:97435378-97435641
  hypo
cgactccttgatggagacgaagagaaccaagggggcacgctattcgggagcctccttggagggtcagatggggtgaagaccatgcacagactgtgggatgggaccttaggctgtggggtgcccagcgagagcagcctcggacaagtggtgcccgaaggcagctttgcaccggttctccgtcagccctgcctggtaatagcctcaatatggtgatttgatctcaagaagctgcctgggggcaggtgtatctgagagtgacagga

SEQ ID NO: 8363 - DNA, 185 bp, Homo sapiens
  chr2:97437985-97438170
  hypo
cgcttacacaccccatgcgcgcacacacactcatacccccacataggcacaggcaggctctactcccacccgtgcgcacacacactcatacccctcacataggcacaggcaggtgctcacacacacgtgcgcacacacactcatgccccccacgtaggcacaggcaggcgctcacacacacatgc

SEQ ID NO: 8364 - DNA, 163 bp, Homo sapiens
  chr2:99097200-99097363
  hypo
cgtctccagtcccttgcattgctggcagcctcagaccggagagcactgaatcttccactagcctgtcttcttgccagctgcagccccagggcgcgtgtgtccgtctccgcagccaaactccccctgtgctggcctgtggagggtgagtggggggcagggtgcc

SEQ ID NO: 8365 - DNA, 206 bp, Homo sapiens; identical to SEQ ID NO: 6114
  chr20:21080357-21080563
  hyper

SEQ ID NO: 8366 - DNA, 67 bp, Homo sapiens; identical to SEQ ID NO: 6117
  chr20:22567768-22567835
  hyper

SEQ ID NO: 8367 - DNA, 585 bp, Homo sapiens
  chr20:30193272-30193857
  binary
cgggcgaggtggtgcgctgtctgtctgagcagagcgtggccatctcgcgctgcgccgggggcgccggggcgcgcctgcctgccctgctggacgagcagcaggtaaacgtgctgctctacgacatgaacggctgttactcacgcctcaaggagctggtgcccaccctgccccagaaccgcaaggtgagcaaggtggagattctccagcacgtcatcgactacatcagggaccttcagttggagctgaactcggaatccgaagttggaacccccgggggccgagggctgccggtccgggctccgctcagcaccctcaacggcgagatcagcgccctgacggccgaggtgagatccagatccgaccactagatcatccttataccgacggggaaacggaggccagagagggcgtgggcgcttgcaccacttccgtcccatccttgcgggtacctggctatgcgggggtgcctaaggagcctggaaaaagcgctcccccgtcgtgcttcctggggaagggggcgttcgctgcgctcggagcggcgtcccttccaacccgccggtctcatttcttctcgttttcacaggc

SEQ ID NO: 8368 - DNA, 189 bp, Homo sapiens
  chr20:30193992-30194181
  binary
gagggagaacaagaccgatcggcggccactgcgcccttaactgcatccagcctggggctgaggctgaggcactggcgaggagagggcgctcctctctgcacacctactagtcaccagagactttagggggtgggattccactcgtgtgtttctattttttgaaaagcagacattttaaaaaatggtcac

SEQ ID NO: 8369 - DNA, 62 bp, Homo sapiens; identical to SEQ ID NO: 6121
  chr20:30639044-30639106
  hyper

SEQ ID NO: 8370 - DNA, 139 bp, Homo sapiens; identical to SEQ ID NO: 6122
  chr20:30639494-30639633
  hyper

SEQ ID NO: 8371 - DNA, 126 bp, Homo sapiens
  chr20:3229128-3229254
  binary
cggaggctacaccctttcccccgggccagcttccacatctgcccagtggggcatttccccttgtcccacccagcgactggttgacaggaagcagggtgtctatggactggcggcgggcgccccttt

SEQ ID NO: 8372 - DNA, 155 bp, Homo sapiens
  chr20:3229326-3229481
  binary
gaaccgcctggcgagtggaacccgagcttgcacggggacagctgatgcctttctggtcgctcctctagagctccgcgggctccggcaaacccccccgttagaacttgcggttccaacgcgcagcgccaaatctggcccttacttgacccgtcagc

SEQ ID NO: 8373 - DNA, 32 bp, Homo sapiens
  chr20:3229526-3229558
  binary
cgccaagctttcactgcgcggaaacgcgccca

SEQ ID NO: 8374 - DNA, 144 bp, Homo sapiens
  chr20:3229659-3229803
  binary
cgggtgggccgggagagccccgttcccatagccggcttccttgagcccctccccaagttctgggactccccaagttcccaccccgcaagccagtgtggtttcttcagatgaattttattcttactctccacgggctgctccggc

SEQ ID NO: 8375 - DNA, 146 bp, Homo sapiens
  chr20:32301652-32301798
  hypo
cgcaacccgttttctgagaagtgccttgagggaagagctacgggagatgacaggaaggtgaagatgcttcagcgagagacaagagatcagggagctttgaggaggaagtgatcctcagagaactggtctggattgccaggagggaa

SEQ ID NO: 8376 - DNA, 322 bp, Homo sapiens
  chr20:32307879-32308201
  hyper
cggcccgacggccccactcacacagccccgttccggaagcccttaagcacggccaacgcagcgtggtagcggcgcttgcgcagcagtgcgttgacgactacgagcagagcccttagctgcggcggggctgccatagtgcgggctgcgcgcagggtcggggttaggaactgtaagcgcactgacagccggaggttccagctgcgcgcccacagcccctcggtagcgccgccgactcgtggcgtctataggctgtttctgcgtcactcatgcatggaagaccaatcagagagcgtacttgtctcatgggacaatagcactcatc

SEQ ID NO: 8377 - DNA, 413 bp, Homo sapiens
  chr20:32378478-32378891
  hypo
cgtcacggcccctccctgagcctgagatgacctggcaaagcgagccaaggtgcagagagtgagcagctgttccaggcagaggagaatggcaagtacaaaggcgcagagggaggagccagcgtggcatctctgaggagagcgagtgtggctggcgcagagagtggctggaagaaggcagacgacgagggtggagagagctggggccagatcacacaggtgctggtggggaaagagcctggattttattcccagcgcagggcactgttgcggggtgaaggtctggatgcttctcactgactttcccttgccctccaggcatgaagctccacaaatgcgccctgtgcagcaagtccttcagccgccgtgcccacctcgccgagcatcagcgcgcccacacgggcaactacaagttc

SEQ ID NO: 8378 - DNA, 343 bp, Homo sapiens
  chr20:32378966-32379309
  hypo
aaggacaaggacctgcaaacccggcggcccccccagaggagggcagccccccgcagttgcggcagtggtgggcgcaaggtgctgacccccttgcctgacccgctggggctggaggagctgaaggacacaggggctgggctggtgcccgaggctgtccccggcaagccgcccttcgcagagccggacgcggtgctgtccatcgttgtgggtggtgcggtgggcgcggaaactgagctggtggtacctggacacgctgaggggctgggctccaacctggctctggcggagctgcaggctggggccgagggcccatgtgccatgctcgctgtgcccgtctacatcc

SEQ ID NO: 8379 - DNA, 87 bp, Homo sapiens
  chr20:32379338-32379425
  hypo
tgtttcctgggcaggcctgatgctcctgtttgggtccagggcccctgggggcagaccggtgatccttaccagtggaagcgagccatc

SEQ ID NO: 8380 - DNA, 187 bp, Homo sapiens; identical to SEQ ID NO: 7240
  chr20:36767690-36767877
  hypo

SEQ ID NO: 8381 - DNA, 109 bp, Homo sapiens; identical to SEQ ID NO: 7241
  chr20:36767917-36768026
  hypo

SEQ ID NO: 8382 - DNA, 148 bp, Homo sapiens; identical to SEQ ID NO: 7243
  chr20:37145099-37145247
  hypo

SEQ ID NO: 8383 - DNA, 63 bp, Homo sapiens
  chr20:37274639-37274702
  binary
cgcccccagaagtcctatccccctgccaaaacttgatcctttctggccaggtcgcctctttcc

SEQ ID NO: 8384 - DNA, 546 bp, Homo sapiens
  chr20:37274731-37275277
  binary
agtagcagcaggcgcccccagctctgcgacgcaggcctcaagacttggctgcggaggatgcacgcagacagggacaaggcgggggacggcctcgaggcggtgagtgcccccgaccccagacaggtggagaagggccgaggcgacaggagggcacctggggcgcggtgcttcccttcctccaggtccccgctaccgggctgccagcaacggcccagtgaggccaccagggggcgttgcggcgccgtcacggggagcgaggaggcgtggctgcgaaacgagggcttagaagcgggttggggaggggaaatggagtgactcggagacttcccctagaaaccgtcaccgccgccccatttttcggcagcccctggccgagggttgggaaaatgggagtcgctctgcggggtgtgaggtgattggggctgggtgggggatagtagaagggaagagccttccaaaaatactgagtattcctaggaggggtcctgaacacggttccttattaaagtcccgattagagaaattgatgagcgttgaggctgcacc

SEQ ID NO: 8385 - DNA, 390 bp, Homo sapiens
  chr20:37433723-37434113
  binary
cgtcagacgtcagcagaggtacgaccacttccttcctccagcgcttcacctcccttctttccagaaagaggaaatgatgcgagtccacaccgcaggccacagcccccatgtctcggccccagcagctgggggacctggccccacagatctgtccccagcgcaaggccagggccggcccctggacctcctgggaagccttcagactcaggccgcgcaggccttcaagctaggaaccctgagttcctggccctggcattcattctgtgtgaccttgagcaggttaccactcctctctgggcttcaggattcccgtctgtcaaatgggagcagggataccgtccttggcttccctctttccatggtcggggtgggggttaggaaaactatttt

SEQ ID NO: 8386 - DNA, 93 bp, Homo sapiens
  chr20:46823583-46823676
  hypo
gcttttggcccaaacagctctttggaaaagagcacaggaatggccccggaaggtgggacctgtttccatggtgcacgcgcaacattggaggac

SEQ ID NO: 8387 - DNA, 246 bp, Homo sapiens
  chr20:48524519-48524765
  hypo
cgggccagaaacggttcagaggtgatgctggagagacggggaaggttcggagcccggaaggatctgagagcacaggatggatgggatcagactggcatagcctctcaggagggactgccaggggcaggaagagagaaggagggcctgtatggaggctgctccaggacctcaccttgatgcttctgaattccttcttccacgggtagaggaagaggttgatgcccaccgtctccagcatgctgaagg

SEQ ID NO: 8388 - DNA, 373 bp, Homo sapiens
  chr20:48524818-48525191
  hypo
accacctcatagaactggatcagccggaatcgataaaagggatccaccttgtgcaggctgagcagggttgaggctgccacccgcaggcactcatcgctgccaggccgctgcctgctggtggtggtatccactttgctctcatggaactgcacgtacttccgaaataagtcatccttgaatttagtatccattgaactgggcttccccatccgatcgaggggggctaccttatctcctccatggcttctggattagaggcagggacatcactaaaagcatggacatgttgccgcctggaccagcggagtgctctggaaggaggggaacaagaagcatgtcattcctcgatacggtcgcgcttcggcttcaggtc

SEQ ID NO: 8389 - DNA, 139 bp, Homo sapiens
  chr20:48789173-48789312
  hyper
agcgtcctccccatcccgttcggcctctgcctccaccgtcgtctctgtaacccgttccctgtgggagagtctctgttgcggtgttcaggggtttcggttttctggctgaacagtgattaacgcgagggaaggcgctgac

SEQ ID NO: 8390 - DNA, 316 bp, Homo sapiens
  chr20:50158039-50158355
  hyper
aagcattgggcccagcccggggaagtccccagcccccagcaactgagggcagttggaggcacagagtgacaaagttcaggcagaaagagcctgtgtccttctgaatccatgctgcagctgcccctcaccctaccccatcccaccacatccattaggactaagcgtagaagatcacttaatatagctcagaccaatcctcttgtgagtggtaagtgatgggttcagcagcagaacccagggaggaaatgggccggccttataataccaaaggttttaaccctctccagcatcagacagacaacctcttcctcagttt

SEQ ID NO: 8391 - DNA, 295 bp, Homo sapiens
  chr20:50208595-50208890
  hypo
cgtttattctttctttcttccggaggaatttgaacacagcctgggctcccgcagttcatgactgcaaaaggcttcgccttcgaaatctgacccaagtgggcatattcgggaaatgtggcagcttcgaagaacatgagccagttaagttttctctacctattcttcctccgcactcacctcccagttctaggcagctggtttatgcagcctgctttccaggactgtcgaaggaaaaggcacctctgccaaaagcaccccaggctacagggctgaacagagacccatcgtatcattc

SEQ ID NO: 8392 - DNA, 297 bp, Homo sapiens
  chr20:50722302-50722599
  hyper
cgctgtggctgctgcgctgcacaggctgcgcttttagattcggacttaattggtctgggctgggacctgggcactgggatgtttttttaaaaaagccgtctccctccctcaccacccccatcacacacacaggtcattctgatgtgcatccaagctgagaagcacgacctccactcctggttctcaaccctgctgcatacccaaatttaaattttaaatgaggagtgtctccaactgcagggagaaatgcagattccgaaagttctggattcaggtggccgaggccagaaatgtgtg

SEQ ID NO: 8393 - DNA, 57 bp, Homo sapiens
  chr20:55532724-55532781
  hyper
cgggtgtttactgggtcatttaaccgggtttctattttttaaagtttccttttctac

SEQ ID NO: 8394 - DNA, 52 bp, Homo sapiens
  chr20:55532850-55532902
  hyper
cggtggggccgggtggctccctctaattgcctgtgttcctgccttttccctc

SEQ ID NO: 8395 - DNA, 46 bp, Homo sapiens
  chr20:55936567-55936613
  hypo
cggatttattcggaaatagttcttgaaattgagcatacgtgcatgc

SEQ ID NO: 8396 - DNA, 113 bp, Homo sapiens
  chr20:57225466-57225579
  binary
cctgcacgaaccccgccgacctggcccggggcggcaagtcgaggtgcttagggcgccctgggcccggccaaccgtggaaaacccggcccggggcacgggggggcgcgggggtc

SEQ ID NO: 8397 - DNA, 119 bp, Homo sapiens
  chr20:57240808-57240927
  hypo
cgtgccacgcttgagcaccgttgggcttaatcacggctcctggacgtgctgggattagtgaatggggcctagtccttccagcgtggtcattgcctaagatgcgttccctgagtggacac

SEQ ID NO: 8398 - DNA, 57 bp, Homo sapiens; identical to SEQ ID NO: 6549
  chr20:58514041-58514098
  hypo

SEQ ID NO: 8399 - DNA, 115 bp, Homo sapiens; identical to SEQ ID NO: 5807
  chr20:58514400-58514515
  binary

SEQ ID NO: 8400 - DNA, 94 bp, Homo sapiens
  chr20:6022704-6022798
  hypo
cgggggctgcgctgggcgcgacggtggtaccctgtgcgtaggtggagcggttgaagcaaggtgggtgtgaagccccgagagtggtgctttggtc

SEQ ID NO: 8401 - DNA, 58 bp, Homo sapiens; identical to SEQ ID NO: 7254
  chr20:60470129-60470187
  hypo

SEQ ID NO: 8402 - DNA, 77 bp, Homo sapiens; identical to SEQ ID NO: 7255
  chr20:60470257-60470334
  hypo

SEQ ID NO: 8403 - DNA, 84 bp, Homo sapiens
  chr20:60544922-60545006
  hypo
cggaacactcggccccctcatcggggcactcggccccccgtcggagcactcgcccccccgtcggggcactcggccccccgtcgg

SEQ ID NO: 8404 - DNA, 209 bp, Homo sapiens
  chr20:60545058-60545267
  hypo
ccacgagtcctttggtgtcagatccctagtgcggggccaggtgacccacctgggtggggcccaagcctttcccggttgcttaactgaggtgcccttacactggctcaaatgcacagatattacctgtcagcttagtgtttcacattggcacgcgcctgtgtgacacccatgatgatcaaaacagaacattttcatcaccccagagggcc

SEQ ID NO: 8405 - DNA, 266 bp, Homo sapiens
  chr20:60545296-60545562
  hypo
cggagccccacaccctgcttctacccacccatgaacttccatcaggcggaatcagaatgcataggcttctgtgtccggcctcttccagtcagcgtagctcctctgagattcagctacctggtggagcatatcagtagttcgttcctttttattcctggggggcgtttcactgactaaatatgcatctgtttgactctccattcacctgctgaagggcatttgggctgcttccatcttgagcatcaatacggccattgtgaacattc

SEQ ID NO: 8406 - DNA, 373 bp, Homo sapiens
  chr20:60773878-60774251
  hypo
gagctcaagacggtggcccacgccggaatggtaggtgtccccactgccaacagcatctgcacacactcagctctagaaaatccacttttctcaatggggatttgccagtggcctggaagagaacagctttgcgactcacctttttcccatcagtacactgctgacttggtcgtgagcatgagcccttgtgactcccccagccctgaaatcctccctccaatcccagttagttacagactctgcgctaacaaaggtgctgccgcgggccgtgccaccgtcttccctctttcccccaggtgggattccccaacgccgggaagtcctcactgctccgggccatttcaaacgccagacccgccgtggcttcctaccc

SEQ ID NO: 8407 - DNA, 212 bp, Homo sapiens
  chr20:60984130-60984342
  hypo
agccaacctggcctgcgggcagtgtgtagggaacacacggcttttgtttcgtgtgattctggagaaattaaagcaacctttaacacacctggacttccctcttgggagttcagtccctctggcctctcaggacaacaggcagacatgtcacaggctgcaggtgggaggcagtgccccctgagtcaggcccgcaccccagtctggcccaggcc

SEQ ID NO: 8408 - DNA, 71 bp, Homo sapiens
  chr20:61585229-61585300
  hyper
cgccaattagaggggagggctgccctcagcgggccctgccccttgctctcttcctcttcccccacccacgt

SEQ ID NO: 8409 - DNA, 124 bp, Homo sapiens
  chr20:61838301-61838425
  hypo
cgtgggagacaactggaaacgcacagttcgggctgcctggaaaacacatgcagcctcctttcagggcctttgatctccctttgtctcccgcacagccaggcacaggttcagcgctcactcgctg

SEQ ID NO: 8410 - DNA, 46 bp, Homo sapiens
  chr20:61974409-61974455
  hypo
ctaaaacccagtgcaaacccctgacaatcccactaccaggtgttcc

SEQ ID NO: 8411 - DNA, 234 bp, Homo sapiens
  chr20:62031374-62031608
  hypo
ctcactgtggcccccagccccactgtttcacaacaccccagctcgttcgtgccctgaggagagggaccatccgtccccacacccggtccacagcaccgcacccgactcagccccagcatcgaccagaagtccccggccctcagaccggccgcccagagacagtgggagtgaggaggccacacaccgtccaggttgaatcactgcgttttactgagtgcacaggtccacctggcg

SEQ ID NO: 8412 - DNA, 115 bp, Homo sapiens
  chr20:62153095-62153210
  hypo
cggtgttggagtccgcagagcactcggaacctccccaggcctccagcagcatgaccgcctgtggcctggctcgggacgccccgaggaagcagcccggcggtcagtccagcacagc

SEQ ID NO: 8413 - DNA, 128 bp, Homo sapiens
  chr20:62153462-62153590
  hypo
cacctggaactgtgcacctggcaccaagcggaaaataaactccaagcagccagtagccccgatggtgtgtgcctgagctgtgtggcccgaggttccatttgagtgtgagaaatggctgaatccctccc

SEQ ID NO: 8414 - DNA, 272 bp, Homo sapiens
  chr20:62185051-62185323
  hyper
cggggccttgctgggcagagcccgcggcgggggaagccgcccctctcctctgtccaggcgctgggtggtccatccgcctggtcaccggccactgcctctctcccaaattcctccgagggattcccgaggagtgcgctcggactggggggttgagcaggaactccctcccagtcacccgaggctcctgcgccccgcccgaagccgggggtgcgtggggagtggtgcgcccgcggaagggctccgggacgggaaccccccttggagcctggctc

SEQ ID NO: 8415 - DNA, 180 bp, Homo sapiens
  chr20:62197207-62197387
  hypo
cgcctgctcctcggccaggtcccctactggctctggggcagcctcccagttccccgctgccccagcctgtgtgcctcggggaggccagcgccgtctctgcgccacaccctgctcgacctgctccatggacaggccctcggggcagacactgtgccgctccacgcactcacggatgaagct

SEQ ID NO: 8416 - DNA, 336 bp, Homo sapiens
  chr20:62197416-62197752
  hypo
agcagagggccacggcgtcccccactaccaccagctgggactgggcgcgggtcaggacggtgttgagcacgcgggcgtcggtgaagaactcaggggccagtgccccagggctgagcaggctctggcaggtgtgcacagtgctgagcaccacgacccggaactgccgccctgcagggggcacgcagtcaggtcaggctgggtgcgcaagacggtgggaccagccccacccctgccgatgccaggctgaggagtgggccgagccacccggggtatcctggggcagctggcagcacctggccccgctggtcacccacctggcaggatctcaaaactgcc

SEQ ID NO: 8417 - DNA, 161 bp, Homo sapiens
  chr20:62314955-62315116
  hypo
cggcttctccgcatttctgtgaatgattccggcttcttggtgttcccagcagaactccctcaagtctgcggcggggctctgacggcggtggcttggctgacatggccacattgctgagcctgttgggggctttgcgttcctgttctggccgtttttggctc

SEQ ID NO: 8418 - DNA, 154 bp, Homo sapiens
  chr21:33711064-33711218
  hypo
cggcagaaacagcgagtgctgcatgagcatcacgtagaccaccgggagctggatgagcttcgtgcgcacggagctttctgggctgtacaggagctgtacggcggtgaggagcatctttaaaaatgtgtggtcctggtaccgaaatctaggcggc

SEQ ID NO: 8419 - DNA, 53 bp, Homo sapiens
  chr21:34033597-34033650
  hypo
cgcaatgtgaggcaaggccccacggttccacccagcatacaagcttatggagc

SEQ ID NO: 8420 - DNA, 48 bp, Homo sapiens
  chr21:37718564-37718612
  hypo
cgtcggcttctcagcgtgctcagattacaggcctgaggcaatgcgctc

SEQ ID NO: 8421 - DNA, 42 bp, Homo sapiens
  chr21:37775172-37775214
  hypo
aaaggaatgatggccgagtggggatgtctgctcccgttttac

SEQ ID NO: 8422 - DNA, 130 bp, Homo sapiens
  chr21:38175745-38175875
  hypo
cgctcgcacagggcgaccttgtgtgcagaagtttattgccaaggttccagtttatgcccacgaggcgcacagcgaggcttctggaggcagcagcttgcttttggcattcccttacagagctcagagcccc

SEQ ID NO: 8423 - DNA, 497 bp, Homo sapiens
  chr21:40762272-40762769
  hypo
cggcagtcccgggacagccagtgagagaaagggacatttacctagggctgtctgccacccgggggttggggtatggagtgtatgtgggagtttaaggactttgtcatggtggggctagtttgtaggtgtttctcagcaggatgaatctcccagtgttctccagcaacagcctttgctctttatcagtcctgggaacgttcacggccgcagtttgcattcagtcctgcagggacgcacacaactggctgggtcacagagtggtcagggcatagacagaaagtagcgggggactggggaaccctcctgtgacccgtgttggaaggtgctgatccccgttgtccgccctgccagatgtccagggtgctgcagaaggacgcggagcaggagtcacagatgagagcggagatccaggacatgaagcaggagctctccacagtcaacatgatggacgagtttgccagatatgccaggctggaaagaaagatcaacaagatgac

SEQ ID NO: 8424 - DNA, 119 bp, Homo sapiens
  chr21:44338552-44338671
  hypo
tggacacattcatggtaagcacaatggttctcctagatctacaaacagattttttcctggcttaggaagggatgcatctgcttatagtttttgtataaaggaatggaaatgccgcgggc

SEQ ID NO: 8425 - DNA, 101 bp, Homo sapiens
  chr21:45374905-45375006
  hypo
cgtgaatgtgcatcacggctctatctgtggcccccaaaggctgggtgccagctgcctgtcggcagggagcgtatcaccgtggcacgtccatgccgtggggg

SEQ ID NO: 8426 - DNA, 53 bp, Homo sapiens
  chr21:45621745-45621798
  hypo
cgcggccggccaggcttggaacgcttgaggcacattctcagagacacgatttc

SEQ ID NO: 8427 - DNA, 157 bp, Homo sapiens
  chr21:45656872-45657029
  hypo
cgccccgcagcatgccggccggtgacatcagggctcggttccggtagcggctgtccacgttttccaaggagctgttctgtgggatgtggtaggtcaccacggttttcgactcactggtttgccaatatacgtaaacatcatttaaatcaaaacggct

SEQ ID NO: 8428 - DNA, 97 bp, Homo sapiens
  chr21:46206226-46206323
  hypo
tgaggacagcccagactgtgggactcgccatccatctcataactgccttgggggccacattacacacaaacacagattccagaaaccttcagacacc

SEQ ID NO: 8429 - DNA, 107 bp, Homo sapiens
  chr21:46277475-46277582
  hypo
cgcatgattcactgtttttaactacagttaatagctgtgccaccaccacaggtgacaccgtctcacctccaggggctgggagttgaacacttgctgcatgcctgggc

SEQ ID NO: 8430 - DNA, 45 bp, Homo sapiens
  chr21:46277614-46277659
  hypo
ggctcccgcagcctcacccctctgctgccccggacgctgagatcc

SEQ ID NO: 8431 - DNA, 395 bp, Homo sapiens
  chr21:46352279-46352674
  binary
cgctccgagcctggccgcctccctggggcgcgtgaagggagctttccttccccgggaaaggccggggccagagacccgcactcggaccaggcgggggctgcggggccagagtgggctggggagggctgggagggcgtctggggccggctcctccaggctgggggccgccagctccgggaaggcagtcctggcctgcggatggggccgcgcgtggggcccggcggggcggcctcgggaggcgtccaggctgcgggagcgggaggagcggccgtgcgggcgccagcgccgtgggtggaggtcgccgtccctcctgaggggcagccggtgcatttgggacccgggagcagagcccgcgcctccccagcggcctccccgggggtctcaccgggtctccc

SEQ ID NO: 8432 - DNA, 60 bp, Homo sapiens
  chr21:46934012-46934072
  hypo
cggagggagcaggccctcaggttggggaggcgctgggaggaggattctgatggcggtgtg

SEQ ID NO: 8433 - DNA, 391 bp, Homo sapiens
  chr21:46935349-46935740
  hypo
cgcggggcacagtgcagggacagcatggccaggcagctgccctgagtgtcgccagcacgctgtggccaccgccagagtgcggcacagggcagggggaatcctagggggcctgctagcaggataagcggaggcccccattgctaaggcaggcggccctcgaggcaggggtcgtggggatgcactgagggccgcctgcaaagttaccacaggggcgcccgagagtcactggttcacattctgaacaccgtcgcttggaagacactgcaaacccagcttgctgacaccaggaggatggacagccagctggggacaagtctcatctgcagcctcagggcctgaggcttgggcggagcacagagtgcagggggaaggggttgtcactgggctcagg

SEQ ID NO: 8434 - DNA, 189 bp, Homo sapiens
  chr21:47799620-47799809
  hypo
cgagtctgctgccgaacccctctctagtgaatttttttttctgtgattgtatttttcagctccagatgtcaagggagctctatttcagtctttctctctgctgagggccctgcgtgcattgtgccctcagggctctggcgggcggtggacagcctggccctggccttcacccctgctgtgccaagccac

SEQ ID NO: 8435 - DNA, 70 bp, Homo sapiens
  chr22:21386510-21386580
  binary
cgagccggacccggaacaggagccgcggctctgcgtcggggcgggtgtggcccaggcagccacctggcca

SEQ ID NO: 8436 - DNA, 201 bp, Homo sapiens
  chr22:21977477-21977678
  hypo
cggggcctacaggcgtgtaagacagcttggtctggtctgtgcagaagtggggagtgatgggcaggttcggcagcctaacattgttcaggcgcatggcccctgcggtgtgtacacgaactcggcttcttttgtcctaggtacgccaagggcaggtttctggagactcccttgtgcccgggatggcaagggcaccgggctggc

SEQ ID NO: 8437 - DNA, 212 bp, Homo sapiens
  chr22:22036173-22036385
  hypo
atggcgggaaagccgacctttgcgccgttgtcaatcctgcacctggacgtttgtggggtgtaggtggccagcgctgctccaggggccttgggagccacttcttgccagaagcctgcacaaactggcatggtcagtcctcgttagtggagtgagggctctgctagaccgcaccgcaggagtgcaggcatcttgtgtgcacagcccctgcccac

SEQ ID NO: 8438 - DNA, 137 bp, Homo sapiens; identical to SEQ ID NO: 5811
  chr22:22862472-22862609
  binary

SEQ ID NO: 8439 - DNA, 500 bp, Homo sapiens
  chr22:23800960-23801460
  hypo
ggggagggttcccagagggctgccgggcgaagggagtcctttccaaaacggtttcctgagctctgatgcacacacatgcagctcacccccaagtctagcgttccattagtctaccgttccgttcttcccagcacattcggtgcgcagccgcgaccagtctaaccgtggcacctttccaccggccctgagccctggcgtgcccctccacgacatcccctgggcacggagttgtgtcgacaggtctctgtgactggctgggcatgttttcggggtttgcccgcggggcagcgtgtctcagagtttggctgtacgaagcggtgttgacgggtaaacccggttttgtctctccctccggcggttgagggctggttccgcgttccatctgttagtgatgggatcgtgttgccgtggacgtccgtgccgaggtctgtgtgtggacagcgctcagaccccctggctgcgcgcccgggcgtgtgctgggcccatggactctgcgttca

SEQ ID NO: 8440 - DNA, 60 bp, Homo sapiens
  chr22:24181727-24181787
  hyper
acctccccaaacgtccagggccccactcaaatgtgccggccgctgtcggggttcttcccc

SEQ ID NO: 8441 - DNA, 97 bp, Homo sapiens
  chr22:27053098-27053195
  hyper
cgcccctggtccgcggtcgcgcgcagcccccgcgcctctccagccctgagctctctgcggcctaatgtggacgggcaagcgttgccatgacagcgcc

SEQ ID NO: 8442 - DNA, 268 bp, Homo sapiens
  chr22:27053250-27053518
  hyper
gggggctgcggagtgctccctccaagaccggttgcaccccgctttcctggccaggactctgggcgcgggtaaggaggggttgggtgtgaggttgtaggggcgcaaggaggcgggaggagggtggaggtgagggccgggggtggggcgcctccgcccgccagccgctcccgcattaaaatttcatgggcgctgcagcagctacaaagacgacgccggctgcgctcgcgggaccagagggagggaggctgcggacgagtgcggggaggag

SEQ ID NO: 8443 - DNA, 307 bp, Homo sapiens
  chr22:29467406-29467713
  hyper
cgcgggctctgggagtggataagggggtggcgcccgggggttgagggggcccaggggcgagtgtacccaaggcgtgccggtcccgcccagccgcgctctgggtgcggcgagtctgcacactggtgcagatgttcccgccgccgcgccgggcgcaggtctgcacttgcaagcccgggaccagggacttgaaagcgcccggcgcgccgcctggacctgccccgccgggcgtcaccgctgcgctttaggcgggaactgtaggaaaatcccctctgcctggcgggagggcgggggaggaggacggcccacg

SEQ ID NO: 8444 - DNA, 149 bp, Homo sapiens
  chr22:29467742-29467891
  hyper
ttgccggggtcggggcggggggaggcgggcaaagggcctaccacgctggggccgaaagtttaagcaagccgcgcgctctctgatccctaacatcccaggctgtaggataagcagtactgtctcatccatttctggacgttgcgttgggc

SEQ ID NO: 8445 - DNA, 177 bp, Homo sapiens
  chr22:29733772-29733949
  hypo
cgctgtttccacccacaagagcccccgtggtccagctgccccagcactcctcctccctgccacggaatcccccggggccggtgcttctgccccaccccttccctgcagacgcagccatctttctcaagtgcaaatcagactggttcatctctttgcttaaaactttccaatggctcc

SEQ ID NO: 8446 - DNA, 80 bp, Homo sapiens; identical to SEQ ID NO: 7308
  chr22:30084279-30084359
  hypo

SEQ ID NO: 8447 - DNA, 120 bp, Homo sapiens; identical to SEQ ID NO: 7309
  chr22:30084388-30084508
  hypo

SEQ ID NO: 8448 - DNA, 458 bp, Homo sapiens
  chr22:30090282-30090740
  hypo
cgtcaccttaccccagccatgttgccagggcatgaggactaagatgcttgccctgccaagcccggaggggatgagcagcctcagctggtgccgccacagacagcacaccacagaggtggctcagggaccttggtagatgggaatgtgagaatctattaaaataggcagggatctccggtcctctgtcaagaggcaatgctgacggctttttcctgctggcgtgcctctgcccaccagccttccccttgcacatcctcatttgtcacctcctaatttgaattattgggcaaatctggccgcttatttgggactgacagccaacttcttgagcatctatttgaacagccttccctttcgctcccagccacctttgaggtgagtccaagtggcaggacaggaccctgtgtgacagagcggaggtcttgtgccctctcagcttcttctctgctttcttacag

SEQ ID NO: 8449 - DNA, 74 bp, Homo sapiens
  chr22:30090769-30090843
  hypo
ggccttctttgaagagctctagcaggtgacccagccaccccaggacctgccacttctcctgctaccgggaccgc

SEQ ID NO: 8450 - DNA, 37 bp, Homo sapiens
  chr22:30091074-30091111
  hypo
cgtccaaggcaccggtgtgtgtgtgtcttgcactcca

SEQ ID NO: 8451 - DNA, 447 bp, Homo sapiens
  chr22:30091301-30091748
  hypo
catcgtcagggagcccgcccagagctcgtgacgagcaagtgctgggtccccgccaggcaccccgaggcggcgctctggctggcagctggtggggaataggcagggcagctgtggctggggagagactttaggcagaagctgtgatgcaggctgactgccagccgaggggctgggtagtgccgtgcgggagctgatggtacagggcactcgctgtccccctccggccaccctagaccagggtccgagaggcaggcaggagccactcatgtcttccccattgcccgacgcccatagacgctccttcctgtgtggggctggggtactccctggtcgtactgcagtcagcacccgtaacccggctatgaccagggatctgtaagccctgtggctccacaggtgctgcttctcactggcccagactctgagctccaccggcccagtctgcac

SEQ ID NO: 8452 - DNA, 254 bp, Homo sapiens
  chr22:30190745-30190999
  hypo
cggaaagaattctcacttattcccaaggaaaacaagcaagctacagaaaaatgcgtacagtatgatcccaaaagcaaactacgctaactctgtttctatggccacacgcctatgcatgacaatgcagacagaaggctaggaagccccacgccaaatgacagtggttactgcttggaagcacctggagttgtctaaatcttttttttttttttttgttacaggctagagtgcagtgatatgatcttgcaacctcc

SEQ ID NO: 8453 - DNA, 592 bp, Homo sapiens
  chr22:38434385-38434977
  hypo
cgggcccaggcaggtggaagccatggctctggccgggtcacagggcggctggggtttgacctggcggccatgatgggctctggacccaggagccacccgggcacaggatgggacgggttgagagattggtcgtccaggcgttgagtgtgccctcgctcctccccaccttccgccgtggccttgagccccttgcgcccgcgcccatggggttaaatctctccctgtctctctctgctccaagttgttttccaagtgaggcagagaatggttctcttgttaccaacatggcttctgggcattgggtaatgcgctccctcttctcccgcagcgccacaaagggaccttttgttcccctccctgcccctctcgctggctcttcccggccccccacccacccaaactccctcctccccccgccggcgcccgcaccccggggctgcgcgctgaccgtggcggccgcggcgccctccctctcccagcgcctgcactggcggccgccatcttgcgagcggccctcagggcggcctgggctttcccagggttctcggggccggggcagtcgtagggggcggctggggctccacaggacgtt

SEQ ID NO: 8454 - DNA, 146 bp, Homo sapiens
  chr22:38435006-38435152
  hypo
ggcaggaccctcccgtccccagcctccgcgccaggcctcgtccctgcatgggacaagaggcagccctccgccatttcccgcggcccttgcctcccgggagcggctcccctctgacgactgagtggactgcgcttgagggggccgcc

SEQ ID NO: 8455 - DNA, 303 bp, Homo sapiens
  chr22:41656931-41657234
  hypo
cgatcggggactcagcaatgtcctgcggggatggggagaggagagtggaagaggagtggggataaggtcacctgagagcacgtcatttggcacctgagccctgcggctgcccctgcctatctccctgtcttggaggtctggtatgttccttctctgtgccccacaccagtggctgggccaggctactgtcagcactcgcaccatctcacttcaccacttctgagcctggcagatgacactccttggtcagagtggcctgcctggcctgaagccccataggggctggctcaccagtgggagcca

SEQ ID NO: 8456 - DNA, 288 bp, Homo sapiens
  chr22:41657416-41657704
  hypo
gctgcaggggcaggatggacagaaaccactcaccctaaaagcttctgccaaggcagtggcgccatcattctccagacggtttctgccagccacaaagaccttcagggccagaggcttgccttgggcactggatttccggtgacattcggtcagagctgcagccaggatctgtggggaaaggcaaggggccctggtcatgggcaggagccccttctcccagcggggtggccactgctgctgaactgctcttcaacatcccacgccacccatcggtgcaggtcaggggac

SEQ ID NO: 8457 - DNA, 69 bp, Homo sapiens
  chr22:41658279-41658348
  hypo
cggagactgaccgatgggaatcagagcccatggtaaatgcgacataaaagaatcacgagcgagtgcacc

SEQ ID NO: 8458 - DNA, 316 bp, Homo sapiens
  chr22:41667782-41668098
  hypo
cgcccgtcaagacctcactcctcacttgcacactgctgcagcagcagagagaacccctctggcatcagcactacgcccggaacactgggccatcaagggcagatcccaccctgcccctgccctgggctgcttcctgcacagaggagggcctaggaggtggtgtgcagtgattcactcgagccactgcatctgtagcaggcgggaaggtgcatgcagcactcctaccggccaggctctcccaggacaacctctgaggaagaaggaagggctctatctcctatttcatataagagcccagcctcagagctgcacgcag

SEQ ID NO: 8459 - DNA, 63 bp, Homo sapiens
  chr22:41668168-41668231
  hypo
ctcctgctgagtcctgtagccttcaggcccatggctccttcattcctgttcttcacaggtctc

SEQ ID NO: 8460 - DNA, 78 bp, Homo sapiens
  chr22:42995235-42995313
  hypo
cgtttataaaactaagggaatggactagttccagctctgaaaatcttacggcccaaacaaagaaatatttctgcattg

SEQ ID NO: 8461 - DNA, 141 bp, Homo sapiens; identical to SEQ ID NO: 7312
  chr22:43351254-43351395
  hypo

SEQ ID NO: 8462 - DNA, 99 bp, Homo sapiens
  chr22:45075627-45075726
  hypo
cgctctgggacactcagtctgatggggcaggctggtcagaagacatagagccatggtgtgtttggaactttcacagagggaagcctggggctcgggaag

SEQ ID NO: 8463 - DNA, 78 bp, Homo sapiens
  chr22:45120758-45120836
  hypo
ttggacaggtggaaggcaggagcaaaccaagtgttgcaggcccagccctgccaggtgtctctccagaaggtgtgagac

SEQ ID NO: 8464 - DNA, 734 bp, Homo sapiens
  chr22:45592910-45593644
  hypo
cggccccgggagtcgagtggcctcgcctggctgcggctccagcactggcgtgccatcgcagaccccggtggcggtggacaggtaggcacttggcagcactccgagggctgggcccggccggggctctgcgcaggctccgcacgcggctaggtcatcaggatgggcttctgccgaacttccaggatgtctagggccggcaggagggaagcaggtgaaacagtaaccctcaacagcggtgagtgctatggtcacggcagtgccacttctgaaggaagcccgcctcagccactcatgcatctcctctccaggcctcacagactgcagaggagacgtgtctccaccatcctcaccctgcagactgggaaatgggctcgcagcaacggcacaccctgcagggcctcaggtgcaagctggtgtgggggccagagccactgcctgtcacagctgctgcaggcctgggtcagcgaggtggcctgagagcctcccctcgcccgtgagtaacacacacctgggcatctgtggccactcaagaggggacagcaggtgcgccagaaaggtgaacaaagggaggacttcagctctgggaaagctacggctccacccaaagtctgagacaaagaggccaagagccctgcaaagaaacccaaccaaccgacaggacagggcgggatgactccgggtggctcacaagtaccaaggccctggaggcagagctggctgtgagaaggtgcggc

SEQ ID NO: 8465 - DNA, 258 bp, Homo sapiens; identical to SEQ ID NO: 6571
  chr22:45593715-45593973
  hypo

SEQ ID NO: 8466 - DNA, 239 bp, Homo sapiens
  chr22:45603946-45604185
  hypo
cccatcagaaaggtgtccgtgtgcgcaccaaagccaggcccaagaggacactgggagctgcccggtacccactgacaggagggtggccaggccgccatggtacactctgcaggcattacacagcagtgagaccagattacaaccacctgtgtcaacaggcatgactcacaaacatgacatgcggagaaagaagcctgaaacaacatatactgcccgattccaatgtatgagctgtgaga

SEQ ID NO: 8467 - DNA, 55 bp, Homo sapiens
  chr22:45604387-45604442
  hypo
ggcagaacccaccgactccacatgcaggagctgtgagaacaggcagaacccgccc

SEQ ID NO: 8468 - DNA, 463 bp, Homo sapiens
  chr22:46255154-46255617
  hypo
cggccgtttgctcagcatcttctaagagcaaggcaccttatagaaagcactggatggaatccgcccctcaattcgggtttgctggagaagatgtagaccttggtgctcagagacgctgaatcgctgggctcacccaggcgggtgcggagccccagtctgccccttccactcggccaggctgcctcccgcctctgccctgcagtgccagctttgtgttgcccaattcatctgcagccactagaggtatcttccttgagaatctcctgttggaggctcccgctgccctcaggacatggcccagactccttagagaggcacatgaggtgcgtcccgagccctcctccagccctccctctctggcaggtgaccatgcagcagccgcaaagcacttggcggtctcttctggctcgaggctgacgcccacgcgagcccccacctagaacctccccaacctgtgtccacc

SEQ ID NO: 8469 - DNA, 447 bp, Homo sapiens
  chr22:46261704-46262151
  hypo
cgacacctctgcagcttcgaccacacagggcttgtggcttggcatggccgcagacgcactgccaggccggcagccttcgccaagaactggattcctcccggcctggcccggctcggctggcattctcgccagtttcattgggttgagttccagagcgatggcagcgattgataatgctgtaattggagtgacttgggtattttctgaggtgttgccacgatgactcatactagggcaagttgagggcccgcactgtccagccggagtcggttagagaccctcaggaggctcacaggctccagggcctggatgttaggatgtgaggcctggggttaccgagatcccacacccaggagatgctcgcgtggagccttcgctcacagcggcctgcgcgaatggggcttgctccgagaggttcagctggcaccgagagctggcaccgagagc

SEQ ID NO: 8470 - DNA, 633 bp, Homo sapiens
  chr22:46704062-46704695
  hypo
cgatgaaaaatttgacttcgatctttcattgtcttcttcgaggtaaacaaatgagttttcttcccttgccttgggcataaccacattcagtaaagtctttcctttaaatgccagtgttatgagttattaatcattctttttttaaacaaatagtgcaaatgaagatgatgaagtcttcttcggaccctttggacataaagaaagatgtattgctgccagcttggaattaaataatccggttcccgaacagcctccgttgcccacatctgagagtccctttgcctggagccctctggccggggagaagttcgtggaggtgtacaaagaagctcacttactggctttacacattgagagcagcagccggaaccaggcagcccaagctgccaagcctgaagaccctcggagccagggcgtggaaagattcatacaggagtcaaaattaaaaataaacctctttgagaaagaaaaggaaatgaagaaaagccccacgtctcttaaaagggagacatactacctgtcagacagccccttgctggggccccctgtgggtgagcctcggctcttggcctcctccccggccctgcccagctctggtgcccaggcccgcctcacccgggcgccggggcctcc

SEQ ID NO: 8471 - DNA, 235 bp, Homo sapiens
  chr22:48027392-48027627
  hypo
cggcttccacagattggacgaggcccacccaccttggggaggggccagctgctgtgttcagtccgccattgcaaacacgaagctcttccagaaacgccctcacagacaccccggaagtcacgtacccactctgtaggtgccccggggcacaggcaagcggacgagccagttatccctcagagctcctgctgcctcgcccgctttctctcggaaacgtgaagtgtggcctcagctg

SEQ ID NO: 8472 - DNA, 41 bp, Homo sapiens
  chr22:48027786-48027827
  hypo
ggcccagcgtcagacgtttccagcatccgcgggagtgaaac

SEQ ID NO: 8473 - DNA, 108 bp, Homo sapiens
  chr22:49967872-49967980
  hypo
cgctccccagacgccggagcacccacggccagcgggtggacacggtgtccacatggtgcacactcttgcccttgagcctgtgggagggaagccaggaagatatggacg

SEQ ID NO: 8474 - DNA, 226 bp, Homo sapiens
  chr22:50191356-50191582
  hypo
cggaccatgctgatagggagctggcaacacagagcaggacagagtctgctagaaagagcgtcttccacctcctccggacacggcgccagttcttaccgtcttcccaggagaaaggccgccgcggtgccgcagcaggccgctcaggcaggtgcatccccgaggcctcttccaagccgatgctgtccacctcgcgccgggcctgcctcagaacaacacctccctgatc

SEQ ID NO: 8475 - DNA, 81 bp, Homo sapiens
  chr22:50191626-50191707
  hypo
tgtacttcatgcagttatctataatgagatcaaaatcctcctcaaactcatggaggtttttatacccttgagcttctaacc

SEQ ID NO: 8476 - DNA, 268 bp, Homo sapiens
  chr22:50529625-50529893
  hypo
tagaacacgcgctcagcggtagctggagctccagctcttggcagcgctcagatcctatgcctgtactgtaaccgtcgccccaggttcctcccgtggctgggaagctgcagtaaaggcacgttcaggactcaggaccgtggctgcagcagtggccagacggctgagggcgtgcgctgctcctgggccagacttgtctgcccagccccgaaccttttccagcaccgtgtttgttgagattctccagtcttccgaggctgctgctgatggt

SEQ ID NO: 8477 - DNA, 74 bp, Homo sapiens
  chr22:50529922-50529996
  hypo
aaccgtgcatgctaatgactcccagatgctgatataagtggccatttacatagcacttaacgcgtgtcagccac

SEQ ID NO: 8478 - DNA, 58 bp, Homo sapiens
  chr3:10011425-10011483
  hypo
cgggcatggccatggctgctcccgtcatctgctcctgcatcattcgtgattggtcagc

SEQ ID NO: 8479 - DNA, 413 bp, Homo sapiens
  chr3:10206343-10206756
  hyper
cgcatgatgcatggtgtagtgccgatggaagtggggtcagaaggcctcctgccgctgcggcagaattcccgtgtggccttctcccaccagggcctcagtttcccctcgcagttccgattctctggccggcgctggggtggagccggcggggccgtcgtgccgcccgtggccgctggggacgctggtgccctcccgccccgcccacttccccgccggtccgcccctggctagagaagccgcagcccgcagtgtccgacccagtcgtcccgcgccggagccggccccgtagcgtgccatggcctgctacatctaccagctgccctcctgggtgctggacgacctgtgccgcaacatggacgcgctcagcgagtgggactggatggagttcggtgagtgcggcccggggaggggag

SEQ ID NO: 8480 - DNA, 438 bp, Homo sapiens
  chr3:124773932-124774370
  binary
ttttgtttcaaactacgtacatcctttgtcctttacaatatcccgtcctagaaccccttaaaaatcagttatttagatgagaaagtcgagccctgtacctggagaggccagttctgtatagcggaaaaaatgaaactggggaccggctggccagatatcggaggtgggagagatgctttgcagtctttttccctttcctttccattttttttaaagtggggtggaagagatacagggtaccccataggaaataagttttcttccaaagggttggaggagaacgggatagtcacacccctcagtccagccaactgcgaaagcgtccctccctacccgccgaccctcagggtcccgcacacgccgggcgaggagcccccaccctgggtcgcgccgcgcggaggggcctacggctggggatgcagcccggggcgcgcccac

SEQ ID NO: 8481 - DNA, 114 bp, Homo sapiens
  chr3:127395778-127395892
  hypo
cgcaggccctcatcctccccactgcccccaggccgcctggacattggcgtagagcatgtgagtgactgtgagcgcctggccaagcaatgccagctgtgggacctgctcagcgac

SEQ ID NO: 8482 - DNA, 123 bp, Homo sapiens
  chr3:127794271-127794394
  binary
cggtacacgcctttggcaattttgcatcaaaaaactaagtgtatgcacattttttttaattgaaagcccaactcagccttcccccactgctccttccccgcatgcacggggggacacacgcct

SEQ ID NO: 8483 - DNA, 289 bp, Homo sapiens
  chr3:127794860-127795149
  hyper
cattgggaagccctccggccccctctctgcacacctggcacacggctcctccctggcggcatgtgggtatttgggttgggcgagcctctccctcccgattcccgagttccgagtgggtcccggcggaccagcgctattctggaggggcagtgcctcagaggcaggtcgcttcgagtggggatttgtgcgctctggcgcggaggaggggggtgggaagccggctcttgccctcctcacccggtggggagcgagcagggccaacggtgcgctgagagcgctcagggcgtcc

SEQ ID NO: 8484 - DNA, 44 bp, Homo sapiens
  chr3:127795229-127795273
  hyper
cggccggcatggagaggcggggccggcattcctgcgggcctgcc

SEQ ID NO: 8485 - DNA, 130 bp, Homo sapiens
  chr3:129231161-129231291
  hypo
cgttcagtgtccatcgtcctgaaactcttttcaacatctccaggttcctgctgcacagcctgcccaaggacaccccctcgggcatctctaaagtgtatcctttctcttatccctcctccgtcccaccacc

SEQ ID NO: 8486 - DNA, 49 bp, Homo sapiens; identical to SEQ ID NO: 6138
  chr3:129694299-129694348
  hyper

SEQ ID NO: 8487 - DNA, 80 bp, Homo sapiens
  chr3:12976966-12977046
  hypo
cgatgcggtagtgcctcttgcggatgacatcgttgctaaaggcaggcgagtcccagctgttgcgggcctccttgtggtag

SEQ ID NO: 8488 - DNA, 192 bp, Homo sapiens
  chr3:12977144-12977336
  hypo
gtcattgtcaccgtctgagtagtccgactcagacttgctctgccggttggctgagccattgatggccaagtggctgtccaggggcctggggggccggggccgcaactcaggctcctcccgggggaggctcttgggggcgccgctgtggggaccatgcttgggactgccctgctgcccgccaaggctgcgctc

SEQ ID NO: 8489 - DNA, 216 bp, Homo sapiens; identical to SEQ ID NO: 7334
  chr3:130424529-130424745
  hypo

SEQ ID NO: 8490 - DNA, 475 bp, Homo sapiens
  chr3:131080684-131081159
  hyper
cggcaccgcccacgctcggattggtccgaggtgagattcgcccttgtgccctcgtaggccttcggaacagcggaagagcagtgtcgggccatggccagggcccgcaggctggagctggccgaggccctggcgctggggccaggctagaggcatgcctgctatgcgctcctgcacgcgccggaccctggaattctctctggccgcctccctctgcgctacgccatactggtgaggagggcgcgcgcccggccactctccgctctggccttgcaccttccttgcggcgctactctcgggtgtccctgccaatcccagcttcctcctctctcagatgcagatgcgctttgatgggcgcctgggcttccctggcggattcgtggactcgcaagacagcagcctggaggacgggctgaaccgtggtctgctggaactgctgggcgaggcggcggccgccttccgcgtggagcgccctgac

SEQ ID NO: 8491 - DNA, 306 bp, Homo sapiens
  chr3:136538179-136538485
  hyper
cctaaggggcacaacagtctttttgggtaagggccgggctgggggcgacgcgccccgcccgctttgcagacttcggggtgctctgcacgacgcctgaaaggccgcggggcccgcatttctctgtgctgccctcctggagaaccgggacacggggacgggagggccagcatcggctacggcccggtttcccgtttctttccgctgtcgcgtgtctgggccctcctgcagcgtccatgatgaaggccaggggctgttgctttcctctcgcccagtagccaacccaagcaaggggtgagtcactgtggc

SEQ ID NO: 8492 - DNA, 124 bp, Homo sapiens; identical to SEQ ID NO: 7337
  chr3:141174173-141174297
  hypo

SEQ ID NO: 8493 - DNA, 81 bp, Homo sapiens
  chr3:141495392-141495473
  hypo
cgggcaccggtgcagatcgcccatctccacggcagaggtgatcgtttccagcgcagcggtgcaaagccaaagggcacccac

SEQ ID NO: 8494 - DNA, 308 bp, Homo sapiens; identical to SEQ ID NO: 7338
  chr3:142895557-142895865
  hypo

SEQ ID NO: 8495 - DNA, 347 bp, Homo sapiens
  chr3:147138422-147138769
  hyper
cgagtctccgagctcaataacgcaaggatggctgaagagcgtctgctccatgtctctttgccggactcaacgaccctcacccactgccaccgagtgctaggcccacagaggcctggcagaagccactcacccctcactactcatgactaggaagaaagtggccggggcatgagggttcgagttctgtcctaggtcccggaagccagggctcccagcgtctagtcaggggcgcagaaaccctcgttcctccaaacccccgccacagggaccactccagaagaaacccattcgtgatttgggtccctttgtgtttgagtattgtggggagtgggctatctagactctaa

SEQ ID NO: 8496 - DNA, 80 bp, Homo sapiens
  chr3:159480852-159480932
  hyper
cgctgaggtcatcctcagcgtgcagcccggaggggaagggaaacgtgagctaaagcaacaggttccacccacagcctgaa

SEQ ID NO: 8497 - DNA, 660 bp, Homo sapiens
  chr3:159480975-159481635
  hyper
ggtggagggagaggaagcggcgaggaggaaggtggaagggaaatgatggtgcatgaccaccgagcacacgtcactcgggctcccacatgggcttgtgtatgtgcgtgtgtgaggggagggaggtccttcacagggtcactcgggcacttccgcgtggaataggaggcgccaggctcgtgctttgggatgccgggtggcttcggcggggtaacgagtcacgcagagacggcttgaggcaagccaagaaaatacgggtgtcggcgtgaaaatacaccactcttcccagcgcgccgcccttgctaactggctggacctgcgcccctaacgcccagtgcccccttcttttgggcctatcttggcccctccaaccccatcccagcctgcctcctgctccagcctgccgccgcgaaaaccgggactgcggactgcgccgcgcccggcagcctctgggcatgctcggtggcgggaccggctccaccgccaggagggcgcgtcctccctcccctagggcggtgacggcgcctgcagcgacttgccgccgcgccccggccaggcacaccttttggggaggcgggggaccaccctgcccggcgtgggccgagagcgccccccaccccgagccttccggcgggtgggaggaggggccggccagggagacgc

SEQ ID NO: 8498 - DNA, 370 bp, Homo sapiens
  chr3:16553609-16553979
  hyper
cgtaacccctctctggggtttggtgacatctggggtcacttgaacttcgttgggattcagctgttcagagatacaaattaggaatcccggcagcagagaggccctacccacaggcccagaggtcgctcacattacacccggcttccttcctggcaaggccttaacttatcctgagatgacacacgatggcaggggttggaagatgcctagtctagttgagcgcccagctcctgaaacagctgtaccgactacaagggttccagcacatgagttgctggaaactggggtgaccactgacagagattgagccagactttttttttaaaaaagtacttcttgtttgtttgttttaagcccccgaagaaactca

SEQ ID NO: 8499 - DNA, 340 bp, Homo sapiens
  chr3:16926663-16927003
  binary
cgtccacgggcgggcgcgctatgacagcggcggggtttccaacggagactgcagcctcggcgtgtccggggacgaagcccgggctagccctaccaggggaccccgcggcgttgcgctcgccccgacccccagcgcggtcgtctgtaccctcccccgggagagcaagccgggcggcctgccccgccggagcagcatcatcaaggtaggtgggagaagggcgctcatcgcccaccctcagccgtccttggattctattttctccctgggggagtggtggtggaaggaggaagcccactgctaacaggaaccactggagcatgggtgcttggggtggttgagc

SEQ ID NO: 8500 - DNA, 54 bp, Homo sapiens; identical to SEQ ID NO: 7349
  chr3:169540679-169540733
  hypo

SEQ ID NO: 8501 - DNA, 48 bp, Homo sapiens; identical to SEQ ID NO: 7353
  chr3:181444767-181444815
  hyper

SEQ ID NO: 8502 - DNA, 586 bp, Homo sapiens
  chr3:182971342-182971928
  hyper
agtttgctgtaagtttccttactttgttactgaggcccccagagctccacgcataagtggtgtgaccagaaaccttttaacaagacccgcctgagcctgcgttagagctcccgctcggaaagtaaaagaccatcctaatccgcggcgctgcggaaccggtgtcccgtgtgggaggaaccgcggcgttccctgggcgtagggcccgcgaggccagcacagtccgcctcttggcggagcgccctgggccggtggttccgcgcggagttagtctgtggtcagttacgtggtgaaaacacggctgtgccgcggccgcatctttccgcggccgaggcctctctgggtgggagtgttggcttcctttccggatcgctaaatggggaaagttctggccgctcggcgggatacgtctccaggccacggatggttcgttctccgtgccgcggccccgagctgggctccctgggtctccagcgcgggctcccggcattgggggctgcgggccggcccctccgccccgcccccgccccgccgcgcctcctcggccgagcggctcgcggtctccggcgcgggaggctccgagtctgcc

SEQ ID NO: 8503 - DNA, 809 bp, Homo sapiens; identical to SEQ ID NO: 5819
  chr3:183165024-183165833
  binary

SEQ ID NO: 8504 - DNA, 186 bp, Homo sapiens
  chr3:184784962-184785148
  hypo
cgagatcttctacactgccggaattttctcactgttaacaagttttgcaaaggtggtttcaaatggatgcgtctatatcacacctgaagatagttacagtcaatttccagcttcacggaattctcccctgcgcctttttcttccctttgagcctccaggattgctcaatcgttcccttgggcaaga

SEQ ID NO: 8505 - DNA, 34 bp, Homo sapiens
  chr3:185363305-185363339
  hypo
gcctgtgggagcctcacttgctgcgctgtgaggc

SEQ ID NO: 8506 - DNA, 139 bp, Homo sapiens
  chr3:186697410-186697549
  hypo
cgtaatagctgctcctaagaatgcaacgtgagctgaattcaaacatgaatttggagccagtacctgaatatgtgggttgttctatgccaccgggccccctgcctgtttaatttctccttcccctgctgccaaggcttcc

SEQ ID NO: 8507 - DNA, 112 bp, Homo sapiens
  chr3:193775965-193776077
  hyper
cgctgaaggacccacccagggaggaggctgagccgcgctccctctagcctccccagaggtgcattcgttaggttcccgccccggccccagccccagccccagcatcagctcc

SEQ ID NO: 8508 - DNA, 154 bp, Homo sapiens; identical to SEQ ID NO: 7360
  chr3:193922622-193922776
  hypo

SEQ ID NO: 8509 - DNA, 83 bp, Homo sapiens; identical to SEQ ID NO: 7363
  chr3:195637425-195637508
  hypo

SEQ ID NO: 8510 - DNA, 159 bp, Homo sapiens
  chr3:42542869-42543028
  hyper
cgcacattctgctcagggctctgggacccgctgccctctccgcctctccactgaactccgcctctccttctgtcacacggctccgccagccactctatcctgccgccgcgaccacatctccagcctcgattgtgcaggctcgagcccgtagaaagaggg

SEQ ID NO: 8511 - DNA, 129 bp, Homo sapiens
  chr3:42543580-42543709
  hyper
ggttgttgaaaattgatcaaacaacccgatctctgtcagcgcctggacacttgctgggccccagctcgcagcctgggaagataagtggcacttcctgtctcgtaatcggatttgcgcgcacgaaccctc

SEQ ID NO: 8512 - DNA, 191 bp, Homo sapiens; identical to SEQ ID NO: 7368
  chr3:4347767-4347958
  hypo

SEQ ID NO: 8513 - DNA, 219 bp, Homo sapiens
  chr3:44945281-44945500
  hypo
cggtgatgaagatgtctctggcaattttggcgtatttatctctaactaggtttgggggtggtccggggtggggcccgttcccaatttgcggcaggaatttccatgtgtggacggatgcctggatgaagcgaccggatctgcccaagggctacgacggctggcaggctgtggacgcaacgccgcaggagcgaagccagggtgagtgggtggcaggaaggc

SEQ ID NO: 8514 - DNA, 255 bp, Homo sapiens
  chr3:45719334-45719589
  hypo
cgtgtttgcgctgtttttctctggagttctcaagagttggtgacttggaaggccgcttctgcaaggcaagtctcaggaacccatgcaggtacatcgcttgcacctgtttttagcttatttaatgacgggcttttgggaagagctgcccgcatactgagagacagcttcttataaacaaggagagtttttgtgtgtgcgagatctctaagccagcgtgggagggagcgcctcaggataagttattatattcatttc

SEQ ID NO: 8515 - DNA, 397 bp, Homo sapiens
  chr3:46009350-46009747
  hypo
cgcctcaactctgctagctcctcctcccaggagctcgtgtgggccagcaactcctgcagccgtcgccagagctggtctgcctcctgtcccttcccagacaactcctcctggagtggggccatctccttcaccaggcgctccaggctggcccgggcatcctctttcagctgaagctccttgaccagctgttccagttgggcactctgctgtctgttgacctcctcgaccttggttctctccctttctagggcttgaagcttctcccctagctcctgcatctcctgggccgcatcactgggaataggttcttgccggccctttgtgtctgatgccgtatctgccttctgctgagccatggctagccagcctgggaagctggctaaatgctggtttttct

SEQ ID NO: 8516 - DNA, 316 bp, Homo sapiens
  chr3:46009776-46010092
  hypo
tcctgtgccaagggctgcagcatggactccagccgccgcagggctgtgtggtagtcctcctccttctctgctgctcctagctccaggccctgcaggcatgtctgcagctccttcacagtgttctgggtggcctgggtgacctcccactgcttctggagctcagctaccaagcaagtgaggcgaacgttgtcctccgctgcagtgcgccccctctccctctctgtctgcagttgctccccttgctggctgacagctgccctcagctcctggttctctctgtccagctgctgcatgcgctcccgtagctgcttctccc

SEQ ID NO: 8517 - DNA, 82 bp, Homo sapiens; identical to SEQ ID NO: 7369
  chr3:50377892-50377974
  hyper

SEQ ID NO: 8518 - DNA, 167 bp, Homo sapiens; identical to SEQ ID NO: 7370
  chr3:50378002-50378169
  hyper

SEQ ID NO: 8519 - DNA, 149 bp, Homo sapiens
  chr3:56718095-56718244
  hypo
cgttcatcaacgttttcctatagtaaatgtatattaaagaaaaaataaacttgcggtcacattaaaaaatacacagcaggtcgtcgctctcccataaagggaacaacttcatagttaagagccctttacatagtggtttctaccttatc

SEQ ID NO: 8520 - DNA, 170 bp, Homo sapiens
  chr3:56718281-56718451
  hypo
tatttactgagtgctttctacgtgctagacacggactggacaagtgatttacgtgcattgtctccatttaatcctcacagcaacagacatgaggtagatactagtttgcagaatttgaaagaagcgttgcaagacactggacaaattatggtaaccgaagatttgaaacc

SEQ ID NO: 8521 - DNA, 768 bp, Homo sapiens; identical to SEQ ID NO: 7376
  chr3:67048599-67049367
  binary

SEQ ID NO: 8522 - DNA, 153 bp, Homo sapiens
  chr3:72149806-72149959
  hyper
cgggtaagagaataataaatcggtcacttcactatccaattagcagctgttgctccccgctggaggaagaaaacaaacaggaagaccctgccctgttttgtttaggatcaaactcgcctctgtaccacctaccggagggactctggggtttga

SEQ ID NO: 8523 - DNA, 96 bp, Homo sapiens
  chr3:72150077-72150173
  hyper
gaaactccgtgcaggggcaaagctgagttttgcaaccagtgagcgggagcccggggggcgtggccaggctgaggggatgcgttgtcctggtaaccc

SEQ ID NO: 8524 - DNA, 102 bp, Homo sapiens
  chr3:99594790-99594892
  binary
cgctttgcgaaacctgtctgcagtttgtgatgctgagacagctttaacagccacccacagacttgctacctggctgtctgacagcagtgccccttggtggag

SEQ ID NO: 8525 - DNA, 92 bp, Homo sapiens; identical to SEQ ID NO: 6160
  chr4:102711787-102711879
  hyper

SEQ ID NO: 8526 - DNA, 185 bp, Homo sapiens
  chr4:106335558-106335743
  hypo
cggcctggcaggctgcgctccgctcgtgctaagcctggatcccacgcatgccaagggcaagccaggtatggagtggcaaagggcaggcaactccgggcaccagcacaggcaccggctccctgcgaggctgcagctggaccaggcaaaccccgcaagtggcttccactagaggctccaggaaacac

SEQ ID NO: 8527 - DNA, 53 bp, Homo sapiens
  chr4:1338812-1338865
  hypo
tgccctgggatgggagccgtcggaggattttgtgtagaggaatcctgtgatcc

SEQ ID NO: 8528 - DNA, 910 bp, Homo sapiens
  chr4:141563919-141564829
  hypo
cggcagagatttgctgctcagctttccgctactgttgcagttcttccccctcttgcgggcgggcgacagggctctcgggggcgtgggtctgtttccacggcctgcgtgccaagcttccatgggactcctcgtgcctgtcctcggagtcccggcgccgctgcagcttcaccagctcatgctgcttctccttgtactggtgctggacctcggcccgccacattctgaagtccagttccaggacgtccatgtcctccacggaggacttcatggggtacatccgctcctccttcttgcgcatccagctgtacttattgtgggcttcagctcccgtgggagccgcaggttcttgagcgggtcccaccacgggcccatccagcacctccctcagcatgtggctgccggctgccagcaggctctccagtgagggccgagccaccagggcccgctccgcacctcccaccttcttgctcctcctctccagctccagctctgcgatctcgctcagcagggtgatgccgtgcagaaagctctgctccaagacaaggctctcggcagcttcctgcttctccaaggcctggactccagtagcacctggggagggcagaggcctggcctggggcagctccatggccacctccatgccagccagtgggtcttccaggccgggcaggaactgctcagagcttgcctcttccaggtagcaggtgctgccgggcacaggcacggcctcccggggctccagtctcgggcactctccctccccggcgggcacgtcacagtctgacatttctaggctgggctggggctcgctcagggccgcctgggccaggccttcctccggcgctgcctctgccgcaggaaccgccacaggcacctccactggctcctccttggcctccactagcgtctc

SEQ ID NO: 8529 - DNA, 352 bp, Homo sapiens
  chr4:154216898-154217250
  hypo
gatcctggacaacaagaacggcacctatgagtttttgtacactgtccagaaggaaggggactttaccctgtctctgagactctatgaccagcacatccgaggcagcccgtttaagctgaaagtgatccgatccgctgatgtgtctcccaccacagaaggcgtgaagaggcgcgttaagtccccggggagcggccacgtcaagcagaaagctgtgaaaagacccgcaagcatgtacagcactggaaaacgaaaagagaatcccatcgaagacgatttgatctttcgagtgggtaaggagagggcttctgtgcccgacgcctgagctggcactggttaaggggtaactgggcac

SEQ ID NO: 8530 - DNA, 140 bp, Homo sapiens
  chr4:1807117-1807257
  hypo
cggccaggtggtcatggcggaggccatcggcattgacaaggaccgggccgccaagcctgtcaccgtagccgtgaagatgctgaaaggtgaggagggggcggccaggggtgcagagcagggctgggggcgccgccgccgcc

SEQ ID NO: 8531 - DNA, 304 bp, Homo sapiens
  chr4:1814436-1814740
  hypo
cggctgatgtcacggaagccaccaaaggcacccaccagagccttccccacctgcaaagcccctgcagcacccggagggcaagctggcttttggaggccatgcggagtccagggcagaggggacagtgggatgggctgcctgttgcagtggctgttcacgtcaacagtgctcagccaaggcagtgaggacgaggatgagagccggggcagctgactgggcccgcgatgccgctcacaggagaggcgtctgcacacacctggcaactgcaagacttgttctcaagggtaagtacacttggacaaac

SEQ ID NO: 8532 - DNA, 79 bp, Homo sapiens
  chr4:1827219-1827298
  hypo
cgagtggcctttcgaggctgatgtttcccttgagcccgtgccggcctggcaccaggccaatattcacgcacctgcttca

SEQ ID NO: 8533 - DNA, 125 bp, Homo sapiens
  chr4:184667665-184667790
  hypo
agttgtgcgggaacccactgcagggcgggagcgagctcgggcatggcaggctgcaggtcccgagctcttccccatgcagaggccgctgagaccgggtgagaattcaagcatggcacgggcccgcc

SEQ ID NO: 8534 - DNA, 194 bp, Homo sapiens
  chr4:187026475-187026669
  binary
cgccgccagccgcgccgcgggagcagtggggaccctgctctcttggcccagtagccctagagcgggtaaagccccgccccagccccccactccctccggcgggggctgctcccctgctcgcctggtggtcccagcgcggccgccctcgggccccggcggggtctgggccgcgctccccaggaacccgctccagc

SEQ ID NO: 8535 - DNA, 57 bp, Homo sapiens
  chr4:1993659-1993716
  hypo
cggcatccggtgccctcccagcagcctcccacctcccagcagcacccagtccactgg

SEQ ID NO: 8536 - DNA, 197 bp, Homo sapiens
  chr4:1994335-1994532
  hypo
agccccaggccttcctgacacccactccctgcgtcaggcgccagagacccgtcctacgagggctgcggccatcacgtccccgcgagcgccgcctcctggtggcctctgagtgggaggaccttccagcgcttccctcactgtcctcatgggcttcctgccctgagggaagttggctcgaagggcagagatcagaggtc

SEQ ID NO: 8537 - DNA, 43 bp, Homo sapiens
  chr4:2514728-2514771
  hypo
ggataggggccactcacgtgacagggtataataaaatgtttgc

SEQ ID NO: 8538 - DNA, 114 bp, Homo sapiens
  chr4:27086319-27086433
  hyper
cgtttctttctctccttacgcttatcggttttaacacatgccatttaccacctcccacccgctgattagggggctggaaacgggcttacatcactgtcagggcaggagaggaaa

SEQ ID NO: 8539 - DNA, 267 bp, Homo sapiens
  chr4:27086484-27086751
  hyper
gcagtgcttaggagaatgcgggacccaaatgaaattccgcgtctccccgcggcgggtgccgcagagccaccggcgaggggcgggcgccaccacgtgactgattattcaaatggaccgatgattaactcggtttatattgatgcaaataatcctgccggagcctgcaacggctaatgcattttggaactgtggtttttccattgatagcacaaaatattgtagaggaaagccattttcataatattaataatggaattacagaatcag

SEQ ID NO: 8540 - DNA, 77 bp, Homo sapiens
  chr4:27086840-27086917
  hyper
tgcagcgatctcattgcataaaacgcacatccccttccctttttctttttaaaagaaaaagagcttcagaaatgacc

SEQ ID NO: 8541 - DNA, 55 bp, Homo sapiens
  chr4:2926396-2926451
  hypo
aatttgagttgctgaattgtttttcagtgtcacaccgctatttactattcaggcc

SEQ ID NO: 8542 - DNA, 202 bp, Homo sapiens
  chr4:30723862-30724064
  hyper
ctacgagctgaccctgcgagtgcgcgacggcggcgacccgcctcgctcctcgcaggccatcctacgggtcctcatcaccgacgtgaacgacaacagcccccgcttcgagaagagcgtgtacgaggccgacttggctgagaacagcgccccggggacccccatcctgcaactgcgcgcagccgacttggacgtgggggtcaac

SEQ ID NO: 8543 - DNA, 91 bp, Homo sapiens
  chr4:30724126-30724217
  hyper
cgagacgtccggctggctcagcgtcctgcaccggatcgaccgcgaggaggtgaaccagctgcgcttcacggtcatggcccgcgaccgcggg

SEQ ID NO: 8544 - DNA, 103 bp, Homo sapiens
  chr4:3217005-3217108
  hypo
cgtgcaccgcggtgagtgtggactcctggaagcgcaccgtagctccgctgtgtcctgctgctcctccctagctgtcagggaggctgtagtccattgctttgcc

SEQ ID NO: 8545 - DNA, 56 bp, Homo sapiens
  chr4:3217154-3217210
  hypo
gtctctgaccctacagaccagctgggatgccactgggggagcgctcccttcccccc

SEQ ID NO: 8546 - DNA, 149 bp, Homo sapiens
  chr4:3220650-3220799
  hypo
cgtgcctgcctgtgtgtgtgtgtgcacgtgtgtgtatgtatgctggagagtctagggaggcttgctccaaggacgcagtattgtttgatcctgagagataaggattctgccgcagggaatgaaggtattccagatggcgggcttattcc

SEQ ID NO: 8547 - DNA, 309 bp, Homo sapiens; identical to SEQ ID NO: 7399
  chr4:39447953-39448262
  hypo

SEQ ID NO: 8548 - DNA, 194 bp, Homo sapiens; identical to SEQ ID NO: 6180
  chr4:55094321-55094515
  hyper

SEQ ID NO: 8549 - DNA, 70 bp, Homo sapiens; identical to SEQ ID NO: 6181
  chr4:55094684-55094754
  hyper

SEQ ID NO: 8550 - DNA, 76 bp, Homo sapiens; identical to SEQ ID NO: 7402
  chr4:56222936-56223012
  hypo

SEQ ID NO: 8551 - DNA, 199 bp, Homo sapiens
  chr4:7047283-7047482
  hypo
ctacctagagtgctctccctgtaaatcatggcccaggattgagctttccacttaaatatcagtgcctcagagggcccttcccttcaccatcccagcacttacctctacgttagctgctaaggaggcgcagagccttggtggcatatctgtgcgtatctcaggacattttcccgacagcccttggcagttggctttggac

SEQ ID NO: 8552 - DNA, 328 bp, Homo sapiens
  chr4:759841-760169
  hypo
acagacccaagatggacttgctgtgaatggtgccacacagcgcccacagactgggccctcgcacccttgggtgctcccggccgccgcgcttaagaacattgcctctgggtgtcatgtggaccagacttctgaatagagaatatttataacttttgtatgagagagaattcacactcaacaagacactaccagcaccacgtttacagaggatgaaaacacttcacagtctcccagagccgatcgtcctctcccccgccccaccccgtgcttcagccttgcagggagagtgatgctccaggcaacacggttctgagtcaccttctgacac

SEQ ID NO: 8553 - DNA, 133 bp, Homo sapiens; identical to SEQ ID NO: 6184
  chr4:76555905-76556038
  hyper

SEQ ID NO: 8554 - DNA, 310 bp, Homo sapiens
  chr4:99399725-99400035
  hypo
cgagtaaccaggtaagaagagggttcaaccaaaaaatcactctgctcgtcccatgcacactctcggcatgatgtacagagtaggccaatagttcgctggcattcacttactgcgggatctttagtgcagcaggagaatggaacgccacatcgctctcgacttgcattggaatctgtgcaattgaagtaaatatttaggttccaatcatcagctccaaaagccccacagcactgccactagagcaaacaggaaagaattagaacatcccaacttggaggcaagcagtcacctacactcacacccgccgaac

SEQ ID NO: 8555 - DNA, 176 bp, Homo sapiens
  chr5:10256093-10256269
  hypo
cggagcaattgctagaccgaggcattcacccaatcagaatagccgatggctatgagcaggctgctcgtgttgctattgaacacctggacaagatcagcgatagcgtccttgttgacataaaggacaccgaacccctgattcagacagcaaaaaccacgctgggctccaaagtgtac

SEQ ID NO: 8556 - DNA, 171 bp, Homo sapiens
  chr5:10564301-10564472
  binary
cgcgaggggaaggccccgggggaaggcgtgtccccgcgccccgccccgccccgcctcggaaagcccccgcggtcccgcccaccccaggggctcgctcagcctccggagacttttttctttgagcgcagccgcctggtgccggtttccgccgagctggagcgcgcgggccac

SEQ ID NO: 8557 - DNA, 58 bp, Homo sapiens; identical to SEQ ID NO: 6193
  chr5:114515671-114515729
  hyper

SEQ ID NO: 8558 - DNA, 132 bp, Homo sapiens; identical to SEQ ID NO: 6194
  chr5:114515769-114515901
  hyper

SEQ ID NO: 8559 - DNA, 44 bp, Homo sapiens; identical to SEQ ID NO: 6195
  chr5:114516274-114516318
  hyper

SEQ ID NO: 8560 - DNA, 89 bp, Homo sapiens
  chr5:118788280-118788369
  hyper
cgctgaggttcgacgggcgggtggtactggtcaccggcgcgggggcaggtgagcatgcgaaggttggaggccgcgccccttgctgaggc

SEQ ID NO: 8561 - DNA, 73 bp, Homo sapiens; identical to SEQ ID NO: 7415
  chr5:134880614-134880687
  hyper

SEQ ID NO: 8562 - DNA, 625 bp, Homo sapiens
  chr5:142781875-142782500
  binary
gtttaagttgcaaataacccagccacattaattggccctaatgaaccatgccagagggtcttaagtggtattacaaggttgcaattatcaagtctgcaaccccaaacgtcaaactagcacttgtaaaaatcgcagcacaaaaccattacggttacagggggtctttttctaaaaggggccacttagaaacctcaggcgcgaattaacaacaaacgctaaagagcaagcccttgcggggcgggggtggagaagagaaaaaagtgcgaggttaaaagagaagtacgtccagacctgttgagttctctctccgacacgcccacttctaacagataacgccggccccggccgcagtctccaagttgcgggctgtcagccccccgcgtgtgcaccctcacgcgccccgcacgccctcctcaagccaggcgccgccggggcctccccggagcccgggctcgcgctcgggcgcgccggggtggcgtgcaaatattcgggcgagtaaaattcagacgcggcttagcgttcaccacgaaaacgggtgtcgggcgacccccttggagggaaaggggacactagggggagaaaagaggccaggattcccgcgaggaatgagaggctcgaagccccc

SEQ ID NO: 8563 - DNA, 78 bp, Homo sapiens
  chr5:142782625-142782703
  binary
cgtcgcccggcccttgccagccccccacccccactccccgaggctaataaaagtttgtaggctcccgcggcggccccc

SEQ ID NO: 8564 - DNA, 274 bp, Homo sapiens
  chr5:14332870-14333144
  hypo
cggagcctcggttttccttgctgtaaaatgatacctaacacctaccttcaccgagtcgctgtgatgagaatacatgtagaaatgcctgacacccagcaggcgcttgtggtgctgtctttgcctagaacagtacgatcattcagattattcagatcttttggtgaatactagccttgtgtttacgttttgggacaagagccactagaagccaaatgcgcctgcgactttgcccttcctgcagtcttcagctgcaggaccagtttttactaaagac

SEQ ID NO: 8565 - DNA, 111 bp, Homo sapiens
  chr5:148206075-148206186
  binary
cgccccttcgcggctgccggcgtgccattggccgaaagttcccgtacgtcacggcgagggcagttcccctaaagtcctgtgcacataacgggcagaacgcactgcgaagcg

SEQ ID NO: 8566 - DNA, 36 bp, Homo sapiens
  chr5:148206432-148206468
  binary
acccaatggaagccatgcgccggaccacgacgtcac

SEQ ID NO: 8567 - DNA, 98 bp, Homo sapiens
  chr5:151066500-151066598
  hyper
gtttagagacaggcaacaggaaaccactcagagctctgggctgggtctatctcccctccaccccgtggtccctcctcctcctgtctcctccttccccc

SEQ ID NO: 8568 - DNA, 173 bp, Homo sapiens
  chr5:152870319-152870492
  hyper
aagcaagcaaggaaggaactgcaggaggaaaagaacaggcagaacagcgagaagaataaagggaaagggggggaaacaccaaatctatgattggacctgggcttctttttcgccaatgcaaaaaggaatatgcagcacatttttgccttcttctgcaccggtttcctaggcgc

SEQ ID NO: 8569 - DNA, 1199 bp, Homo sapiens
  chr5:158634816-158636015
  binary
cgcaaagacagggagtctactctgaatacaaaggccatctttcaacttaaggaacagagagaggaaataaaactgctacctctgccatcggccgctcagcctgggtcacgactgcagcaccgacagctcattcttttgggcatgattcaagattcagtaaaactgcacactccgtattttaaaaaataaaaagacacacagtcctctccttccctttcagactagtttcctctttactgcagactgcgacgcaaggccatccactaatctttgatgcctgctcactgcacaggccccttcctctctccccgcacctcctcccacaacgcctgcagatctcagatgcgtttgaactacagtaaccccaacccagctcgcggcaagcaggcagcgcagcagcagtagcagcagcaaccgggccgccgccgccgcggggctaagagattacgttcagcaaaaactcttccaggaaagaggctcgagagctcccctcctatctcgccaagggtgctgactctgtcgcgccacgccacgtaccaaaaggctcgcgaagaaaaacgcgggcgaagttcagcatccccgaacagaaagggaactcattccagaaagggggttcacgggtctgagggtccttgggtggggaaagcagtattggagggagaagacagaagggatggcaagacagaggaaaccacggggacaaaaaggaagggatgaggagccctcttactataaaagggactgacggacgggatgcagagcaatgggcccccctcgaaaaatggactggcaggcccttccgcacccccaaacaacctcgcaccacctgaaagcggggagcttgagtttggggctgcgtagatcaaagcagggtaagacgaagggaaagagggaggggagcttggaagcaaagtgaacaaagaggcaaaagaggcaaagttggaaatggaaacgagaaagggagctggaaaggggccgctctggaagggtcttgaaaaaggcctagaaatgggatgctggggaggcaaagggggacagccccgaggaagggcatctcaggaatgtaagggagcgctccaggccctgggaagaggaagggatgggagggcggggaggcagccgaggcccgggagctggaacagagggggctttgcgcggggcccaggaggggagagcagggtcggagggaggcgaccacc

SEQ ID NO: 8570 - DNA, 168 bp, Homo sapiens
  chr5:159489238-159489406
  hypo
cgtcggcagtttgaatatttgcagtcttagcttggaatggtctttctgcactagagggaaacctcctttagtgcagaccagcctaaagccaagccattgctgcctgaggaagctgccatctctggagcacggtgacatgccaccaccctggacctattcccatccccc

SEQ ID NO: 8571 - DNA, 163 bp, Homo sapiens; identical to SEQ ID NO: 7427
  chr5:159776164-159776327
  hypo

SEQ ID NO: 8572 - DNA, 147 bp, Homo sapiens; identical to SEQ ID NO: 7428
  chr5:159776588-159776735
  hypo

SEQ ID NO: 8573 - DNA, 476 bp, Homo sapiens
  chr5:174119512-174119988
  hyper
cgtgtcctcctgtgcagacgaggaaactgagtcacacgagaggaagcaattgctgatagttcacagttgccacgccctcctcatgcctttacagacatcccaggcctttgatcaaactagggagaggttagaagaaaggcgagacgggcctcagaagaatttggatctgttgaaaaaggattttaggacaagaacgaaacaagacgcgttttcatgggaacgcaaacccagtaacttctcagagccagggcttcgcagagaaactgcatcaaaaggaaaagagtctggtcccaacctttatttctcccaaggcatgaaactcctgatttcaaaccacttctctttgcctctgaaagaaaacaagaaaaagatggggctgtgtagttcttccaacagtgaaaaaaagaaagaaaagagagaagaagaaaactgtttcgggtttcgaaacagaaagggcctccttcccctttatcgat

SEQ ID NO: 8574 - DNA, 234 bp, Homo sapiens
  chr5:174120134-174120368
  hyper
ctcaagtctcagggcgaagtcctgctgctttgagacgtttacagctttgattgaggaaagctattcagggctggggcgaggatctgtttgttttcaggaggaagcctctgtgagcctgccccctcccccctgtgtttccagagttgctggagagataaaagccatacctccttttgaccttcattggacagtaggagccccgactcagcgtggaataataaaggcatatcatgc

SEQ ID NO: 8575 - DNA, 175 bp, Homo sapiens
  chr5:174120406-174120581
  hyper
ctctgacttaaaggggggtgtcgggggctggggcagggaatggggaggggttcggtttatttactcaagcacctactgtgtgctgctgatggggaacttcctaggcaagtcattgtcgcatttcatccctacaaacagtcccaggaggtaaatattatttatccctgtgatgtgc

SEQ ID NO: 8576 - DNA, 192 bp, Homo sapiens
  chr5:176764238-176764430
  hypo
ggtcggtcatcacctgcagggcccagcacgctaagcacctcgcaggacagcagcctgccctcctgagcctctgtgggaccagcacagggccaccagctgccacccccaccgcctagcctgctcaccgtcagacggccccgggagtagcgcacagccaggaaggtgtcgtgatcgcggttgcggaagtcagcc

SEQ ID NO: 8577 - DNA, 53 bp, Homo sapiens
  chr5:177525861-177525914
  hypo
cggcggagtaaaacttgccgcaggcaagatccaccaactgacgcaagagagtc

SEQ ID NO: 8578 - DNA, 205 bp, Homo sapiens
  chr5:179448886-179449091
  hypo
cccaggtccgagtcacatgctacactcagtcgtcacgtcatagccatctccgtcagtctgcaactgtctctcggtctttcttggtgtttgtgaccttggcactttcgaagactacattcggcccagttgatctgtcgaaggtatttccctgtggctagattcaggtcaggtgccgctggcagtaacaacacggaggtgaggctgc

SEQ ID NO: 8579 - DNA, 64 bp, Homo sapiens
  chr5:180632796-180632860
  hyper
cgctctcttgtcccccagctgtctccacagccccgcagcagagctgcctgtgttatccgcttcc

SEQ ID NO: 8580 - DNA, 244 bp, Homo sapiens
  chr5:180633225-180633469
  hyper
gtcgtctcttagcgcgctcccttctcagggccggctctgtgcccgcactctatctcctctggaatgtcagctttcagatggactgtactaggtttgttcacggctgaatcctgtttttagagcagttcttggcaagctcagtaaggttttcttggattaaacttggttcgaaattcaaaagaggagccgcagttcacggtggaaagtaggcccatcgcctgtgtcccagtcctttcttcctccc

SEQ ID NO: 8581 - DNA, 287 bp, Homo sapiens
  chr5:1874606-1874893
  hyper
cggtgagggactgggagaccgggatggggagagagagggaggccgggctgtctcgtcagcagcaggcgtgcccagggaaacgcaggtggcatacatcgcatgcataatctcaggagacggccactttaaatcttaattggttgccttttaaatatcatttaagggctggcttccctgcctctctctctagttaagaaggtgtcgtgtcaaactctattaccttgctggacgtctctcccttaagttaaaaaaaaaaaaaaaaaaagaaaagaaaaaagaaaaaaaaa

SEQ ID NO: 8582 - DNA, 87 bp, Homo sapiens
  chr5:1879747-1879834
  hyper
cttcttgaggcgccggcgcgcgttggcgaaccaggtggagacctgtgtgagggtcatcttggtgatgatggccagcatgatcttctc

SEQ ID NO: 8583 - DNA, 337 bp, Homo sapiens
  chr5:40680627-40680964
  hyper
gggatgcggccctcgccgaagagagccaagaagggaagagcgcgctctccaaattgcttttgtaacttgttttcagtgagcattttattgattcagaatctatcgagaatagcactagcgagctacttttcccttgagatgggtcttattcatcttggcaatggagtgagttggattgtggggaggaagaggaatgggaaaatcagtttataaatattaatgtcagcaagagtgtgctgttggcaggacgtatcgcgagcctggagattttggtggccgcagttggtaagtggctacaatccagaaagtaggatcgagttgctccccttgtcttatc

SEQ ID NO: 8584 - DNA, 99 bp, Homo sapiens; identical to SEQ ID NO: 6210
  chr5:42950747-42950846
  hyper

SEQ ID NO: 8585 - DNA, 175 bp, Homo sapiens; identical to SEQ ID NO: 7436
  chr5:42995428-42995603
  hyper

SEQ ID NO: 8586 - DNA, 338 bp, Homo sapiens
  chr5:43007481-43007819
  hyper
cgaacctaggcaggcagcgtggggtggagttggcaaacgtcctgcaacccatgaagagccgctatggtaccactagcggttctaggacccaaaaactaacgaaactgctcaggagaagctgcaggcttgacccaccagaggtgctgccaccgagatcaattctgctcggacgaatgagcggtgctatgactcagaaagtgccagtccgaggaaccagggatactgggacatagtgaaaggagttagccagctttagggagactgtaagggaagggtccccagagaacctccgactggtgttttgtgcagataagggaacttgcacaagggacttgcct

SEQ ID NO: 8587 - DNA, 388 bp, Homo sapiens
  chr5:43017314-43017702
  hyper
atccaacgctggaatctttcagcccattttcctccccggctgtttttgaactactatccccaaatatcgaggatatctgacagagtgaaccatcagaataaggagcgattgccacagagttccatccagtaggggagggacttgatgtgcggggcaagcctgatgcccgggtcaggcgactgtgcctttcattctccacggagatcttgaacctagagtttccaagttccgaagagatgcggttgtcgacagctctcctagaatctctgatggctctgaacggggacaaaggtctagggcagagggatggtgtggaaggacccagccacggccattggaagagcagtttcctgcaatgtaatgctgtttgcgaccagcataagcttta

SEQ ID NO: 8588 - DNA, 304 bp, Homo sapiens
  chr5:43019347-43019651
  hyper
cttaggtgtaacatgtaccggtttagatctgacagagatatcacaattgtaggattgcatcttttagcaaggtttgtaatttcttctttctaggattggttctctgtaatttttgcttatttttaaattctctctttgtcttttgctctgagaacgatgttaccgatgtgtttgctttccatgtttacttgcattttagcctttatttttttaattttgattttatttaaatgttatgtattttttttctactaattttgagcgtctcagcttcctgcttctttacttacattctctcaggatc

SEQ ID NO: 8589 - DNA, 260 bp, Homo sapiens
  chr5:43019887-43020147
  hyper
aagaacttcctaaaccatgttttactgtgcagaacggtgattgcacggagccgctgtacgcactagtaatttcatagcaccgttagctggcgctttttctgtcacaacacattaaaacgggttaaaatactgcaagcggattaaacacattaagaggattaaaacattaaaatgtctcaacacatttttctgacacaacacatttaaacggagtgggttcattcctccgaagaggatgtttaggcgtggaagcaccgctg

SEQ ID NO: 8590 - DNA, 386 bp, Homo sapiens
  chr5:510026-510412
  hypo
cgggcagccggcgttgtccctcctgcagtcagcgctccactgccccacactcagctggcttcccagggcctgagcaaggatgggggaggcttcgggagaagaggggctccaacgatgtggaggagaatgtgttggggagacaggtgctgggctggaccggggagccgctggaggcctgggggcattggaagcaggaggatccgtgggtgcttgggcccctggcggagcgcggcagcttgttgggagctgggagcagagccacttactgtgagctcagagaggctgccaagagcagcgacagagaccatcgttccctccaggcaaagccagatgctgtgtgggaaaggaaacgtggccgtacgctgccacggagctctaaggtgttc

SEQ ID NO: 8591 - DNA, 76 bp, Homo sapiens; identical to SEQ ID NO: 7437
  chr5:54518558-54518634
  hyper

SEQ ID NO: 8592 - DNA, 33 bp, Homo sapiens
  chr5:6583144-6583177
  hyper
cgcttctcgggcgtcggggctcgccgcagtcac

SEQ ID NO: 8593 - DNA, 38 bp, Homo sapiens
  chr5:77268330-77268368
  binary
cgagttcacagatggtaaatcgcgtggagagaaatgag

SEQ ID NO: 8594 - DNA, 72 bp, Homo sapiens
  chr5:96114516-96114588
  hypo
cgcaagatccagtgcatgtgctgagggaagaccggcaggacttgcgtagttagatgtctggggaagaaagga

SEQ ID NO: 8595 - DNA, 53 bp, Homo sapiens
  chr5:96114632-96114685
  hypo
attatgataacatctcgggctctttacttttcatgccctgcttcaggatcttc

SEQ ID NO: 8596 - DNA, 45 bp, Homo sapiens
  chr5:98200950-98200995
  hypo
cgctggaaccaagtaagtcagagaagtggccggcaacgatgggag

SEQ ID NO: 8597 - DNA, 62 bp, Homo sapiens
  chr6:106959878-106959940
  hyper
cgccagggtcgcccacccaggagcggcccgcgggaggactaggcgaggcccctaacggagcc

SEQ ID NO: 8598 - DNA, 263 bp, Homo sapiens; identical to SEQ ID NO: 7446
  chr6:106960046-106960309
  hyper

SEQ ID NO: 8599 - DNA, 315 bp, Homo sapiens
  chr6:107810308-107810623
  binary
cgggaggagaaagtgcaaccaggcggggaggggaggatcccaccggggcgtggcgagggcgttcggggtccgggtgagcgggaccctacgcgggaccgtgcgctcccagaagctcccactcagcccaaccttttgggcgaaacccaggacacccagataagggtgcaggcggggtcacgcgtaaagctgttactttgaagcagggcataagtgagagagagataaagagagaaggaccaaggggaaaaagaaatgaaggggctgaaggccgagatgtcctacttctaagtagttctttgagaggcaaaagcttca

SEQ ID NO: 8600 - DNA, 430 bp, Homo sapiens
  chr6:107810665-107811095
  binary
gggcggggcgcggggacctctccaaggggtctccagcctccgcgcactctgcggtggcccccggagggggaaactattctggcagctcagtggggggaagctcgtccgggctgtggtttcctttccccgagaccccagcgttgcacccccgaggcggcaggctcagtcaaccctccccgggggacggcggccctctagccaggcgacctcaggtctcgcgacctcccgccgcccaaccttctcctttcacccccattcatttttcctcagcggctcctaggacgggctcaaaaaccaactccacacgcaacccagcccacctcgcggagctgagaagcagggctgggttccgagcgggcgccggcgcccctggcgtgtggcggggaggtggcggccgcggggggcgccgcgagccgcccgtgcccgccgc

SEQ ID NO: 8601 - DNA, 573 bp, Homo sapiens
  chr6:111408744-111409317
  binary
cgatccccgaggtgttcgcgcgcgccagctgtcctcgcggccgcctgcgcgctggccgcctgcgcgctgccagcccgcccgcccgccaggggctccgccgccctcgcctcggcctcgttagcccgccaggagccccgcagctcctccgggagcccgctggtaactcgcgtccctcgcgcttctccggcgcctgaggggcccgcctcgggccatggtgctctcccaggaggagccggactccgcgcggggcacgagcgaggcgcagccgctcggccccgcgcccacgggggccgctccgccgcccggcccgggaccctcggacagccccgaggcggctgtcgagaaggtggaggtggagctggcggggccggcgaccgcggagccccatgagccccccgaaccccccgagggcggctggggctggctggtgatgctggcggccatgtggtgcaacgggtcggtgttcggcatccagaacgcttgcggggtgctcttcgtgtccatgctggaaaccttcggctccaaagacgatgacaagatggtctttaagacaggtgaggcgcggcgcccgcc

SEQ ID NO: 8602 - DNA, 274 bp, Homo sapiens
  chr6:111409368-111409642
  binary
ggctgtgtctgcctccgagtgtgcatgtcggtgggtccctgtgccagagggtgcgagcaggggggtctttcgagttgcagacagagcctgccgcttctggggcctcggggtgcccgtctttatatggaatccagctgcagagctgtgtgtttgcaagcaggtcgcagaacttacttgccgagatcgtcctcctttcccctcagcagagcagacgctaacagtccacaggagcccttccttttattgtttgaaaacaaacagaaccccagaacct

SEQ ID NO: 8603 - DNA, 440 bp, Homo sapiens; identical to SEQ ID NO: 5838
  chr6:127836226-127836666
  binary

SEQ ID NO: 8604 - DNA, 31 bp, Homo sapiens; identical to SEQ ID NO: 5839
  chr6:127837749-127837780
  binary

SEQ ID NO: 8605 - DNA, 429 bp, Homo sapiens
  chr6:128901277-128901706
  hypo
cgatgtcgacactctgcacatgctcctcaaacttggtgatctcctcctccagcaagtctgtccccactttgtcgtcctccaccacacactgaatctgcatcttccggataccatagcccacggacgccagcttggaggccccgctcactagcccatccagctggatagagcgcacacatgcctccagctgggtcatgtccgtcttattgtcccaaggcttgatgtccagcaggatggaggacttggccaccagcgagggattcttggccttcttggcgtacagccgcagccgctcctcccgcagccgccttgcctccttgtcttcctccttattgtcgctgccaacagatcaatgtcatcgtcctcgttatcctctgcttcttggccggggtcgtagtaaggggggcgaggggaggggcgctccacttg

SEQ ID NO: 8606 - DNA, 90 bp, Homo sapiens
  chr6:130499428-130499518
  hypo
acccttcttgaagacagtgccttagggctgcttctgctgctcttctccgctgcaatgccgtgtgattgaatagatccccacagtgagtgc

SEQ ID NO: 8607 - DNA, 135 bp, Homo sapiens; identical to SEQ ID NO: 7454
  chr6:136901469-136901604
  hypo

SEQ ID NO: 8608 - DNA, 217 bp, Homo sapiens
  chr6:137310942-137311159
  hyper
accaggcgcagcgagtaaccctactccgtttctgaacgcacgcgggggcgctgccaatgtaaggctccctgttaggaacgggtcctagccctcagcggagggtcacaaagaaatgagactttcctggcaagactgtggaatcagatcgagccatttttaactgtaaatgtctggctttgcctgcagcatttcaaggaagacttgactgctgtgcgtt

SEQ ID NO: 8609 - DNA, 369 bp, Homo sapiens; identical to SEQ ID NO: 6230
  chr6:143247975-143248344
  hyper

SEQ ID NO: 8610 - DNA, 208 bp, Homo sapiens
  chr6:143248451-143248659
  hyper
gatgactcttttttccactaggattatttccaagtcatcaaaagtgaaaaatcacgtaagtgttgttgcagttgttttcccctcgttttctatctcctttccaattgtgaattccgtaaataactgtcagacataaaacaggaaaaggaacatttcttcactgcagagctccagtaaggtgaaagtaggcaagaaggccccctgagac

SEQ ID NO: 8611 - DNA, 173 bp, Homo sapiens
  chr6:150312215-150312388
  hyper
tcctacagcctggtgctgggcgcggggaggactttacacccagctcctgccgagacgtgaccttacagctggggtccttggggctccaaaagtgcggcttccgcgcggatcccattcctgcttgctttgaggctgctggtgagcggcgcctgcgcaggggaagttgtgtgccc

SEQ ID NO: 8612 - DNA, 752 bp, Homo sapiens
  chr6:150921277-150922029
  binary
cgccggccccctgcgcgcccctccgcagtggggacggagggccttggggggcgccgagcggtggggacagagggcgccgggggcaccgcgcggtggggacggagggcgctggggggcgccgcgtctcgggggtcggagtcgggtcggggatgctgcccgccgccgccccgcttggggttccgcgcccccaagttcccggtgctcccgcccctcgccccagcggctgcaacatcagcgcgcagaggagtttctgcgagcacccgggagttgtagccaccgcttccccacccccgactcagcaggacagccccagaacgggaccccacagccagtcagctgggtcagctccccagcagcgaagccgggagcccgaggacccggggacgcgcggtgggggcggcggccgagctgctgcggcgctcagggcttgggggcgcccccgttctgcagatgcgcttttcagggggtggggagtcaagagcctgtggctcttccgtcacggggtaaacggtaacacctgggcggccgcgactctgcgagcgttctggcctcggcgggcggcggggaaccgcagtgatgcccgagctcgccccttttgtgtcctcgcggtgagccccgttccgaagccggaagcttgggaacgctctaactgggagaacggcgctcggctggtcaattcattccgctcctcggaaacaatgagctggatccttgacttgaatgtgctggcggagcggggtttgtaagccggc

SEQ ID NO: 8613 - DNA, 398 bp, Homo sapiens
  chr6:155577660-155578058
  hypo
cgagtggaccggtgagactggcaagggaaccttgctggactctgacgagggcagcttgagcagcggcacccagagcagcggctgccccacggctgagggcaggcaggactccaagagcacttctcccgggaaatacccacaccccggcttggcagattttgccgacaatctcatcaaagagagtgacatcctgagcgatgaagatgatgaccaccgtcagactgtgaagcagggcagccctactaaagacatcgaaattcagttccagagactgaggatttccgaggacccagacgttcaccccgaggctgagcagcagcctggcccggagtcgggtgagggtcagaaaggaggagagcagcccaaactggtccgggggcacttctgccccattaaac

SEQ ID NO: 8614 - DNA, 218 bp, Homo sapiens
  chr6:157505865-157506083
  hypo
caagtattcaaaaagattccatctacctctacacaaaataaagatcccccagtggccagtttgaatacatgtgcacttctaggaaatgccaccctacaggttcgacagctcgagctcccccgccctctttcggaaatcctcagatttgaactttagtaaaatgaagcctgggcttcgtttctaatgtcccctacccagcaagttctcacttctaggga

SEQ ID NO: 8615 - DNA, 56 bp, Homo sapiens; identical to SEQ ID NO: 7457
  chr6:158321417-158321473
  hypo

SEQ ID NO: 8616 - DNA, 520 bp, Homo sapiens
  chr6:158402113-158402633
  binary
cgtacacgcgcggacacgtgccggtgtccagagccggtgggagaggcgctgtcaccatctgacaggagaggaaggtggagcgcagagaagtcagggtcacgtggtaagtgggggtcgtggtctggggatcacggctccaggtctcttcgcgacaacgcaccgttgacccccaacacctctccctggcggggtcggtgaccgcaacagcctccgggatagaacgctagtgaaaggtaacctttctccagcccgctccacgcgctccgcacccgctaagcgcctccgcgaattaactcaggcctccgcgccgaagtaggcgcagttatgaccccgcttccccgcagggagaccgaggcacgcagggtcgaaaggactcgtccagggtcgcaggagccgaccacacagggaggcgcagcgcccccggcgggaacagtcagcgggtccagcctggcggactcccgggccgggctgcccatataaggctgcgggcggccggcatcgcagccaggctcccggggtc

SEQ ID NO: 8617 - DNA, 69 bp, Homo sapiens
  chr6:159203076-159203145
  hypo
cgctgtgcctggcttttccgtgcttctttaccaatgctgcatccagcacacttggagtaggagcgaacc

SEQ ID NO: 8618 - DNA, 447 bp, Homo sapiens
  chr6:160679377-160679824
  hypo
cggtgacgatggacgagccaggcgtctcgtacacccagccgtcccggcaggggcccagtggcaggcggctcctgttggtgtccaggctggccagggggtccacgcagtcgaaggtgctctggttccagtccacctcgtagcgcctacactgtcttggggaggcttcgcccgcaggtcctgggcccggcaccgtgtagttcagttcctctgcaggactccagccgcagcgcagactcagctcggccactccggggctccggcagcggtggtcaggggtgaagcccaggaagacgatgcccacgtagatgggcgcgaaggtagccgagagcagagccaagaggaaaaacatttgcttctggaaaaagtgaaactcccctccatgctccaggacatcgtccacggtggtgggcatgatcctgcaggcaggagggcccgaggctgcccgac

SEQ ID NO: 8619 - DNA, 314 bp, Homo sapiens
  chr6:169641077-169641391
  hypo
cgccaccctccctgccccggtctcctgccatcgaccccctccctgccccaggctcctgccctcgccgccctccctgccccggactcctgcccctgccgccctccctgccctgggctccatctcctggcatcatttacttcatgccctctgggtacgagtgacagtcagcatcactgcaccctggttagccatgtgtatgttgtggggcaccgtggcccggagcacctcattatgttcagtccctttctctaaactgcgagctgcccgtcctgagccccgcaggcatcgctctctcttcctggccgcgctgtgcc

SEQ ID NO: 8620 - DNA, 115 bp, Homo sapiens
  chr6:26233864-26233979
  hyper
cgtcacgcagtgcagcccccacactatttacaaatacagtacctgagggccgatatcccaaagctaaggcttatcaaaggcctgcgaaaagacagacaccgggcaccaccagcag

SEQ ID NO: 8621 - DNA, 130 bp, Homo sapiens; identical to SEQ ID NO: 7461
  chr6:26271217-26271347
  hyper

SEQ ID NO: 8622 - DNA, 327 bp, Homo sapiens; identical to SEQ ID NO: 7462
  chr6:26272105-26272432
  hyper

SEQ ID NO: 8623 - DNA, 156 bp, Homo sapiens; identical to SEQ ID NO: 6254
  chr6:2903557-2903713
  hyper

SEQ ID NO: 8624 - DNA, 73 bp, Homo sapiens
  chr6:3231938-3232011
  hyper
cctggcttttctagggcgccatttccctgctacaggcaatctcccctcccccacgctgtcaatgatttgtggg

SEQ ID NO: 8625 - DNA, 70 bp, Homo sapiens
  chr6:3232260-3232330
  hyper
cgctgtggctgcgggaccctcacccggcgctgaaaaccctccacatcagctcctgctcggaaatgtctcc

SEQ ID NO: 8626 - DNA, 266 bp, Homo sapiens
  chr6:3285535-3285801
  hypo
tttttgttaggaagacaggagtgagaccctgctggcctcagagcctgaggagaaaatggaaccttcacagtgagaccccagcaggtgcaaagggtgagcttccttgcatgtaaagtcacccacaggtcactgccgcctgcattcaagctgcgtcaagtgctgtggggtgcccctgccagccccagctctgctcctcacggctgcttggtgttcgcctggggctcctgtgcattcctgctcagggccaaaggggcaccacaacaccc

SEQ ID NO: 8627 - DNA, 144 bp, Homo sapiens
  chr6:34520750-34520894
  hypo
cgcaaccagtctcaggcgctggagccccgggctgggcagtccctccagccacgtctcccctgtgccagagctagagggagaaggaggggggtctttatcctggtggtgcgccgtcataatcctggggaggtcccggtcccatcc

SEQ ID NO: 8628 - DNA, 109 bp, Homo sapiens
  chr6:36165692-36165801
  hypo
tggggaaggagaagatggagcggctttcatgaaagtgggcgccgcaccgcctgtctgcgctgtttggggtcggtgtggaggcagatgttctcacctcttctagggcctc

SEQ ID NO: 8629 - DNA, 90 bp, Homo sapiens
  chr6:37275483-37275573
  hypo
aacaacaaggacccgaatcaggtaaaccagaggctttggaaaatagaaaggccatctgcagctgaggcgttggagcctcttggtccggcc

SEQ ID NO: 8630 - DNA, 61 bp, Homo sapiens
  chr6:37358463-37358524
  hypo
cggaagggaaatacaggctcctcatttatttatttctcttctttttctccaaagcaaagag

SEQ ID NO: 8631 - DNA, 321 bp, Homo sapiens
  chr6:37358553-37358874
  hypo
tttgaaagactgccaggtagtgcgagcctgagatggtctggaggattctctctagccgtgactccgctgctctgaaggtcaactgagaagtcttgtgggacagagacttgagttaggaagccctcagtcacttgccttccacggtggccagccctgctgccatcattggctgaagcaccaccaggattcacggcacccaactgcttcagggtacttcgtagactctgcctcactacatgtcgaaagagttatttgagttctcttctgtttttttttaatttgttgttgttgttactgttttgatacctcggaaacacctcc

SEQ ID NO: 8632 - DNA, 61 bp, Homo sapiens; identical to SEQ ID NO: 6255
  chr6:391113-391174
  hyper

SEQ ID NO: 8633 - DNA, 312 bp, Homo sapiens
  chr6:41620850-41621162
  hypo
cgctccgatgtgcttaactgtctgtgcctcggggtcatcacctagaaaatggagctgtggggacggattcgtgagcttcaggcacacagtgaacactcagcgtccctgctgctgccgctgccgcaggcccccacacccccggctatttcacacacgctcatccctcccctctctcacccgtccccctctccaccgccaccccgcagactgctgtgtccactgcatcctgtcctgcctgttctgcgagttcctgacgctgtgcaacatcgtcctggactgcgccacctgtggctcctgcagctcggaggactc

SEQ ID NO: 8634 - DNA, 249 bp, Homo sapiens
  chr6:41715240-41715489
  hypo
cgtgtatcgtttctgtgtatttttccttcttgagggtggccgcaacagactttcatcttattgactttttggttcaagcatcggaggccaggaggtgcaagcgataagagagaaagttgccgtaagatggagtggtgaagattacgtcttgttcccaaaccagaggcataatgtgtgcatttagggacgagggccagaaaaaggtagaggcagagtgctgggatagataggatctatagccagggtttc

SEQ ID NO: 8635 - DNA, 557 bp, Homo sapiens
  chr6:41773903-41774460
  hypo
tggctgagcacctggaggatggagttcatgtagcaggtgttgcccaggttgcgcaggcccgtgacgcctggggccatggccggctggcgacgcagcttgagtgtggcggcgggcactctgcgtgaggtagggagggcggcggggcgcgaggcagccgggcccgcgtcgcggggcgtgtgcaggagcagccgtgcactcttgcgcggaggggtgctggccagctcctccagcagccgccgtttcacctcgcgccgccgcctccgcgcctcctccttcttgcgctccagggcctcctcctgccgccgctgctccagcttcgcctggccccgggagctcttctcgaaccacagccgcagcgtcctggccagcaggcgctgacgccggtaccacagagccgtgagcatctgcggctgtccctgaggagcgcgctgcggcaggaccacgtcctcacccgaagccatggaccgcagcgtccgcccacgtctcaccggcgtgtcctgtttctggccccggaccgccaggagggagcttcttagcagcttcaggtccccctctgg

SEQ ID NO: 8636 - DNA, 97 bp, Homo sapiens; identical to SEQ ID NO: 7486
  chr6:42762779-42762876
  hypo

SEQ ID NO: 8637 - DNA, 236 bp, Homo sapiens
  chr6:43096747-43096983
  hypo
cgtcctcccaggatgcactgcaggggcgccgggcgctgcttcgctgtgaggttgaggctccgggcccggtacatgtgtactggctgctcgatggggcccctgtccaggacacggagcggcgtttcgcccagggcagcagcctgagctttgcagctgtggaccggctgcaggactctggcaccttccagtgtgtggctcgggatgatgtcactggagaagaagcccgcagtgccaac

SEQ ID NO: 8638 - DNA, 174 bp, Homo sapiens
  chr6:43748290-43748464
  hypo
cgcctgtgtgcgcccgcgcatgcctccccagagaccacctgcctcctgacacttcctccgggaagcggccctgtgtggctttgctttggtcgttcccccatccctgcccaccttaccacttcttttactccccccaccgcccccgctctctctctgtctctgtttttttatttt

SEQ ID NO: 8639 - DNA, 41 bp, Homo sapiens
  chr6:50674750-50674791
  hyper
ttttaggcgtttggagagggatggagatggtgggtgggggc

SEQ ID NO: 8640 - DNA, 44 bp, Homo sapiens
  chr6:50805695-50805739
  hyper
cgaaaaatggggggagatctttgcgagaaaggctagaaaaaatc

SEQ ID NO: 8641 - DNA, 194 bp, Homo sapiens
  chr6:50808438-50808632
  hyper
cgtttccaacgttgctgtttgtcatcttccacagacttgtaaaatttactacaactccagaggggaaaatagtaaatctctggctaaatttaggtctagagctcatttgaacttttacagtgggttttctatttatttgatttactcctgtctttggcttcggtgtcatattgttggtgttttatggccggctc

SEQ ID NO: 8642 - DNA, 230 bp, Homo sapiens
  chr6:5084683-5084913
  hyper
cgtgccgcgtgggcgccggccccacggggccccctctccgccctccctgcgggatcccggggcgcggactcgcgggcgcgtcgggcgggacagggggaggggcgggacgtgctcccgggcctggcgcgaatggcctccggccgctctcggctgcgggccatggccgctccccggcgcgtccccacacggtccccgccccagtctggccgcagcccaccccgcgccgccac

SEQ ID NO: 8643 - DNA, 665 bp, Homo sapiens
  chr6:5084942-5085607
  hyper
cccggctttcggaagagcagagcggagcgcgcctgaccgagtcaggcttccgagtgggattggaacccggggcgccctgaagtttggggaaagcaggagcagaagggaagggatgcgctccccgctctccggcggcgcggaatgggcctccttccagcctctgcgtaggcaagatttccccagttgcgcgctgcaccggggactccccagcccgtgaggcagccaagaggagagcgctcagtgaccctctgggggcagagccgtcaggccaagttcatgggcaggaagactttgtgcacgtgggggtctctgaaggttgagcgcgagctctgcacccccacttcgaggcactcaagaagcggaacagacgcgagccccgccgggggtgcgggtgagggctgcagggagcccgcgaacgacagaaagtcgccccccgcattccaccggagcactcgggaacacggcttccaggtgtcccagcggccgcgcctccccgcccccggccctcccccgtcgcgggcaggttcaaccgggaggcggcgtggccccggagccggccccaggcccgcatcctcctcccacttcgccctgggcagccgcagctaaaagccggaggctccaaagtggaactacgttgtcttgtcgagcctggggcgactcgcctc

SEQ ID NO: 8644 - DNA, 637 bp, Homo sapiens
  chr6:52227115-52227752
  binary
cggggcccgagctcgggaggcggggacgtcaggatcgcggcgttggggagtcctcgcaccccgagctcagaggggaggtccagagtcgcagcgttgggaacctgaggccaggggccggagtttagggccccgatgttgagtctccgaatccaagcccggaaggggggacgacgggttaggatgctggggagccctggagctctgaacggctgtagtggggtggccaggactgcgatgctggggagtcatggagcctgagcctggagagctggcgggggtgtggggaccgcgatgttgggaaggctgagcccggagggcgggagattcaggaccaagacgtgggggagtccgacagggcagaacgaggggcgtcctgtccgcatttgtggggcgccctccgcagggcggaggggaacggaacctgggaggggagtgcggaggagaggaagcccggggcggtagggagagcccgaggaagggcagcccgaggtaggggaaccccggaaagagtagggtgggtctaggcatgtgctttcgccggggaaagatggagggggcttctctgagagggtgggcgcgaggagcggagttgtgatgggaaccgccggcagctggctaatgggcggatgctggggct

SEQ ID NO: 8645 - DNA, 133 bp, Homo sapiens
  chr6:52227876-52228009
  hyper
agggaatctagtctagggagcaagaccgggcatccccagacggaggcgggtggggacctcgcactcagcgcgcttggggaatattcggagcctgggtttgggggctgctgcaccttgccgacccggtgcgggg

SEQ ID NO: 8646 - DNA, 110 bp, Homo sapiens
  chr6:52409363-52409473
  hypo
cggcactggcgtttgagtccatcttgctcgagtctacaaagaccggccaatgaccacctacgtgagggaacccgataagcagaacttcatgatgatgatttgattccagc

SEQ ID NO: 8647 - DNA, 249 bp, Homo sapiens
  chr6:56818408-56818657
  hyper
cgttcgctgggcactaatatgaaatcacttaaaaggaaacatgccactttcggctaggggacagcatgttcgtcattcagtgtcctactggtttcttaacacgcatataattaatattggtactcaggaaagagaacttcttctgaccttgagcgtgcgcgctaaataaattacctcagaacgaaagtggtgcgatctcaaaacagcatctggggagaaaagagataaatgagacttcatttaactcct

SEQ ID NO: 8648 - DNA, 116 bp, Homo sapiens; identical to SEQ ID NO: 6258
  chr6:5997274-5997390
  hyper

SEQ ID NO: 8649 - DNA, 113 bp, Homo sapiens; identical to SEQ ID NO: 6259
  chr6:5997401-5997514
  hyper

SEQ ID NO: 8650 - DNA, 571 bp, Homo sapiens
  chr6:71123134-71123705
  binary
cggccggggacctgttgatcgcaggtatagccggctggcccgggctccctcgggactggggcgactgcgcatgctcgctggccgcgctgggccagtagccgagccgcggtgacgaaccggctccgcggttgcggtgtttgcggttgctgtgatggcgatgtgagggggcccggggcgggatggtgctgacccgggtcgggccgtcttcttgcagctggacaacgagctcctccgttcgacaggcgggggaagaggccgagccgggcgagaggtaacccccttactgtcccctctggctcccccggctcccgacacccacgacccctccctccgtccctcttgcccaggggccaggaaggaagcggcctcctcttcgtccgccgttcgcccgccgcggcccctcacccgactgctggcggtcggagcctggccccggccccgttgaaggtcggtggggacggcggtgcggagcgctctgagggaggcgaggggccgcggcgcgctgctctcccggtgcccgcggccgcccctgcccctgcgcgcgtccctcgacccgttcttcctgaacctc

SEQ ID NO: 8651 - DNA, 289 bp, Homo sapiens
  chr6:71123746-71124035
  binary
cgctctgtccctcctttacccgctttcgtggttctgctttttcatcccgcgcctcccacgtgtctttttgcccgggtggtccctccttgggaagcagcgtatctctgtgcttccatcccttgcctggctcttccctgtccggagctccttaccctggccgaccaggtttctcactcttgttacctccataatttcttccttggttttattttcctctcatccacctcctttcggtacttcctcctggttccctttttgttagttgccgattgtgttttgctttagcatc

SEQ ID NO: 8652 - DNA, 164 bp, Homo sapiens
  chr6:73329621-73329785
  hyper
cgtgtccctgtgtcctgccttcctgagacttcttgcctgcacgcggggcccagccgcgccagagagatggaagtgactttacctacccagcgaaagtagcagtctgcaacaaggaaaacagctaagttaagaggaagtggttttcattttactgcttgcagaaa

SEQ ID NO: 8653 - DNA, 82 bp, Homo sapiens
  chr6:73330126-73330208
  hyper
gctcccagctagcttctgctgcccagaggcttggggggaaggagggagggaagcaggctcctgctggtgaccaggagcaggc

SEQ ID NO: 8654 - DNA, 51 bp, Homo sapiens
  chr6:79620238-79620289
  hyper
cgaattatacaacgtagacctaggtcgtgcgatagctacaaaatacctaag

SEQ ID NO: 8655 - DNA, 776 bp, Homo sapiens
  chr6:89855504-89856280
  hyper
cgttctcattctgctgctgtgggaaataagcaacaacggaaaagtaatcgataatcttagagcataactcaaaggccagagcagccaaggaggtggaagagtcccgagccctgccttctccacagcacccccaaaaccccacggcggggcagagcgcctggtagggtacgagcggccgccagcgtttcccgcgcggcgccgggggcggccccgggactgggggtggtgccctgggagctgtgtggccgcgtgcgcgctccgccggggtcctggaggcctctgggcgcgtgcgcgggcggtcgctacctgcggccgagccagggagcgagagggcgcagagggcagcgggcttgggcagcatgaggcccggaggggagcggcccgtggaagggggcgcgtgcaatggccgctccgagctggagctactgaagctgcgctcggcggagtgcatcgacgaggcggccgagcggctgggggccctgagccgcgcgatctggagccagcccgagctggcctacgaggagcaccatgcccaccgcgtgctgacgcacttcttcgagcgggagccgcccgcggcctcctgggcagtgcagccgcactaccagctgcccacggccttccgcgccgagtgggagccgccggaggcccgggcaccgagcgccacgccacgcccgctgcacctgggcttcctctgcgagtacgacgcgctgcccggcatcggccacgcctgcggccacaacctcatcgctgaggtcggggcggcggccgcgctgggc

SEQ ID NO: 8656 - DNA, 206 bp, Homo sapiens
  chr6:90367697-90367903
  hypo
cgaaattgctgaatgaggcatttttcagaatgtatccctgtctttaaaaaataactgttcagtcacgcgttgcttaaagaatgagatgtggtctgttagatgtcaacaacaaaacaaacaacaaaataaccaaacataaaccaactaatgctacacagaatgtgatgtcggacagggagaagagaccctactaagaggcagctggc

SEQ ID NO: 8657 - DNA, 87 bp, Homo sapiens
  chr7:100030648-100030735
  hypo
cgagggcctgaagcgcatgtttcgccggatctaccggcacctacgccctgggggcatcctggtcctagagccccaaccctggtcgtc

SEQ ID NO: 8658 - DNA, 244 bp, Homo sapiens
  chr7:100167136-100167380
  hyper
cgagcggggcgtggcaggagccagcagggtgcatggaggccccgttccaaagccctctaatcgccagcgccaccaccgctgccacaagtccgatcactggcctcacaccgaggctttctcggttgccccgacgacgtgtccggaccgcagtcagctgatcggtagagacgcccccacgctctctgcccctataaaggctcagtcttggggtcgaggccgcctctcttggacttccctactcaaa

SEQ ID NO: 8659 - DNA, 240 bp, Homo sapiens
  chr7:100167621-100167861
  hyper
acccctgctggcctctccccgtgctcaagacacgagacccagccgtctctgcctcttctgcagccactttattgccttcgcccctgaatgaagcccgcaggcggcggccccggggagagccgggaatggccgccgtgcccctcagccagccgctgccctgggcctgccctgccgacgtgcggttctgcggccacctgcgcgcagacccgccgcgtcccgagtgttccgagagcgagcaga

SEQ ID NO: 8660 - DNA, 145 bp, Homo sapiens
  chr7:100168054-100168199
  hyper
tgccggtgaggcccgagccccgggcttccgggggcctcgggggcttctggctgtggtttctccgtggctcgcccctcccccaggtcgccgaaagttcaaacattaaaggggcaggtttagagttctccgggcacaggcccggccc

SEQ ID NO: 8661 - DNA, 157 bp, Homo sapiens
  chr7:100179313-100179470
  hypo
cggtctgcagtgttttcgttaccgcagcctgagccaactgggacgcacatacaaacacctcctctccagttcttcattcttctcaccttcgggcagcgtactgagctggttcctccggacattgaggtcccgcagggaagagaggccacacagttcc

SEQ ID NO: 8662 - DNA, 188 bp, Homo sapiens
  chr7:100179940-100180128
  hypo
aggttgaggtaggtgagggctgtgagattccccaaggctgggttcaggcatctcaggcaattgtggtagaggctcaggccctccagggacaccagctggcacgccgcctcgggcacctcgggaaaccggttccgggacaggtctggggaaaaggaggtgtcggggagagttgcggaaaggcccagccc

SEQ ID NO: 8663 - DNA, 312 bp, Homo sapiens
  chr7:101652279-101652591
  hypo
cggccccgcgtgctccagcaggtctgcatgattaacctgaattgcagtgttcagaggctcggcctgccagccacagcggttccagatgaaatgcagcttagaaggcagcatggtgtagtagctttggcgccagccgcacccagagtttggattgtagccagatggcctcaggtgcaatgtataacctctgggaattccagatttcctatttacacgacagggatgattccatacctgaagggctgtttggaagcatctagaagcaagcacagtggagtggctgtcatgacgctgaccgcacaaatgatggtg

SEQ ID NO: 8664 - DNA, 148 bp, Homo sapiens
  chr7:121956311-121956459
  hyper
cgcactccggtgactactccctgaaagccaatgagcggttgaccctctggtgacatctggaacccaggttcagagtttcgctctcgcctctactcccttaatattttactcaatgtcacagaggagaacagcttaaggcagccctgct

SEQ ID NO: 8665 - DNA, 88 bp, Homo sapiens
  chr7:127371042-127371130
  hypo
cgtatggagctgcctttagcagcatctgcttctccagctggagaggcttgttttagaacgactggcatgcggaagcggtaggtggagg

SEQ ID NO: 8666 - DNA, 252 bp, Homo sapiens
  chr7:127371249-127371501
  hypo
cccctttcctctacttcataccgcagctgctgtgagcgagtgcactgtgctctgcacaggagaattggcagacagttccatatgctggttttggccattgggacattcaggattattaggccagtttgtactttaagaggagggagacttgacatcgctcaaagcagcttattttatttatttctatttcttataaaggggaaagaagctagcccagcccttagctgttcctttcaacgtagccggctcaac

SEQ ID NO: 8667 - DNA, 47 bp, Homo sapiens
  chr7:129330248-129330295
  hypo
cgtaagtacaagagcatgatcctggaagacctggagtctgctctggc

SEQ ID NO: 8668 - DNA, 89 bp, Homo sapiens
  chr7:129330351-129330440
  hypo
acggaattccagtctctgtggacaaaatgacccaggtgaggggtgggaggtgaggaggagactcaaagacaagtggcacaggtgtgggc

SEQ ID NO: 8669 - DNA, 82 bp, Homo sapiens
  chr7:129421203-129421285
  hyper
cgttaacaccttgtcttgggctcgagcaaaagaagggggtgaggcagtggaagcggggcccgggaaatctatagtttcccca

SEQ ID NO: 8670 - DNA, 282 bp, Homo sapiens
  chr7:129421349-129421631
  hyper
gcccgactcccgggcagggcctgctgaagccgtagatgtcgcagccagatggatcgggaagcaagattcccaccccaggtggataactggacgagtctcagggcctcggggcccctctccccatgcagccagggatgggcacggtgagcgagaacccggacagcggagataatgagcacgtcacagagcccaacgggccaaaagggggtgatagctccacattaacccctccccgtcctactagcattcccccgcccatctaggtcgcctcgagcctccctg

SEQ ID NO: 8671 - DNA, 170 bp, Homo sapiens
  chr7:129424378-129424548
  hyper
cgggatgctgaagcctgcaggagttgaatcagagggcgagctgcagagcggaggcactggggcggcgggccttgcccgggctcttggctcccatgaatcctcgatgagtagagaatcgtcgctcggagcaaaggcgagaggagagagaagcgtgcgggtgcggcccttgc

SEQ ID NO: 8672 - DNA, 31 bp, Homo sapiens
  chr7:129800434-129800465
  hypo
tccccactaggaacacaaggggcctttcttc

SEQ ID NO: 8673 - DNA, 56 bp, Homo sapiens
  chr7:129846024-129846080
  hypo
cgctgagccaggcgcacggatatagaaaataagaccttcctggttattacccagag

SEQ ID NO: 8674 - DNA, 72 bp, Homo sapiens
  chr7:129846109-129846181
  hypo
gcatttcggtggcaggtgaggtggatgcagtgctccccaaggaggcgcatccagcccagccccagctctcgc

SEQ ID NO: 8675 - DNA, 124 bp, Homo sapiens; identical to SEQ ID NO: 7499
  chr7:1308164-1308288
  hypo

SEQ ID NO: 8676 - DNA, 32 bp, Homo sapiens
  chr7:131041484-131041516
  hypo
cgaggattacctggagcttaatggccactagg

SEQ ID NO: 8677 - DNA, 86 bp, Homo sapiens
  chr7:134918319-134918405
  hypo
cgagctgattactgacgcgagggtcccctccctgacccctcgcgaccctgcgaggtgagtcagccccgcccctccctcttctctct

SEQ ID NO: 8678 - DNA, 132 bp, Homo sapiens
  chr7:134918661-134918793
  hypo
atcctttgaacgctcctctccagaaaggtgcccttgggcatatgagtgtttgtgtagacttgaaagaattcagtgcagcggagcctaacaggtgaacttttagcgcggggttcacaggagccttttgtatcc

SEQ ID NO: 8679 - DNA, 125 bp, Homo sapiens
  chr7:148448819-148448944
  hypo
cgttacacagtatattacagctgcggctatgtcagataccatcaaaaacaaatggcagagcaaatgtacatattacagtttgtataatttaaaaatgtagaacatggccagacgcggtggctcac

SEQ ID NO: 8680 - DNA, 163 bp, Homo sapiens; identical to SEQ ID NO: 7504
  chr7:148851234-148851397
  hypo

SEQ ID NO: 8681 - DNA, 32 bp, Homo sapiens
  chr7:149112425-149112457
  hyper
ttaccgtcacactccaacgcactttcttcccc

SEQ ID NO: 8682 - DNA, 351 bp, Homo sapiens
  chr7:150676178-150676529
  binary
cgcgaggttccaaccaggggatccccgggtgcgagcggcccgccctcccccggcagcccggggccagccttgcacgcccaatcggcgggctcggggccctgcggcggcggccacggcccagcccctcggaaagccctggcctagccgcaggcccctccccccggccagctggctcgctccagctgcggctcccttatttaggcaaggaggcctagggatgctcaagggcaggcggggtgtctgccccgccgcctgctcatcgcctgcttgcgtctgagtgagggtctccgggcgcggtgtcctcggacttagcagtcaggcagggccccgggaaggccagggcggggaggc

SEQ ID NO: 8683 - DNA, 148 bp, Homo sapiens
  chr7:150774065-150774213
  hypo
ccggccgtcccggcagaaatgccagcgttcccgcaacaccagcaccaccctgcagggggagggacgtggctcagggcatggcgggcaaggtggccagggctcccccaccctgcctcctttacctctgggcagggtctcgagtagtggc

SEQ ID NO: 8684 - DNA, 347 bp, Homo sapiens
  chr7:150774358-150774705
  hypo
ctccgtctccccgggcctgccgcctgccccttgctcacctgtgcagtagcctggaggcacagtcaggtcctggcggtatttctcctcccccagcagctggcgcaacccctcagctactatgtccttgtgactgaggagaaaggacaccagtagcaggaagggcccggcacctcatcctaatctgtcccagtctagtgccaccaccctgggcaaagccctctgctgcttcagggcccagttttatggtggccgagagctccttagctttggcgcttcatggtccctctggcttttccactctgctggtcccaggctggcccctccccttgccccaggctgccccatcc

SEQ ID NO: 8685 - DNA, 219 bp, Homo sapiens
  chr7:157334647-157334866
  hypo
cgcggcctcttagtgtacgtgttagaacctattattaaaggagtcaactgagcctggcggccacctcagggtgggacccggggagatgtgtctgcctgcgccccgtctctctcccctctgcactgccagagggcacctttctgctcctcgaaattacgtgggagctgcccctgtgggggcaggggctcaggtcgggctgtgccgggaaggtccgcaaac

SEQ ID NO: 8686 - DNA, 250 bp, Homo sapiens
  chr7:157589680-157589930
  hypo
cgagttccgactcgccgctcagacgaactcacggctcagctgggagaatcacacgggaggggcccatgaacgggcactggggccacagccggggattcaactgcaccgaaatcccagccctcaacacggcccacggctgtgtcatcccggatttatcactataaagcaaaaccaaaaacggacctcaggtttctctgcaatatgtaggatccgtgaaacctccaacgtgaaatgagaagtaggtagcctc

SEQ ID NO: 8687 - DNA, 203 bp, Homo sapiens
  chr7:157642963-157643166
  hypo
cgacatggggtgcctcaggctcgcgtaagggatcccaggtctccgaatttccgacgtgggtgcctcaggctcgcgtaagggatcccaggtctccgaatttccatttccgacgtggggtgcctcaggctcgtgtaagggatcccaggtatccgaatttccgacgtggggtgcctcacgctcgcataagggatcccaggtctccc

SEQ ID NO: 8688 - DNA, 218 bp, Homo sapiens; identical to SEQ ID NO: 7517
  chr7:157916520-157916738
  hypo

SEQ ID NO: 8689 - DNA, 171 bp, Homo sapiens
  chr7:158741267-158741438
  hypo
ctcagtgaaggtggcgcgggggatggctgagtggcagttgtgtctgcagggcagagtcatatcggaatgtacaagcgcaactggatatgcagacttttattcctggaggctacagtctggtccctcaatgaccccacaccccccacaattatttacaaaattccatttgac

SEQ ID NO: 8690 - DNA, 237 bp, Homo sapiens
  chr7:2233056-2233293
  hypo
attgctgtgctgagtttcagcacagggaccgtgcgtcctgctctctgctgcatctcccagccagtatacaccacggtacgtcataagccctcaacaaatatttgttgaatggaacagacgtgatcacaatatgtgctcctgggaaccctcggctaccagaaaaaaaggcgagacagaaatgagcacttctcaaccctgggagcaaatttataagggttttatcccttcaaaattatt

SEQ ID NO: 8691 - DNA, 141 bp, Homo sapiens
  chr7:22893437-22893578
  binary
cgggagccagtcttctgctacgtaattagacgagtcttgaaagaagcacccaggggcgtggctgaagactttaagaaacaccaggcaagggaggggagtgggtaccagagacacctaacattatttgagtggcaggagctt

SEQ ID NO: 8692 - DNA, 1088 bp, Homo sapiens
  chr7:22893607-22894695
  binary
tcacagccagcgagagtttggggcagactccccagactcggaggccggggcaaagtgggagccggggccaagtgggagccggggccgtgtggggtgggggggggggcccaaggcggggaaggcccgggccgccgacagggggcgcgcgagggcctccgggccccgcgggcggggcgggtgctggacccggaggggccttccggcaactttttggttggtgccgccccgcccaggccccttttaaacttgatctccgcagtgccctcccttttcggccgcggcgcgtgactgggtaagtgggctcggaccttctggacgcaggagccgaccacgtggctccggggctaccccgtgcgcttcctaggcgcgcctctcgctgcccccacgccgaggcctcggctcggcgccgcggggaagcctccgttagggcccctcgggggtgggggcgtcctcgtggcgcttgggcccttcgtcccgggttaggacggcccgtgtccttgtgcgcttgaaggggccgccccctttcctcgaggatcccacccccactcagcagaagccgccaggcgcccgtcacctcccgtgcctgagtccctgccgtccacgcattcggcctacaggcagcttttagtcctttttcaattaaatgattgcattttgaggatcaaattccaaccgcaggcggaggcgccgagccccggacggtctctgggttcttggtgcactcggggctcctgcctgcccaggggctgtgaccgcgcggacggaagcctatttgggaagcgagtgagatctgatgtctgaagcgctttaagtttctaagcggggcagtataatagcggggttagcaaacacacggaggtcatttcactcgcgcagccatcccccaccgccaccagtgccgttcatttgctactggcccgcagtcagataatttaaaggcttggagggacgagtcttgctggagccgacgcctacagtaagttgagcggagtgctgtgagccctaataagggagcctgctttcctcccgaagattcgcttttttgggagtggccagagcgttattacagcacagggcccgcttccaac

SEQ ID NO: 8693 - DNA, 210 bp, Homo sapiens
  chr7:23052818-23053028
  binary
cgaggattcccgagtatgttaaaatgagcctcaggagaggaataactcatagaaagaaggggcaagggctcaagaagagatcttcagcgaaataaccaaggaaggaagcgtggctgctgtctgaacctctccgccctgcaggggaccaaagaccgactcgggccaacgctgctctccagggggcgagggcggggggtcgacagtgaccat

SEQ ID NO: 8694 - DNA, 714 bp, Homo sapiens
  chr7:23053080-23053794
  binary
gagtgggagaggaggcagaggccagagcatccgccgcggcagggaggggacggggggctcccgccccaggcccacccggcagaggggcggccggtggggccgaggcggcggcacccgggtcacagcaggaggctggactgctcctcgccgggaaggaaagacccgagtcgcgcgcacaaagctgccgccctccaggcagcgggcaggctgcgcccaacttcggggcgagcagcgccggccgcagcccacccgcccgccagccgcccccagcgccccgcgccgcctcgcacccacccatggcgcctcgcgcgggagccgttacccccagtggagccgcggccccagggacaaagtcccggtcctgtcctcgccgccgcctcgccccggctcctccctgacaaaaaaaagttatccgttgccggacgccctgggggcccggcgtgggtctctcggctggactcaccagggcggctgccggagctccacctgcaggacctcgactcgtgaggctctcagcgacagcgacggaggctgctctgcttcctcccgagtagcagcaccacctgctccccttcttcctagcagaacgggtcccggtgagccatcttccccctcctctcactgactgacaacccagccgggagagccaccactgccgccagcctctctgacaggcacgaccagggacccgtcctcaagcagccaaccaccacc

SEQ ID NO: 8695 - DNA, 246 bp, Homo sapiens
  chr7:23053819-23054065
  binary
cgtcctccggggcgggatcagaacaacttctccaccaatgagaatcttcttctgctgggcctggggcggagccatgaggcgccttgagtgggcgtggtctgagcaatgggcgtgatccgggcgtccgagggaagttgattgactgtaaggtttgcggtggccgctaggcgatgacaatcagcgaaggtctcttagattctgagccgttagggcttatggccttctcagaaaaaaataaaccttacc

SEQ ID NO: 8696 - DNA, 523 bp, Homo sapiens
  chr7:23507580-23508103
  hyper
cgtttacgcacgcgttccaatacccctggcgagctcacagggcagaggcaaattcctctccactcggccgcgcccacggcctcccaaccccggacagagaaggaaaggagggacccccgcgtgtccgcagctgctttcgcctctcctgctcctggaggggtgggggaatcatccgctgcttcccaagccctgcaaaccccccaaactgcttgttgggacccatttcccgtaggagcaatttgacccgctcggaccgaggacattcagctgtgagctttcgagagattttgtaaccaataaccataatcccgcggcagaggccacagaaaagctttcaattcctgcccagcatcatcaacacacacacccccgccataaacttaaaagcaaggattaaagaccggaacaccacgccacacggcagggggtaagcaccagaggacaagaagttctcagctgagtctctccacccaataacggagtgagaacagaatcggggcaaacagaagcagcagctcacctt

SEQ ID NO: 8697 - DNA, 761 bp, Homo sapiens; identical to SEQ ID NO: 7527
  chr7:23510081-23510842
  binary

SEQ ID NO: 8698 - DNA, 229 bp, Homo sapiens; identical to SEQ ID NO: 7528
  chr7:23513246-23513475
  binary

SEQ ID NO: 8699 - DNA, 242 bp, Homo sapiens
  chr7:23514425-23514667
  hyper
ctggagtcacatcttcgtttccctgcccatttccaacatcttagagttgatgcgtccttttttacttaaaacaactacaaccaaccatgttctcaggtaccagaacttttctgggcttctagagaaatcgactcgccctgcccgctcccttcctaaacccctttgtggtccacagggttgttttaagcaaaatcaaacaacccctccaaaaaaagcaaacgaaaaattccgggtaaaatcaa

SEQ ID NO: 8700 - DNA, 469 bp, Homo sapiens
  chr7:2472811-2473280
  hypo
cgcgtgatgatcgtgctgagcggaagcctgctgcaccgcggtgcgccctaccgcgacccgctgcgcatcccgcgcgagcacgtgcacaacgccagcgcgcacctgaccttcaacaagttctggcgccgctacgggaagctctcccgccacctcatgaaggtcaagctcaagaagtacaccaagttcctcttcgtgcgcgaccccttcgtgcgcctgatctccgccttccgcagcaagttcgagctggagaacgaggagttctaccgcaagttcgccgtgcccatgctgcggctgtacgccaaccacaccagcctgcccgcctcggcgcgcgaggccttccgcgctggcctcaaggtgtccttcgccaacttcatccagtacctgctggacccgcacacggagaagctggcgcccttcaacgagcactggcggcaggtgtaccgcctctgccacccgtgccagatcgact

SEQ ID NO: 8701 - DNA, 328 bp, Homo sapiens
  chr7:2473779-2474107
  hypo
tgtggtttttctgagcgtgcgggcgccgggaggggatgctgaggctgatggagctgcctccagggctagggccactcaccggaggagggcggggcctgcacttgaagtcaggccgcacctgtctgtttttggaagggtagccgacaaatccttccagagggaaagttctttgtttaagtgttgtacttgaaaaggtcaatcttcagggcttcctgtttgaagtcaagtcagaggtaaaccggtcagttacagaagcaggatttctaggatttctaactccagctgttcccatactgtctagtttaaattatggctgttaaggccgggc

SEQ ID NO: 8702 - DNA, 1196 bp, Homo sapiens
  chr7:25019058-25020254
  binary
cgttgtctcagtctctccggcgcgccccatcccgcggatgtggtaaagcttcgcgctcgccccaatttaccaggcttcctgagcctctagccccggcgtagcgcctccccgctgcccaggacagctccgcgcgccgcgtcctcccgcacctgcgccgcggcccctgcgctcggctcctcctggcggtcaatcctctgagccgtccctcgagggaaggtgtcctggggtgggtgagacccgggtcctccttccccgggagctgcagccggcacccaagctcccaggcttgggtctgccccagggccggagcctccccgggcgactcggacagaccccggtccggcagagaaccgcggcgccccgcaaacagcagcccttccgagcccgcgccgccgccaggccccccgacacccaggccccatttaggcgggcgccccgccactcacctgagcgctgtgcagccggagacgctccctagttccccggggccgggctccggggttagcgcacagaaccgggagaaggcaaccccggcttctccggtacccccgcaacgtgcagctgacagctcccgcaccggccgcaggagtcgggggcggggatggccacttgcagacagactgcggggccggagccgcgctgcgcaccggccgcgaagcgctcaagtcccctctcccgggccggctggcgggcgccaccagcacgcggccagttctgagtactttgcccagaacttctcggcgcgcgccgcccggcgattagcccgaggagccgcgcaagggcgggagcgcaggggaggggcctgagaggcccaggggcggggccccgagggggcgggagggcggcagagtgatgcacaatctcaccaatcagaagtcgcctttcgggaaggaggtggggcgatgtcctcggaagaagccagcggattccatgacgcggcgggggaactagggaccccggattccggatgggttgggagggcggagggaggcgagtcctgcggcgaggcactgggtggggctcccggtggcccagctcggtgcctgcgcgcggtaggcgttcggtaaatgttcctctagtggcttttccgggccagggaaggaggaaaaagtgagggcagcgcgggaggggcaggtttacggagaaggctccaggggacccttgcggtcgcacaggctaggagaactcgacctccc

SEQ ID NO: 8703 - DNA, 196 bp, Homo sapiens
  chr7:25896938-25897134
  hyper
ttgtaacactttgggaagttattaaaaggaagatctactgcttcctccttttgggttaaactggatggcaatgtttgtcactggcccttattagagaagagtgtggcgaggtggagggccgttggacgctgggtttgtttgtgtgggtcttgttttttattacaagacacattatccttttaattacaagctgtag

SEQ ID NO: 8704 - DNA, 109 bp, Homo sapiens
  chr7:25897246-25897355
  hyper
ctcaggaaggtgttgcaacctttggttgtaccagaaggaaataagcaaactcccatcacccccacccccattccccgccctaacacggagtaaacttcggcctttttcc

SEQ ID NO: 8705 - DNA, 225 bp, Homo sapiens
  chr7:26192423-26192648
  hyper
cgtccctcgcaccagcgtggatgcatggctggtgcacagcgtggctgccgggagcgcggacgaggcccacgggctgctcggcgccgccgccgcctcgtccaccggaggagccggcgccagcgtggacggcggcagccaggctgtgcaggggggcggcggggacccccgagcggctcggagtggccccttggacgccggggaagaggagaaggcacccgcggaacc

SEQ ID NO: 8706 - DNA, 112 bp, Homo sapiens
  chr7:26192748-26192860
  hyper
cttgtgtcggatctgagcaggggccactctcgctgtgtcctggcacccttagcccctggtctttgcaggttcgcagatgctgctgctctgattccgaatgaagggctactag

SEQ ID NO: 8707 - DNA, 164 bp, Homo sapiens
  chr7:26283815-26283979
  hypo
ccgaaaatccaacgttggtccaagaaggctctggtgtgtgccaggcactcactgatcatctggtcttacggagacgcctctaagccatttgatcccgttccgggaacgaaaatggcagcggtgacggttgctccttttatggtctccctccggctgtccaggac

SEQ ID NO: 8708 - DNA, 91 bp, Homo sapiens
  chr7:27135176-27135267
  hyper
cgtctgcttcctgatttaacgcgtaggggctgtaaggcgcactgaagttctgtgagccatagcttggaccacaacttgagtgggagtagga

SEQ ID NO: 8709 - DNA, 142 bp, Homo sapiens
  chr7:27136790-27136932
  binary
ggaggggaatgttagaagagagagagagcttccttttataaccttcctcattctgctgcacgtctagagtgggtgtgggggctggcaggtgggaggggcggtggacaaatggctgatggtggacgggacactttaccccaac

SEQ ID NO: 8710 - DNA, 78 bp, Homo sapiens
  chr7:27281871-27281949
  hyper
cgtagcttgtaaaaagacttttcagccagtttgaggttagctgccaggggcagacagttgtaataatgccgacagaat

SEQ ID NO: 8711 - DNA, 456 bp, Homo sapiens
  chr7:27531253-27531709
  hypo
ggtctgacatgattgttggccgtggaaggcctcgggccatcctgagctcagatcttggctgccggccgctagggcggctgcttctgcagcagggctagggtgtcccgcttctcaatggagcgcagctgctgctgctttgcccgcttgagcttggcagggtttcggatcacttggacgatctccaccttccgctcgttctccaggcggcatttcaggttctccgcccgacgctgtttcttctcctggcggcgcctctcctactcctcctccaggtgacgggcaaagtccttggccagcttcctctcctgcttcatcttccgctgccacgatatacgcaggggcttgtcctaaagcatctgagagaatcttttcttggagcggtccttccacacttgccccgacttgggcttccccttcgggattacaggaagctcctcctccttcagcttcttggac

SEQ ID NO: 8712 - DNA, 399 bp, Homo sapiens; identical to SEQ ID NO: 7537
  chr7:2770640-2771039
  hypo

SEQ ID NO: 8713 - DNA, 126 bp, Homo sapiens; identical to SEQ ID NO: 7538
  chr7:27831654-27831780
  hypo

SEQ ID NO: 8714 - DNA, 54 bp, Homo sapiens
  chr7:30599500-30599554
  hypo
cgcttcactcgctgcactcaaacattgcttcacgtttccatagtgctcatcacc

SEQ ID NO: 8715 - DNA, 54 bp, Homo sapiens
  chr7:30603338-30603392
  hypo
cgactcaccgttctggaggctggaagaccaagatcaaagtgttggccgagccat

SEQ ID NO: 8716 - DNA, 110 bp, Homo sapiens
  chr7:30603436-30603546
  hypo
agccccaggcatttgtggcgtgtggcagcatctctccgatctctgcctccatcttcacacggcggtctctgctctgtgtgtgtccagatttccctcttcttaataaggac

SEQ ID NO: 8717 - DNA, 126 bp, Homo sapiens
  chr7:30656768-30656894
  hypo
cgcatctacctctacctcacgaaggttggaatatctccagataaactccgcttccggcagcacatggagaatgagatggcccattatgcctgtgactgttgggatgcagaatccaaaacatcctac

SEQ ID NO: 8718 - DNA, 396 bp, Homo sapiens; identical to SEQ ID NO: 6278
  chr7:3082731-3083127
  hyper

SEQ ID NO: 8719 - DNA, 84 bp, Homo sapiens; identical to SEQ ID NO: 5847
  chr7:3083602-3083686
  binary

SEQ ID NO: 8720 - DNA, 52 bp, Homo sapiens; identical to SEQ ID NO: 6279
  chr7:42927739-42927791
  hyper

SEQ ID NO: 8721 - DNA, 412 bp, Homo sapiens; identical to SEQ ID NO: 6280
  chr7:42928175-42928587
  hyper

SEQ ID NO: 8722 - DNA, 78 bp, Homo sapiens
  chr7:47515282-47515360
  hypo
cgcttgcagagtgtatgaaggtaaacacaggatggaaaaaaacaaggacactctgcccttgaacttcaatcaaaagct

SEQ ID NO: 8723 - DNA, 147 bp, Homo sapiens
  chr7:47515405-47515552
  hypo
agatcctgcaaacctgcaactaccaaggacagactcgcatgcgcccttgttctgaccgtggtgcctccaagtctgcaaatgcgggatcacaggaatcatctactgtgtctgtcatcggtgccctcaccctcaggaagcaggggacac

SEQ ID NO: 8724 - DNA, 50 bp, Homo sapiens
  chr7:4771516-4771566
  hypo
cgcttgctacgtgccagccgtccggtcaggactgatgttcacggcatgga

SEQ ID NO: 8725 - DNA, 504 bp, Homo sapiens
  chr7:503100-503604
  hypo
agcccagaaaggcgacggggtggcccaaggtcacacccacgccaggcccagcactctgctcttcccgctcacccactcggccgggcctgtgccctcccgcccggccaagtgggggctccaggaagggcagcgagtgccccgcggccccggccccactgcgggcggccggaacacagagggcggtgaggaaggaggcgttccctgccgggtgccctccagcaggattcgcgaacccaggggagcgagcgggaggattttccatgtgaggccggcttcctggggcgaggcccacccggcgccagcgtggagagaggagaggagcaaagcgcctcgacacattctccctcggtgatttaatggccggagcattcgtgcgatatttatgcagtaaatccttccactggggggtttcactgtgtcacgggaggctcctcccagcccgtccccatcccgtcccccccaaaaaaagaatcctgagaaaatctcatttcacagtttcccatc

SEQ ID NO: 8726 - DNA, 57 bp, Homo sapiens
  chr7:50560501-50560558
  hypo
cgagcgccggggaagagttgtccgggagagatgagcgcacagccgccaacttgctgg

SEQ ID NO: 8727 - DNA, 220 bp, Homo sapiens
  chr7:50560663-50560883
  hypo
ggttttcttcagccttaacatacgcactggttgtctggacctgagggcaggacgccgcattcattacactccttcttatcgtgtgtcaatatttgcctccaagattagggacccaaaatatttctggtccctgaccgcttcagtttcctcatctgtaaagagagcgtggcaatgtctgtgtccctcaacacagggctgtcgtgggggtccagagagctac

SEQ ID NO: 8728 - DNA, 132 bp, Homo sapiens
  chr7:56037272-56037404
  hypo
cgtgtttgtctgtctgccctcaccagcaaactgagctcccgtgaagtcagggccaggttcatctgtgcatcgtcagtggctgacaggtgtagtgcacagtctgtaaataacagtgatcatattgccgggcgc

SEQ ID NO: 8729 - DNA, 49 bp, Homo sapiens
  chr7:564189-564238
  hypo
cggcgttaagaccaggccctcacggagccctcactctctgaggaggaac

SEQ ID NO: 8730 - DNA, 107 bp, Homo sapiens
  chr7:564271-564378
  hypo
aggcaaaggatttcaggcccaggtcaggaaggccttgtctgaggagtctgagaagaagtcaattgacaacagctagaacatctaggtcaggcactccaggccgacac

SEQ ID NO: 8731 - DNA, 405 bp, Homo sapiens
  chr7:64146495-64146900
  hypo
cgtcgaaaaaggtgggctatgcacctttttaggggaagattgtttttccaccaaccagtctggactagtacgagatgctgcctcgcagttaaatgaaaaggcttctaaaatcagacaatgtctttcagacttttaacaccaatctttggagctgggcgttgtggcttctccctatagctgggcccctcatttccatcattctccttctcctatttggaccctgcctcttccgtctagcctctcagttcctacaaaatctcattcaagctattaccaatcaatctatgcgacaaatgctactcctaactgcccctcaatgtcacccccaccccaagatctctctcccaattaggagtccatgccgccccaagtcccgctcgaagaatccctgagaaacatcacccc

SEQ ID NO: 8732 - DNA, 210 bp, Homo sapiens
  chr7:7605822-7606032
  hypo
cttaatctctccccacttcctctgctcattcatccatacctactgcctcctcactgctatgtcctctctcctgacccggcacttgctctttcccagtcctagaaggctcttctcttccagttcccactgcccttttccctttcctggctaatcccatactcatccttcttgtctcaacctagtggtccttaaggaagctttgctgacccc

SEQ ID NO: 8733 - DNA, 372 bp, Homo sapiens
  chr7:907709-908081
  hypo
ggggcagtaaatccacagctggcatagaggagaagccggcgggtacgtgcccatcgttcaccatctcttctaaacacgaatgaaatgcgtgtgtcgtcctcacacactgaaggcaggctgcgtgcacggtctcctcctccgttgcgcacagcaacgtggctgcctgggcgcagcgtctgcaacttgtcagtcagtccctgtgtgtgcctggggacgctgtgctgcgaacagtgctctccggtcacatctgccctgcacctggaggtgggggtgcgatcgcaggccagaggcagatgtgtgcgcagcaggccgaccttgccaggctgtgcttctggggctgcaggctgcaccgtggccgggttaggttagaac

SEQ ID NO: 8734 - DNA, 176 bp, Homo sapiens
  chr7:920980-921156
  hypo
cccaccccaccccatccccggcacccgtgcatctgcgggctgcacttaggtgaggtggtgtttcctggagttttacgtatgtggaatcacagtgcgcactttctgtctaaccgcttgaattcattcaccacggaggctgggagactcctcctggagcgtccgcagttccttttatc

SEQ ID NO: 8735 - DNA, 80 bp, Homo sapiens
  chr7:99155672-99155752
  hyper
cgcaactgtcagtttcctccgtctctctcggttctattccaatctgctcatctcccctcccgtccccgctttccccaagg

SEQ ID NO: 8736 - DNA, 216 bp, Homo sapiens
  chr7:99156600-99156816
  binary
ccgccgtcaggagccggcgaccgtgccctggtgcgagctggtctgtatgtcctcactggtccttttgggactttgccttggcctaaaagggaagtgggaggagggcagcgccgggcaaggccttctgaggaccgagctgggagccgggcaggggcccagggcgagggtggtgggagggggacggcaccctcatgcgtccttgggcctgaaggacgc

SEQ ID NO: 8737 - DNA, 77 bp, Homo sapiens
  chr7:99156982-99157059
  binary
atttcctagggggcctgctgttttatttatttaaatgagtttatttacgtaaacgcgggcctgtcacggtggttcac

SEQ ID NO: 8738 - DNA, 448 bp, Homo sapiens
  chr8:100796506-100796954
  hypo
cgatccatgttggctttcgtatcctttttctttcagaacaaatgccctgaggtagaggagttggtcttcagccattttgtgatctgtaatgacacacaggagacactgcggtttggccaggtggatactgatgaaaatattctgctggcgagtctccacagtcaccagtacagctggcgctctcacaaatccccacaggtatttgagaaacacccttacaaacagccattgttaaggttggggattcatttcttctgcacttgtgtgcctgtccagttatttccctttttaagtctccgaaggaaccacacagcgtagctacatctgacggaaacccaagagtgtttagagatgggagcacacgcttctcttggaatggagcattttcctgtttagcactggtgcttggggcgggggcagcagggtgtggtgatgaagaggctgactc

SEQ ID NO: 8739 - DNA, 40 bp, Homo sapiens
  chr8:114444541-114444581
  hyper
tccccaaagacaagaccgcattcagggagaagagaaccag

SEQ ID NO: 8740 - DNA, 142 bp, Homo sapiens
  chr8:117336931-117337073
  hypo
cggcagtattgaagccaacgtctcatgtaaagatttagggctttttcatcaagacactgtattggaaaatcgcctgctaagaatgtggtcattaccgtacattttgtgtgcaaagcaaaggcggttgatactgtaccttggc

SEQ ID NO: 8741 - DNA, 221 bp, Homo sapiens; identical to SEQ ID NO: 7561
  chr8:118531602-118531823
  hypo

SEQ ID NO: 8742 - DNA, 104 bp, Homo sapiens
  chr8:125580698-125580802
  hypo
tctgtttcttccaataagagatacttatcattgacatcttggagagcactgtccaactgaggctggatatcacctctccctgcaaaaaacagagacccaagcac

SEQ ID NO: 8743 - DNA, 631 bp, Homo sapiens; identical to SEQ ID NO: 7564
  chr8:128871653-128872284
  hypo

SEQ ID NO: 8744 - DNA, 191 bp, Homo sapiens; identical to SEQ ID NO: 7565
  chr8:128872459-128872650
  hypo

SEQ ID NO: 8745 - DNA, 62 bp, Homo sapiens
  chr8:128888848-128888910
  hypo
cgtacactcttcccatctcctggcccctccagttctgaagggatggggactaagtgggatct

SEQ ID NO: 8746 - DNA, 43 bp, Homo sapiens
  chr8:128889422-128889465
  hypo
cagattctaaagtgaagcaggctgtggtgtgatgatggccccc

SEQ ID NO: 8747 - DNA, 107 bp, Homo sapiens
  chr8:128957492-128957599
  hypo
cgcacatgctttcttggtcacttatgtgagagctcatccaggatttataccctgaggcgacttcactgccgtggaggctaaggaacattttctgtttcataagacgc

SEQ ID NO: 8748 - DNA, 199 bp, Homo sapiens
  chr8:140770366-140770565
  hypo
cgtgacagcggggaggccaagcgctcgggcctgggaagccagtgtcacccctcagggccgggatggctggaggtgcccatcgctggacttgctggctggggctggagcaaatgccaggcttatgtggggtggggacatgtgcctgtggaggagaccgccctgtgtggaatgggactcacactgagcatgcccacgtcgc

SEQ ID NO: 8749 - DNA, 297 bp, Homo sapiens
  chr8:141599879-141600176
  hypo
cgagatccgtgccatcagcacgagccgcagaacaggacggagtgatggctcagtgagtacagaccagagagtagatgctatcaagctgtactctcctgctaaaatcaggacacgagggtgacaactcacctgttgtctacacaagcaagcctcccttatggccacccaagttgacgctaaacacagtcatggcagcttttttggtgaaatggacagagacggtctcagaatgtgtgctgggaatgcagtcggaacatctgctcctgtcagccggagtgcagacaactgtatgctgtc

SEQ ID NO: 8750 - DNA, 50 bp, Homo sapiens
  chr8:141600284-141600334
  hypo
gggatggctggagctgggtccccagctgatgcgttctaccccctcccccc

SEQ ID NO: 8751 - DNA, 193 bp, Homo sapiens; identical to SEQ ID NO: 7569
  chr8:142367176-142367369
  hypo

SEQ ID NO: 8752 - DNA, 288 bp, Homo sapiens; identical to SEQ ID NO: 7570
  chr8:142367824-142368112
  hypo

SEQ ID NO: 8753 - DNA, 107 bp, Homo sapiens
  chr8:142427489-142427596
  binary
cgggcggtggggctggtgggctgggcagggggtctgaactggagggactcgggcgccctcctcctcagggtgcaggacagcacctgcacggcggggccgcatttcca

SEQ ID NO: 8754 - DNA, 328 bp, Homo sapiens
  chr8:142427700-142428028
  binary
gggggccagggggagctccgaggttctagggagggcgcgcaccgggagagggcgccgggccggccggcgggaggaaggaggggtcccgggcggcagcgcccccggccctcgccgcgccccgcacttccctttcctggctgggcttcctcttccccgcgcccgccctgcgcggcccctttgtttcccgggcagggcgcggctatatttaggcggcaggtgtgggagcccccggcagccgggtcgcccgccggtcacgccccccacgtgacgcccgggcgctataaatagccgcaggcggcggtggcggcagcgcctggagccggctccg

SEQ ID NO: 8755 - DNA, 56 bp, Homo sapiens; identical to SEQ ID NO: 7573
  chr8:143333267-143333323
  hypo

SEQ ID NO: 8756 - DNA, 37 bp, Homo sapiens
  chr8:143334502-143334539
  hypo
cgggtgagagtgcggaggtggacaggctggcgacagc

SEQ ID NO: 8757 - DNA, 321 bp, Homo sapiens
  chr8:144178383-144178704
  hypo
cgttcaacacaacacagtgctggaagctctggccggtgcacacagcaagacaaggaaaccctcgcgttcaacacaacacagtgctggaagctctggccggtgcacacagagagacaaagaaaccctcgcgttcaacacaacacagtgctggaagctctggccggtgcacaaagagagacaaagaaaccctcgcgttcaacacaacacagtgctggaagctctggccggtgcacacagagagacaaggaaaccctcgcgttcaacacaacacagtgctggaagctctggccggtgcacagagcaagacgaagaaaccctcgc

SEQ ID NO: 8758 - DNA, 88 bp, Homo sapiens
  chr8:144676118-144676206
  hypo
cgtgcaagcctctcctctccagcaggagagcccggagcaggacacagcgactctttcaactgcgtcccgacaaacggtcagccccttc

SEQ ID NO: 8759 - DNA, 93 bp, Homo sapiens
  chr8:144683804-144683897
  hypo
tttcatttccaacctttcttcccatctcagcccttttgttggcccgggtcccaggaggctggtgtcggtgagggcaggcccgctcctctcatc

SEQ ID NO: 8760 - DNA, 77 bp, Homo sapiens; identical to SEQ ID NO: 7581
  chr8:145698674-145698751
  hyper

SEQ ID NO: 8761 - DNA, 127 bp, Homo sapiens
  chr8:23021590-23021717
  binary
gtcagttgtactcccttcccgcagtcacttccaggcactcaggctgggtctcccccagcacctccaggagggcccaggttgtgtgggtgggtgcatggacggacaggaactggctctttccggcagc

SEQ ID NO: 8762 - DNA, 57 bp, Homo sapiens
  chr8:37655257-37655314
  hyper
cgggggacaggcgcaccccagagaaaggcaccgcaggcgcccactcacctgcacagg

SEQ ID NO: 8763 - DNA, 65 bp, Homo sapiens
  chr8:42134216-42134281
  hypo
cgtatgttttcttgtttttttttttttgagacagtctcactctcagctgagacaggtgcgatctc

SEQ ID NO: 8764 - DNA, 69 bp, Homo sapiens
  chr8:49334914-49334983
  hypo
cggagtctgctctgagacccagggaccgtgcgttctgcagggaagctggcgcatgcccttaggttctgc

SEQ ID NO: 8765 - DNA, 120 bp, Homo sapiens
  chr8:54645734-54645854
  hypo
cgccagctgctcatgtactgaggacagctggttcacccgcctggacttgaaggacgctttctttagcatcagactagctcctgagagccagaaattgtctgctttccagtgggaagatcc

SEQ ID NO: 8766 - DNA, 173 bp, Homo sapiens
  chr8:56791852-56792025
  binary
cggagaacttgccgggccatttgactctacgtcatcccctcccccatcaatgccctgaacagcctcctgtacacccttaaggaacttactttgtaatgattattaagaactcagcgagaccccgagcatcacctcggcatatcgcatcctttctctagagaacccctaatgtt

SEQ ID NO: 8767 - DNA, 1176 bp, Homo sapiens
  chr8:56792065-56793241
  binary
ccccttcctaataataccttggggatgggtcggaaggaaaggaaaggagacgcgagaggtgtagtcgatgtgcctgcgaagcccaggctcctctggagatccttccgtccgtccctacaggagaaggctggcccgggctgctccactccccggagctgcagactgagtcgccaggtttctgtgccttcaaagccctgcgcgacggccacaccaaacacccaaaccttgggcagggaccaaacggtcacttccccgccctccgggctcaatatgcaaatccgagcaccaggaagtagctgggacctctcggccgagcccagagacagccagttcctctcccgccgcgccgggccgcgctgccgctcgctccccggccgtggcgcctccgggccagacgcgctgcagcctccagcccgcggcaagcggggcggccgcgccacccccggccccgcgccagcagcccctcgccgcgcgtccagcgttcccggccagcagcctccccatacgcaggtcctgctgggccgccccgtcgcgccccccactctgaactcaagtcaccgtggagctccgccgccccgaaactttcaccgcgagcgggtgagtcctctgcgcgagcccaggggtgggcgcgggcacgcgggcagtgggtgcaggggccgcggctgtgccaccagccggagtcccgggcgcagggtagactcggggccgggggcatcggcgcggcccgcggcggcttcctggccgcaccgcctctgggctccggcggcgaaggctcttagatgtcttcagccgacgggtgaccgggcccgggggagccagggcgcggggactgaggctccgcaggtgtccgccgcggagccgcgcaggggagcggtgggaggtgcgggcgcgggggcgggctcaccgcgtgtccttcccggtgagggcccgagggccggctgctgtccctgctccggccgcttctcgcacacagtggggaagccgctgcccttgcggagcgggcgcgcggcggggatactggagaggactcctcggattgtgcaatctgatctcccctctggaccctgggtctcctggcagtgggagatggggctcggccggcgccctctcgaggcccgcggacagttgccctccctggtggccccgggcaggagcgtgacgtcgaggggctgcagc

SEQ ID NO: 8768 - DNA, 103 bp, Homo sapiens
  chr8:60030067-60030170
  hyper
cgaggagcttctccacggggaagtgtgtgtgtgagagcctgcctgtgtgtcaacactgtccaagactcggagctgcgactcggtcgcgtggtgcggagtccag

SEQ ID NO: 8769 - DNA, 239 bp, Homo sapiens; identical to SEQ ID NO: 5853
  chr8:60030908-60031147
  binary

SEQ ID NO: 8770 - DNA, 350 bp, Homo sapiens; identical to SEQ ID NO: 5854
  chr8:60031791-60032141
  binary

SEQ ID NO: 8771 - DNA, 203 bp, Homo sapiens; identical to SEQ ID NO: 6303
  chr8:60032288-60032491
  hyper

SEQ ID NO: 8772 - DNA, 95 bp, Homo sapiens
  chr8:6633002-6633097
  hypo
cgagaaacaccaccggctggaaatgtggctctgctcccgatctttgtctgcgttggcgagacaccggccgctctgggccggaatctctcatctac

SEQ ID NO: 8773 - DNA, 55 bp, Homo sapiens; identical to SEQ ID NO: 5856
  chr8:72756949-72757004
  binary

SEQ ID NO: 8774 - DNA, 142 bp, Homo sapiens
  chr8:81213177-81213319
  hypo
cgatgatgtgcagatctggcacttgcttgcaggattacactgcagtgaaggagaagtatgccaagtacctgcctcacagtgcagagcggtatgccgccaaacgcttccgcaaagctcagtgccccatcgtggagtgcctcac

SEQ ID NO: 8775 - DNA, 327 bp, Homo sapiens
  chr8:81213356-81213683
  hypo
aagctcatgatcatgcgcatcgtcaagcacgccttcgagatcatccagctgctcacaggcgacaaccctctgcaggtcctggtgaacgccatcatcaacagtggtccccgggaggactccacactcactgggcgagccaggatcgtgagacgacaggctgtggccgtgtccccattaagccgtgtgaatcaggccatctggccgcagtgcacaggagctcttgaggctgccttccggaacatcaagaccattgctgagttcctggcagatgagctcatcagtgctgtcaagggctcctccaactcctatgctagcaagaagaaggac

SEQ ID NO: 8776 - DNA, 197 bp, Homo sapiens
  chr8:82192428-82192625
  binary
cggcggtggatatgttgtcaaacggaggggtgcaggagaggcggggccaggcctccaggtgacccctctggcttcctgggcctgcagaggcgccgaaacgtgcaggcgccggcgtccatgaggcgtggggcgcgccgggcgagtccctgcttgcaggaggcgcccgagaggccgtcgcgtaccctggcaagaggagc

SEQ ID NO: 8777 - DNA, 99 bp, Homo sapiens
  chr8:82193698-82193797
  binary
aggagcgcaatgaggcctgggggtggccgtgtgttgccatcctggcctctgccacttgagggtgaggaggaaggaggcagtgggctttgctggaaaacc

SEQ ID NO: 8778 - DNA, 101 bp, Homo sapiens
  chr8:8898512-8898613
  hypo
cgtaatgagaccgttttcagtgcagacagctgagcccccaggcacttgctccgctgagtgtttcagcgattacgctgcacttctgctcgcctgcctaaaac

SEQ ID NO: 8779 - DNA, 140 bp, Homo sapiens
  chr8:91014317-91014457
  hyper
cgtgattttcgaagttttcacagttctgcaagtttccaacttgtgtgtaaataggtagaaagaggtagggaaggatacggcgcccgtccaccccttaaggagtgagaggggatcaggccgagcgagcactgacctttgac

SEQ ID NO: 8780 - DNA, 244 bp, Homo sapiens
  chr8:91657148-91657392
  hyper
cgaggctccgcgttaggtatgttttatgtgtaggacagacttcccaggctgcgatggaaagtaatcgtaactcctgccgtcaatgtcacttctctgctggtatttatctgatagagcgccctcctagggccgccacaagaccgctcaaaaacagacttggagagggataggccagcgggaccccacttaccgaaaacactgcattctgaagcccaaaaggtatgggtgtcagtctggccagcgc

SEQ ID NO: 8781 - DNA, 245 bp, Homo sapiens
  chr8:91657421-91657666
  binary
ctacgcgaataaccgcgctcagcttctcgctgctctggatcctggcggccacccaggcggtgaggagccgcttgcagaccacatgggcgatgaaggtgccgatgaggacgcccaccatcatcagacccatgcccagcacgaagccgtacaggtagccagcggccacgttgagcacgatgtagccccagccgcaggggaaagagaccacgatgaagcccacgacgaagagcaggacccccagcagc

SEQ ID NO: 8782 - DNA, 66 bp, Homo sapiens
  chr8:91996920-91996986
  hyper
cgtagctttgactaaaacaccagcaatgaaaaccttgtgccaccgggtggagggggcaaatcgtct

SEQ ID NO: 8783 - DNA, 39 bp, Homo sapiens
  chr8:95556587-95556626
  hypo
cgtatcaacattcacactaaataaagattatggccgggc

SEQ ID NO: 8784 - DNA, 45 bp, Homo sapiens
  chr8:99077294-99077339
  hyper
cacaggagaaatgtcctatcaaggccttctaccaaggctgggggc

SEQ ID NO: 8785 - DNA, 59 bp, Homo sapiens
  chr8:99953137-99953196
  hyper
agcttattggccctgagaataggcccaggccctctccacaggacccctaccgcacacgc

SEQ ID NO: 8786 - DNA, 55 bp, Homo sapiens
  chr9:101558601-101558656
  hyper
cgggcccggccacctcggcccccgccggctccgcgcccgcctccggctccgcgcc

SEQ ID NO: 8787 - DNA, 149 bp, Homo sapiens
  chr9:104248697-104248846
  binary
cgcccgcagaaacccaacactgctgccgcgctctcggcgcgcccggcgaacctaaggtgtggacgcgccgcgagggtcccctgcttgcgggcggccattaggcgccaggccccttggcgcttcggccctgctaggctcggcgagggtct

SEQ ID NO: 8788 - DNA, 186 bp, Homo sapiens
  chr9:104248975-104249161
  binary
ctggggacccctgcggggtcctcgcaatcctccggcaggaagcggtcggagctgcgggcagggccgctaggcaacccgcctgcccgaggcgcactgcccggggcacaggccctctgcgatgactctccccaacccccagctgccctgcttgtgccagctgtggccacccctaatccttgtcccctc

SEQ ID NO: 8789 - DNA, 93 bp, Homo sapiens
  chr9:113800676-113800769
  hyper
cggcccgcgctccgcagcggggctggagacggagtcgccactcagggagcgtcagccgccagtcggcccctactgcccggctttggcgcgctg

SEQ ID NO: 8790 - DNA, 283 bp, Homo sapiens
  chr9:113800798-113801081
  hyper
agaggagcagcgccgacgccagcctcctctcttcctccgccttccttcttttctgcttgttccacgtagcacaagtcagcaacacccgaacccccagagtccgccctccccgctcccaagctggaccccttacctggtgtggcgcccccagcgcccctgacctctgcgccccctcctccattcattggctcgacagcccacggtggtggcagggccggggctggggggtggccttagcctcccattcattatctcagcagcctcccccgccccgcccccgagt

SEQ ID NO: 8791 - DNA, 66 bp, Homo sapiens
  chr9:113801414-113801480
  hyper
tttttcacttcactggatctgtaaacgaaagcaagtgtgtctgctcccctagttctccatatccac

SEQ ID NO: 8792 - DNA, 55 bp, Homo sapiens
  chr9:128103464-128103519
  hypo
cgcaaagatagcgatgatgagaaatcagacaggaacagaccttggtggagaaaac

SEQ ID NO: 8793 - DNA, 193 bp, Homo sapiens
  chr9:129373418-129373611
  hyper
cggggaaggcatgcagaggggcccaaggggtgtggactcagcagccccaccccagaccagagaaggcagccaggctctggcgtccaccgagccagcgcccctatctgggcgcgggccgcatggcggcagaccaccctatatccgccttggtggcgtgggatatgactggcaggagcgcggaagaggcgctgag

SEQ ID NO: 8794 - DNA, 62 bp, Homo sapiens
  chr9:129373640-129373702
  hyper
cggcacggagggggtacttcccacaagtcctcctgccttgagaccaggccttcgagtggtcc

SEQ ID NO: 8795 - DNA, 231 bp, Homo sapiens
  chr9:129393170-129393401
  hyper
cgggctgccggtgcagcaattcagggcaggcgttgtctggcctttgaagggacggctgtctgagtgtgtcactttgaactgcaaaggggcctgtggtgagggctcggccccctcccacgtgcccccgcctgcccacccctccagctctggttctagtcggcaggcctggagccaaaggggcgggcagggcagtggcccccctgtgggatgtcagcctgataagtgagcagc

SEQ ID NO: 8796 - DNA, 136 bp, Homo sapiens
  chr9:129400713-129400849
  hyper
cgcagccctgccaccctggggagctgaccccgaccccacccggccccccacgtcccagctcgggggctcacaaagggagaggagggaagagcaaaatcgcagagatttgtcttgtctggggctgacagcggagcga

SEQ ID NO: 8797 - DNA, 138 bp, Homo sapiens
  chr9:131127341-131127479
  hyper
ctgatctcagcttgacacccaattagcacaagaatgggaggaggaagcctgcgagaggcgcctcccagcctcccggggcgcgcgaggggagcaggcgggaagacaaaggacagcaggcaggggggcacccgcgccctc

SEQ ID NO: 8798 - DNA, 67 bp, Homo sapiens
  chr9:131399183-131399250
  hypo
cgctgccactcaccggccgtaggcacaggccaccacagagccagtggagttccaggagatgctggtc

SEQ ID NO: 8799 - DNA, 355 bp, Homo sapiens
  chr9:132393701-132394056
  hypo
cgcccaactgtcatcgctgtcctgaagggtgaggtgggcctgggctctgctgccaggacccagctgaggctttctagttctctctccttctaccgtggcaaccgtctcctcatccccctgccatctccaccgccgccagcagtcttcagaagcatcggtcttcccgggccactctctgttgggcctcagggtggttgactcattgctctgtaggatgcagtcgaaactgctagagttgactgtgagaccaggaactggcagccgcgagggctgtctgtccttccctccaggagcagtgccgtcgccctccacctactgcgcttattcttgcccatccatcggtttcagcttacgc

SEQ ID NO: 8800 - DNA, 33 bp, Homo sapiens
  chr9:135548276-135548309
  hypo
atataatgagttgggccgggcgcggtggctcac

SEQ ID NO: 8801 - DNA, 208 bp, Homo sapiens; identical to SEQ ID NO: 7612
  chr9:135645005-135645213
  hyper

SEQ ID NO: 8802 - DNA, 452 bp, Homo sapiens; identical to SEQ ID NO: 7613
  chr9:135645250-135645702
  hyper

SEQ ID NO: 8803 - DNA, 105 bp, Homo sapiens
  chr9:136728494-136728599
  hypo
acctgtttgtcaacctggagtcagcgcaaaggccccaggtcgggtcgtacagatggaaccgggtcgtacagatggaaccggagacagagaggaggcgtggcgggc

SEQ ID NO: 8804 - DNA, 33 bp, Homo sapiens
  chr9:139103631-139103664
  hypo
accagtcttccagccgtctgtgccagaacgccc

SEQ ID NO: 8805 - DNA, 196 bp, Homo sapiens
  chr9:139268627-139268823
  hypo
cgggggagaaacgtcccttccagaagtgtcgttatcctcgttatccccatcatgaggcatccctgctctccaccaggatgcatgtgaggactgaggccactctcggggtcccccaaaccagcttcagaagagccggtgacagcagggcacagctcggcccccatccagggacaacggacagcagagtctgccctga

SEQ ID NO: 8806 - DNA, 128 bp, Homo sapiens
  chr9:139268912-139269040
  hypo
aactgagttgccacccaacaggttcgagaaggggccgccaggctggaaggcaaggaagctggtgtggagcttgcctaaccgttctcagcctccagccctcaggcctctgtgcggacaacgtctgacat

SEQ ID NO: 8807 - DNA, 441 bp, Homo sapiens
  chr9:139269121-139269562
  hypo
cccctcaccatcaacatgagcgagtgtgcaggccggggccatcctgggccctgccagggagcgaaccggagctggcaccaggccctcatgacccagtgtttccccagcgtttaaaacgcggaccttagtgacttccctgtggtgtgtgtccttaggagtgaacacacataccatgttctctaaccatatcggaagctaaaaatcggtaacagatatcggcaaaatctctaaatatttggaaattaaataatataccgctaaataacccacagatcagagtggcccccagactaggcaccagactagagaaccaggcacagcaacacatactcaggagtgaggtcggccatgggaccgtcccgtctgccaggtgcccagggctgaggccccacagtggctccagtgaaggatcgaagcccagatagccaagggcctgggggc

SEQ ID NO: 8808 - DNA, 145 bp, Homo sapiens
  chr9:139317510-139317655
  hypo
cgcgctcgtgtgacacgcgtttgccctctgcactaggcaacgtgaagccggaagatgtgaagagagtcgcttctaagatgctccgagggaagccggcagtggccgccctgggtgacctgactgacctgcccacgtatgagcacat

SEQ ID NO: 8809 - DNA, 380 bp, Homo sapiens
  chr9:139317866-139318246
  hypo
tttggaactcaatgtgccgatcagtggagtcagtatcgagcctgaccaccgcaagccaggaagcaggtgaagtgcccagcgctggagtgcagcgtgccacgaggagggcggtcggtgcttccctcctcgggctgtgggcacatggggccccgcaggttccttggaggagccctgagctgggaggcagcaaaggctgacctatcaaagcctcccggaggccaccgtgctgggtaccaggactcacctctgacaagcaggagaaggtaagggcccggtcagctccaaggagcgcgctccacgcgcgtgcacacagcttccctggtaataaagagctggcatctttcttagcacggtgttttccttctcgcctggggaggggc

SEQ ID NO: 8810 - DNA, 233 bp, Homo sapiens
  chr9:139374838-139375071
  hypo
cgggcctagaggtttattccttggctgctgctgtgagagcaaaactgagtgtccaggtgagtggctcgaggcagccactcctctttctgcaatgtatttttgtctataaaatgcgagaatcgatgtgattattttttcctaaaaaacccgggtttaatcttatgagattctactcacagtggattctgggatgtcctaatcccacctgctgtttaacaggggtggccgggcac

SEQ ID NO: 8811 - DNA, 206 bp, Homo sapiens; identical to SEQ ID NO: 6644
  chr9:139698453-139698659
  hypo

SEQ ID NO: 8812 - DNA, 33 bp, Homo sapiens
  chr9:139889104-139889137
  hypo
tattgggcgacagacgcggggtggggcgctagc

SEQ ID NO: 8813 - DNA, 184 bp, Homo sapiens
  chr9:27212729-27212913
  hypo
cgcgccccatggaaaccttctggacttccttcgcaagagccgtgtgctggagacggacccagcatttgccattgccaatagcaccgcgtccacactgtcctcccagcagctccttcacttcgctgccgacgtggcccggggcatggactacttgagccaaaaacaggtttgtccggaggacttc

SEQ ID NO: 8814 - DNA, 730 bp, Homo sapiens
  chr9:34372076-34372806
  hypo
cgtctgagcccacgcacactcggtagctcagctctggcgctgcggcgcggccggcgggtggcttgtagggcgtgtcgtggtagcgcgcctgaagccgcagcgagcgctccgtgctgttccagcccaggtggaagggcactgagtcattgactttgatggcggccgcgcgcgaagatagccagtagcgctcgaggatgcccccaaacgcggcgtcggaggagtagacatcgctggtgacgaacggctggggctcctgctggccatccaggcggatgggccagtgttgcgtcctcatctcggcgccaccataccagtgggccgccgcgtcgcccaagaacatggcgtgctccacggcccggcccggcgctgcctcctcccagcgcacgcggtagcacatgaccgtgtccttgggccgcacagtctggatgaagaagtgcagcggcagcccgtcggccgtgagcgagcagcccagcagggcgccatcgcggctgcaggagtcaaggtccagcgcgccggagcggaaggccaggcggaagacctgctctcccttctgattgcggatggagaagccgccagctttcaggtccagcagctccgcgcgaagtcgctccgccttgcgtagggagacgctgtagtagcaccaggccaccaccgcggccagcacaagcagcagccccagaaccgcggagcccagcagcggcttcaggtctttggaaggcttgggcttggc

SEQ ID NO: 8815 - DNA, 41 bp, Homo sapiens
  chr9:35676180-35676221
  hyper
aaggccaccgtttccctgccgaggtgagcgcggagctggcc

SEQ ID NO: 8816 - DNA, 295 bp, Homo sapiens
  chr9:35711931-35712226
  hypo
cgagagggaggaaggagaggcctggcattctttgactcctacgttcccccaccccctaccgtcctcctaccgagtcactcaggagtcgcttgctggcatctccaactgccctcagggcattatccacatcgcgctggccaggtaggcagctgacacagcggttcagagcctgggtcactgctttagccacctggggtgagaaaggagacagggttgcccaagtgaaaagaatttgagagatcgcctccattcacgcgacatgggagatgactagctctactgcctctgaaagtga

SEQ ID NO: 8817 - DNA, 63 bp, Homo sapiens
  chr9:37034135-37034198
  hyper
cgctcacaggtcggaataattcaagccttccgctcccccgccgagctggggtagctgatcact

SEQ ID NO: 8818 - DNA, 167 bp, Homo sapiens; identical to SEQ ID NO: 7619
  chr9:4864421-4864588
  hypo

SEQ ID NO: 8819 - DNA, 249 bp, Homo sapiens
  chr9:98783525-98783774
  hyper
cccaagcaacccgttcctccgaatcaggctgcttttctctgtaaagaaaagagaaagcaagcgattaactgatggcttggccggctggaaacgggaaagcgagttctccaggagccgcacacctcggggaagcccagtccctcccgggcagggagcgaggggcggtcctgggggctgcttcccgcggggagagaagggagggcggcgcagccctctgcggggtccgcccctcggttctccggacccccg

SEQ ID NO: 8820 - DNA, 117 bp, Homo sapiens
  chrX:15755988-15756105
  hyper
cgagggaaagtcactttttagataaggctctgaagccccaggtctagtttcaatccactaatgcggccagcggcgagcaggaggagggaggattggtccggcgggggcggggccaga

SEQ ID NO: 8821 - DNA, 300 bp, Homo sapiens
  chrX:15756366-15756666
  hyper
tggggcgtaacagggcacgagggggcgtagcttcgatggccggacgtgcaggctgcggatccccgtaggcgagcgagcggctaggttcgtgatctggagagacgctcaggtaaggacgggtggccgagaggagtggggggcgaccagggacaggccgatccagacagggccgtgattcttcccacgactctccgctctggcgcaccgggttccggagctaggagagctgttgatcctgcgagtattgtctgggtcccggcagggcgcccgggagtactgagtggggcctaatggggtgtc

SEQ ID NO: 8822 - DNA, 187 bp, Homo sapiens
  chrX:23801086-23801273
  binary
cgccgctagcgaatcccacagcgcgccccgctgcccccacttttgtcctccgggttcacacgggcgcccggaagagagggtggtgcctgggagaggaaacgatgcgccccggggccgcggcctcattggatgagaggtcccacctcacggcccgaggcggggcttctttgcgcttaaaagccgagcc

SEQ ID NO: 8823 - DNA, 892 bp, Homo sapiens
  chrX:39933533-39934425
  binary
cgagtaggtgtctgcagcaggctgggtgggaaggtggactcggggtgacggccgaggcgaggggggcaacaggagagctgtgtcccccggcaggccactggtgaccgccttggcagagggaaccctgggctgcttactgttctggatgtgaggataggcgtgggaatcaacaggattcccagggctgacgcccatcttccacgggaggcttttgtctgcgcaatggacgagaggcgggatggctggggaggccgaaggtgtcgagagcctcatgggtgatgccaaggacgatgggatgtggggaccgacgtagtgaggtggcggcaggtagagaaagcgctccccattggtgcagactggagaatacagcggctgggccaagctgtaggactgctgaggtagcaaggccttgtacatgttcagtgaatacttatttggcgagtcgaggaaagggtagatggctggcgtggcaccctccatgtaaggattgacccagggcagccgcagataactagcaccattgatgttgagagggctctgtttgtcgctggcaggcctgtccaagcccagcgcttctgctgtggctacagcacttttttgtattccaggcggtgttttgtatatagcactgaagccatttgggggttttccagagacggcagaagcctccactgtctcgggtgtattcggtttgaactgcatctctggatttctttccgaagaaaacccaaggccacctagagtgcttgtggcagcctcccgacctttctctgagcccagtccacacaagctagaatagacgatgtttcccgggacccgcagcccttcccggatcaggccagtgcggtccatgctcagtgctgccaggccatcgatcctatgggccgtgctc

SEQ ID NO: 8824 - DNA, 744 bp, Homo sapiens
  chrX:39953894-39954638
  hyper
cgacgcgagcgggagcgagttaaagacacagtggaggcgaccgcgggcaggaagaaagagcgggctgcgcgggcctcgaggcgccgcacgcaacgcgccgccccgcgaagttacactcgcttccccgccgtccctcgctaccggcccctccccacttcccagcggcgctccccgcagcctggacagcgaggccccggcctgtgtgggaggcggaggccaggacggccctgcaaagggctggagagaatcgctaatgagctgtgcagcccattgatccggagaacacttcctaattaactctcagtcacctactggtgacagcgcctcaaaggacagcgctggggccagccgagccccagccgcgacttgccggccgggcgcctgctgcccaaaacccgcgcgctcccctaaacaccccaaggcaattggtgtgcgtggcggtgtatacccgcacactgaaggccagcctcggattaaacctggatggcatattaatcatcgccttccccccccactccgctctacgcgctgaaaccctgcccaaaataaacacgaaaaccaacactgcaaaacccacaccagataacaggtcgagagaggagtgggcagggtcaaggaacgagcgtattccctaagtgtccacgtacaggaatctttgaggctgacaattaaaatgccttccacgcaagcaattctgttggcaaaaccgaacccaacacttcgtaaggattgatttcggcccgc

SEQ ID NO: 8825 - DNA, 104 bp, Homo sapiens
  chrX:39956753-39956857
  binary
cggccccgccgaggggtgggctctgggccgggtgggggcggggcggggcgggctcggggcctccgggcaggtggcgacagccccgtgcgatcctccgggctccc

SEQ ID NO: 8826 - DNA, 879 bp, Homo sapiens
  chrX:39957026-39957905
  hyper
cgcggcttgggctctccgcccggcggctcgcgggctccccctccgccgccgccgcccgcctagctcccgctctcggtcgcggtctgggctcctgcgcgtctcccccgcagccgccgagctcggcccgcgttcagcgaggagcgcagctctgcctcaccttgccgctgggagcccaggctccgtctgccgccgcacgccgcgatcccaacgcgtcccccctccctggttccctcctcttcctcctccccctccctccgcccgtcctccctcccgcccgccctacctccctccctcccaacagccgcctcccctccccccgcaggcgcagcgctcgggcgacagccgcccgcccgccgccgcctccagctctcgcaagtttgagctccgccagtctccgctcaccctccgctgcggcgcctccgcggcggggtttcgggaggggtgattccccaggaaaggtttgcccgagtttccccggccgtcatcgatgcacggcccggcacgttttggcctctctggatccgaaccccggaccacttgggtggcgccccccctcctcgtcccccggcctcccctccccagctcgggccgagttggctgcgcacgcccgacccgggcgcacgtcctgggcgagccggagaccgacttgggcggcggcggcggcgagggctgccggcagagccagagccgaagggatgggggcggcgggggcggctctcccagccgcgcgccgagactcccctcgctacccagaaggccagtggaggaccgcaattaccataaagcgcctcgcactccgctcagccaaagctgtcaaaccccagcggcagcagccgctgccgccgcctcttgccaccagcgctgcgctctcccggcctc

SEQ ID NO: 8827 - DNA, 514 bp, Homo sapiens
  chrX:39958064-39958578
  hyper
cgcccgagttccccggacgtttcaattgtgtgggaattgtttggaggtgggggaaggggggagcagcccgtggaggcaccgggaggcgtgtggggggcggtcggcgagcggagatccgcctgtatttctcccggttctcgagcattttcacggtctgtacctctgatggttggaggggctgcccaggcccctcgccccggcgttgggagattatctcccgcgttttattttccttgacagggagcaacttttggcttacaccgttcgccccataaatttccactcggtaacgtcgtgctgatcggtgcttggcggcggcgtacagcctgcgcccgcagcagttcaattcaattgacacgtattgagcttctccagcgcacccggcgcggctctgggcgcggggggagggcgggggcaggcgggagggagggggaagcggagaagcgaggttccggcctccccggagcgcaaagcctcaagggcgagccgagaagccctagttggtgaagctggc

SEQ ID NO: 8828 - DNA, 187 bp, Homo sapiens
  chrX:40034239-40034426
  hyper
cgttttctagcccgagaaggggcaggcggccctcatggcgcctccttcggcggtttcctggcgaagcgcccatcctccccaagcaccaggaacggaggccgtccatattaatactcgcgggcagcctgttctgacctatactgtcattttttccatcggtcgggatcgggctgggggtggggtgggg

SEQ ID NO: 8829 - DNA, 668 bp, Homo sapiens
  chrX:40035057-40035725
  binary
aagagccgcccttactcgactggggtgaggggcgggaaactttgcaagaagactgttccgcgccttccccgcgtggcacctcagaagaacgtgggtgggtttcccgtccgaggccagaccacgctaccctacttttccaggtttcggacctgaacctcgtggactacgggagggagagtacatttcgggccactgcggggggcggagggacaccaaagacaggcgtcttcaagggttctggcagatggccaagtttgtgtcctttccctcccacgctagagtagcgcacgccactttggggaagcgtgagaccgttcaccaccggccacgaggccaccaatgtcttccaggtggggccgatggtttgtctgcagcactcccttccgccttgcggtcctcgcctggctcccacagtcctggggagcccccagagctagcccgcgtcttccctcgcccgctcttccgggggaaagggaggctgtttgtgtggtgtgtagccccgctccggcttgcacccccgcgagccacctcgcagccctccccggcctcggcctcacggatcccctcccggagtagccccgcgggcccccccgccatgcgtaatggggcgcccctgggacgcaggcggggatggcggttccggtcgttccgggatttgcgtgcaagaa

SEQ ID NO: 8830 - DNA, 721 bp, Homo sapiens
  chrX:40035852-40036573
  binary
cgattcctcgtccggcccgtgccgcaccacgcggagctccgcgcgccctggctcccacaccggtccctccataactcgcgctcctccctcgctccgggctcggggagccgctcgctcccagcgcccagagtcagccggttccaccttcggctgcgagagccgccgccccgcgccacccccgcccggcccggcccttgtcccagcccggctcccccgccagctgcgccgccaccgccgcacgtgacccgcccccgtcgcggcttccgctgagctgcctgttccggggcacaaacaatttttgctctgacgcggggtctctcgggggccctggcgtcctctactccctgctccccaccccaccccaccccctaccttccgggtaggagaactcaaaacaactcgctgaccttcgggccgaccagctccgtcttccactgactccagcattccgttcaaacccagcagccacggcttctaagatttcactccgctctgggctgggggggagggggcgagttctccgggagggggtgtctcagatcgaaagagccacttcacgctctttctcctcctccgaggtgagtttttagactatttggaggccttggggaaacgcgagcagccgcgtgcaaaggagcccccccgccttctccccgcacatgcagccttgtctagtgtgacccgatttccagggtcagcagcagagggcctggccagcttc

SEQ ID NO: 8831 - DNA, 76 bp, Homo sapiens
  chrX:68758240-68758316
  hyper
cgacaccggccgctgggtggcgctgtggctcctcctacccaggctggaggcaccagggaggcggaggcgcagccgc

SEQ ID NO: 8832 - DNA, 289 bp, Homo sapiens; identical to SEQ ID NO: 5717
  chr1:101702081-101702370
  binary

SEQ ID NO: 8833 - DNA, 393 bp, Homo sapiens; identical to SEQ ID NO: 5718
  chr1:101702796-101703189
  binary

SEQ ID NO: 8834 - DNA, 306 bp, Homo sapiens; identical to SEQ ID NO: 5867
  chr1:108506290-108506596
  hyper

SEQ ID NO: 8835 - DNA, 39 bp, Homo sapiens
  chr1:11139801-11139840
  hypo
aaaaggtgcatttcgttgatctgctgccgcacaaggggc

SEQ ID NO: 8836 - DNA, 79 bp, Homo sapiens
  chr1:112084812-112084891
  hypo
cgtttagaccagcttaatgaaacagacatccttcgcgtactgacggaaacactggcggcacatattgaggccgtatttc

SEQ ID NO: 8837 - DNA, 142 bp, Homo sapiens
  chr1:113059805-113059947
  hypo
cgcacctgctggcgtgcactctcagatttccgccgcacaggtgattacctgcggcgacgctatgatggggctgtgcaggtgatggccacccaagatggtgccaacttcaccgcagcccgccaaggctatcgccgtgccaccc

SEQ ID NO: 8838 - DNA, 612 bp, Homo sapiens
  chr1:115212647-115213259
  hyper
cgggtatcactcgggtccgctccgtcccgcccccgcaggccctgccgaaggccccgtcccggctgcagccccaccccctagccccgccctccctggcaaggctcagttcttattggctcctattcccacccctcacgctatgcccgcctccgacaccgccccggccggcggtgaggggaaccaccacgcctcaagtccgctgtatggccagaaccttgccaggacctcggtcactgcagttccagcaggcgggcgaccagtgtcaccgtcgtccggccaagccctcgagccagagctccatcgccttcgcctgccgtcgcatcggccccacggagacggccctatgcttcatgtgaaggtttactcttcacaactactcaacaagataaagcctggcttaatcagggaatccaagcactgtttcctaggctgacctcagtgagcaaacaattgcactacggtgccaacttgaaacgtcaagagaagcaaataactctcgcggcacctcaggcttggaatctcagaacgggggtgccttgatactcccagtgcgtgaggtcagcccccacgccctgttgagacacacatgcctaagcgctccgcctgcaacac

SEQ ID NO: 8839 - DNA, 76 bp, Homo sapiens; identical to SEQ ID NO: 6344
  chr1:1168275-1168351
  hypo

SEQ ID NO: 8840 - DNA, 462 bp, Homo sapiens; identical to SEQ ID NO: 6345
  chr1:1168984-1169446
  hypo

SEQ ID NO: 8841 - DNA, 112 bp, Homo sapiens
  chr1:11982519-11982631
  hypo
cgtcgtctcctctcaaaacacttgtgcgcgctctctggtgtcaagggctgagggcatcaggacacccattcctgcccaggcctcaccccccctcgccaggctagccccttcc

SEQ ID NO: 8842 - DNA, 64 bp, Homo sapiens; identical to SEQ ID NO: 5719
  chr1:12123950-12124014
  binary

SEQ ID NO: 8843 - DNA, 77 bp, Homo sapiens; identical to SEQ ID NO: 6657
  chr1:14125492-14125569
  hypo

SEQ ID NO: 8844 - DNA, 54 bp, Homo sapiens; identical to SEQ ID NO: 6658
  chr1:14125622-14125676
  hypo

SEQ ID NO: 8845 - DNA, 253 bp, Homo sapiens; identical to SEQ ID NO: 6660
  chr1:153540242-153540495
  hypo

SEQ ID NO: 8846 - DNA, 448 bp, Homo sapiens
  chr1:154297543-154297991
  binary
cggtgctgtgtcgttcattcaaggagagttgagatacagtgaaatgagccagggcgaggagggagggtgaaggaacggagggcgggcggctccgaggagcgagagtcgggctgagggcaacctggcgccagggaaaattctggttattcaccacttctacagctctcctgccgctccctgcagaggatgctcgttttgcagagaaggcagtgttcctctattcccttcttccgaattaaaaataccccctcagagcgatctagcctcccgaattgttttttcttttaagatgcggatggacgtacgtgtgggggcatcccagcccagccacgccgaggctcggaagggctaagaccctcccactgccccgcacaaagatggctgctccctcctccccgctccttctcccctccccaaaaccccctcccgccccccggcccccgccgcc

SEQ ID NO: 8847 - DNA, 73 bp, Homo sapiens
  chr1:154298038-154298111
  binary
cgggccgaggccccgggggagcggggccgcagctgggggggcgggagcccgtggggagccgagccgagcgccc

SEQ ID NO: 8848 - DNA, 140 bp, Homo sapiens
  chr1:154954433-154954573
  hypo
tctttttttcaattgagagaactcaagcaatcctccctcctcagactcccaaagtgctgcgcccgaccaagggttttgaagagtaaaatttggcaaggtgtggtttaccagtcctacaaagaatgaattcggcccggcgc

SEQ ID NO: 8849 - DNA, 200 bp, Homo sapiens
  chr1:155881090-155881290
  hyper
cggtcgggtcacgcacttcgtcttccttcactcgcggaggctccggcactgacctgtgacccctcccgcaaccgagtaagatggcgccaccggcgcccgagtcgcggaaggaggggcggggccactcagtgacgcccacagcctgccccgccctcttcccgcccctcccaggtccctaaaacccagttccgggacccacc

SEQ ID NO: 8850 - DNA, 40 bp, Homo sapiens
  chr1:155954396-155954436
  hypo
gcagagctgaagaatttaggagccatgggaacagagcacc

SEQ ID NO: 8851 - DNA, 575 bp, Homo sapiens; identical to SEQ ID NO: 6349
  chr1:1562211-1562786
  hypo

SEQ ID NO: 8852 - DNA, 43 bp, Homo sapiens; identical to SEQ ID NO: 7658
  chr1:156390054-156390097
  hyper

SEQ ID NO: 8853 - DNA, 158 bp, Homo sapiens; identical to SEQ ID NO: 6663
  chr1:161367435-161367593
  hypo

SEQ ID NO: 8854 - DNA, 354 bp, Homo sapiens
  chr1:161695853-161696207
  hyper
ctaaggtggctgtgacagtgcaaggtgggagagaccaggggccccgggagggaggcaaatgagcattgagaaattctgggacaggagctcggcgagaaaagaaggggcggaagttcaaatagctgccacttggagggtttctcttagactatggacgctgtctcctctcctttgccgtgaagcagcgcttgatccgccgcctgcttggaggctggtccctttccccgacgcacatcctggcttctcactctggctggggactcccacagagagggcagctctggcaggggcaggggccactgtgggactgggacgaaggagcgactccctagcgtcctgcaaggcaggcgcagc

SEQ ID NO: 8855 - DNA, 125 bp, Homo sapiens
  chr1:16270113-16270238
  hypo
cgctgcagagcgccggggtctgcaaactgtcgctggcagtggatgcacacgtagggcttctccccgctgtggatccgaaggtgccgcttcaggttccctgtggcgagaccgagggcgaacctggc

SEQ ID NO: 8856 - DNA, 629 bp, Homo sapiens
  chr1:166135586-166136215
  binary
tcccggtcagactcagctcgcacctaggagcggggagccgccgggcatccttggggaagccccctcctcttgcagccgcgcggggtccccgctgccccgacgtccgcccacgcccgccccctcgctccggcagggcgcgcggagggtgcactcctaggaggcggcgggtgccctcgccggctccagcgcccgggcggagggcagggaggggagcggcgctgcgaggaatggtgcccaccccgggccggagccccccgcccctcgccggagaggaggaggcggcagcggcggcggcatggagccgggggagggcggcggtggcagcgcccggtctgtctgcctccgcggcggcagcagcagcagccgccgccgccgccgccgctgcatgaacctctgcaccacggctgccccccgcgtgcagcgcacccagcggcgggcgagcgggcggcccaagaggcaggcggaggcagcagcggcggcggcggcgaccggagctcccgccggccccgccccgtagccggaccacaccgacactcctcggcccggctgcctcggcccggggggcgccaggaggctgtggcccggggtggagagccccaacggctggagcagcacaggacgtgctccgc

SEQ ID NO: 8857 - DNA, 32 bp, Homo sapiens; identical to SEQ ID NO: 6353
  chr1:167393552-167393584
  hypo

SEQ ID NO: 8858 - DNA, 187 bp, Homo sapiens; identical to SEQ ID NO: 6354
  chr1:167393613-167393800
  hypo

SEQ ID NO: 8859 - DNA, 160 bp, Homo sapiens
  chr1:168150817-168150977
  hypo
aaaccgcaattacttttgcaccaacataatacaatatataattatattatatataaagcagtcagcttcaaactggggcccccatgtaatttacttacagattctctaagcgatggctgtatacatggagagttttaagggaataaaattccatatctac

SEQ ID NO: 8860 - DNA, 70 bp, Homo sapiens; identical to SEQ ID NO: 6355
  chr1:171554936-171555006
  hypo

SEQ ID NO: 8861 - DNA, 122 bp, Homo sapiens; identical to SEQ ID NO: 6356
  chr1:171555061-171555183
  hypo

SEQ ID NO: 8862 - DNA, 205 bp, Homo sapiens
  chr1:18434105-18434310
  binary
cggcttagcggacgagagccgaacagcccagaaaggattaaagaaaagtctgtataatacgcggagagcgcggcgaggggagggcaaggagggcgggggggcggggagagggggagggacggagggagggcgagaggaggggggtgctcgcgccgccgggagaggcgagcgcgaggcagagagcgcgattcggctccaaactccg

SEQ ID NO: 8863 - DNA, 37 bp, Homo sapiens
  chr1:18434816-18434853
  binary
tctgtggagctggttggctcgatgagggagggaggac

SEQ ID NO: 8864 - DNA, 83 bp, Homo sapiens
  chr1:18971634-18971717
  hyper
cgcgcgcgcgcgtgcgtgcgcacgacagcagagtgtgtttgcggggctggggctgaatttggcagccagcccccaagctgacc

SEQ ID NO: 8865 - DNA, 94 bp, Homo sapiens
  chr1:196577278-196577372
  hyper
cggccctcccatttccgtctctttttcagcaatatttacagaacaatcctccaccacaccactcacctgtcgtcgttttgccatccttggtccc

SEQ ID NO: 8866 - DNA, 194 bp, Homo sapiens
  chr1:196577435-196577629
  hyper
ccatccttcctcaaagagtgggaaacatcaaacaacaaatggaggagaggagggagaaagaaagaaaatattgcggagtacagggagaggactaacaagacgctgtggccgagagagggatgggagaaggggaaggggacagggagggggagggggtccgcttggagccggaagctaaggcttgaaagggggct

SEQ ID NO: 8867 - DNA, 93 bp, Homo sapiens
  chr1:200012227-200012320
  hyper
ttttccttctttttattttcacagattttcaaacgtaaggagatgaaagtatccagaatagaaaagtactgtcaatacggaactgaatgtttc

SEQ ID NO: 8868 - DNA, 87 bp, Homo sapiens
  chr1:202183285-202183372
  hyper
cgcttggagggagagggccgctcagcgagggcgggacagaacctctcccgggctgggagtgcacggcgcggtgcgcccaggtaggct

SEQ ID NO: 8869 - DNA, 201 bp, Homo sapiens; identical to SEQ ID NO: 5872
  chr1:20512799-20513000
  hyper

SEQ ID NO: 8870 - DNA, 146 bp, Homo sapiens
  chr1:207628133-207628279
  hyper
gcaggtgctcatcgctctctggccggcggtcagcgctaccgctcgccacgggaaacctacccactgcatgaggcaccagctagccacgtgaggctgtttctgtacacccgaaccgcgctcttgcccagcaaaagcggcagaacctc

SEQ ID NO: 8871 - DNA, 585 bp, Homo sapiens
  chr1:209957600-209958185
  hyper
cgccttccctttctgtccgacatcaaggaccctcggaagatgagatttctccgatccacacaccccacaccagagcatgttatagtgatttgctaaatgaggcataagtctgtctcacatacgttctttttccacgtccgctacaggttcgggggctcagaaactttttgcggcttcctgcctgctgccagaaaggcagctagtcccccacgcccagccgcaagtaacactggaaaacccgcctgcgctgggaagaccctcgcagcccgctctgctccagtcccgcaggcaccttcttgcgcatgcgcacccactcgagtgccgccctctttccccccattccgtgacgtcatccagccgctcgcgcgcctcgcgttagaatcactagctaggcagccttactgcgcgccggaagtttgggccaccgtgcggcccgccctttccggccagactgaacgcggccccatctgtcggcttaggaactgggaagggcggaagtaaacgagaaaaggcggaacctggtgaaactggtttcccgctgctgccctcattttgcttcgccgaacgtcctccctgtgttatgac

SEQ ID NO: 8872 - DNA, 158 bp, Homo sapiens
  chr1:214162300-214162458
  hyper
cgctttccgccaaaccccatccttccgatctccccaggctaaaactccggggccggtccccttgtcctttctctttgtcttgtttattatagctgcctttcttcccggctcttccaatttgcttgtcatttgcatacctttcacttctccttttttaa

SEQ ID NO: 8873 - DNA, 70 bp, Homo sapiens; identical to SEQ ID NO: 5874
  chr1:214387777-214387847
  hyper

SEQ ID NO: 8874 - DNA, 235 bp, Homo sapiens; identical to SEQ ID NO: 7685
  chr1:21573434-21573669
  hypo

SEQ ID NO: 8875 - DNA, 100 bp, Homo sapiens
  chr1:21835634-21835734
  hyper
ggctgggctggggcagcccggaggcagagagaccgagagtgcggggcgggcgagggacgccagggccgcgtcaccccagcccgttcctagctccgctccc

SEQ ID NO: 8876 - DNA, 151 bp, Homo sapiens
  chr1:21835765-21835916
  hyper
cggcccgcggggcgcggggctcgggccgggggcggggccggggccgggctggggaggggttggggccgggggcgggggagggggcgggctgcccgggcctcactcgggccccgcggccgcctttataaggcggcgggggtggtggcccggg

SEQ ID NO: 8877 - DNA, 242 bp, Homo sapiens
  chr1:22191349-22191591
  hypo
cgatgtagcctggcgggcagcggcactcctccacctcgagggcgcggggtctgtttgagggccccggctgggcgacctccaggctgactgcgctgatgctggccgccagcggcacggaggagaacgtggcccggatcaggagctcatccaggtcggccagtgccatcaggaggtgctcgcgtgtggccggctgcccatcgggccggcgccagaattcctgggttgggggtggcaacgtgggc

SEQ ID NO: 8878 - DNA, 186 bp, Homo sapiens
  chr1:22351424-22351610
  hyper
cgacagtgcgtagtctggtagcaactggaaaagtcctgctgagatttagcctcccatacacacagagtcccaccccggacaggctgtatcaaccccccacggccatatgcccactgctgtttgcgtacaatgaggcgggacctatagactgtatccactgactcatctggagtgattccgcggggc

SEQ ID NO: 8879 - DNA, 38 bp, Homo sapiens; identical to SEQ ID NO: 5876
  chr1:223936543-223936581
  hyper

SEQ ID NO: 8880 - DNA, 63 bp, Homo sapiens
  chr1:224300452-224300515
  hypo
cgttaacacttttgaataatttatgggcccgtcatctagcgatgtctacctcaaacgcaactc

SEQ ID NO: 8881 - DNA, 64 bp, Homo sapiens
  chr1:224368640-224368704
  hypo
cgtaagcctccgcacaccttttggactggtgtgccagttcacacatgcctgtgatagcaactgc

SEQ ID NO: 8882 - DNA, 45 bp, Homo sapiens
  chr1:226736488-226736533
  hyper
cggcggccgcctgagctcggcgcggagcccggagcccgcagccga

SEQ ID NO: 8883 - DNA, 264 bp, Homo sapiens
  chr1:228112950-228113214
  hypo
cggccacactcacctcgcttgagcaggctggcccggtagcggccctccagcgtgcagttccagcgctcaaagcggaactggaactggcactcgagcgcactcatgctcacggcctccaccagcgtctctgccacgcccgggtcccggcggcacatgcgccgctgcttccgctccagcttcagccggtcgcaggccttgtagtgcgcctgggcagccgcctctggctccagggtcagcgggaggatggtcaggggctcgctgccc

SEQ ID NO: 8884 - DNA, 109 bp, Homo sapiens
  chr1:229606426-229606535
  hypo
cgggagtggtggttcttgagaacaatggcggctgacagcttttcggcatgctcacagagcaacagtcgagtggccatcggtgtccctctaactggaaaactgcctagac

SEQ ID NO: 8885 - DNA, 618 bp, Homo sapiens
  chr1:230561973-230562591
  hyper
ccgccgccaccgccgccaccaccgccaccaccgccgccgctgcgtctcctcggcgcccgccgcctccctgcccgccctctccacggcctccggcgctcggctgccgaccttcccgggcgcgagccgccagaggcgggccctgccgcccctcacctcccgcccgccggccaatggggagcccggcccggacagccgcgggggagctgggcgggcccggcgcggggaacgcccccaccctcctccgcggggcggggcggggcgcgcggccggggctggcggttagggggagggccgccggcggcagtgccggtctcctcctacagggacgcgcagcccgggaccgccacgcgcagcgcgggagggggagggcgggaccggggaacaggaggggagggggacccgggtgcttccagcggtccgggcccgcggacggagtgcgggccgatcccgctcactgtccccttccgcagtccgcgtgcagctccagggagctgtccgccccggtggttctgaaccaggcgccgccgaaacgctccaggtaggcggcgggcccgaggtcaccacacccgcggcggcggctgctgccgaggtttcctgggggtcactgccagctgcgcc

SEQ ID NO: 8886 - DNA, 117 bp, Homo sapiens
  chr1:234350341-234350458
  hyper
ccgggggtccctgcaccctagccggggaatgctgccaccctgaggggggctgtctggctgcggggcgccggggctgggggtactgctcccccaggacgcggctccgcagtgcagagc

SEQ ID NO: 8887 - DNA, 162 bp, Homo sapiens; identical to SEQ ID NO: 5877
  chr1:234812061-234812223
  hyper

SEQ ID NO: 8888 - DNA, 158 bp, Homo sapiens; identical to SEQ ID NO: 6362
  chr1:23693515-23693673
  hypo

SEQ ID NO: 8889 - DNA, 421 bp, Homo sapiens; identical to SEQ ID NO: 5878
  chr1:241519651-241520072
  hyper

SEQ ID NO: 8890 - DNA, 51 bp, Homo sapiens; identical to SEQ ID NO: 5722
  chr1:241520533-241520584
  binary

SEQ ID NO: 8891 - DNA, 148 bp, Homo sapiens; identical to SEQ ID NO: 5723
  chr1:241520612-241520760
  binary

SEQ ID NO: 8892 - DNA, 91 bp, Homo sapiens; identical to SEQ ID NO: 5724
  chr1:241520789-241520880
  binary

SEQ ID NO: 8893 - DNA, 307 bp, Homo sapiens
  chr1:247241973-247242280
  hyper
cgcgggaccacttggacctcccagggataaggggaaggagcagcggagacgcaccgagctcgccacattcgcgctgcccaacacaaaagccgcgccaggtcccggaagctgctccctcctttcgcggcgcgcttgagagtacagtccccttcccagcgcccgattggacagggccttaggccccgccccttcagtcctgagtgacgggagatgcaatcagacacggcgctgagtgaggccaggttctttccctgcagtccttttctaaggcatggattctgccctgtgctgagacctggcgcccccc

SEQ ID NO: 8894 - DNA, 819 bp, Homo sapiens; identical to SEQ ID NO: 5879
  chr1:247267064-247267883
  hyper

SEQ ID NO: 8895 - DNA, 177 bp, Homo sapiens
  chr1:248406552-248406729
  hyper
cgtattagttttaacttaatttttggtgttgaagtttgggctgtaatccagtagatggcgcctaagagtaatgcccgtagagaggctcttgatcggccacttggctctttcgtgtttcctggcattcgcaggcacgctgtccggtgggggttgagagagatgcctccttaccaggac

SEQ ID NO: 8896 - DNA, 256 bp, Homo sapiens
  chr1:27220862-27221118
  hypo
cgcttcatgccgttcccattcctcaccccggtcatcgtcctaaaaggcagggagaggtgatttgcctgagcttcctgacctcatgccccgagggagggaagctcagggcacaggaggcatgtgtggctagcctcagcgccattccttcagatttctccaagaagcagcacatatttggcccctgaccaacacgtctccagcccgataattctcaacagtttgctcctgtccccacaagcctgactcacctctgcgc

SEQ ID NO: 8897 - DNA, 117 bp, Homo sapiens
  chr1:29463499-29463616
  hypo
cgatcctcctgtctcagtctcctgtgttgttctgactacaggaatgcaccactgtaccccactttggaaccctttttattgtgaatataatacacctccaggaaattacataaaact

SEQ ID NO: 8898 - DNA, 262 bp, Homo sapiens; identical to SEQ ID NO: 5880
  chr1:32180427-32180689
  hyper

SEQ ID NO: 8899 - DNA, 317 bp, Homo sapiens; identical to SEQ ID NO: 6367
  chr1:32826720-32827037
  hypo

SEQ ID NO: 8900 - DNA, 330 bp, Homo sapiens
  chr1:3344504-3344834
  hypo
cgtgtcagacccatgagcgccacaggccaggccttacctacgccccacagccccgtccccaggcacaatcccctaagctgcagctcccagagtaaggccaggcgaggaacaagtgaggattcatcaatggcatccttgccggggtgggcccaggaccaggagcgtgtgcggaggctgaaccacctggaggacagcaaggcccccctaccccgagctagggtgcagcccggccgcactgcaggagacccaccaggaccccgagctagggtgcagcccggccgcactgcaggagacccaccaggaccccgagctagggtgcagcccggccgc

SEQ ID NO: 8901 - DNA, 225 bp, Homo sapiens
  chr1:34629913-34630138
  binary
cctcctagctccgagcgccgagggaggggtagcatttgaggagggggatggcggccgcagtctgcagtcggttccagagggggcaccggtttcaattggagaaaatgggcgggggcagggaagggcagaccttgcagacgcagaaatggggagggggcgcacggttcctctccagcccccaggaccagcgtgcctggcagaatcaggagccgggggagtagggct

SEQ ID NO: 8902 - DNA, 253 bp, Homo sapiens
  chr1:35394790-35395043
  binary
cccgcggccctgaccgggagcgtgggtccgcggtccgcgtggtcccctgcccgcccctcgggtcgggcccgcgggcagccaggccggggcaggagcgggggcagctgaggaggcccagcccctcccccctcccggggccgggagccgagcgccggagcccggggcgtgggcggcgccggggccgcagccgggccgtgcctggggggcgctgcagagggagccgcgagcgcggccccgtccccactcctccccg

SEQ ID NO: 8903 - DNA, 113 bp, Homo sapiens
  chr1:35396131-35396244
  hyper
ggggagggggccacggtggggaagccgcagggggaggggctgaagacgtgggggaaggggtggctccggattccggctttccagggtaggtgtgaggaaacactgcctccggc

SEQ ID NO: 8904 - DNA, 83 bp, Homo sapiens
  chr1:43147856-43147939
  hyper
cgtggccgactactctaattctagttccggtctctatggcggccggcggaggcaggaacggttgtaggtcgactgaattagcc

SEQ ID NO: 8905 - DNA, 148 bp, Homo sapiens; identical to SEQ ID NO: 6368
  chr1:44132677-44132825
  hypo

SEQ ID NO: 8906 - DNA, 60 bp, Homo sapiens; identical to SEQ ID NO: 6369
  chr1:44351032-44351092
  hypo

SEQ ID NO: 8907 - DNA, 106 bp, Homo sapiens
  chr1:44726788-44726894
  binary
cgacaggcctcgacttgaaaagggtgctaaaagcaatgatgtctccaagtgtgatgggagatatttgtgtctgctttacccttggctttttgctccggttcaggta

SEQ ID NO: 8908 - DNA, 49 bp, Homo sapiens; identical to SEQ ID NO: 7726
  chr1:46744609-46744658
  hypo

SEQ ID NO: 8909 - DNA, 264 bp, Homo sapiens
  chr1:46955978-46956242
  hyper
cgcttcggatccgtcacggttttgcctcatttggaagatattacttcgcccctgaaaaaaaaaatacaaaaaaggtttggatattaagcggagacaaatccttctcagtttggaagggggcggcgcggggagggaggtggccggcgtaatgcggaccagatgcggcctggggagttgcggagccctgggcgggggctggggagggggcgcggccggcagcccagttcccagcctgcggagcgcagaggccgcccacgccctccc

SEQ ID NO: 8910 - DNA, 255 bp, Homo sapiens; identical to SEQ ID NO: 7727
  chr1:46957171-46957426
  hyper

SEQ ID NO: 8911 - DNA, 114 bp, Homo sapiens; identical to SEQ ID NO: 5882
  chr1:50893877-50893991
  hyper

SEQ ID NO: 8912 - DNA, 605 bp, Homo sapiens
  chr1:54204704-54205309
  binary
gccgggacgccagcctcggatctcgggccccgcacacgcccctccctcggccgcgggccgcgccccctctcacctcgcagcggcagctgcagatcgctgggcgcccggctcggcgcgcctccactggcgcagcagcccccgcagccgccgcagccgccgccgccgccgccgcgtcctgcggggcggttccccgggggacgggggcgggcccgcgtctgcccaacagccgctccagccactggctggccgcggccgcccggctcaggccaatcgcggcgcgagggcggggcatccccccctgggggtctgggcggggcccgacgcggggctgagcagagggtttgacaggcggcggccggctggatccccgcgctgcccgctgttctcagacggccgagccgggcaggacggcggggcggcgccgcggcgagagaggctgggctcgggggtcggcggagtgcgctgggcgtgaggagtgccgggctgaacccggctccctgcccgcctctccactagccccgggcaggatcctcccttctcccggtcggttttcccctccgtcagatgggaacgacgctgtctgctaacgcgaagcggacagatgc

SEQ ID NO: 8913 - DNA, 211 bp, Homo sapiens; identical to SEQ ID NO: 6371
  chr1:61601555-61601766
  hypo

SEQ ID NO: 8914 - DNA, 260 bp, Homo sapiens; identical to SEQ ID NO: 5884
  chr1:63793072-63793332
  hyper

SEQ ID NO: 8915 - DNA, 293 bp, Homo sapiens
  chr1:65431047-65431340
  hyper
cggggtccccttccccaggaacacacaggaaatcatggagtgcaaaccctccaaaaaacgtgtgcacaaacacctggcaaacatcgcatcttttatctagaagttccgtggtaaacacacatccaaggagcccacatcccagggaccctggggagtgactttggaggagtgtctattagtcctccgatgctcccggtcgccgacgatgcgcggatggagttggagtgagggagccagagaccagccccagtttcggttaatcagtccctttccagtgggattcgcaattcccc

SEQ ID NO: 8916 - DNA, 133 bp, Homo sapiens
  chr1:70032839-70032972
  hyper
cgcaaccccagaatgaggagaggacttaagagcaggcacaaggttcgctgccatgactgatgtgaagcgacctgacgcacaagcggagacttttctccttggcagccaacaacctgcagcaggcaaggcgggc

SEQ ID NO: 8917 - DNA, 232 bp, Homo sapiens
  chr1:70033272-70033504
  hyper
gagctcggcctctcgtcccgttctcgaaaagcagcctatcgtgacggagccgggagaaggctagcgtttcaatcctgtgcaggactgggatttttcttctcataatttgggggagccggagtagaggtcagagggacaggcgaggatctcaaaaagagaccgagggttgtgaacatggttaccccctcctatcattggaaaatctccttgacatttttcacactttgaagca

SEQ ID NO: 8918 - DNA, 100 bp, Homo sapiens; identical to SEQ ID NO: 5886
  chr1:72750578-72750678
  hyper

SEQ ID NO: 8919 - DNA, 185 bp, Homo sapiens
  chr1:77333579-77333764
  hyper
cggggttgcctcgcctcctagatctccggcgagaggtccgagggggtggcggagagctgcaggagcgatggaggagtgggcagattgctcaagggatgggggtgcccaaaagcaacagcctgccaaaaactaagagggacggggaggggggacctttgcagactttcttcgttttcttagatttc

SEQ ID NO: 8920 - DNA, 200 bp, Homo sapiens
  chr1:7764988-7765188
  binary
cgcgtgcggtcgagggcggcggccggcgggggcgcgcgcggggcgggggcggggccggggcgtggggacacgcgtgctcgcgggccgggggcgtggtgcgcggccacgcgtgtttctggcgcgagtgtgcggggccaggccgggagggcgtgcgcggaccgggcgtgtttacgcgcggcagggaggggccacgagggtgc

SEQ ID NO: 8921 - DNA, 224 bp, Homo sapiens; identical to SEQ ID NO: 5890
  chr1:78956569-78956793
  hyper

SEQ ID NO: 8922 - DNA, 170 bp, Homo sapiens
  chr1:85463947-85464117
  hyper
ggagccgggagggagcgtcagcgtggcccggcgggcgcggagggagggcgcacggccccagggctggactcgtaaccccagcgccctgctgcagccgccgttgcttttccctcttggtgcacgaaaggaagacgcctgtgggaaatcgaacagacaatcggtcgccgttc

SEQ ID NO: 8923 - DNA, 410 bp, Homo sapiens; identical to SEQ ID NO: 6372
  chr1:898245-898655
  hypo

SEQ ID NO: 8924 - DNA, 39 bp, Homo sapiens; identical to SEQ ID NO: 6373
  chr1:898690-898729
  hypo

SEQ ID NO: 8925 - DNA, 88 bp, Homo sapiens; identical to SEQ ID NO: 6374
  chr1:898776-898864
  hypo

SEQ ID NO: 8926 - DNA, 154 bp, Homo sapiens
  chr1:91183993-91184147
  binary
cgcgcgcgggaatagtccgaagacattaagagcggaggaaggagatccctgaaggaatccacagaaaagtgtgtcacttcaggcgccggagccttgcataagcgggcgggtcggctctgggctctgatttctcgcccgacgaacccaggcgctc

SEQ ID NO: 8927 - DNA, 41 bp, Homo sapiens
  chr1:913463-913504
  hypo
cgcttcccccgcaaccccgggaaccacctgccccgcacacg

SEQ ID NO: 8928 - DNA, 426 bp, Homo sapiens
  chr1:9711649-9712075
  binary
cggcgggggaaggcgaggccctggaggacctgttgtttttcctgttgcaagtgaaaaggaaacaaagtgggaagtggagtgtgcgggttggcggcaggcggggcgccccggcgcgccccgcctccctccctcgaggctcactcgcgcccagcgcagtcgctccgagcggccgcgagcagagccgcccagccctgccagctgcgccgggacggtaagcgatcgccgctggctgcgtcaggggaggtgggaagaggaccgcggccaggggctttgggagctgcggctgcgctcgggggcgcggggctggctggcgggcgtctctccggcacacacagcccgtgcgccctggccctgggcgcctccccgagtctagcgagccgggtcctgggagccccgggggccgggctgctgggacctgggcggggg

SEQ ID NO: 8929 - DNA, 164 bp, Homo sapiens
  chr10:102587906-102588070
  hyper
ctgccgaatccctgggaaaaattcttttcccccagtgccagccggactgccctcgccttccgggtgtgccctgtcccagaagatggaatgggggtgtgggggtccggctctaggaacgggctttgggggcgtcaggtctttccaaggttgggacccaaggatcg

SEQ ID NO: 8930 - DNA, 78 bp, Homo sapiens
  chr10:102588175-102588253
  hyper
gctctcagccctgccttgcccctacctcagcgtctcttccacctgctggcctcccagtttcccctcctgccagtcctt

SEQ ID NO: 8931 - DNA, 124 bp, Homo sapiens
  chr10:105403473-105403597
  hypo
cgagattcaatgccactcaatgctgtgtccgcccagcacatgtttgcacgacccactctcggggaaccactgatcttcttcaggtgaagcttggggtaaagaatctgcagaccaggccaggcgc

SEQ ID NO: 8932 - DNA, 101 bp, Homo sapiens
  chr10:11207330-11207431
  hyper
tttgccactgctcttcttcctcctccttccgcctccccgctcccccacccccactattttttcttcctgtccctcatcgtgccgccctaactctggctccc

SEQ ID NO: 8933 - DNA, 99 bp, Homo sapiens; identical to SEQ ID NO: 6729
  chr10:116045880-116045979
  hypo

SEQ ID NO: 8934 - DNA, 180 bp, Homo sapiens; identical to SEQ ID NO: 6730
  chr10:116046022-116046202
  hypo

SEQ ID NO: 8935 - DNA, 240 bp, Homo sapiens; identical to SEQ ID NO: 6731
  chr10:118891774-118892014
  hyper

SEQ ID NO: 8936 - DNA, 138 bp, Homo sapiens; identical to SEQ ID NO: 7761
  chr10:122708760-122708898
  hyper

SEQ ID NO: 8937 - DNA, 231 bp, Homo sapiens; identical to SEQ ID NO: 6735
  chr10:134733835-134734066
  hypo

SEQ ID NO: 8938 - DNA, 76 bp, Homo sapiens
  chr10:14646259-14646335
  binary
cgcggctccctcccagctcgctcccggcgcccgcggcggcgcccagcggcccgactgctcggcggcggcccgaggc

SEQ ID NO: 8939 - DNA, 87 bp, Homo sapiens
  chr10:14646653-14646740
  binary
cgggaaagtgggaaggcggccgcgtgggtcacagccacaaagctccggggcgctcactctccttttttctcactccctcgttccctc

SEQ ID NO: 8940 - DNA, 209 bp, Homo sapiens; identical to SEQ ID NO: 5728
  chr10:17270445-17270654
  binary

SEQ ID NO: 8941 - DNA, 96 bp, Homo sapiens; identical to SEQ ID NO: 6738
  chr10:1780056-1780152
  hyper

SEQ ID NO: 8942 - DNA, 63 bp, Homo sapiens; identical to SEQ ID NO: 6741
  chr10:22540645-22540708
  binary

SEQ ID NO: 8943 - DNA, 56 bp, Homo sapiens
  chr10:27144571-27144627
  hypo
cgcacattgtttttatcccctatgttgccataagaaccctgtttagggccgggtgc

SEQ ID NO: 8944 - DNA, 137 bp, Homo sapiens; identical to SEQ ID NO: 7770
  chr10:30736731-30736868
  hypo

SEQ ID NO: 8945 - DNA, 791 bp, Homo sapiens
  chr10:31607954-31608745
  binary
cggttgccgcaaaccgcccggtccctagcaacaaggttccggccgtagagcgagagcctctaggtgtaaggaaggtgatgtcgtaaagccgggagtgtcgtaaaccaggtgcggtggggaggggggaggggtggaggcggaggggtgggggggaagggggagggagggggaggaggtgactcgagcatttagacacaagcgagaggatcatggcggatggccccaggtgtaagcgcagaaagcaggcgaacccgcggcgcaataacggtgagtggcggaggggaccggggagcggcggagtcagggggagctgggcagccggggcgcccccgggggtgaggggggcgagccgggctgggggcagccggggcagggacggcaaagtggagtgggaaagtagaaagtagtgctctctgcccccctccgctgccgccgctgccggagccgcgccgcggccgctcgctctccctgaaccgttatgtctcttacctggtctctctccgcctagcggctcccgccgcccctgccgcctccctggaccgttagccggcgccgacgccgccgcatccccggcgcagggcgggcggccgggacgcactggccacttttctggtcccgggtggagcggctgttgcttctttccgcacttttccccactcttgtgcccttcggcgcctccctctccccctcctcctggccccctcagcgcgattctccctcagcgcccaggcccccgggagccgcggaacaaacttgtgcccggcgctgaccgtgcaaagtggcttccgcgc

SEQ ID NO: 8946 - DNA, 107 bp, Homo sapiens; identical to SEQ ID NO: 5901
  chr10:44806674-44806781
  hyper

SEQ ID NO: 8947 - DNA, 198 bp, Homo sapiens; identical to SEQ ID NO: 5902
  chr10:44882100-44882298
  hyper

SEQ ID NO: 8948 - DNA, 94 bp, Homo sapiens
  chr10:50606762-50606856
  binary
taaaaaagggcgttagtaacgaaaaggttatttttccttaatttttgtgcggtaaaatgtattttccaattaaccaaattcgccgatctgtctc

SEQ ID NO: 8949 - DNA, 180 bp, Homo sapiens
  chr10:52180055-52180235
  hypo
cgtaacatgaaggcttctttcatatctggaccattttttccattcctggttcaggcattcgtcccctctgcctgagtcactgaggttgagtgtcttctagccgctgttccagcaggcgggcccctccctctatgcctctcaacacatcatcatcatcatcacatgacaaatgtcaaagtc

SEQ ID NO: 8950 - DNA, 102 bp, Homo sapiens; identical to SEQ ID NO: 6378
  chr10:524407-524509
  hypo

SEQ ID NO: 8951 - DNA, 84 bp, Homo sapiens; identical to SEQ ID NO: 6379
  chr10:524671-524755
  hypo

SEQ ID NO: 8952 - DNA, 381 bp, Homo sapiens; identical to SEQ ID NO: 6383
  chr10:5540271-5540652
  hypo

SEQ ID NO: 8953 - DNA, 198 bp, Homo sapiens; identical to SEQ ID NO: 6384
  chr10:5541528-5541726
  hypo

SEQ ID NO: 8954 - DNA, 127 bp, Homo sapiens
  chr10:63213212-63213339
  hyper
ttcccaagaacttccccatcacgagggggcggaaagaggagggaggaggactgaaggtcaaggtgcagcacagccagaaaggcggaggaggagagcatctctggcagctccgccttacttttccacc

SEQ ID NO: 8955 - DNA, 79 bp, Homo sapiens
  chr10:64133789-64133868
  hyper
cgccgcgactgcgaggctgacacgcgtctttccttccctcccccggggaatgatcccagcatctctcgcagtgatgtca

SEQ ID NO: 8956 - DNA, 42 bp, Homo sapiens; identical to SEQ ID NO: 5905
  chr10:68685841-68685883
  hyper

SEQ ID NO: 8957 - DNA, 99 bp, Homo sapiens
  chr10:71333132-71333231
  hyper
gctctctctcgaggcgcggcggtgagaccgcagggatttcctgagcagcaagtcgtgtgccccttggcacgctttatctgcttcgcccgggccaggagc

SEQ ID NO: 8958 - DNA, 544 bp, Homo sapiens
  chr10:77160489-77161033
  hyper
cgggcggctggcgcctcagaggctgtgtgcacacactggcttctgcggatacgaaggacggcgactttggaaccgtatttcagacctccgcctgccttcggtgccgagtgaaggggcctgggtcggggtaggggctttcatatcgaaaggagaaacaagtattggcagccttgctccctagcatgcacgccccattccacttcctcccccttttccgccctagttttgaggtacggaagcagtagcctcttcccccattcgggagctgaatcactccgacccccccacctccgcccagatcccgagaaaaagaaagccctagggtggcagccagggtagtggtcccagtgcgatccagagagagggtccttacctcgatggggctgaccggcgtggaaggcaggggctgcaggtactcggggtgcaaaatgtggccagttcgtgccgtcagcatcttcagcaccttgattggcaggcggttggcctggcgcagggggtcagaggggggcacggcgtgcacaaaaggcttggtgctgccggccgg

SEQ ID NO: 8959 - DNA, 142 bp, Homo sapiens; identical to SEQ ID NO: 6386
  chr10:851108-851250
  hypo

SEQ ID NO: 8960 - DNA, 175 bp, Homo sapiens; identical to SEQ ID NO: 6387
  chr10:851504-851679
  hypo

SEQ ID NO: 8961 - DNA, 761 bp, Homo sapiens
  chr10:98479725-98480486
  hyper
cgccccctgtgggtccacggagcccaggagacgcgtttggccctgtagaccatccacatcgcccgccctccgcttctctcaactcgcctctcgcttcagagtcggagggacaggggaagcgacgctcagacactcctagggccagaggtggagggagcgaaggagaccctgaagaagtgggagggggtcgggccaggcaggggctgaagagaatcgcgccacaggctgggacgggaaacgtgggaaagttggagtgggaagtttgcgacagggaacatagaaaagagcagaaagagggcaagatccccgcacagaggacgcaaacagaagcaagcgggggagcgcgcctcaagggatgcggggtacgagagaggggccgggagcccggggacccgcggcgcctgcctacccacctgaggctgccatgccgcggggcgccgctcacatccctggctcgctgcgtgcccggggccgggaccggggccggcggcgtcctggctcgggctggaggggcgccgggctccgcgcgggaccggccgccgctctggcgcttcctccctcagggcagcccggcctcgccacgagggcgtgtccacagagtccgccccgcctgcgggactcggcccgcggcacctgcacccgcggccgttggggaggggaagtgagaaccccatgccggccgccggccagctccccccacggccccctgctcaggggcagcgagaaggcgggggcttcgcgccacgtgcgccccactcctc

SEQ ID NO: 8962 - DNA, 131 bp, Homo sapiens
  chr11:106889091-106889222
  binary
ccgtgcgccgcgctcccgctcacggggaggctccgagagtgtgtgaccgcggtcggcggggcggggagggctgcggcccaagcagaaggggaggcagaggcagaggcttctgccgcctgcgcgcctatctc

SEQ ID NO: 8963 - DNA, 168 bp, Homo sapiens
  chr11:107462735-107462903
  hyper
ggacagccgagtggggagtgacagctgacagctgacggggctgttaaaagcagagcagtggagtgtggtggtggggtgagctgttgtgggtgcttttttttgttttccaagtgtgggtacgggctgttctgactcagtgtttatgctcaacctctaagcggcgagttc

SEQ ID NO: 8964 - DNA, 45 bp, Homo sapiens
  chr11:113930323-113930368
  hyper
cgccagcactaaagatggagaggcgccggggccttgcaggggagg

SEQ ID NO: 8965 - DNA, 230 bp, Homo sapiens
  chr11:113930801-113931031
  hyper
gccccggctgtcagcctgggcgcagctgcctccccagcccttcctcttcagggcacggtcggggtgagaggtggggggcgtagcggtgtgcgggggctgagggcgtgagcagaggggtcggggatccggaggctttgtaccgccaggggctggcggagcaacagagcccgtgggtgctcttatgtatgcggaccggtgcgcgggcgcaagataaggttgtggtttattta

SEQ ID NO: 8966 - DNA, 208 bp, Homo sapiens
  chr11:113931067-113931275
  hyper
aatcggaggagctgacgagtagatctgggggcggaggggagcaggactgggactgcttacgttttgtttctctttgagaaaacgtggtgggctttttcttgattggacttgatccccaccccccttttgcaggggagggagggaagctccagagggtctgcagcgctgcgggccctcctcggctctcggcgggaccggcggtgacacc

SEQ ID NO: 8967 - DNA, 48 bp, Homo sapiens; identical to SEQ ID NO: 6768
  chr11:120008024-120008072
  hypo

SEQ ID NO: 8968 - DNA, 160 bp, Homo sapiens
  chr11:120435049-120435209
  hyper
cgctcgcggggagggggctcgggaatccgggcccgggcaaccggcgccgcatgctaatcagggggcgcccgcccccgctttgcccgtggccctcctttcccgattccccgacgtttcgggaggagtggggtcggagcgcagggctgggaagggtcttagg

SEQ ID NO: 8969 - DNA, 161 bp, Homo sapiens
  chr11:131564801-131564962
  hyper
cgctcagcgccctcgcagccggaatggggcctgggaagggaggagccccagcagaggggcagtcggagagccatgaaattgcgacctgctgccaccagagggcagtgttggacgggctgggaggagcgccgccgccgccgggagggtgcaggagagagctg

SEQ ID NO: 8970 - DNA, 238 bp, Homo sapiens
  chr11:131781335-131781573
  hyper
gtgcggctgccggagttcggggaagttgtggctgtcgagaatgggggtctgtgggtacctgttcctgccctggaagtgcctcgtggtcgtgtctctcaggctgctgttccttgtacccacaggagtgcccgtgcgcagcggagatgccaccttccccaaagctatggacaacgtgacggtccggcagggggagagcgccaccctcaggtagggagctgacattgttctgcgaactgat

SEQ ID NO: 8971 - DNA, 76 bp, Homo sapiens
  chr11:133402290-133402366
  hyper
ctgtgctgaattctgagcaggtttaaatccaatgtttgcaaagggagggagagagcagaagagagagagagcgcgc

SEQ ID NO: 8972 - DNA, 217 bp, Homo sapiens
  chr11:133920473-133920690
  hyper
cggaacaccaaacagctaagcgtgccggtttggggagggcgggggaggaataaggagctgcaacggtaagaggccgccacacggtggcgcagtgaggctgggaaacggtgcaccccgcgcaggagggggcactccccgtcgcggccacccggggtgggcaggaggcggcgcgggctggctggtctctcccgagaaggttctctcccgagaagggtgc

SEQ ID NO: 8973 - DNA, 161 bp, Homo sapiens; identical to SEQ ID NO: 5733
  chr11:133939437-133939598
  binary

SEQ ID NO: 8974 - DNA, 347 bp, Homo sapiens
  chr11:14665271-14665618
  hyper
cgcgcgcccaacggaccaggctggggccgtgaggtaactgttgcagccagcggaggtgggaggcgacactgagtctccagtcccgagaggtgcccgagggaaaaggaggcggcagctaaactggtcctggagagaagccccttccgcccctctcctcagccagcatgtcccggactccgccgctcctcagtccgcgcggtggggaccccgggccgtggcggccggcgcagccctgacgggttgcgaaccagggggcgccccgaacgcgggggttggggtctgggagcgcgagcggccgctacggtacgagcggggtgtgctgagtcccgtggccacccccggcccca

SEQ ID NO: 8975 - DNA, 299 bp, Homo sapiens
  chr11:14665651-14665950
  hyper
atgcggtccctgcagccgccggatggggccggctcgccccccgagagtctgaggaacggctacgtgaagagctgcgtgagccccttgcggcaggaccctccgcgcggcttcttcttccacctctgccgcttctgcaacgtggagctgcggccgccgccggcctctccccagcagccgcggcgctgctcccccttctgccgggcgcgcctctcgctgggcgccctggctgcctttgtcctcgccctgctgctgggcgcggaacccgagagctgggctgccggggccgcctggctgcggac

SEQ ID NO: 8976 - DNA, 227 bp, Homo sapiens; identical to SEQ ID NO: 6389
  chr11:1521171-1521398
  hypo

SEQ ID NO: 8977 - DNA, 79 bp, Homo sapiens
  chr11:16634452-16634531
  hyper
acgcaccctgccaaagtcctgtaaccatctacttcttccatctgcctaagagaaactgtaaacgggatttcccccccac

SEQ ID NO: 8978 - DNA, 189 bp, Homo sapiens
  chr11:1795707-1795896
  hypo
cggcgcccaggaagggatgcgaatgtacatggactacccgtgcaaatgcttatggtgaaatgttctgtgtcaacttggctgggccacagtatccagatatttgcaaacgctagtctagatgtttccgtgaaggtgtttttcagaggtgattctcattcccatttaaatccgtagactttgagtaaagcc

SEQ ID NO: 8979 - DNA, 230 bp, Homo sapiens
  chr11:22214131-22214361
  hyper
cgagaccaaaagtaactcccaactgggagaggggttctctccgagtggcacgcatgagcggatcgatgaagacccggccaaccggctgagggagcatcgggaccccctttggggatcggaggaggaggattccgacaggagggaagcggcagccctggggaaccaggattcctggtcgtgggtggacccagtggaaaaggacgtgcgaagcctgtacagaatggagcagg

SEQ ID NO: 8980 - DNA, 565 bp, Homo sapiens
  chr11:2398759-2399324
  binary
cgcccgccgcccgcgccgccatgggagtggagggctgcaccaagtgcatcaagtacctgctcttcgtcttcaatttcgtcttctgggtaagggctgcgccgggggccggggcgggagggggcaggcacacactccacgttgggcaggtcccgcggcagcgtgctaggccccgcgggcgcagcgcgggccgcgaagttgtggggccacctgtgggctccaggagcggggtggggggtcgcccggggccaccgcgccccccgacattggggctgagggctgcgagccgagtttcggggcctctgtgctcgggggcccacctctgcggccgggccggggcttctgggggccgccgggcagttcccgctgtggtggtgatgggtgcggtggtcgcgggtcgggacccgagtacccggccgcccctcagctaaggaggggcctgcgcgggtccctggccgcggattccggactgctgcttcgcggggacgaggggggggctcgcgggcgggactcctggcgccccgcccccatgagctcatcaagagccgccgcccctggatggtggggc

SEQ ID NO: 8981 - DNA, 401 bp, Homo sapiens
  chr11:2399399-2399800
  binary
cggtcaccacccgagaccttcctgggggtcgcgcctaaaaggagcgcagactcccgccgggatggcccagaagctggggtgcgcgcaccctggccgtccctgcctgggagccgatctccctctcctcacccagacacgttccagcggaggcctcctcccagaagggctctggaggcctcgcaggagtggggatcccgcggttctgagttggcacaaggaagagagtggcaccaggggcctggagtggatggcagggtccgggagtggggccgctgctttgcaagaggggcccccacgctgggcatctttgggtgccagcgtgggtggaggagggtcttttgctgagaatggctttctcctgaccgcagtctttgctgctgggaagtgactgatgggctttc

SEQ ID NO: 8982 - DNA, 94 bp, Homo sapiens
  chr11:3164459-3164553
  hypo
cggggggggcagaggaggcaggtgcggagcggggcagaggaggcaggtacagcccagtgcgtggaccagcgaccggctccaggggcccatgggg

SEQ ID NO: 8983 - DNA, 251 bp, Homo sapiens
  chr11:33891709-33891960
  hyper
cggggacggggagagccgctcagcgaacacctctccttggaaaggaggctgggcaaccactaaatcattcttcagggcttcccctcttccgcctttcccttttggtttaactaaggcagaaagtaacccacgaacagctcgagcaagcaagaaaagacaagaatgtgaaataagcacctacagaaatgcaagtgttcccagtggattttccgcccgtcccaggttcgaggtcccaggtccacggacgccgt

SEQ ID NO: 8984 - DNA, 119 bp, Homo sapiens
  chr11:33892127-33892246
  hyper
cagggcagctaatcccagagggagggtggctgggagggaccacgcggggccggggctcctctcagtcggctggtggcggaatcccctccctctgcacctttcagaaagcggactcctgc

SEQ ID NO: 8985 - DNA, 56 bp, Homo sapiens; identical to SEQ ID NO: 5916
  chr11:43599961-43600017
  hyper

SEQ ID NO: 8986 - DNA, 239 bp, Homo sapiens; identical to SEQ ID NO: 5917
  chr11:43600215-43600454
  hyper

SEQ ID NO: 8987 - DNA, 61 bp, Homo sapiens
  chr11:43965299-43965360
  binary
actgcgtctggaggattgatatttatttttgcattgcgatggctgaaggcatttatttaac

SEQ ID NO: 8988 - DNA, 42 bp, Homo sapiens
  chr11:43965463-43965505
  binary
cggggtccaggctcccaagactcggggaggtgggggaggagg

SEQ ID NO: 8989 - DNA, 141 bp, Homo sapiens
  chr11:43966061-43966202
  hyper
ggagggtggggcatgtctttggttagagcctgaagggcacctgggtaccatcgagtccttcccttctccccgcccctgcctttgtttacatatgagaaaacaagcctagggtaacagggagaggagcgcccccagttctcc

SEQ ID NO: 8990 - DNA, 52 bp, Homo sapiens
  chr11:44337578-44337630
  hyper
cgctgcgcgagttatcagaaatccctggagccaaacactacgggggaccggc

SEQ ID NO: 8991 - DNA, 118 bp, Homo sapiens
  chr11:44748073-44748191
  hyper
cggcagcgggaagcccaggagcccgatcaggaccgaggatctcaccccaacccctgcgtttgggccccggggtcagctgaaagttcccctggaataaacacttcgggtccagcatgcc

SEQ ID NO: 8992 - DNA, 257 bp, Homo sapiens
  chr11:44748419-44748676
  hyper
ggaggggcggaggtttggggagggggagggagggcgggggaggggagggacggacggcggcggaggtggggccggcgggctggcgggcgtgcagctgccgccggcgtcgcggggctccaggctgcggggcggacgtagcgccgagcgatccaccgcggagccgcgcgaggccgcccgagccccagccccggccccggccccagccccggccccggccccggccccggccccggccccggtcccggccccgagccccg

SEQ ID NO: 8993 - DNA, 314 bp, Homo sapiens
  chr11:44748871-44749185
  binary
ccgccgccgcgcccccggggacctggggacccccccgcgcgccgccccgggggtgctgctggacgcggcggggaattggggtggagtagggatcccaggacggaagcccggcaaccaagttccactcaaactagcacgcgggggctggggggccggggacggtctccaccccgtgcctgcccggagtccgctgagggccgggggctgcgcccaggacaggtgcagagccggtgggctcccagtgctccgggtggaggagtgggggcttctggagaacggcgcggggtggcaggtgtggttacaaggttcggggt

SEQ ID NO: 8994 - DNA, 516 bp, Homo sapiens
  chr11:44749218-44749734
  hyper
cgccacgccacccggtaagacagtgagggaccagggactgggagcggcgatcggggccgggagggctgtggggcccggcagctgcatggagggcgggctgcctttggggtccctggcagcggggcggggcggggcggaggcgccactcgttcctccaggaccccccttattccttaggtgtgtgcggtttggggaagtggagactccatggagtgctgggtgggtgggaggctcgggcacgtccagatttagggggcagtgggagccagttgggacggtgctcggctcgggtgggatcgcgccggctccgggtcctgctggagtgaggtgactgggctcccgccagggggcgcactgccccggccctcgccagcaggaagcgcgttctggctcctgcgaggcaaccgcgccgacatccaggacgcagggaccacagacacccaacttacgcggggtcccgccccgaggagcccgccctacactagccagacgggggagcgggaccaagagtgaggc

SEQ ID NO: 8995 - DNA, 106 bp, Homo sapiens; identical to SEQ ID NO: 6390
  chr11:47359237-47359343
  hypo

SEQ ID NO: 8996 - DNA, 383 bp, Homo sapiens
  chr11:66176338-66176721
  binary
cgggcgccgggctgcacccccttaccctgggcagccgcggggccgtgacgcctggcggagggggcgcgcatctcggcgcgcgccggtcttcgcagtggctcattcatcgccgccgaggcacgccgttgccatggggacgtgatgcaggcgcggggagcgggagggagagggaggccccgggtgacgtccgcgctcttctcgcagctagtctcccgcggcctcccaattcttgcctaatttggaagagagccgcagcccttctgctgatgcgcgcgcgctggcgcctttttaaggcaactggcggagtggcggctccaccagagcctgggagctgcccccgcccccgagccgcgagccccgcgccgggccggggagtccccggc

SEQ ID NO: 8997 - DNA, 269 bp, Homo sapiens
  chr11:66677377-66677646
  hypo
cgggtatgagcagaaggggacgcaggggcctgaccactcactgcggcagagcaacacagcatgatccatgctgtcttcaatttacacagaaagcccggtgttgaaaaattcaacaattaaccttccatgcaattgtaaaataccctgaaaccaacaattatgacgactttataggtgttttcttcatctgagaaaaacacaagcggggggagtaagtgtctggcttaaacggtagcaaggttatgcgctgctgccctggcgaacgagtc

SEQ ID NO: 8998 - DNA, 510 bp, Homo sapiens; identical to SEQ ID NO: 5735
  chr11:76381512-76382022
  binary

SEQ ID NO: 8999 - DNA, 290 bp, Homo sapiens
  chr11:79150336-79150626
  hyper
aactgcatttctataaaccctctctccacggttagggggtgggagggagttagagatcgggtgggggcttggcgcggtactgttgagggctctgcacccaactgagcagtaatacactcatccacatggacgcgggtgcataaatcgccttaacattttgccctgaaagcggagccaatttccaaagttaaggaccacgcagctgaatttccagtactttccaacctcgcctaggcgggggcaggcagagaaggggcgggcagcgggcagctaactcgcccgaccccccc

SEQ ID NO: 9000 - DNA, 38 bp, Homo sapiens; identical to SEQ ID NO: 5919
  chr11:84431917-84431955
  hyper

SEQ ID NO: 9001 - DNA, 55 bp, Homo sapiens; identical to SEQ ID NO: 5920
  chr11:84432270-84432325
  hyper

SEQ ID NO: 9002 - DNA, 129 bp, Homo sapiens; identical to SEQ ID NO: 5736
  chr11:8615887-8616016
  binary

SEQ ID NO: 9003 - DNA, 772 bp, Homo sapiens
  chr11:94963753-94964525
  hyper
cggcggaaataaaaagccgcagtagtccaaaccctcctgccctcaacccacgccccctttctcagtccctgcggagggacggtgcccggggatccctctcagcctcccccagtgcgcgcccggggacgagccgcccgagccccggccggcaggaagcgaccctcgccggcaggaccccgggccgaacccgtaccttccgcagcactttccggcagttggtacagagcaggtagttggcggcggccgacgggctgccgccgccccggttcatcgtggctgcgggcgccgaggcgagagcgggcggagggccgggtccgggctgtcactgcggccactgcagggccggtccgtccccccgccgccagccgcgattccgcctcagcctcctcaaggcgggatgtcgggaggagaggcgactgcctgaaagctagcggcactgccagaggcgaccaccgcggcagctgccccagcgacggcggagacggcggcggctgctcctcaccggcccgttgttccacccgcccccatcttccagacccccgcccccgccaggctaggacgagcagccgccaccgctgccaccgccaccaccgccgccgcagcgcctcagtgcggccccgcctccgccgccccaccaccttcaccacctccacgctccggtaccgcccctcccgccaatcggacagctccggctacgcccccagggcgctagcccgcagccaatgagcaacgagagcccgactgggagtcgcgccggccaatcgcaggggcc

SEQ ID NO: 9004 - DNA, 513 bp, Homo sapiens; identical to SEQ ID NO: 6394
  chr11:993208-993721
  hypo

SEQ ID NO: 9005 - DNA, 268 bp, Homo sapiens; identical to SEQ ID NO: 5923
  chr12:103351149-103351417
  hyper

SEQ ID NO: 9006 - DNA, 423 bp, Homo sapiens
  chr12:110778337-110778760
  hypo
cgcctcaaaaaaaaaaaaagaaaaaaaatgcagaaacctgtctcaatgtttaactgggcatttttcaaactaggggacaaaaactagaacttgccacttttatttaaagtgatgctcttattttagaccaatctgaccttcgttggctgcgtgggcatgctggatcctccgagaatcgaggtggcctcctccgtgaagctgtgccggcaagcaggcatccgggtcatcatgatcactggggacaacaagggcactgctgtggccatctgtcgccgcatcggcatcttcgggcaggatgaggacgtgacgtcaaaagctttcacaggccgggagtttgatgaactcaacccctccgcccagcgagacgcctgcctgaacgcccgctgttttgctcgagttgaaccctcccacaagtctaaaatc

SEQ ID NO: 9007 - DNA, 145 bp, Homo sapiens
  chr12:112196497-112196642
  hypo
cgggcgtgccaaggctgtcactcagagacccctcttgttggtatttctgctgccctccctgctgcgacataggtacagatttctccccttcgtccattttaccaaaatggatgcgcgttgggacaggtgagtcccggactccagc

SEQ ID NO: 9008 - DNA, 1016 bp, Homo sapiens
  chr12:117536372-117537388
  hyper
cgggccgatgcggggcgcgcagcctttgctggtcccgggagactcagcgaactcaggggaggacgctgggctccgggcaaagtgctctgcggccgctgcctcgctaagtctcccagccacccgcggggatgaggctgcctgaacccattttacagatgcgaggacgaaagcaggcgccgggcgccggctctcccgactaaggtcacccggccggggagcgtcggagacctgttcccacccaggtccgccgacttcaaaactttccgctctcgcgctcacgaatgcaaacgactctcaggtgtggggcgcgcgcgccagcgggggtgcctgagggacttgcccgcccggcctgaggcacctgccctgcgcttgggaagcctgggccccgctccctccccggtccgcagtcccccggccagggagttcccgggccagtccgaagctgagcggctgcggcactgagcatcgccgcggagctcctcgccgcagcccgcgaggtggccagcggggacccatttgaaagaggaggagactgaggcgcagagagggcccgccactggcccaaggtcacacagcgcggcggcgggccggggtccccaacagtggccgttcggaggtcccgccccggtccccgcgccgccccccgcgggtactcacagccggtcttgccctcgagctcccgcacctcctcagacgcggagtgggcagcgcccatggtgcccgcggcgggggccccggggcgcgcgtccctctcaggccccgcactggcttcggctgcgcagcggcgggactggcctcgggtccggcctcgggtcgggacgccggcgaaggctcggagccgcgggttccgcgtggggccggagcggggcctcatataacggcggagggcggcgcgccgcggtcctagcgcacgccggtttcgcgcactgcgcggctaggggagcgccccgccccgccccggcccggaaaccgccgggaaggggaccccggagcccaccgctctggagtccccgttc

SEQ ID NO: 9009 - DNA, 413 bp, Homo sapiens
  chr12:118198873-118199286
  hypo
gatgcagcgcggtgaatcccgggatcaagtgtatcagttttcgggaggagggcggtggggtccccgggggcttcagcttgttcttcttcctcatgggcggcgtgcccggcggggtcacggtggtgacgatgttgggggtgcgcggcggggtgcggaccgcgtgccgctgccggggcgatgggggcagggaacggtggcccgactccagtggcgggggcgggcacaagcccgggtaggcgtccacggtaagcctgtccacgtgggtgtacacaggggccccgggagtggggctggtgtgacaatagtgctggacgcacttggacgggaccctggggctctgggagagatgggtgcggatccacggggtgggctccggggggcacacgggattgttctccttccccgtctctgtc

SEQ ID NO: 9010 - DNA, 704 bp, Homo sapiens; identical to SEQ ID NO: 6401
  chr12:121687598-121688302
  hypo

SEQ ID NO: 9011 - DNA, 239 bp, Homo sapiens; identical to SEQ ID NO: 6402
  chr12:121688331-121688570
  hypo

SEQ ID NO: 9012 - DNA, 276 bp, Homo sapiens
  chr12:122439511-122439787
  hypo
agctggctttgtctgggcatgtagctgtggctcactgatttgttgtagacttcagtacatttatttctcctgatcggtgcaagccactctccctaagactgcacataacaaagcatgtctgttgggaatcccacatgaataagttatgaaaagaacagtgagtggtggcttttgttcccgcgctctgtccgtccttttgtttcttctgggcttattttccctttgttccactgacctgtcatcttgccggcttgggtgggtgaatattggccaccc

SEQ ID NO: 9013 - DNA, 435 bp, Homo sapiens
  chr12:125815555-125815990
  hyper
cgcccaaatcggggtttcgtctctggaagaggggagggatgcaccaccggctcctcgtgcagcgctggcggcggcggccactgggtggcggtgttgcccgcgaggcccggggtctgcggaggagggagccggactgggagcggggcggggacagcgccggggagggcctggtccgggtgggctcagtccgggctcccgggtcggtcccctcctccgcgttgctgccccaggagtccgcttcgtcctccgctgactctgagcgacacaggacaagctctgaattgcattccaggaaaaggggactgaggctttgtatttttcctccgcaccaagattcccaaggctgctgttaagggtttttacccagggtggggtccacggcgaagccctggggtctgtgtgaaggggaggtgctgtttctttcccgagttctcc

SEQ ID NO: 9014 - DNA, 147 bp, Homo sapiens
  chr12:126018005-126018152
  binary
cgagggaatgttcctaaacgcttgttttccctttgcatagctgattgcagagcccagcaagtctttctctaaatggctttactttgacaaggggtcgcgatggcattttgattggcatccgcctctcctccggggaaggacctcgtg

SEQ ID NO: 9015 - DNA, 33 bp, Homo sapiens
  chr12:126018265-126018298
  binary
cgtcctcaggccctgcgatttccagggattccc

SEQ ID NO: 9016 - DNA, 132 bp, Homo sapiens
  chr12:128850403-128850535
  hyper
cgttgattgtgtgccgaggagccctccccgggaaggctgtgatttatacgcgcaggcttgtcacggggtgaaaggaagggccactttttcattttgatccaatgttaggtttgaaagccacccactgctgta

SEQ ID NO: 9017 - DNA, 662 bp, Homo sapiens; identical to SEQ ID NO: 6821
  chr12:131272765-131273427
  binary

SEQ ID NO: 9018 - DNA, 160 bp, Homo sapiens
  chr12:132643296-132643456
  hypo
cggatctcacgggggctaacgtgtcccccggaaagagatgtccccgtcctggcccccagcatcggcgagtggaccttatttggaaatagggtctttgcagattaaggagccagctgagatcatcctgcattcagggtgggccatcagtccggtggccggt

SEQ ID NO: 9019 - DNA, 321 bp, Homo sapiens
  chr12:132643525-132643846
  hypo
ggcctctgggagctggaaaaggcaggaatgggtcctccctgagtctctgagggccccgcctgcccacacctgcccatatttgccccaacctgcccacacctgcctcaggacagcatctcggtctcctggctgccagactgtgatgaagatgcatggttctaggccactggcttgtggtgacttgttgcatcagctgtggggagctcacacggtagcgcctgtcttggggggtgctgggcgggtgaccttcaggagacccctggggccccgctgccctcccaatgcctccagtcccagtgtctctgtggtggcatcctgtgc

SEQ ID NO: 9020 - DNA, 92 bp, Homo sapiens
  chr12:132644008-132644100
  hypo
gatactgcaggtggcaggtcccctgaaggcatagtcagaggctttgctctgggctggcatggaggtatgggcgtggcggggtgtggctgggc

SEQ ID NO: 9021 - DNA, 117 bp, Homo sapiens; identical to SEQ ID NO: 5738
  chr12:21681020-21681137
  binary

SEQ ID NO: 9022 - DNA, 118 bp, Homo sapiens
  chr12:22488705-22488823
  binary
gtgcaaggacaaagaagaaacctggtcagcttagtcatcacgaaaacaaaatctaaggctataactccatttgttcagccgaccaggctgcggtgtctggtacctttgtctagcatcc

SEQ ID NO: 9023 - DNA, 254 bp, Homo sapiens
  chr12:2692239-2692493
  hyper
cggcggaggtgggtctgggtggaaacctgcagctttggcatgggtgaggttcaccttcctgaaccctccgggcccgcagcggcgccgcgctccgggcgggctgtcgccgtaatctgggtgagcggcgccccctggcgttgcggcgtgtgcggccactcacaccgcctgcgatagggacgcgcgggagcgggccggctgccctggggccgcggcgtctgctcagaggcgggacgctccgggagggaggatgagcc

SEQ ID NO: 9024 - DNA, 62 bp, Homo sapiens; identical to SEQ ID NO: 6831
  chr12:27742262-27742324
  hypo

SEQ ID NO: 9025 - DNA, 77 bp, Homo sapiens; identical to SEQ ID NO: 5740
  chr12:40618264-40618341
  binary

SEQ ID NO: 9026 - DNA, 35 bp, Homo sapiens; identical to SEQ ID NO: 5741
  chr12:40619048-40619083
  binary

SEQ ID NO: 9027 - DNA, 86 bp, Homo sapiens; identical to SEQ ID NO: 5742
  chr12:4377809-4377895
  binary

SEQ ID NO: 9028 - DNA, 245 bp, Homo sapiens; identical to SEQ ID NO: 5743
  chr12:4378558-4378803
  binary

SEQ ID NO: 9029 - DNA, 247 bp, Homo sapiens; identical to SEQ ID NO: 7891
  chr12:4379920-4380167
  hyper

SEQ ID NO: 9030 - DNA, 285 bp, Homo sapiens; identical to SEQ ID NO: 7892
  chr12:4380196-4380481
  binary

SEQ ID NO: 9031 - DNA, 401 bp, Homo sapiens; identical to SEQ ID NO: 7893
  chr12:4381033-4381434
  hyper

SEQ ID NO: 9032 - DNA, 167 bp, Homo sapiens
  chr12:4382439-4382606
  hyper
ctaaaatcaccccctcccttatttttcacttaagggacctatttctaaattgtctgaggtcaccccatcttcagataatctaccctacattcctggatcttaaatacaagggcaggaggattaggatccgttttgaagaagccaaagttggagggtcgtattttggc

SEQ ID NO: 9033 - DNA, 51 bp, Homo sapiens; identical to SEQ ID NO: 6838
  chr12:4382915-4382966
  hyper

SEQ ID NO: 9034 - DNA, 210 bp, Homo sapiens; identical to SEQ ID NO: 6839
  chr12:4382999-4383209
  hyper

SEQ ID NO: 9035 - DNA, 255 bp, Homo sapiens; identical to SEQ ID NO: 7894
  chr12:4384059-4384314
  hyper

SEQ ID NO: 9036 - DNA, 79 bp, Homo sapiens; identical to SEQ ID NO: 7895
  chr12:4384533-4384612
  hyper

SEQ ID NO: 9037 - DNA, 293 bp, Homo sapiens; identical to SEQ ID NO: 5932
  chr12:45270086-45270379
  hyper

SEQ ID NO: 9038 - DNA, 239 bp, Homo sapiens
  chr12:48551355-48551594
  hyper
cgcctgcgcactgatgagtgttcgtcagcggggcgcgcctgcgcagacttgtgcagcagctttcgccctccagaggcctagttagggggttactttctccttttactcagaggctttgcgcgcaggctcagtgcagcgttctcggccacagccgcagggttcgggtcttggtcctgcagcggggataaaaaagctcaggaaccctgagtgttgggccgattctatatggttgcacctgc

SEQ ID NO: 9039 - DNA, 494 bp, Homo sapiens
  chr12:48576976-48577470
  binary
ctctgggatcattagcaacagcctctctaccctctccgctttcctgcgcatcgctggaggacagggaggcaggactcgactttagcgccatcctctgagaaaggaatgcgggctggaaaaatctttccagggcagtctcgctgggtctcataccccggctaggggagggacgatctctcccggacttggaggtttctgcagcagacggctctctcatacttccctattaaacattgcgaccacacgctctttccagccttggccgaagccactgtagcgtcccctctcctccccccaccccgctagtccagactccagagccccactgcagcttccagccatcctccctttttcttcgccacttcctggttaccatggagacacacgtcatttacgtgccgtgcgtcgccttggaaacagaggagcatccgcgacacccccgggagacccaccccagctgctgctgccacactcgcgggcgctgcccggtaatg

SEQ ID NO: 9040 - DNA, 54 bp, Homo sapiens; identical to SEQ ID NO: 6843
  chr12:52401605-52401659
  hyper

SEQ ID NO: 9041 - DNA, 125 bp, Homo sapiens
  chr12:52672849-52672974
  hyper
cggacagtcgtcctccgttcagccgggctccgcctgcctgctccagccccgagcaggctccggcgccctggagacgagcgcccctggcggcggctacgcgctctgcggctctcccggctgtgtcc

SEQ ID NO: 9042 - DNA, 156 bp, Homo sapiens
  chr12:53272458-53272614
  binary
cgcctatgcacatacaatctcccataggaattattccttgtctctggtgcctgaggccctccatatgtgcacctgacagtacacacacgcgcacacgcatgcacacacccacagccccctgcctgcgtgtcttccctccatgatggcaaggctgcc

SEQ ID NO: 9043 - DNA, 725 bp, Homo sapiens; identical to SEQ ID NO: 6845
  chr12:53613775-53614500
  hyper

SEQ ID NO: 9044 - DNA, 194 bp, Homo sapiens
  chr12:54150983-54151177
  hyper
cgatgatttcattatcgacgtgctgtctgtctcgggctcagcccggttgccagggcgactctgatcgattgccttccggtcttcttggcttggccggctgcttcctttctggagcctggctgttggcgagcactccctagcggccctctctggtactgcagagcttcccggttgcaggcttgagagactcaggc

SEQ ID NO: 9045 - DNA, 156 bp, Homo sapiens; identical to SEQ ID NO: 6846
  chr12:54338511-54338667
  hyper

SEQ ID NO: 9046 - DNA, 432 bp, Homo sapiens
  chr12:54400009-54400441
  binary
cgcgcctcggccggcccggccccactggctctgagcaaatcaatcctctcacctgcgaggtgtaaataattcgcgagtggcagcgggagatgggccctcgatctggcagcgggctcggaaggctcaggagggcaggcattaaaaataatcgctttgtggaggagataagtgcaaagcaggcagcgcgtaattaacacaaaaaggcagaatgacccggacaaacgaacataaatccgtggtacctatgagggcggtgcaggcctcggggagagggacagagacggcctcggcgaggatggctgctttcggttcctttatttccaggctcggggagcgaaataaaccagataacgtgtaaaagaaagcaaacaaacaaatgaaagaacggtgagggatccccaaaaggggaaaccaagtccggccaggggttgc

SEQ ID NO: 9047 - DNA, 213 bp, Homo sapiens
  chr12:58015267-58015480
  hyper
tcgaaaagggaggaaggacggagggtggaggggtagtatgtgacaagggagcaggaaaggaggttggagccacgtggctgaacgagggcgctgaggaggtgtaagccctggtggcactgggtagagagggcctcgctctgggggtcccgcgccggggcgcatgagccctggcacggggccctctgctcatcgcccctgccctcagacgctggc

SEQ ID NO: 9048 - DNA, 189 bp, Homo sapiens
  chr12:58015548-58015737
  hyper
tgctcgtgccggtcaaggaattgaacgtgagattccgagaccggctacccacgccgatcccgggggaagtcgtcttggtgaggatggccgtgcgcgccggccccctgcccgcgcagaccctgcggtcctgtgggaactggccgctgccgccccctggtggagtgcagagaggccacggaacagagggcc

SEQ ID NO: 9049 - DNA, 184 bp, Homo sapiens; identical to SEQ ID NO: 5933
  chr12:63026256-63026440
  hyper

SEQ ID NO: 9050 - DNA, 278 bp, Homo sapiens
  chr12:68758776-68759054
  hyper
cgcctcagtattgtcgatttccacatccacagcctaacaacgtggtgcaatcgccctttgcgacgccgcagaccaacagacggatgctgccctgctgcagtttcacagcacaccgggtctttccgcttcagctggacagaggcccagccaggccgtagggaggattccgaaggtctctctgcagaggaccggcctctcagaccgagaaggctccacccaggcaggaaaggacactgtatgtggggcagtcggcctgggccccatggctcgtgtttgtt

SEQ ID NO: 9051 - DNA, 108 bp, Homo sapiens
  chr12:68759131-68759239
  hyper
tgaggagggctgcttctgcctcttggtgaccacgccctttcccaggctgggcccacaggaagtctggccgggaagggaggaggcactgcaagctgtgggaaccacacc

SEQ ID NO: 9052 - DNA, 479 bp, Homo sapiens
  chr12:70760478-70760957
  hyper
cggggggagcacgccagccgccgagagtggggggcgatggcgaagctccgggtggcttacgagtacacggaagccgaggacaagagcatccggctcggcttgtttctcatcatctccggcgtcgtgtcgctcttcatcttcggcttctgctggctgagtcccgcgctgcaggatctgcaagccacggaggccaattgcacggtgctgtcggtgcagcagatcggcgaggtgttcgagtgcaccttcacctgtggcgccgactgcaggggcacctcgcagtacccctgcgtccaggtctacgtgaacaactctgagtccaactctagggcgctgctgcacagcgacgagcaccagctcctgaccaaccccaaggtaagaacgccccgcgcacccaggggctccccgcgagggaggtttggaggcagcgtcggtgttagactccgcgcggggagggttcggcgtgtgctcgcattgctagg

SEQ ID NO: 9053 - DNA, 82 bp, Homo sapiens
  chr12:70761129-70761211
  hyper
cctgcgcctaccggactgggtttggagaagtgcaaggagccaagaaagttaacttttcctccatttaaagccagtggttagc

SEQ ID NO: 9054 - DNA, 119 bp, Homo sapiens
  chr12:77719613-77719732
  hyper
cttccatttcctctttttttctcccctcatttcctttttttcctttcccttttaaagaaaggggaatcgtttgtaaccctttcgttctaccaacgtggaatagctgtgaaacctgcagc

SEQ ID NO: 9055 - DNA, 205 bp, Homo sapiens
  chr12:79257510-79257715
  hyper
gagaggaagcagggagagaatctatgctttagtcgtcactgctctggcaaggggtcgagagagatgggggagggaggtggcaaaaaataaaaatgaaaaaataaaaaagcatctccaacaatgttgcacttgacccaagtgtacaaacttattggtcgctgcaatggaaactcccagtgcactctccacggcctggcagccgccg

SEQ ID NO: 9056 - DNA, 313 bp, Homo sapiens
  chr12:81331319-81331632
  hyper
cctgcctgagcgcgtcccatgtcccgttgggaattggcaggcggggaagggaggaggggagaggggacgcggtggcctggcgagcgagccgctcccttacctctgtccagggtgagcggctggaccactgtcaatgtcgccatgtctgccgtgggagccgaagtgacgctcggcttcagcatcagcaaccgctcgtagtgagaaaaaaaggaggagattgggggcgggggtggagagggaagacggaaaggagggggaggagggggaaggaaggaaggtggtggtggtggagaagaaagcttgggtgggttgg

SEQ ID NO: 9057 - DNA, 57 bp, Homo sapiens
  chr12:85305601-85305658
  hyper
cgccacactctcaaattccaggatgcgcagaaacacaggagccgtgatttctccagc

SEQ ID NO: 9058 - DNA, 255 bp, Homo sapiens
  chr12:85305980-85306235
  hyper
ggatgctgtgggcaatttccacgacgggaagaaaggatggcggcacgtttcaacccatgtgcttccccttacatgtgcagcctgtcgccccccaccctgattgtacagagatgcagagttagacggttgcccgcccagcccagcttctccctcccagggcttttgagctgccctccctcctcccaccccaggacgcagcgagtccttcccggcatccatccatcaattcgttcccggtgctggtgcccaggctcc

SEQ ID NO: 9059 - DNA, 105 bp, Homo sapiens
  chr12:94541793-94541898
  binary
cgacccggggaaacccacaccctgtcacaggggcgccttggtccccggagtctccggctcggccatgtctcccgcgcgcctccccggggcctccctctcgccgct

SEQ ID NO: 9060 - DNA, 1132 bp, Homo sapiens
  chr12:94541957-94543089
  binary
aaccccttcgcaccctggatcctcgctccgcgcgcctggcgtatccccgacccggctgctgtcgtaaacaaaaccgggcgttggagcagcaccgcgggcggacgggcgcgggagcccgctccgtgcgccgttagcgcgccccgggagccccaggcgagccaagggggcgatggtggcggccgcggcggccgcggcgggcggctgagctttgttatgaatagatgaaagaggccacctacacagtaacccaaattacgagacctccctcctccctatctcaccgaatcaagaggggaggggagatgggcgtggagggagggcgggcgggcgggcaggaggcggagggcggaggaggaagagaggatgaggaagggggccagttgcatcccactttcacaatgggaaagtgaaacgcacaagcgcacccaacctctccagccctccccgcccgcctcgctcctctccgcccgtcccctcccttcccctccgcgcctccccgcgagcgccagcgctgcacacaggaactctccggcgaaggagggcgaggaggaaacggtgccggagcgcgcagggcttgctgccgccaccgccgctgcacaggctgccggagcgagcctgccgcgcgccgccctccccgctctccttcctgggcgagctgcggggatggggcggccgcgggagcccgagcgcgcgcaggaaccgccgccgccgccgcccgcgtctccgttgccgcgcgcctgagccgccgtcgccgccgcgcgccctgcccgggggcggcccccccagccccatggaggtctcccggaggaaggcgccgccgcgccccccgcgccccgcagcgccactgcccctgctcgcctatctgctggcactggcggctcccggccggggcgcggacgagcccgtgtggcggtcggagcaagccatcggagccatcgcggcgagccaggaggacggcgtgtttgtggcgagcggcagctgcctggaccagctggactacagcctggagcacagcctctcgcgcctgtaccgggaccaagcgggcaactgcacagagccggtctcgctggcgccccccgcgcggccccggcccgggagcagcttcagcaagctgctgctgccctaccgcgag

SEQ ID NO: 9061 - DNA, 31 bp, Homo sapiens; identical to SEQ ID NO: 5744
  chr12:94543992-94544023
  binary

SEQ ID NO: 9062 - DNA, 86 bp, Homo sapiens; identical to SEQ ID NO: 5745
  chr12:94544052-94544138
  binary

SEQ ID NO: 9063 - DNA, 107 bp, Homo sapiens
  chr12:96183929-96184036
  binary
cgctctgcgctcgcagccctggctcccctgcacccccgagtcccgagatgggttagagaagcagcgagggaaggggtgggggccccgccgcgtcaccacccacctgc

SEQ ID NO: 9064 - DNA, 207 bp, Homo sapiens
  chr13:108518148-108518355
  hyper
cgacgcactgcctgcaagtggtcatctcgccgccttccttgagcaccacatccagactgcagttcaaagtgttgggactggacaaccccgagaacaactcccaaagtgtgtaggaattacaaaacgaaaggtaaaaatccgacaagttccagagcggagtgggatgcttgctcctcacctcctgcccgtcccccccggccgcccccc

SEQ ID NO: 9065 - DNA, 68 bp, Homo sapiens; identical to SEQ ID NO: 5747
  chr13:108520309-108520377
  binary

SEQ ID NO: 9066 - DNA, 65 bp, Homo sapiens
  chr13:108520915-108520980
  binary
cgggagcagcaggtggcgtgggtgccagacgctgccggtgcgcaccgagtgcagcgctgccccgg

SEQ ID NO: 9067 - DNA, 269 bp, Homo sapiens
  chr13:111766945-111767214
  hyper
acagcccagatcttcggcgtccccgagacgcagccaggcgcccggcccggcccggcccggccctctgcacagccccacttcaggccacgccgtttccttgaccttcccccggcagggtctgaagcgtcaccgtccgtctagagcagagtcgcgcaggcccctgccctgccggtgaggtcggcgccgcgctccggagagtcggttcctcccgattcagacccatatggcttcagatggaaccatcatttctgttccgtcatgaccggctt

SEQ ID NO: 9068 - DNA, 34 bp, Homo sapiens
  chr13:111768508-111768542
  hyper
tttaaagaggcacgcatctgtagctgagggctgc

SEQ ID NO: 9069 - DNA, 77 bp, Homo sapiens; identical to SEQ ID NO: 7921
  chr13:111911450-111911527
  hypo

SEQ ID NO: 9070 - DNA, 352 bp, Homo sapiens
  chr13:112760444-112760796
  hyper
agctgccctggctggtgattggaggtttaacgtccggaattcaggcgcttctgcagctcagatttgccggccaaggggcctcagttgcaacttttcaaaatggtgtttctggaaaataacaaattcagactcaactggtgacagcttttggctatagagaatgaaactgcttccctttggcggtggaactcttaaacttcgaagagtgaaagaatacaatgaaataaaatgccataagatcactggatttttcagaaaaaggaagaccccaaattactcccaaaatgaggctttgtaaattcttgttaaaaatctttaaatctcgaatttccccctacaacatctgatgagt

SEQ ID NO: 9071 - DNA, 162 bp, Homo sapiens
  chr13:113507123-113507285
  hypo
cgtgatgatacttgcttataaattatttccttataatctccagtcagcaagtgcgaaacatctctgagcctcagcttccttttgaatcgaattgtagggccaggcccggtggagcacgcttgtaaacagggccaggcccggtggagcacgcttgtaatcctc

SEQ ID NO: 9072 - DNA, 39 bp, Homo sapiens; identical to SEQ ID NO: 6859
  chr13:114188365-114188404
  hypo

SEQ ID NO: 9073 - DNA, 92 bp, Homo sapiens; identical to SEQ ID NO: 6407
  chr13:114807847-114807939
  hypo

SEQ ID NO: 9074 - DNA, 143 bp, Homo sapiens
  chr13:22178308-22178451
  hyper
cggcgcttctctcccggcgccgccgcctaccgcttgggaactctcgcgacatccgacaggcttccgccccgcctaccgggcctgcgccgtgggtgcggttgctgaggcgacgctcgcagccgcaagaggtggccttcggttcc

SEQ ID NO: 9075 - DNA, 71 bp, Homo sapiens
  chr13:27131483-27131554
  hyper
cgcaaactcaaaggtactgtaatgggcacctagcaatcagaggtgatacaagggtctcttggcccgaagta

SEQ ID NO: 9076 - DNA, 306 bp, Homo sapiens; identical to SEQ ID NO: 5936
  chr13:28491488-28491794
  hyper

SEQ ID NO: 9077 - DNA, 38 bp, Homo sapiens; identical to SEQ ID NO: 6869
  chr13:28527202-28527240
  hyper

SEQ ID NO: 9078 - DNA, 462 bp, Homo sapiens; identical to SEQ ID NO: 6870
  chr13:28527384-28527846
  hyper

SEQ ID NO: 9079 - DNA, 58 bp, Homo sapiens
  chr13:28540416-28540474
  hyper
cgcatttgaatggggctgcggccccgaccccgcgcctgctatgaaagtaaagggaact

SEQ ID NO: 9080 - DNA, 112 bp, Homo sapiens
  chr13:28541283-28541395
  hyper
agacaggggctgtagaaagtgggtctttgggagccaggatctgggagcccctgctaggagaaaggcgcctcctctaggagaagggaccaagccaaagctctgaggctcaccc

SEQ ID NO: 9081 - DNA, 103 bp, Homo sapiens
  chr13:28542253-28542356
  hyper
cgcagcaagtgccggaggacgcgattctgccggcgtccagcagtgctcacgccgacattccccggagcttcccgaaggtgtcccggggttgcgaatgaggagc

SEQ ID NO: 9082 - DNA, 259 bp, Homo sapiens
  chr13:28542395-28542654
  hyper
gaatattcactcccaggctcagtaggtcagagaagccccgacgggccagaggcccccgaatttgtctccgggccgtgcccctcctggcgccgagctcccagacagcccgggacgcccctgtgcgcactggacgcgcgacgcgcagcagccactggctcgacccgcgccttcccaagcaccctccgaaggggcgcagcctctgcttaccttggctgccgagggactgctgcgccggcttccgcatccactcgcacaggtt

SEQ ID NO: 9083 - DNA, 201 bp, Homo sapiens; identical to SEQ ID NO: 5748
  chr13:29292491-29292692
  binary

SEQ ID NO: 9084 - DNA, 242 bp, Homo sapiens; identical to SEQ ID NO: 5749
  chr13:29293342-29293584
  binary

SEQ ID NO: 9085 - DNA, 98 bp, Homo sapiens; identical to SEQ ID NO: 5938
  chr13:29393559-29393657
  hyper

SEQ ID NO: 9086 - DNA, 277 bp, Homo sapiens
  chr13:35516217-35516494
  hyper
cgccccgcctctgccagcttgccccagtgtctggcagcagtccccatgcacctgctcacctgtctatccgttcggggtggttgggggagggacgaggggtgtcggggtgggtgggtgggaagagaaggagggcagggcaaaagagggggtgcaccgagggctccgcccccccggaggctgtgcgcaggcgcagtggctgctaccgcaggcagggggcggcaacatggcggagtgagcggcggcgtcggggcttcacaacaacagtggtggccgtagc

SEQ ID NO: 9087 - DNA, 470 bp, Homo sapiens
  chr13:35516535-35517005
  hyper
cttcagcaccggccagcgtcgtggccagctgctcgcgtcctcgggcttctcggagcggctgcagcatctccgcggggggcgggccgggccggacagaccgggagagggagagagcagaggcagcggcggcggcagcggcagcggcagcggcacacctgctgggcgggcacagccgcttgcccggcagcggttagcggtaccgccaccgccgagaataagcctgcggatcccccgccgcctccgcgggggagagcgccggagcgggccgggctgaggcgcaggcggggagcgggcccggcgccgcggcgctggtggatgctggggctccgaggcgacggccggggggcgggggccgaggcaggtataacggtaccggcggcggcagcgccgctgctcttcccttctcctcaggaggggggccaatggctagcgagaagccgggcccgggcccggggctcgagcctcagccc

SEQ ID NO: 9088 - DNA, 63 bp, Homo sapiens
  chr13:35517052-35517115
  hyper
cggtggtggcggcaccgggggcagcgggatgggggagctaaggggggcgtccggctccggctc

SEQ ID NO: 9089 - DNA, 128 bp, Homo sapiens
  chr13:38443934-38444062
  hyper
cgaagccatgggaggcgggggaggggcggcccgggagggggaggtaaccgccaggggaggagaacctctcccacccccgcctgcacagatccctctggataaagttaagagttcccacggctgacagc

SEQ ID NO: 9090 - DNA, 200 bp, Homo sapiens
  chr13:45492040-45492240
  hyper
cgccagtctaaaatttcggcgttcccacaccgggagtcgaacccgggccgcctgggtgaaaaccaggaatcctaaccgctagaccatgtgggagacggcaatagcgactccaagcctagacaaattgagtcttctcggtcggcttccgcccactccatcgcgttcatccgtaggcgtcaaacctgctcctgcgcctgcgc

SEQ ID NO: 9091 - DNA, 546 bp, Homo sapiens
  chr13:45492271-45492817
  hyper
cgcattctactgtttctctccttgcaggggcccttgaatctttcttcaatctactctcgcgtctttcgtgatctcatccagtctcctggtgctaggtaccatgtcgacaccaatgtagacactagattggatgagtcattgttcacaattcctcacaaaactcctgcaaagtccaaaagaactggggtttgaatgttagaggctggtgaagaagtgaggaccacggggcgtcataacaccgcgcagtggaggccacgctgcactggccggtgtccgccgacagggtgtgtgccacagacgcgcagtgccttgcccgaatctgtccctcccctcagcgctggtccaggctggccacaggcaccaccccgtccctgaaagtggatcttttcctctgaaaaaacaggaatgagaactgcccggaagcctggaacattccaggttctgatgactcagcggctgaaggcaggatttgtgtcaccgaaagcagccagagtggcggtctgtaaatgtagcttagaaaagtggagaaagtctcttactgcaggc

SEQ ID NO: 9092 - DNA, 65 bp, Homo sapiens
  chr13:52980451-52980516
  hyper
aggaaacaggcaggaaacgcgcggccagccaaggtcctgcgggagggggtgcggccccggcagac

SEQ ID NO: 9093 - DNA, 141 bp, Homo sapiens
  chr13:60738352-60738493
  hyper
cgccaccatttgagcagcgctgggatataaaaccatctgctagccctctccttgcacgtctggggctggaaaaagtagttctgggactgggtacggtgctggaaggggtactaggcaggatgaaacgacggggcccacgac

SEQ ID NO: 9094 - DNA, 155 bp, Homo sapiens; identical to SEQ ID NO: 5941
  chr13:67804074-67804229
  hyper

SEQ ID NO: 9095 - DNA, 196 bp, Homo sapiens; identical to SEQ ID NO: 5942
  chr13:67805438-67805634
  hyper

SEQ ID NO: 9096 - DNA, 34 bp, Homo sapiens
  chr13:79160914-79160948
  hyper
cgaaaagccccagacagccactgcagtgccaagt

SEQ ID NO: 9097 - DNA, 65 bp, Homo sapiens
  chr13:79161096-79161161
  hyper
cgccaaccagccagccctgccctgtgtagacgggtcgccagagcgcggcgcagggatcgagctcc

SEQ ID NO: 9098 - DNA, 162 bp, Homo sapiens; identical to SEQ ID NO: 5946
  chr13:92050814-92050976
  hyper

SEQ ID NO: 9099 - DNA, 213 bp, Homo sapiens
  chr14:103010929-103011142
  hyper
cgctgcccggaacgccccgcgggagaacatctgcgccaggggccgggggccgggggccgcggcgggcgaaatccgagaggcccgggctcctcctgctgcgcggccggggaggggggcgcctgccgggtcggggctggaggacctgcgcgcggccccgggaggccccgcctcgccttccagtctgtgaaatggggcgacggcctgggcgtggcg

SEQ ID NO: 9100 - DNA, 99 bp, Homo sapiens
  chr14:103011360-103011459
  hyper
ggacgggcctcagtggcttccccgcccctccccaccgcgtcccggctccccgggcggggggtggggggggtcgcgtgcggacggttccccaccccgcgc

SEQ ID NO: 9101 - DNA, 599 bp, Homo sapiens; identical to SEQ ID NO: 6409
  chr14:104048314-104048913
  hypo

SEQ ID NO: 9102 - DNA, 127 bp, Homo sapiens; identical to SEQ ID NO: 6410
  chr14:104048982-104049109
  hypo

SEQ ID NO: 9103 - DNA, 121 bp, Homo sapiens; identical to SEQ ID NO: 7943
  chr14:104159197-104159318
  hypo

SEQ ID NO: 9104 - DNA, 106 bp, Homo sapiens; identical to SEQ ID NO: 7944
  chr14:104159437-104159543
  hypo

SEQ ID NO: 9105 - DNA, 336 bp, Homo sapiens; identical to SEQ ID NO: 6889
  chr14:104202370-104202706
  hypo

SEQ ID NO: 9106 - DNA, 78 bp, Homo sapiens; identical to SEQ ID NO: 6897
  chr14:105512395-105512473
  hyper

SEQ ID NO: 9107 - DNA, 247 bp, Homo sapiens; identical to SEQ ID NO: 5947
  chr14:21098618-21098865
  hyper

SEQ ID NO: 9108 - DNA, 196 bp, Homo sapiens; identical to SEQ ID NO: 5948
  chr14:21099147-21099343
  hyper

SEQ ID NO: 9109 - DNA, 686 bp, Homo sapiens; identical to SEQ ID NO: 5949
  chr14:21099793-21100479
  hyper

SEQ ID NO: 9110 - DNA, 113 bp, Homo sapiens; identical to SEQ ID NO: 5950
  chr14:21101056-21101169
  hyper

SEQ ID NO: 9111 - DNA, 39 bp, Homo sapiens; identical to SEQ ID NO: 5750
  chr14:23355352-23355391
  binary

SEQ ID NO: 9112 - DNA, 53 bp, Homo sapiens; identical to SEQ ID NO: 5751
  chr14:23355484-23355537
  binary

SEQ ID NO: 9113 - DNA, 79 bp, Homo sapiens; identical to SEQ ID NO: 5951
  chr14:27067019-27067098
  hyper

SEQ ID NO: 9114 - DNA, 219 bp, Homo sapiens; identical to SEQ ID NO: 5952
  chr14:27067386-27067605
  hyper

SEQ ID NO: 9115 - DNA, 205 bp, Homo sapiens; identical to SEQ ID NO: 5953
  chr14:27067699-27067904
  hyper

SEQ ID NO: 9116 - DNA, 266 bp, Homo sapiens
  chr14:29225768-29226034
  hyper
acactaaaatcaaaaagactcctggtgcttgcgagtacaaccccaaattctctcgcacactgcccaagtttcttgaaactcggaggctcagctcagtgtaaaaacatgggggttctcctgagtcggtttccctgaccacagggggacccctgcaaacacggcctcctctttaatacctttgtaactcagttcttcaagcaacccacctaggagaataaaaggacccactgagctccaataactgagtagatgattaaataaagccg

SEQ ID NO: 9117 - DNA, 56 bp, Homo sapiens
  chr14:32597657-32597713
  hypo
agaccctgagaaagtcccttcacctcgctgggctctggtttcctcattccaaggat

SEQ ID NO: 9118 - DNA, 203 bp, Homo sapiens; identical to SEQ ID NO: 6902
  chr14:37135434-37135637
  hyper

SEQ ID NO: 9119 - DNA, 138 bp, Homo sapiens; identical to SEQ ID NO: 5957
  chr14:42076491-42076629
  hyper

SEQ ID NO: 9120 - DNA, 52 bp, Homo sapiens
  chr14:42077719-42077771
  hyper
aggcagaaagtcttcctacgaccgtcttttcccttagaggcaccaggtaaca

SEQ ID NO: 9121 - DNA, 224 bp, Homo sapiens
  chr14:51562012-51562236
  binary
atagggcagtcttcgctcgcggctgcaagatctctgaagggggccggcgtgcggaggctaggggaccgggaaggaggagttaggcgggatgattcatcctcgcccggcttacttccgacctccggtgcagtctcccaggagctgggggcgtgagaaacccctccccgcagcgagtgggctgccggagggggctggggcttctcgccagcgtttgcgtttggctc

SEQ ID NO: 9122 - DNA, 260 bp, Homo sapiens; identical to SEQ ID NO: 7958
  chr14:52327346-52327606
  hyper

SEQ ID NO: 9123 - DNA, 315 bp, Homo sapiens; identical to SEQ ID NO: 5958
  chr14:52781114-52781429
  hyper

SEQ ID NO: 9124 - DNA, 80 bp, Homo sapiens; identical to SEQ ID NO: 5959
  chr14:52782046-52782126
  hyper

SEQ ID NO: 9125 - DNA, 173 bp, Homo sapiens
  chr14:60043607-60043780
  hyper
taccctcctggttctctaattttatccacgataattaagcagtctgggaagaatgactctctctttagctaatttttcccctttcaatttccattgcgttagttcaggcctgtatcttttttgtgggccactggaatcataataatgatcacttttgagcgcatctttgtgcc

SEQ ID NO: 9126 - DNA, 80 bp, Homo sapiens; identical to SEQ ID NO: 5752
  chr14:60097114-60097194
  binary

SEQ ID NO: 9127 - DNA, 637 bp, Homo sapiens
  chr14:60337053-60337690
  hyper
actggggggccctggtccccgacgccatttgaggggcagcggcgcccgccttacctgtggatgcagtttccatggcaacgggcgactgccgggcggggcccgagccggcttcccgcgacgccgcttcccgggccctggcgcccaaccccgggctgggctccccagcctgcggcgccggcgtggcccctttcggcgtcaccgcttcgttctccccctccccccggtgcctgagccactgggacccggggccggccagcggcagcagctcgtcctgcggatcccccggcgcggccatggctggcggtcccccggcgcggcgacggcggcttggctgggcagaggctcggtggctgcgcgggcgctccctgctgctgtccccggagggactcggcgctcagggaagctgcggtgtctcagcgtcgccgccgcctctgctgcaactccgccgagccgctgcctgccgctcttcccgcttcagctcctccttctcccccctcctcttcctccggccccgccgcggccgctgcctgcgctcctcctcctactccactcgctgctgccgccgctgcttcgctattcccaatcctgttattacgcaggtgaaaatggcctgcttggtccgggtcctcctgggcac

SEQ ID NO: 9128 - DNA, 45 bp, Homo sapiens; identical to SEQ ID NO: 5753
  chr14:60385935-60385980
  binary

SEQ ID NO: 9129 - DNA, 114 bp, Homo sapiens
  chr14:62584399-62584513
  hyper
caccccgcccccaaccactgaagagtagccagctgctggtcccaaatgacctgattcgattttttaaatgtaaaccttaggattggttcttgggtgaagagtccgctgctcttc

SEQ ID NO: 9130 - DNA, 56 bp, Homo sapiens
  chr14:73358909-73358965
  binary
cggttatgtgatttcggctggaaatggggaaactgaaaatcagttgtgggttcggt

SEQ ID NO: 9131 - DNA, 255 bp, Homo sapiens
  chr14:73359040-73359295
  binary
ccataaaacattttctttcttgggtgaaacgctgtggcgttcaagcgcagtgtatccgagcttccgagccagaactgaagccaggagctcctatctgatcagcctcagcttccaacgtcctcttaacggcagctttcatataaatatatttgaaacctggggccttcctacccctttccctatttctgatgggcgacgagctggcgcaaacacgtccgattctccctgtgcattcctttgcgttaggaaccccct

SEQ ID NO: 9132 - DNA, 139 bp, Homo sapiens
  chr14:73359490-73359629
  binary
cgaaggggtgaggaccccccagcccacctcggatacggagggagccaccctctgccgacatcacccaatagcacccctttcagagcgacactagttttccgaggccacccctggctccgcgatcgcgagcggacttggc

SEQ ID NO: 9133 - DNA, 464 bp, Homo sapiens
  chr14:73359779-73360243
  binary
cggggctggcccccgcgagtcctcgcccggcccgccccactctgtccaggatctgggcaagcgctcaaagtctccccgaggcggccagaggcacctgcccctcgcccggccgggagcagacgctgccccctcgggccaggagccccaaaaccgcctctccgcctgcctcagcgcctcacccagaggtggcgagaacaccattcataagacctgcggcttccctgcctccaaatccaccccaagttaacccgagtcgttaatccactaaagccagctcgctcgcaaatacacgagcagacacacgctcgatcgcccggagcgcctccgagatccgggggctgccggggaaagcccggggcgaccacctgggccccagcacgcccgggacccgctgcttcccccgcggtgctccaactccggaaggtttgcacaaactccccgcgagcgatcggaaggcgaagagc

SEQ ID NO: 9134 - DNA, 227 bp, Homo sapiens
  chr14:73360763-73360990
  hyper
cgctttcagggggttgtgaatgacagtcgccattttgctacaatgtaacagaatattgtctcagagttctaaaggttcgctcaggggaagcgacgggccaatcacagcgcgggataccggcccgccggccaatcggcgctgctggtagctaggtgggcggggcctgcgccgtggtagttattaggagagctgtcaaagcccagaggtcactcccttttgtagagccc

SEQ ID NO: 9135 - DNA, 198 bp, Homo sapiens
  chr14:88789765-88789963
  binary
cgaccctccccgcggcgcgccccagacgccgcgccccggcaagagggagcagggcgagcagcggaccgaggctcccagctgggaaggcgcgctgagcccccggcacccggctcggggcagcgggaggcggtcgcggacttgcccgcggggcggcgggaggcggtgggcggtggcggggaagccgcggaggggcgggga

SEQ ID NO: 9136 - DNA, 406 bp, Homo sapiens
  chr14:89493490-89493896
  hyper
acgcagaacccggacctcggaatgggacgatgcgacgggcggggaaggcctggcccggccgaggtgccctcggccccgccctccaccgagggcagggaggcactgcctccgctccgtccactcgtaactggtgacgctggcagccccgccggggggcggggggagtgcaagaaaatcctgaggtgtgtcgggggacctggaccagatgccctcctgcaccgccctagctccggggaagtcgctctccggctccgcggcgcgggacccgccagcgggcagaggcgcggcgctttgatgtcgcgcggccacacggtggcgctgccgcaccgcccgctggcggagactgggggccaggggtgcccggggtggggtggagccgggacgcgcgcactccccagccacgccc

SEQ ID NO: 9137 - DNA, 111 bp, Homo sapiens; identical to SEQ ID NO: 6413
  chr14:89875711-89875822
  hypo

SEQ ID NO: 9138 - DNA, 486 bp, Homo sapiens
  chr14:90085312-90085798
  binary
cgtgacaatgctaaacccgagcagattaggaggcaggaaatgagccccattttcgttaccttcgatcgcctgcccccccgctgcttctcgcggccgcattggggggctgcggcgacgctggactcgcgggtggccccgccgccgggtcgcgccgtctcccggccgagctgcagcagatcgcggccggaaccccggctcctgcgcccggcgcccgcccggggtcggcggcgcggctcccaccccggcctggagccctgctgggtcctagtgcgcgccgcgcgcccgcctcgcggcccggtctgcagcccgcaccgagggcaggcagctcccagcgccgcgagtctccgggcgaggccgccaccctctcggtcccttgcgaaagcggccgcggggtgtgcggatgaactggagcttaatgtcaaatcctggcacaagatgttcaaaagaaagacattggctccaactgaactcttagaaggcagatgc

SEQ ID NO: 9139 - DNA, 144 bp, Homo sapiens
  chr14:90527180-90527324
  binary
agggcagggccgcggctgccaggaggcccgggaacagtcccgacggagcggcgcggagagggcgctccccggaaggtgagatctgagcgcggcagcggcgccagcgcccgctacaaggcggggtctcggggagggggccccggc

SEQ ID NO: 9140 - DNA, 227 bp, Homo sapiens
  chr14:90527931-90528158
  binary
ggcacctacaaagccagcagactgacacccgtgtcctagccgtcggcggcctgcgaagcgatagtcaaaggaaccaggacccaggaccccggcgctctgcttacccgcagacctccggaccgcgccccccccccgccgccccgccccgccccgccccgccccgcgaccgtctctttgcgggaaactcgagttggctcgagcttgccctgaagacgcgccacgccccc

SEQ ID NO: 9141 - DNA, 206 bp, Homo sapiens
  chr14:94404864-94405070
  hypo
cgtgagccaccgcgcccggccaagttctgacttttaaagtaacaacatggacgtgtcctgcctctgggtcgctggctttctgcttctgacctgaccctacaccagcctgctcttgacatgcctttccggatcgtgcttgtttcacatcgcattccaggtgtaggtttgctggaggtgacgagcctcttagtttggcagagttctcc

SEQ ID NO: 9142 - DNA, 547 bp, Homo sapiens
  chr15:100889946-100890493
  hyper
cgctggttgcaggagtagccaaccccgctccctggcagcccgtgagatgccacatcccctccagcagggggcggccggcatcggtcccgtcttcctaaaccggcgttggtgggaaatgccggcaccagctccctccccgctccagagccctgttttccccatttgtatttcactactttcctgttgagcttggattccagcctcaaattccgcgatttggccggcatcctaatccccgagtgactcttgccaaccactctctgtggggcctgtgtgcttcctcctgggttctggggcgctggcggcgtccgcttcaccgggaacgggagccccagcctcccgaggccttcctgcctggctctgggaatggccactgtccagaaagccccgcggccgtccatgctcgctcgctcagtcaggcccttgtggggatattgcagaacgagtccgagttactatccctttaaatacaggcgtttcggcctagctgccgccggtccaatccgcagcgcttccgtgccccactttcccgcgtcagcctggctcc

SEQ ID NO: 9143 - DNA, 497 bp, Homo sapiens
  chr15:101458286-101458783
  binary
cgcgtcccctccagcgtctgcccgggccctgggcctgcgctccctcgcggtggcgccaggtggcggggctgcgcgccctggaggagctgcaccgccgtcgcggggctctctcagcactgaggacaccacgccctgcaaattgttgggaacttgtcggtggcaatcacactgctggctcctgcaaactggtgtgaggccctcaggggtgagaacaggattgcagaactgcgctcacccttttggaaagtcgtccagtggcagaagtagcctcccaggagcagagcgaagctgctcggtggtcccctctccaaccagggacccaagaagccgctcaagggaacacggccccgcggcgtccgggaggtcctgcaggagccctgcggctgccccggttctgtgaaatggcagtgagggtgggggagatgtgcgctaaatcctgggaacgtgcgagtcataactttccaggagaggggcccagggcgctggtcctgcagggc

SEQ ID NO: 9144 - DNA, 664 bp, Homo sapiens
  chr15:101459313-101459977
  binary
gtgcccgaacctgaaggaggacccggtgccggaagggcccgcggaccccggcgtctcccggggcatcgagcgccatcgcccgcgttttacggccagggaaactgaggcggccgccgaggggacgcctcgcgacggttcctgggagagctggcggcggccttgctctgcgcgctcttcgcgccgccctccccgcccgcccgcctcaggattgaggaagtgcgtctgggcccggccccggcgcggggggcagacggcggtgggacggccaggccccggccccgccagtgtgtccgcccggccccgcgtcccggagcgcccgcacccggccccgccgccgcctcaggtaagcgccgctcctgccggcgccccccggcggcctggctgcctcccggccccgcccggggaacccagagcccgcgcccggcgcccgcggggagcctcggcctctgcctgcccgcgggcccctgcgctccgggcggccgcgtggtcgggcacggggggccgttgcgcaggggccgcggcccgaggggcgcggagggcgtgtggggcgaccccggtctcacgtccccgctgcctcccgccgcgcccggagcccagccagcctgtgggaggggagcgcgcggggcccgagcagggaaccccgaaaccccgtccgggcagggtc

SEQ ID NO: 9145 - DNA, 409 bp, Homo sapiens; identical to SEQ ID NO: 5966
  chr15:26178877-26179286
  hyper

SEQ ID NO: 9146 - DNA, 145 bp, Homo sapiens; identical to SEQ ID NO: 5967
  chr15:29432142-29432287
  hyper

SEQ ID NO: 9147 - DNA, 61 bp, Homo sapiens; identical to SEQ ID NO: 5968
  chr15:29561185-29561246
  hyper

SEQ ID NO: 9148 - DNA, 1045 bp, Homo sapiens
  chr15:29561316-29562361
  hyper
gcttcagtttccttgatggtgttgcccttcataaagatgagccctaagacgatcatcaggaggcccgtagtgggcgtgccttggtcacccctcatctcggcatcctcctccacaggctccagggtgttgatgaggatgtaagtgttgctcttgggttcaagttccaccagcttatacccgaagacgtactggaggcgctcggcggcccgtttgaagaggtcggggaagatgtccttgtagtccccgatgacgtgcttcagtatgtcggcccgcttgatcggaatcttcttctggtctttaatcagcaagaactgcaccagctcggacactttcagctccagctgcttctggctcctgggccccacggcgggggcggcctgggcccggcgggcgccctgaggcgaggggccctgcgacccctgcgagccgcccggcccgcgggacgtgctcggggcctcctcggcaaagccgtctctgagaacccgggcgtcttccccggcccgcgaagccccggggtttccgctatggctccagtctctgtccctctcggcctggccgccagagcggccccggttcctcggtttttgcaacatgtctccggcggcaggtgccggcgcacactccggtaggcaagcagccgcggcggggattgcgggtcggcgacccgctaacgccggtgcctggaggcgcgcgcagtgtcggctgagactgcgtgctgcgtcatgaagcctgcgccttgcgtcagggcggctgggcggtgcgcctgcgcggctgcggcgggtaccaaaaggaacagcgttttccgtgcagccctgcaggtccgggcgatgatttttagtatagtgaagtgttgttaccaaaccatgcaaacagagagcgagaaccgaaactcctaaacaagtgtgtcgctaaattcagaccacacaggctcaggcaagttttacagacagtattatgagtttctaaatcgggagcatttgtaaacggaaagaattcagaggatgaacgtgtgagaaaaaaaaaaggtgaagaggaagggccgacc

SEQ ID NO: 9149 - DNA, 507 bp, Homo sapiens; identical to SEQ ID NO: 5754
  chr15:31774606-31775113
  binary

SEQ ID NO: 9150 - DNA, 155 bp, Homo sapiens
  chr15:32322773-32322928
  hyper
ctcgctgcagctccgggactcaacatgcgctgctcgccgggaggcgtctggctggcgctggccgcgtcgctcctgcacggtaaagccactgcctccccgccctccactcctccgtgggatcccgggcacatcccgggcgcctctgtgcgccccgc

SEQ ID NO: 9151 - DNA, 113 bp, Homo sapiens
  chr15:39971441-39971554
  hypo
cgctaacggctaaggaataaggaaccctgaatatcttaaaatctagctttacaagccaaagacatcaagacaaatattgtaaggccttgtgcatttgtctgacctgttgcgcc

SEQ ID NO: 9152 - DNA, 88 bp, Homo sapiens
  chr15:41091052-41091140
  hypo
cgttaactcacgacttaatccttcattctggcagccgtggtgccccgccttgtgagtgtgtgtgtaagaatttggcgcttgctggctg

SEQ ID NO: 9153 - DNA, 464 bp, Homo sapiens
  chr15:45722474-45722938
  binary
cggctatctgcgctcccctcttagggggttccacctcctactccccaaacctccaaactcctcacaagcacctaggggggccaagagcgaccggggtcggcaggtaaggaagaccgcggcgagcggcagggggcgccagcgcccgcgttcgggcgcttcacgtcagccgcagaatgtcctgcagggggcgcccgggagtcgcgtgcccaacggggaaagcgagtcaggtccctcgcgctccccgccccacgcgcgtgaccagagcgcgctggcccggcccacccggggcggttgtggtcgctatatataaggtggggaggccgccggcccgttcggttccgggcgttaccatcgtccgtgcgcaccgcccggcgtccaggtgagtctcccatctgcagagacgcggacgcgccggcccgcagttggcctgcggagcgcggtggacggtttggcgcccaccaggc

SEQ ID NO: 9154 - DNA, 119 bp, Homo sapiens; identical to SEQ ID NO: 5970
  chr15:48469946-48470065
  hyper

SEQ ID NO: 9155 - DNA, 53 bp, Homo sapiens; identical to SEQ ID NO: 5971
  chr15:48470094-48470147
  hyper

SEQ ID NO: 9156 - DNA, 159 bp, Homo sapiens; identical to SEQ ID NO: 5972
  chr15:48470215-48470374
  hyper

SEQ ID NO: 9157 - DNA, 78 bp, Homo sapiens; identical to SEQ ID NO: 5755
  chr15:48936649-48936727
  binary

SEQ ID NO: 9158 - DNA, 228 bp, Homo sapiens
  chr15:53078992-53079220
  hyper
gggggaggagggatattgaagtccagagcaagagcctccagggggcgggggtgggggatggggaccgagttttcccggaggggtagccttctccatttctatcttcttcccacattcccccgctccactctttggcttcagcgggcactgcctgggtaagaggccctgaagcctggctctggggtggtgtgggtgtgtgaaaaggcactaccttgggctctggagaga

SEQ ID NO: 9159 - DNA, 218 bp, Homo sapiens
  chr15:53080082-53080300
  hyper
ccagctgaactcagaaacacctggggcttggggtttcgggcaggagacctctgctcctagacttgggggtcatttacacactctcatccccaaacccccctcccgcacggggattcagacgaaaatcgcgaagaggaataataaaacaaaatgcaaagtcctcagggagtcggcagcggagtcggtcccaggacatggctattgctttgcagctctca

SEQ ID NO: 9160 - DNA, 147 bp, Homo sapiens
  chr15:53489675-53489822
  hyper
cggggctgctgagcacatcgagagcgccccctaggcgctggcacgtggctctgcaggaggaagccaccggtcgatcatccctgcgtttgtcaggcgcccaaacccacacacaaagccctggcacaggcggcgacgcggcctctctcc

SEQ ID NO: 9161 - DNA, 78 bp, Homo sapiens; identical to SEQ ID NO: 6926
  chr15:54191760-54191838
  hypo

SEQ ID NO: 9162 - DNA, 620 bp, Homo sapiens
  chr15:63086996-63087616
  hypo
cgggggacagagtgtctcatactccatgcctcttgctggcacggtaacacagtgactcccctgccctggtcagcatgtttgaagaaatctacctacgaaacgttgtcagattcttctttgggtcgtagtcaagggtagtgggtgtgtgcacgcagaggttaatacaaagactcaaagagcctccagccactagcctgacacatgcgatttacattgggtgcattgggccatcctgagggcaagaacggtgtgctgtggcgtcccgggaggcagggctgtctctggaagaggagagcagggggaggtgtccggggctcagctgttttgcaggctgcttgaggcacaggatgatacatccgtgcttggtggcttttccttcttccttcactttggcatctgacggggcaactagttcggtggctgcgggagaggggcaggagtcgttgcaggcagagcgcagacccagggtggagaggtgggagtgtttgggaaagtcaggagctggcgggtgtggtgagagccaggtgaagcggacacatgaccagaaacggagctcagccaggggagatttgtaagcagggtgttagtgtggtcaggtttatgtcataggaaagtacctc

SEQ ID NO: 9163 - DNA, 206 bp, Homo sapiens
  chr15:65186319-65186525
  hyper
cgagccattctcgggctcggccagccattgggctgggaacctgtcaatcctggttgatcttccaatgagctgtgaactggtcttccgggaggacttacaggaggctggaaacggggcctggcgcgcgcttccctctcagtgcgaggctgactggttggactcgccgggctctactgtgggccccacgctatgtttagacgcccgac

SEQ ID NO: 9164 - DNA, 39 bp, Homo sapiens
  chr15:71164697-71164736
  hypo
cggctcggcatcagagggagaccgcggaaagtgggagac

SEQ ID NO: 9165 - DNA, 96 bp, Homo sapiens
  chr15:76558876-76558972
  hypo
cgataaaatccaaacttctactccctttcaatatcaaggaatgaagttagaacaaagtgctattaagcctcaaaaagttcaaatttggccgggtgc

SEQ ID NO: 9166 - DNA, 60 bp, Homo sapiens; identical to SEQ ID NO: 6933
  chr15:79208280-79208340
  hypo

SEQ ID NO: 9167 - DNA, 61 bp, Homo sapiens
  chr15:79383268-79383329
  hyper
cccctccccagacacacacacacgcacacgcacacgcacacactcaaaccctgccctccct

SEQ ID NO: 9168 - DNA, 62 bp, Homo sapiens
  chr15:79384146-79384208
  hyper
gcgcagccctgtgaaggaaagacaccatctttccgcacggaaactgcgtatacccctccccc

SEQ ID NO: 9169 - DNA, 35 bp, Homo sapiens
  chr15:89942592-89942627
  hyper
cgggcccacgaccccaaatgaaacatctttcactc

SEQ ID NO: 9170 - DNA, 295 bp, Homo sapiens
  chr15:89949942-89950237
  hyper
atcataattattttatctataatttattctaaccccaaggttccaagaaaatctgtaatgaacgttaatatctacagcctcctggtcaatctgcatcgggcgagagagccgtcgggttcttcgcagtgggtgacttcaggtccctgtgccttgtttcctatcactctgaaagaattttctccccaaaggaaatccaacttgtttgaaacaggtttctcctctctgactttctgcactggagaaaaatctggatctgcttttcgaaaagattttttttttttaagaggcatccggg

SEQ ID NO: 9171 - DNA, 40 bp, Homo sapiens; identical to SEQ ID NO: 5978
  chr15:90016187-90016227
  hyper

SEQ ID NO: 9172 - DNA, 107 bp, Homo sapiens; identical to SEQ ID NO: 6415
  chr15:90378787-90378894
  hypo

SEQ ID NO: 9173 - DNA, 202 bp, Homo sapiens
  chr15:96596605-96596807
  hyper
cgttaaacagcggggagccgctggcgctggcagcctgcccaccggcgacggtgaaccgggctggcaccgagcagggagccgggcctgccagcctgtccgcctcgcgagaggaggcccgggctcgccctctctgccctccagatgactctttgcattcttgtcaaatatatttagaacaagaggtgtccacttaaagagaaac

SEQ ID NO: 9174 - DNA, 90 bp, Homo sapiens
  chr16:1265061-1265151
  hypo
cgtcggttcttcaaggacaggtgtgtgtggtggggccgtcttgggttctgggggcccctcagggctctgggggctgggggcaggtgaggc

SEQ ID NO: 9175 - DNA, 224 bp, Homo sapiens
  chr16:1265333-1265557
  hypo
ccaccatcatccgcatcatgcgcgtgcttcgcattgcccgtggtaggtgcccgcgtgcccgccaggttctctctgcgggtggagggtgggggctcagccatgggtgggagtgaggggcggggcggccagggtccccgcgcagcagggagggtccgcccagccctgctgacgctcagctcccggccctagtgctgaagctgctgaagatggctacgggcatgcgc

SEQ ID NO: 9176 - DNA, 430 bp, Homo sapiens; identical to SEQ ID NO: 5980
  chr16:12897365-12897795
  binary

SEQ ID NO: 9177 - DNA, 46 bp, Homo sapiens
  chr16:1383142-1383188
  hyper
caccagagccccagggacgatcgccccacagaccgtccgcgtgggc

SEQ ID NO: 9178 - DNA, 131 bp, Homo sapiens; identical to SEQ ID NO: 6426
  chr16:1753650-1753781
  hypo

SEQ ID NO: 9179 - DNA, 184 bp, Homo sapiens
  chr16:1813299-1813483
  hypo
cgtttcaggcgtctgtccagcagggagtcgctggtcatgcctgtgccccggcggcactccaggtcccggtctgtggaaccctcagtgactgtggcagcagagcagcctctgggtcgagcaggggccagctgtggcctccaagcccaggggcatagccggtgccaggaaagccacccttcccagc

SEQ ID NO: 9180 - DNA, 217 bp, Homo sapiens
  chr16:1814037-1814254
  hypo
gccctacctgtctcagatttctggagggatgggtaggagccagggttcgtgcccacggcgcctccctgctccctgcagctgagtcccaacgggggccaggaggacacgcggatgaagaacgtgccggtgccggtgtactgccgccctctggtggagaaggaccccaccatgaaggtgagcccgcgaggaccccgctcaggctggctgggcgagcggg

SEQ ID NO: 9181 - DNA, 112 bp, Homo sapiens
  chr16:1814369-1814481
  hypo
caagccagcgccaggccgcgatcccctgacctgcgaccgcgaaggagacggcgagcccaagagcgcccacacgtctcccgagaagaagaaggtgagcatggccgaggccacc

SEQ ID NO: 9182 - DNA, 95 bp, Homo sapiens
  chr16:18804320-18804415
  hypo
cgctgggtaagaaaagtcaaaacactaatgagttgtccatgaagccaactgctaagaacgcgctcaactatacgcgacatgaagacactatgcac

SEQ ID NO: 9183 - DNA, 228 bp, Homo sapiens; identical to SEQ ID NO: 6427
  chr16:2042997-2043225
  hypo

SEQ ID NO: 9184 - DNA, 371 bp, Homo sapiens
  chr16:2226433-2226804
  hypo
cgggggtggggacgaggagctggcagccccagcacaaagtggtggagggcaggtacgtgtggcaggtgtggctggggcagggcagccggccgcaggacatcctggtgaagcagccctttctctgcaggtttggacttgctaacaggatccaggccaggctgtggtttcccctgaaccagccctggacctttctgagccaggctggccacatggggtggtctcggggtttctgcctgccccgtgggcataggtggacaggctctggcagccgggcagtgccctccccgtcccatgctcggcgagcctccctctactcggcactgtccttgctgcccagcccctctctgggtgccaggtacgacgcttgcccc

SEQ ID NO: 9185 - DNA, 266 bp, Homo sapiens; identical to SEQ ID NO: 6431
  chr16:2230223-2230489
  hypo

SEQ ID NO: 9186 - DNA, 389 bp, Homo sapiens; identical to SEQ ID NO: 6435
  chr16:2280815-2281204
  hypo

SEQ ID NO: 9187 - DNA, 238 bp, Homo sapiens; identical to SEQ ID NO: 6436
  chr16:2281402-2281640
  hypo

SEQ ID NO: 9188 - DNA, 61 bp, Homo sapiens; identical to SEQ ID NO: 6437
  chr16:2281702-2281763
  hypo

SEQ ID NO: 9189 - DNA, 713 bp, Homo sapiens; identical to SEQ ID NO: 6438
  chr16:24837143-24837856
  hypo

SEQ ID NO: 9190 - DNA, 482 bp, Homo sapiens; identical to SEQ ID NO: 6439
  chr16:2485948-2486430
  hypo

SEQ ID NO: 9191 - DNA, 173 bp, Homo sapiens; identical to SEQ ID NO: 8013
  chr16:2806405-2806578
  hypo

SEQ ID NO: 9192 - DNA, 276 bp, Homo sapiens; identical to SEQ ID NO: 6956
  chr16:29170096-29170372
  hypo

SEQ ID NO: 9193 - DNA, 61 bp, Homo sapiens
  chr16:30017168-30017229
  hypo
cgacctcctccctgttgggggagagggacggggcagcgtggagaggcaggagtgaggagcg

SEQ ID NO: 9194 - DNA, 42 bp, Homo sapiens
  chr16:30017858-30017900
  hypo
gagccagctccccagcccctccctggcctccctccatgtccc

SEQ ID NO: 9195 - DNA, 212 bp, Homo sapiens; identical to SEQ ID NO: 5982
  chr16:3222239-3222451
  hyper

SEQ ID NO: 9196 - DNA, 50 bp, Homo sapiens; identical to SEQ ID NO: 5983
  chr16:3238043-3238093
  hyper

SEQ ID NO: 9197 - DNA, 196 bp, Homo sapiens
  chr16:410000-410196
  binary
cgcctctccgggcgctgccgcccccccgttggtgctcatctgtccttctgcccactatccccagcggccccgatacctgcacaccccagtgcccagcggttccccctcgagctggcaaggggacattaaatgggaggtgaggaagtgcggcccccagcgggcagctgcctttgccccggcccacctgcgcccccgc

SEQ ID NO: 9198 - DNA, 111 bp, Homo sapiens; identical to SEQ ID NO: 6962
  chr16:411606-411717
  hypo

SEQ ID NO: 9199 - DNA, 49 bp, Homo sapiens; identical to SEQ ID NO: 5984
  chr16:4363872-4363921
  hyper

SEQ ID NO: 9200 - DNA, 158 bp, Homo sapiens; identical to SEQ ID NO: 5985
  chr16:4364080-4364238
  hyper

SEQ ID NO: 9201 - DNA, 342 bp, Homo sapiens
  chr16:4377552-4377894
  hyper
cggggactgcgggcggggggccgggtggctccgccagcgctgcagctgggggccgtctgctcgggctgcggtcgggcacacaatagcagccattgtctcggccagggtggcggggggcccgcccagcccaccctccgggtgacccccgccctgcggtgggtgggaagggcagggcccggtcccccgaagcccccgccgtcccggtggtccccgcggccgcccccgcgcgcttcctccctcgccgcagccgcttcctcccgctcgccccgctctaattagttccttttgcagctggaggagccgcgcagcggccggttccgcggccacccccaccccccaccg

SEQ ID NO: 9202 - DNA, 165 bp, Homo sapiens; identical to SEQ ID NO: 8040
  chr16:56671950-56672115
  hyper

SEQ ID NO: 9203 - DNA, 109 bp, Homo sapiens
  chr16:67175573-67175682
  hypo
cgccagcataggcaccagctccacgtaagggtgaggctagatcacgtgtaccgcaagcggcttccattgcgggcacccatgtctggacaaggagaatgcggtggcaccc

SEQ ID NO: 9204 - DNA, 94 bp, Homo sapiens; identical to SEQ ID NO: 6449
  chr16:67313759-67313853
  hypo

SEQ ID NO: 9205 - DNA, 115 bp, Homo sapiens; identical to SEQ ID NO: 6450
  chr16:67313958-67314073
  hypo

SEQ ID NO: 9206 - DNA, 512 bp, Homo sapiens
  chr16:717202-717714
  hypo
cgggtggcagcgacttttaaggagggaactggcccagctgcaggccgacagcctggcagtgatggaccccctagtcccagtggcacgtggagggcacagccaggagcccttttagcaccagctcccccgaccagcatcatgcccagtggggacagtctgggtgggttgggggagccctctgagtgctgcctggtcctggccctggcccacctgcaccgtctacccacagagtgcatgctgaggctggtagactgtgccatggggactgcccaagactttgccggccacgacaacgcagtgcacctgtgcaggtttacaccgtccgccaggctgctcttcacggccgcccgcaacgagatccttgtgtgggaggtccccggcctctgagatgcagcagggactgtggtggtgggcatcacgcctggtcatgccaggcacctggacacaggcttggcagaggcgccaggttgtcaatggcctcatgctgggacaggccaggattcacgtaaatc

SEQ ID NO: 9207 - DNA, 61 bp, Homo sapiens; identical to SEQ ID NO: 6452
  chr16:75148493-75148554
  hypo

SEQ ID NO: 9208 - DNA, 136 bp, Homo sapiens; identical to SEQ ID NO: 6453
  chr16:75149151-75149287
  hypo

SEQ ID NO: 9209 - DNA, 205 bp, Homo sapiens
  chr16:77247511-77247716
  binary
taccaggcactgttctaagcactggattttaaacagcgcggtcagcgacggcctcacctaggaagtggtatctgagcggagaagcgaggtagagaagcgagggggtgagccctgtgggtgtctggggaaaggtgggcctggcagaagacatgcctcatgccaaggcgggaggtgaggctgcacttcgctgtgtttgaggagacgt

SEQ ID NO: 9210 - DNA, 49 bp, Homo sapiens; identical to SEQ ID NO: 5986
  chr16:77822069-77822118
  binary

SEQ ID NO: 9211 - DNA, 133 bp, Homo sapiens
  chr16:78409056-78409189
  hypo
cgattcatctgtaaagtaaaaataaccgtcgtcgtcatttctcaagcgtgacgatactgttacacgtttactgcatattctgcataccaagcacatatccgtcacacgcagtgtggccaacttccgagaggcc

SEQ ID NO: 9212 - DNA, 68 bp, Homo sapiens
  chr16:80574541-80574609
  hyper
cggtactgtttcgtgcattttgtttggtgcattttgtccgtctccctggcacctggtgggtggtgaat

SEQ ID NO: 9213 - DNA, 72 bp, Homo sapiens
  chr16:80575052-80575124
  hyper
gggcccacccaggcacgggcggtccaggggccgcggcggaggctggtggctccaggatcttcctggaggggc

SEQ ID NO: 9214 - DNA, 31 bp, Homo sapiens
  chr16:80837324-80837355
  binary
cgcagcgccccctttcgcccccagggagcac

SEQ ID NO: 9215 - DNA, 539 bp, Homo sapiens
  chr16:80837424-80837963
  binary
gggggtgagggaggtggcccggggaccccggggagcggtttggcggttgtccccccgaacccccacccagcctcccccttcgcagccccccgggaccccgcctcgccccggccaggctccgctccgatcgcccgcccccctcctcccccgcgcccccggcccagccgggccgcgcaacccccgccccacacccccgccggccgcggcgcgcccccccgcattcccagcacgtccggcgccgacttttacctgtactttctgtactcgaggcggctcgtcgggcgagaaacacctccccgggaccgctacctcccccgccccggctccgcccggcttcctccttcccctccaaggccgcaaagtagatggagtaagagagtgtgtgtgcgagagaaagagaaagagggagcgggcgcgggcgccgcgggaggcggcgggcggcgggcggcgggcgggaggcgcgcccggcccccgccaccctccggccgccgccgccgccgccgcgggctcggcaactccggattgcgcccggccccggc

SEQ ID NO: 9216 - DNA, 107 bp, Homo sapiens
  chr16:81361640-81361747
  hypo
cgtcatcgttttaatcgtctttgaactcttaaaattttaacatgcattttcaaaccttgtcttttaagagagaaattttattgactgctttactttcaaaatgacgc

SEQ ID NO: 9217 - DNA, 261 bp, Homo sapiens; identical to SEQ ID NO: 6455
  chr16:81563939-81564200
  hypo

SEQ ID NO: 9218 - DNA, 163 bp, Homo sapiens; identical to SEQ ID NO: 6456
  chr16:81564229-81564392
  hypo

SEQ ID NO: 9219 - DNA, 240 bp, Homo sapiens; identical to SEQ ID NO: 6457
  chr16:81564541-81564781
  hypo

SEQ ID NO: 9220 - DNA, 92 bp, Homo sapiens; identical to SEQ ID NO: 6977
  chr16:85033902-85033994
  hypo

SEQ ID NO: 9221 - DNA, 772 bp, Homo sapiens
  chr16:85590112-85590884
  binary
cggatcctcccgctgcggtcaagcccgcggtgtgcgcggctacgtgcggcggggagcgcccacctggcccgccgcccccatcgcgccgccgccgggggttgcgcgtctcgctccttttgtctgccgggagccggctccgccgcggcggcggagcgagcggccgaggcacttaaaccttccaaggtgaagtaagcgccgagtgtgaagttactttcctgcaggccgccccgatcgggtagcatgccccccccccccccagtcctggggtttatttccctctccctccagccaacccccttgcgcggtctcggcgcgagcgtggctcgccggcccccccgccgccccccttcctgcctgggattccctggaaggttttgttccgccgaggtcggaggagggggccggggaagctcaggagggtatttggcgtggcttcctgtttccttaaccttcctgcgcggtgacagccgcttgccctgtaactttctgtttcggggcaagtcgcgctttcagcctggaggggaggggaggggagggggttgacagctggaggtttggggagcccctcctgaattcaccttatttggatttctaaaccttaaaaaaaattaagtgtaggctacatggaagctggtgatccaggaattcaggcgagggagccctgggtggtgaaccccagggttcttccccaccgcgcgccgtcacccccactcctgtgccccctggggtcggggagaaacgcacaggcctgccccaggtggggccacgtgac

SEQ ID NO: 9222 - DNA, 43 bp, Homo sapiens
  chr16:85731408-85731451
  hypo
cgggagcgtcacctgaggttggatccccaaacaggatccaagt

SEQ ID NO: 9223 - DNA, 178 bp, Homo sapiens; identical to SEQ ID NO: 5759
  chr16:85932121-85932299
  binary

SEQ ID NO: 9224 - DNA, 32 bp, Homo sapiens
  chr16:88757496-88757528
  hypo
cccttgggcctgcggcagatgaggtgagactt

SEQ ID NO: 9225 - DNA, 31 bp, Homo sapiens
  chr16:88757686-88757717
  hypo
ggatctgtggggtccccggcatcgtcctgcc

SEQ ID NO: 9226 - DNA, 662 bp, Homo sapiens
  chr16:88898125-88898787
  hypo
cggtgaggccgagcacggggtgcgtggggaggagagcggtgaggccgagcacggggtgcgtggggaggagagcggtgaggccgagcacggggagcgtggggaggagggtggtgaggctgagcatggggtgcgtggaggctgagcacagggtgcgtggggaggagagcggtgaggatgagcacggggtgcatgggggaggtggccagtgaggggcgcacacaccctgggatggctgcaggcctggacctgctgcccggcagaccggtggacgctgactcacctggcctgcagtgacgtgccctggccaccatgcgagggcaggctccctcatccctccttcaaacgtggtctgcttcccacacagaaaggggccgttgctgccacctgggagagaggggcccttgtcaggccactgggaccagatgtccccaggccctccccctccctccccactgagtcactgagactggtcatagggacaaagggcccggccaaggcactctggctggagtgcatgatccgagcctcggggtggctctccaggggctcatctgagatgccgcggctgcaaagtctcctggagaaagtggggacatcatgcccactgaggaaatggaaacacaaccatacggtgtcagcaagactcagagaggtacactccc

SEQ ID NO: 9227 - DNA, 179 bp, Homo sapiens; identical to SEQ ID NO: 6461
  chr16:89947451-89947630
  hypo

SEQ ID NO: 9228 - DNA, 299 bp, Homo sapiens; identical to SEQ ID NO: 6464
  chr17:1454071-1454370
  hypo

SEQ ID NO: 9229 - DNA, 208 bp, Homo sapiens
  chr17:17224346-17224554
  hypo
cggggacattctgcttcgaagggagcagctggaatgtgggggtcaaggctgtgtgtgtatatatctaaggcgggaggtgccagcacacgtttgaatgaggagtcatggaggaggatagcaagcgggcattcgggaggtgccagcacgtgtttgaatgaggagtcatggagaaggatagcaagcgggcattcgggaggtgccagcatgc

SEQ ID NO: 9230 - DNA, 112 bp, Homo sapiens; identical to SEQ ID NO: 7002
  chr17:19513145-19513257
  hypo

SEQ ID NO: 9231 - DNA, 51 bp, Homo sapiens
  chr17:19912429-19912480
  hyper
cggaaatggggtccacatctggcttgggacgcccaaacatcgattatgtgc

SEQ ID NO: 9232 - DNA, 115 bp, Homo sapiens; identical to SEQ ID NO: 6466
  chr17:2326357-2326472
  hypo

SEQ ID NO: 9233 - DNA, 126 bp, Homo sapiens; identical to SEQ ID NO: 6467
  chr17:27909050-27909176
  hypo

SEQ ID NO: 9234 - DNA, 157 bp, Homo sapiens; identical to SEQ ID NO: 6468
  chr17:27909205-27909362
  hypo

SEQ ID NO: 9235 - DNA, 122 bp, Homo sapiens
  chr17:3599052-3599174
  binary
cgggaaaaccgcgtgcacgcctgcgaattccaggaccctggagaaggacgcggcggctggcacccgccctgcccctcccccgccttcccaaaagtccgcggagaacttacacgaccaggtac

SEQ ID NO: 9236 - DNA, 392 bp, Homo sapiens
  chr17:3599244-3599636
  binary
cggtcttgtagtcgaacagcgacaggcagagccccttgcagcccgcctgccccatggcgcgctctcagccgggcttgcggaccgcccggcccacgtgcgctcatggggagcactcggtccctcggtccctgcgcgcccggcgcccgcctcggcccgtctgcgcccgctcagctgcagcccggggtgtccggcagggctgcggggcgcgggggcgggtcggggcggccttttattgacgcggttgagaaagcctcggctgggagctgggcggcggcgagcaccggaacctcagaccgcgaccttgccgctacctcttcttcctcctcctcctcctcctcccctgacacagtgacacccctgcaacctactccccagccaccggtctgggagcg

SEQ ID NO: 9237 - DNA, 329 bp, Homo sapiens
  chr17:37782857-37783186
  binary
cgacctcgcaggcctctctgaaactcccagtaccaggaccacgaaggggttaaagccagagtcctgcctccccgctgcccctctccccctccctccccctttatcctctctgctggactccatcaataatgcagcttcaagttctggggagaccgcagggggccccccagctggctccccaggccttggctctaactcccaccctcctcccagccccaggagaacacgattctccatgctcattggccagtttcccctaaaccctccctccgagcacccgggcgccagtcccaggcggaggggacgggctggggaccccaaagctggga

SEQ ID NO: 9238 - DNA, 85 bp, Homo sapiens
  chr17:40558083-40558168
  hyper
cgggtcggagatggggttgcgtaataattgcacttgggctaaaatctctgtggtcgtccaaccctgtcctgatccctttccaccc

SEQ ID NO: 9239 - DNA, 47 bp, Homo sapiens
  chr17:40558226-40558273
  hyper
cggagcgccctctggtgccgcaaatcgcacactgcccgagccaggcc

SEQ ID NO: 9240 - DNA, 268 bp, Homo sapiens; identical to SEQ ID NO: 8102
  chr17:42091861-42092129
  hyper

SEQ ID NO: 9241 - DNA, 170 bp, Homo sapiens; identical to SEQ ID NO: 8103
  chr17:42092357-42092527
  binary

SEQ ID NO: 9242 - DNA, 111 bp, Homo sapiens; identical to SEQ ID NO: 7015
  chr17:43121686-43121797
  hypo

SEQ ID NO: 9243 - DNA, 170 bp, Homo sapiens
  chr17:44928894-44929064
  hyper
cgccgcctgccccgccccacccgggtttaaagtcccgcgggcgggtggtggcggagctgcgagcttgagcggcgcgaggagatgctagagggcgcagcgccgccagcaccatgcgccccccgcccgcgctggccctggccgggctctgcctgctggcgctgcccgccgcc

SEQ ID NO: 9244 - DNA, 208 bp, Homo sapiens
  chr17:44929360-44929568
  hyper
gcgcacgcctcggaccctggccccgtccgccccggccccgcccgttcaggcgtcagtcccgctctctgatgccctctcgggatcctcacgccggtgccctgtctgccgccatcctggcctccggcgagccgtccttgcctcggactccttccccaccctccgccttcgccctgcggagcggagaccgagagggctgggtggatgggtg

SEQ ID NO: 9245 - DNA, 64 bp, Homo sapiens
  chr17:45330951-45331015
  hyper
cgctgacgacccggctggcaggcgggtcctcgtgggcgaggcgagggaggcggcgagagaggag

SEQ ID NO: 9246 - DNA, 120 bp, Homo sapiens
  chr17:45331313-45331433
  hyper
aggctccggctcggcagcgtcgcagctgccccaggatctgcgccccggtcaagttgcggacttggagccggcaaacgcggagggctggtcccgcgcgtctgcgctgggaatgcgcgtgtc

SEQ ID NO: 9247 - DNA, 90 bp, Homo sapiens
  chr17:45331675-45331765
  hyper
ccaaggcgaggtggggcttccgggggttgttcccgcgccttggcagagggatgccgctgtagcttcctgggtgagagcgtgcgcgcgcgc

SEQ ID NO: 9248 - DNA, 172 bp, Homo sapiens
  chr17:46801836-46802008
  hyper
cgagatggctcgtaccgaacctccttgccttcttcctgggtctctcgggggctggaccaatacatctgccgatgccctggccgaatggcaggcgacatcgggtcctggacccccacacgcagctcagtacccacgaggccccaggccgctggaagcctgtagctccgcggac

SEQ ID NO: 9249 - DNA, 284 bp, Homo sapiens
  chr17:48565138-48565422
  hypo
cgtgctgctcggggagctgtttcctgagacttcccctgatcttgacattcaagaagcgagcacggggccgaggcaggtgcgccatcagataacctgggaccactcaggtttctcccagctgccagggctcgtgccacttgagacatccgggcgctccctgccaggacacctcataaggcccgtgcagaggagctgggtaggagccagggccaagtcggggtggcacagatcaccttctgtgactcagtctggtctttccttcaccagatgaatcagaagctccc

SEQ ID NO: 9250 - DNA, 197 bp, Homo sapiens; identical to SEQ ID NO: 7018
  chr17:48619736-48619933
  hyper

SEQ ID NO: 9251 - DNA, 528 bp, Homo sapiens; identical to SEQ ID NO: 5996
  chr17:49021815-49022343
  hyper

SEQ ID NO: 9252 - DNA, 213 bp, Homo sapiens; identical to SEQ ID NO: 6474
  chr17:5269074-5269287
  hypo

SEQ ID NO: 9253 - DNA, 235 bp, Homo sapiens
  chr17:54673684-54673919
  hyper
gactaagggccatggtttcggaggggtccgaatctgggtgaaaatcaccacctctggcatctgcttttgggaagagagtatgcctgtgctcgggcactttctccccttgaggggtggggaggagggagaaatcggaaccggaatctttgcgctttaagattagataggggcagaaggcacgtaacccattaaagggacgtgcaaaacatcactcccaccccaccccttaaaaagc

SEQ ID NO: 9254 - DNA, 281 bp, Homo sapiens
  chr17:54674073-54674354
  hyper
cctccccacctccctgccacctctccgcgcctccctcccggcgttccttccaccccaccccccaccccccccaaccccccaagtccggagtcccggcgaatctatgctaattatttcaaacctgcgcctggtccccagcgcagtctcaatgcccccggccccgcccgccctgtccctccagcccggcgctttcttccctcccgacgcagcctcgatggctcctcatttcaatagcctggccccggagccgagccccctccccggcgctgcctccgtcagcc

SEQ ID NO: 9255 - DNA, 216 bp, Homo sapiens
  chr17:56327007-56327223
  binary
cttcggctggacgccggggaagacgcgcaacggcttccctctcccgctggtgagggcaggccgggccggggtgaaggatgggagccagaggggacgggatgcactacccaaacacgcagtgaaaggaggaggagggatcggtgggggcagcaggggtgcgcgatggagatctgcacagacccccaccttccgctagagggcagcagagctcggagc

SEQ ID NO: 9256 - DNA, 136 bp, Homo sapiens
  chr17:56743008-56743144
  hypo
agttcctaagcattaaatgatagcaaggtacagctttaaacagtaagcaacggtaacaaccctgcaaccccaaagcattcttaagaaccaaaagaaacaatgaaaaaaaaaaataaggctgggcgcggtggctcac

SEQ ID NO: 9257 - DNA, 48 bp, Homo sapiens; identical to SEQ ID NO: 7019
  chr17:57297129-57297177
  hypo

SEQ ID NO: 9258 - DNA, 146 bp, Homo sapiens
  chr17:57787150-57787296
  hypo
cgtcatgtattgtcacttcagaacttccaagtgcagaaaaagctgaagttttttgcctacgtatagttaactaaagagtagaagtagtcctatcttacttacattaaataagaaaccttattattgggccgggcgcggtggttcac

SEQ ID NO: 9259 - DNA, 132 bp, Homo sapiens; identical to SEQ ID NO: 8122
  chr17:59532387-59532519
  hyper

SEQ ID NO: 9260 - DNA, 198 bp, Homo sapiens
  chr17:72220057-72220255
  hypo
cgcaggcgagacgctaaagcagccttgtggggcggacaaagctctgagcacaaggaaggggaccaaggctgctgcaatacatggccggggctgaaataagagactcagaggacagagttctggacaggccgggaggtcacagtcgagtgcggttcccagtacagtggaagagctttgagaagtgactggtgttaaaaa

SEQ ID NO: 9261 - DNA, 248 bp, Homo sapiens
  chr17:72856466-72856714
  hyper
gctgggggaccgagccagaagtccccttggacgaccagggctgggaaaccgagtggacgaatggggtgggcatcagggcctggcgggaattcccgtcttgctcacccagcagctccttgcagggtcgcgggacgcacctgggggttcaggttgccgggtgcctttgctccgcgtgtccccgccctgcccgcgtaggcaggaaacaggagactcggggcttcccctccccgccgtcggggatcctgggc

SEQ ID NO: 9262 - DNA, 153 bp, Homo sapiens; identical to SEQ ID NO: 6482
  chr17:73808671-73808824
  hypo

SEQ ID NO: 9263 - DNA, 194 bp, Homo sapiens
  chr17:73811214-73811408
  hypo
gcctgagcctgacttgcctgtgctctgccctccagatctacaagtccaccaagtgcaacgacatgcagcagtcgggcagctgtccccgaggacccttctgcgcctttgcccacgtagaacgtatgctgttcccattgccccggggcagtgccctctcccacccctccctcgcctggctagctcaggcttaggcc

SEQ ID NO: 9264 - DNA, 185 bp, Homo sapiens; identical to SEQ ID NO: 6483
  chr17:74042063-74042248
  hypo

SEQ ID NO: 9265 - DNA, 136 bp, Homo sapiens
  chr17:74620111-74620247
  hyper
cgcggaggacagggcgccgcgagcagggcgccgagctgccgccacctgccgcccggagctggcactgcacccttttagtgcaaagcaaatccctgtcccattggtcccctccttccctaaccatgaaatctaaagc

SEQ ID NO: 9266 - DNA, 73 bp, Homo sapiens; identical to SEQ ID NO: 6484
  chr17:7493149-7493222
  hypo

SEQ ID NO: 9267 - DNA, 148 bp, Homo sapiens; identical to SEQ ID NO: 5760
  chr17:76034983-76035131
  hypo

SEQ ID NO: 9268 - DNA, 200 bp, Homo sapiens
  chr17:7690145-7690345
  hypo
cgaggagcgtgagcggagggtgcaaggtgagcggctccccggtttcctcatcacccaccatctactcagatgagaaacccgacgagaagtggatcctgttcgatggccccgtggacacactgtggatcgagaacatgaactccgtcatggacgataacaaggtgttgaccctcatcaacggcgagcgcatcgcgatgccc

SEQ ID NO: 9269 - DNA, 520 bp, Homo sapiens
  chr17:80294473-80294993
  hypo
tttgtaacttgattctctgggttcccttgcctttcatccttgcccacccacgtgactgcagcctgtggggcttcctcctaatgtcccgaagataactcgtcatccttgaccccgccgccacctcgggttctagtggaggatgtggcccgcctgccacccccacaggcaccgggtcctccaggcctccttgacccacttccaacccacctgggatgtctgcgcgttaccagcccagatgcctcttggagccttccacctgcaccccatctcctgtcccaacaggctgggcccctcctcccgggctggccaagccagtacctccgcaggggccgcaggtgcagcaccctctgtgggggagctagggggatcgctcctctgctctgcgcacttttatgaaagggcctctgaccctcccactgtcctgctcactctgcccgcgcacccccggccacctgggggccgccccccaaagccctcggcccgtggacagactcgcagcctcctgggagccgagccaacc

SEQ ID NO: 9270 - DNA, 175 bp, Homo sapiens
  chr17:80519712-80519887
  hypo
cgtagcctccgacctccacaggctggaggtgcccctagggcagggtggtggacagagtcttcctctgttggggggggggggtgcccgcactgggcgcacagatgtgagccgggctgagtcccgcgccgggtgcgcggatgtgtgctgggctgagtgtggccggccacttgtttgc

SEQ ID NO: 9271 - DNA, 63 bp, Homo sapiens; identical to SEQ ID NO: 6489
  chr17:80747754-80747817
  hypo

SEQ ID NO: 9272 - DNA, 95 bp, Homo sapiens; identical to SEQ ID NO: 6490
  chr17:80747890-80747985
  hypo

SEQ ID NO: 9273 - DNA, 212 bp, Homo sapiens
  chr17:8383605-8383817
  hypo
cggctgctagctcggcgttcagtgtgtccacctagagaggagagaggagtttagtcacttgtgcctgaggggtggcacagccctccctgggtgacgggctcctgcatgggccacctgtagagtggtcttgcggaagcggtcgttgagcagctccatgttgctctgctcctcttccagctcctcctccagctgtgcgatccgagcttccagac

SEQ ID NO: 9274 - DNA, 199 bp, Homo sapiens
  chr18:13491241-13491440
  hypo
cgatgaaagcatcccaagacctcccttttccatctgtggctgatcacctctggaacccacagctagccggctgctcctccactatcagatggcggctgtcagtcatgggcttgtcaccgagtgcatccgtcatgctcgggccatgggccggcacctgtgtgtgtgtgtccagcttaacgacagagatttttggaaagac

SEQ ID NO: 9275 - DNA, 94 bp, Homo sapiens; identical to SEQ ID NO: 5761
  chr18:13823932-13824026
  binary

SEQ ID NO: 9276 - DNA, 113 bp, Homo sapiens; identical to SEQ ID NO: 5762
  chr18:13824102-13824215
  binary

SEQ ID NO: 9277 - DNA, 311 bp, Homo sapiens
  chr18:20911034-20911345
  hypo
cgttcagcgagaggcagagccccggaacagcggtgttcactcagttaaacctcatggtctgagagagtggcaggtgtgccgttttccataattagtcacagcccctgaaggaaaagcgcgcccgtgtggggcaggaccaaaggaagaaacgcttctgcaatgctaccgggaagtctgagctcaccttctttaccttggcaccgagctgaagatctgttagaaaccctctccaaccaggactttcaggagaaacggtggccaccgcccagaataacaaggccccagcagcaaggtgtccttttcccagcaag

SEQ ID NO: 9278 - DNA, 1208 bp, Homo sapiens; identical to SEQ ID NO: 5765
  chr18:32556625-32557833
  binary

SEQ ID NO: 9279 - DNA, 65 bp, Homo sapiens; identical to SEQ ID NO: 5766
  chr18:32557864-32557929
  binary

SEQ ID NO: 9280 - DNA, 445 bp, Homo sapiens; identical to SEQ ID NO: 6006
  chr18:32558003-32558448
  hyper

SEQ ID NO: 9281 - DNA, 593 bp, Homo sapiens
  chr18:32621215-32621808
  hyper
cgtggtcacgccgcgaccctgtgcgaattgaggcgaggtgatgagttagcgggttgccatggcaacaggctggccacgtgaccagggtgctgctgccggcgctctgacgtcagctgccagagggcggggccgcaggagggcggggcgcgagcgagagctgggagaaggcagtgagcgagcaggcggcaggcacggtccgtgcggagcaggcgagcgagcgggaagacgcagccaccttcctcaccagccagcccacagcggtttgttccccttctcgggagtgcgccaatgcctgggccgacccaaaccctgtccccaaatggcgagaacaacaacgacatcatccaggataataacgggaccatcattcctttccggaagcacacagtgcgcggggagcgttcctacaggtaatggggctggcacgagagcagcgccggggaccgccgtgagggcgcgcggaaatccagcccgttatataatggagcagacactgcctgcgacccctgctgcaggcatgcatttgtgaaggcggttgtgattatttggtatctgtttccatgtgtcatgttgggtttgcattgaggctccgc

SEQ ID NO: 9282 - DNA, 201 bp, Homo sapiens
  chr18:35147249-35147450
  hyper
cctgccgtggggaccgggggtcgagccgcccggtccggaccccgccggactccccgccaggcccactggggctggcatctcggctgcgcgggaaagggagtggcaggcgcggagccgggagcagggtccgagcggccccgcctgtaggggtgaatactggtggtgaacttggctggggtagcagattttcacgttaatgat

SEQ ID NO: 9283 - DNA, 80 bp, Homo sapiens; identical to SEQ ID NO: 6007
  chr18:44335955-44336035
  hyper

SEQ ID NO: 9284 - DNA, 73 bp, Homo sapiens
  chr18:47087075-47087148
  hyper
cgaggtcggaacaggatctgctggctccggctcggtttcctcgcacaggtctctccagctggatcctcgacgc

SEQ ID NO: 9285 - DNA, 358 bp, Homo sapiens
  chr18:47087704-47088062
  hyper
ttcccaacatccctaagccgccgatacattatcacccacgtattgcggacgagagaaccgcctcggagaagctggctggctcgcttggagttttgcagctagtggcggagcgagcattccgagcaggtactgtgcgatcctccagcgccggccgcagctcacagccccttagctccgccgggttattgtgcggccgcgccttctgcacctgttgcggccctcgctaggcgggaagggagggagaagaggaggacaaaggggatgaccaggtggctctcccccgacggactcccggcccagggagcggatagaccactcccagagagagtgtggctttgagccttggagaggatgctct

SEQ ID NO: 9286 - DNA, 242 bp, Homo sapiens
  chr18:47088502-47088744
  hyper
cctgccaccgcccgggctccgtgccgccaagttttcattttccaccttctctgcctccagtcccccagcccctggccgagagaagggtcttaccggccgggattgctggaaacaccaagaggtggtttttgttttttaaaacttctgtttcttgggagggggtgtggcggggcaggatgagcaactccgttcctctgctctgtttctggagcctctgctattgctttgctgcggggagcccc

SEQ ID NO: 9287 - DNA, 196 bp, Homo sapiens; identical to SEQ ID NO: 7061
  chr18:47339411-47339607
  hyper

SEQ ID NO: 9288 - DNA, 401 bp, Homo sapiens; identical to SEQ ID NO: 6009
  chr18:47339758-47340159
  hyper

SEQ ID NO: 9289 - DNA, 50 bp, Homo sapiens; identical to SEQ ID NO: 6010
  chr18:55104759-55104809
  hyper

SEQ ID NO: 9290 - DNA, 280 bp, Homo sapiens; identical to SEQ ID NO: 6011
  chr18:55105185-55105465
  hyper

SEQ ID NO: 9291 - DNA, 57 bp, Homo sapiens; identical to SEQ ID NO: 6012
  chr18:55106090-55106147
  hyper

SEQ ID NO: 9292 - DNA, 116 bp, Homo sapiens
  chr18:5896132-5896248
  hyper
cccgccgggacgggcgcaccgcgggacgcttggaagcctctgccagatgcgctcgcgctccagccccgccgggctttgtgaccagcctgaccgggacccggcagctggggctcctc

SEQ ID NO: 9293 - DNA, 128 bp, Homo sapiens; identical to SEQ ID NO: 7066
  chr18:60609821-60609949
  hypo

SEQ ID NO: 9294 - DNA, 101 bp, Homo sapiens; identical to SEQ ID NO: 7067
  chr18:60985398-60985499
  hyper

SEQ ID NO: 9295 - DNA, 75 bp, Homo sapiens; identical to SEQ ID NO: 7068
  chr18:60985973-60986048
  hyper

SEQ ID NO: 9296 - DNA, 74 bp, Homo sapiens
  chr18:635725-635799
  hypo
cgcgccgttcagagaaaagggaggatggaattgttacaaccgtttctgtcgcccaggctggagtgcagtggcgc

SEQ ID NO: 9297 - DNA, 113 bp, Homo sapiens
  chr18:9196896-9197009
  hypo
cgcttacctgagaagagggtgcttatgtgcctttgggatagctatttcagattgaactcttctcgcatattgttaaaagtttctttgctagtcatttttaaattacattactc

SEQ ID NO: 9298 - DNA, 81 bp, Homo sapiens; identical to SEQ ID NO: 7073
  chr18:9514129-9514210
  hypo

SEQ ID NO: 9299 - DNA, 229 bp, Homo sapiens; identical to SEQ ID NO: 8179
  chr19:1004547-1004776
  hypo

SEQ ID NO: 9300 - DNA, 279 bp, Homo sapiens; identical to SEQ ID NO: 7074
  chr19:1005441-1005720
  hypo

SEQ ID NO: 9301 - DNA, 631 bp, Homo sapiens
  chr19:10530654-10531285
  binary
cgacactgaaaacacagacaaccctcggaagaggccacgtgcgcgcacatcccgccccgggcccgcaccatcactatcctccgacgcacagacaggagatcccacacactctgccgccgcccgctgcaggtaccgcgccggtggcactaggaccactcctcaaaaactgccccccgccaggggtagcggcgaggacacgccaacaccggactccgccctcgccatgatggaccgactgactgacactctggcaaccagtccggtgtctgcttccagatcggattaaccgtttaactccttcgtgcctgtgcgcgccgcggccaagcagggtgctttgaagacagacgagttccagcgccccctcccagcccggagcggggatctgcgtgggcgggaagggcccccctccttaggtagctgccccccgctggcccggacggaggaggaggggggcggcgctgacagccgcggcgggcggggggcggggaggggcgggacggggcggaggagccggggctggcgccgagcgggccgcggaacgcggagcgcggagcgcggagagcgccgccgggcactgagcagagctccaggcgccgaaaggaagctgcagagcccggcccgggggcgattg

SEQ ID NO: 9302 - DNA, 116 bp, Homo sapiens; identical to SEQ ID NO: 5769
  chr19:10691764-10691880
  binary

SEQ ID NO: 9303 - DNA, 177 bp, Homo sapiens; identical to SEQ ID NO: 6503
  chr19:11003087-11003264
  hypo

SEQ ID NO: 9304 - DNA, 319 bp, Homo sapiens
  chr19:1128115-1128434
  hypo
cgagagagtgagactccgtctcaaaaaagaaaaaaataaacaagcaatgggtgagaaacaccaaccctcagggccacgcaggacggcgtctgacttctgcagcacctgaagggcagcaatgctgcaggaactctgagcagctcgggtctggggtgagcctggtgccatgccctgtgccggaggcaggggcgggggcagccacgcccagaggtggggctcgccatggggatgacacacacacacgcgctgcccagtgaaggagatgtatgtacatcatttcatttttttttttttgagacggattcttacactgtcgccc

SEQ ID NO: 9305 - DNA, 166 bp, Homo sapiens; identical to SEQ ID NO: 6017
  chr19:11805261-11805427
  hyper

SEQ ID NO: 9306 - DNA, 369 bp, Homo sapiens; identical to SEQ ID NO: 6018
  chr19:11805597-11805966
  hyper

SEQ ID NO: 9307 - DNA, 608 bp, Homo sapiens
  chr19:11877720-11878328
  hyper
cgctgcccgagatcgcttcttccgttactcagtgcccgggggagggacctggcgcactatccaatcagggccgcggggcggggtcgtgagaactgtcaatcaggcgcactgaccggaggagggtgcaaggttcaaagagcccgccgagtcttctccacgcccctgcactgggctccgggttctgtcactgagagacgccctggaacgtctgtggcagcttctgtctcgctgggacccgcactgacagcgggaggcagagggaggaacctggacgccggaagccgggaaatggtgagtgtgtgaggtctggtgtcccgacgcgtgagaggagagactggttggaaccggccggaaccggctgtggtggcaccaggtcttccccgccggcgacaccctggcgcagctcggccctcggttccctcggccgcacgatggggctggggcggcagccgggaccccgggcgtcctgtcccgtccctgcgcggccactgcggccctggccctggaggcctgtctgggcagctccgcgcccgcagtcctgcgtctccccagattgtgcggctgtaaccggcacaggttcgcggcccgagtcactgcaccgagacgcc

SEQ ID NO: 9308 - DNA, 161 bp, Homo sapiens; identical to SEQ ID NO: 6019
  chr19:11909173-11909334
  hyper

SEQ ID NO: 9309 - DNA, 61 bp, Homo sapiens; identical to SEQ ID NO: 6020
  chr19:11909732-11909793
  hyper

SEQ ID NO: 9310 - DNA, 50 bp, Homo sapiens; identical to SEQ ID NO: 6021
  chr19:11959378-11959428
  hyper

SEQ ID NO: 9311 - DNA, 172 bp, Homo sapiens
  chr19:11999219-11999391
  hyper
catttgagcaaacagcgattcacgaatgagacacacccagtcctggcttgtggtttgtcaacggaaaaagccaaactatgtaaaataaagaagtttattcggagccgaataggagagaccttggccgagggaaaaacaaccccaagaagcctggagtaagtggtcccgaggc

SEQ ID NO: 9312 - DNA, 255 bp, Homo sapiens; identical to SEQ ID NO: 6022
  chr19:12075818-12076073
  hyper

SEQ ID NO: 9313 - DNA, 333 bp, Homo sapiens
  chr19:12098300-12098633
  hyper
cggctggaatagcagcgaccggctctgcagcgccctgttacccggggcttctgctgtcactcagggctgagggggcggggtaggatgccctatccaatcggggtgctggggcggggccctgccaactgtttaatccgccggaaggagggcgcagcattgccggtcttctcattgcctggctgctagaggaaacccgaagtcgggattctttctttcctgctctgagagggaccaggtccctcctccgtagcttttgtctctctattgcctgcgccgtgtcctggactgctcacgggagttctgcaggagacgccggaatatctggaagctgaa

SEQ ID NO: 9314 - DNA, 31 bp, Homo sapiens; identical to SEQ ID NO: 6023
  chr19:12163025-12163056
  hyper

SEQ ID NO: 9315 - DNA, 118 bp, Homo sapiens; identical to SEQ ID NO: 6024
  chr19:12163331-12163449
  hyper

SEQ ID NO: 9316 - DNA, 443 bp, Homo sapiens
  chr19:12250823-12251266
  hyper
cggcccagccgcaccctgcggccgaggggacgcagggacgagctgagacagagggattcgggtcccagatccaggaggcgcggcgaggaggcccagatcccaccacagccgcttccggccggttccacccagcccctcccccgtctggggactccggccccatacactcaccatttcccggcttctgggtgtcccggtgtcctctctagggctcccgtgaatagtgcgggtcacggtgcaggcggcagagcgacagaagttgtggcagagggacccggggcctctcggagtaggaaatctggtatcccgacaacaacctgcatagcaacaaaagtagaagctggaatgggcctcctccttccggacggaccgttggccgggctccgccccggcgcttctgattggacaaggtacaaggccccgccccctcagaactgagtgac

SEQ ID NO: 9317 - DNA, 198 bp, Homo sapiens; identical to SEQ ID NO: 6504
  chr19:1226490-1226688
  hypo

SEQ ID NO: 9318 - DNA, 317 bp, Homo sapiens; identical to SEQ ID NO: 6505
  chr19:1226828-1227145
  hypo

SEQ ID NO: 9319 - DNA, 227 bp, Homo sapiens; identical to SEQ ID NO: 6025
  chr19:12551198-12551425
  hyper

SEQ ID NO: 9320 - DNA, 391 bp, Homo sapiens; identical to SEQ ID NO: 6026
  chr19:12551485-12551876
  hyper

SEQ ID NO: 9321 - DNA, 97 bp, Homo sapiens
  chr19:12595013-12595110
  hyper
cggtcgtgggtttgagatctggcttcccatacacttggaaaccttgagaaacgagtcctcccttgggaagaaaagagggactgaggaccccacacaa

SEQ ID NO: 9322 - DNA, 485 bp, Homo sapiens
  chr19:12595307-12595792
  binary
ctgcggccaaagagaccgagggccgagctgcgccaggaggactcgggtccacagacccgggagacaacggcggggaggcctgggtcccaccacagccagatccggccggtttcaacccgcccctctctcccatctcaagacccccagccccgcacacttaccatttcccagactctgggatgtcctggtgttctgtttacctctcccgcggccagcacaggtcctacctccacctgaggcccttcctccacctgagggccttctggggtgaggagaccccagagcggagcgcagcggctggtagccacgccctcgccgtttgcgcagcgcccctccgcccgccttcccggcggcgcccctgattggacattgcactcttggacccgccttcgttgcctgagtgacagctagtagggaagtcgcgtctctaagcaacctgcattcgtccggggtcaggaatctgttcccctgccacggatatttgc

SEQ ID NO: 9323 - DNA, 224 bp, Homo sapiens
  chr19:12721448-12721672
  hyper
cgaggggtcgctccatctggaaactgagactggaattcctgcgcatccctgtccccgcatccagaaacactgcaggaagacttccgtgtccgacccgagatccggaacaatttctgcttcaacacaattgtccacggagggcaccagttccgtcccaccggcggaagcgagatctgcctagctactagacctgctgcctagctgtcattcggacaaaaaggggc

SEQ ID NO: 9324 - DNA, 112 bp, Homo sapiens
  chr19:14815869-14815981
  hypo
cggggctgttcctgaggatgcagctggtgccctccatagaagagagggagacaccattgactcgagaggaccggccagctctccaggagccgccttggtctctgggatgcac

SEQ ID NO: 9325 - DNA, 439 bp, Homo sapiens
  chr19:15271811-15272250
  hypo
cgggggccgctcctgcggggagacgggggtccctgggttgagcagctggggtcccggcgccagtggcagcaggaacgaggggcctggaggggcaggtgggggcagccgggcccaatcgaggggcacagccacagggttcagcaggcccaggctgagtacacatcctccagggggctggcgccctagacccgcccggcctgggccaccaagctgtgccagagacactgcagtggcagtggcagctgcatagggcccctcaagggggaagccaccaggggaagcagggggcccaccgaaaggccgcggggagtccagcgagtccacgggcgacagcgtgaccgagctgtcagccagggggcccgggcaggccagcgtcagcttcttgccccgcccccggggcccctgcggccccagccccgccttcccggggggcctcctg

SEQ ID NO: 9326 - DNA, 803 bp, Homo sapiens
  chr19:17837853-17838656
  hypo
cgaatgcccaggcggcacccaagccccgcaaagcgcccagcacgtcccactctggcttcccgccggtggcaaatggaccccgcagcccgcccagcctccgatgtggagaagccagcccccccagtgcagcctgcggctctccggcctcccagctggtggccacgcccagcctggagctggggccgatcccagccggggaggagaaggcactggagctgcctttggccgccagctcaatcccaaggccacgcacaccctcccctgagtcccaccggagccccgcagagggcagcgagcggctgtcgctgagcccactgcggggcggggaggccgggccagacgcctcacccacagtgaccacacccacggtgaccacgccctcactacccgcagaggtgggctccccgcactcgaccgaggtggacgagtccctgtcggtgtcctttgagcaggtgctgccgccatccgcccccaccagtgaggctgggctgagcctcccgctgcgtggcccccgggcgcggcgctcggcttccccacacgatgtggacctgtgcctggtgtcaccctgtgaatttgagcatcgcaaggcggtgccaatggcaccggcacctgcgtcccccggcagctcgaatgacagcagtgcccggtcacaggaacgggcaggtgggctgggggccgaggagacgccacccacatcggtcagcgagtccctgcccaccctgtctgactcggatcccgtgcccctggcccccggtgcggcagactcagacgaagacacagagggctttggagtccctcgccac

SEQ ID NO: 9327 - DNA, 133 bp, Homo sapiens; identical to SEQ ID NO: 8212
  chr19:17958343-17958476
  binary

SEQ ID NO: 9328 - DNA, 306 bp, Homo sapiens; identical to SEQ ID NO: 6515
  chr19:1977026-1977332
  hypo

SEQ ID NO: 9329 - DNA, 233 bp, Homo sapiens; identical to SEQ ID NO: 6516
  chr19:1978023-1978256
  hypo

SEQ ID NO: 9330 - DNA, 116 bp, Homo sapiens; identical to SEQ ID NO: 5770
  chr19:1979018-1979134
  binary

SEQ ID NO: 9331 - DNA, 262 bp, Homo sapiens; identical to SEQ ID NO: 5771
  chr19:19843330-19843592
  binary

SEQ ID NO: 9332 - DNA, 47 bp, Homo sapiens; identical to SEQ ID NO: 5772
  chr19:19844044-19844091
  binary

SEQ ID NO: 9333 - DNA, 243 bp, Homo sapiens
  chr19:19887245-19887488
  hyper
cgcaccaccccgatgcatactgggattgtagttctgaagctacctacccatgggctgagagcagtaaagagactacaactcccagcataccaggcgcggcgcgcaccgccctgccccttcctctggggttgcgaaccgcccccgagcctggtacaggctgggattgtagtcctgcagccttgtggccgaagggctgggactggccatgagattacatgtcctagcatgctcagccaggcgcgc

SEQ ID NO: 9334 - DNA, 75 bp, Homo sapiens
  chr19:19932106-19932181
  hyper
cgaccttcccgtggcccctgaacaatctgggaaagacctgtgggtgcagagctgcccggagagggttccacgcca

SEQ ID NO: 9335 - DNA, 694 bp, Homo sapiens; identical to SEQ ID NO: 6027
  chr19:19976556-19977250
  hyper

SEQ ID NO: 9336 - DNA, 35 bp, Homo sapiens; identical to SEQ ID NO: 6028
  chr19:19977294-19977329
  hyper

SEQ ID NO: 9337 - DNA, 118 bp, Homo sapiens; identical to SEQ ID NO: 6029
  chr19:20011652-20011770
  hyper

SEQ ID NO: 9338 - DNA, 54 bp, Homo sapiens
  chr19:20162601-20162655
  binary
cgatcccagacccttgagggtctgtgagaaatcaaactttcggcactttggaag

SEQ ID NO: 9339 - DNA, 76 bp, Homo sapiens
  chr19:21512126-21512202
  hyper
cgagaccggagctccggctgcagcaagagacaaaggccgcgccaaacccggaagccgccctgtccggtccagctgc

SEQ ID NO: 9340 - DNA, 120 bp, Homo sapiens
  chr19:21541712-21541832
  hyper
cgacgctgggctgggaactgtccaatcaggcacgcagcttgagcggagaggacggcttccgggatgtggcgggatttgtccgcttctttgtctttggctgccgctggaactccgggtctc

SEQ ID NO: 9341 - DNA, 173 bp, Homo sapiens
  chr19:21542078-21542251
  hyper
cggcctcagtcgccttcagccataagatggcggttgcgccgacagcccggcccccgggcgtcctgtctcttccctgcatagtgactgtgcccttgcctggagccctctctggggaatctctgcacccgcagcgccgcttctctaccggattgtgcagggaccgtgggagggtc

SEQ ID NO: 9342 - DNA, 309 bp, Homo sapiens
  chr19:21579832-21580141
  hyper
cgggcccttaaaccgtatccaatcagacacgcagaactgggaaccgtccaattaggcacacatttggagcggcgaggacggcttccgggatgtggctgggccattgtttctctctgctgccggagctccaggtctacccttcactgctctgtgtcctcagcgtgtgtggcttcgtgacctgaagatactgggaaatccatagctaagatgccaggaccccctgaaagcctagacatggtgagagtgctgggtccgacatcacgagagaggggaaggagttgctcggaaccggtgggaagtggctgtggc

SEQ ID NO: 9343 - DNA, 104 bp, Homo sapiens
  chr19:21580233-21580337
  hyper
cggctgcgccaacagccggggccccgggcgtcctgtctcttccctgcactgtgactgtgccctgcctggagtcctctctggcagttctgcacccgcagcgccgc

SEQ ID NO: 9344 - DNA, 159 bp, Homo sapiens
  chr19:21688303-21688462
  hyper
cgcttcattctgcccagcaactgatcaccctctgtcactcagggcctgagagggcgggtcttaaacattatccaatcaggcacgcagctggagcgacaggacggtttccggaatatggcggggcgtttggctcttgctgcagccagagctccaggtctc

SEQ ID NO: 9345 - DNA, 77 bp, Homo sapiens
  chr19:21688738-21688815
  hyper
cgactgtgctgacagccgggccccgggcgtcctgtcttccctccgcagtgactgtgcctgacgtgtagccctgtctg

SEQ ID NO: 9346 - DNA, 61 bp, Homo sapiens; identical to SEQ ID NO: 6030
  chr19:22019028-22019089
  hyper

SEQ ID NO: 9347 - DNA, 89 bp, Homo sapiens; identical to SEQ ID NO: 6517
  chr19:2204172-2204261
  hypo

SEQ ID NO: 9348 - DNA, 219 bp, Homo sapiens
  chr19:2273763-2273982
  binary
cgccgtgttactggccgcccctagggacctgcagcgccgttcggggcagcagcacttccggcggggtcgtggcctggagcgcttccgggtctgcaaccccgccgtctgcccggccgcagcgccacctgccggccgcatccgggagcgccacccggaaaatcagggccaggcctggccgggaaaccggctggaaagaggaggaaaggaggaactcgaaaa

SEQ ID NO: 9349 - DNA, 102 bp, Homo sapiens
  chr19:23432614-23432716
  hyper
cgtgaaccaaagcgcccggcctgccataaatttttaatagggggaaagatgaactggaaacgcagcggactaaagcccttcccattcatgaacccgctcccc

SEQ ID NO: 9350 - DNA, 130 bp, Homo sapiens; identical to SEQ ID NO: 6031
  chr19:23432833-23432963
  hyper

SEQ ID NO: 9351 - DNA, 121 bp, Homo sapiens; identical to SEQ ID NO: 6032
  chr19:23433023-23433144
  hyper

SEQ ID NO: 9352 - DNA, 118 bp, Homo sapiens; identical to SEQ ID NO: 6033
  chr19:23433296-23433414
  hyper

SEQ ID NO: 9353 - DNA, 106 bp, Homo sapiens; identical to SEQ ID NO: 6034
  chr19:23456510-23456616
  hyper

SEQ ID NO: 9354 - DNA, 216 bp, Homo sapiens; identical to SEQ ID NO: 6035
  chr19:23456881-23457097
  hyper

SEQ ID NO: 9355 - DNA, 39 bp, Homo sapiens; identical to SEQ ID NO: 6036
  chr19:23577711-23577750
  hyper

SEQ ID NO: 9356 - DNA, 68 bp, Homo sapiens; identical to SEQ ID NO: 6037
  chr19:23578240-23578308
  hyper

SEQ ID NO: 9357 - DNA, 68 bp, Homo sapiens; identical to SEQ ID NO: 8228
  chr19:23598868-23598936
  hyper

SEQ ID NO: 9358 - DNA, 702 bp, Homo sapiens; identical to SEQ ID NO: 6038
  chr19:24216103-24216805
  hyper

SEQ ID NO: 9359 - DNA, 601 bp, Homo sapiens; identical to SEQ ID NO: 6039
  chr19:2461998-2462599
  hyper

SEQ ID NO: 9360 - DNA, 73 bp, Homo sapiens; identical to SEQ ID NO: 6040
  chr19:2702445-2702518
  binary

SEQ ID NO: 9361 - DNA, 453 bp, Homo sapiens; identical to SEQ ID NO: 5773
  chr19:2702553-2703006
  binary

SEQ ID NO: 9362 - DNA, 770 bp, Homo sapiens; identical to SEQ ID NO: 6041
  chr19:28284358-28285128
  hyper

SEQ ID NO: 9363 - DNA, 187 bp, Homo sapiens
  chr19:30155060-30155247
  hypo
cgctgcccgttctcagcactcggtatgcaggggtgaaccagaagaaagtcctgtctgaacacgagaagaaattactgtctagcccgtggggctcacagcctgggtgggaggcaagccaccagcatgacttgtttatgagcattccacagaagccacagcctggtaggcagccctgaatcccacgagc

SEQ ID NO: 9364 - DNA, 61 bp, Homo sapiens; identical to SEQ ID NO: 8229
  chr19:30718934-30718995
  binary

SEQ ID NO: 9365 - DNA, 1016 bp, Homo sapiens
  chr19:3490855-3491871
  hypo
cgctctgaggtctgcttgtccctccctggcccctgtgccctacctgacccactcagggaccaccaccctgtccctacccaggcctcggggtgggggagtcagaggcccccagaccctgtgtcccattcctagtgaagctgaagccaccataacgtcagcctcttcccagagccccagctctgcccctggcttccctcgcgatcctcccctggctcccctcgcgatcctcccttggcttccctcgcgatcctcccctggcttccctcgcgatcctcccctggcttccctcgcgatcctcccctggcttccctcgcgatcctcccctggcttccctcgcaatcctcccctgtcctgagccgggcatcccagagcctcccgcagagtcccaccccaagcctggaaacttccacgctacagccctgcgccaggccccgaggagcagtcaggggactcagggagtcacagcacaacggcagctcctcggtcccagacggaggagggggacagcaaccatgcgcccagcaagacacaagcgatgacaccgatttacacacacccggtttagacgccaaagctctgcgggggaggagcggccctcaagagtcctccgggagctccgggtgagggtggggccctaggagggggccccgcgcagctgctccaggccgtccgcgtactggaaggcccgcccggtctcgtgctcatacatgtccagagccacctcgcagctctcacgcaccacgcgctctgggtcgtccgcgtgagcctgcagcgcggccaggcaggcgggccgggcaatggcgcccagggcctccgcgcactcgtgccgcaccatggggttctcggtgcatcgggccagggcggccgccagctggggcaccgccgcctcgtgctgcagctgtcccaggacgtagccgacctcgtggcggaagagggcgctcccacagtgcagacctgcaggggagagggacactcgctggggccaggaggggtgggaaggggagctctgtcttttc

SEQ ID NO: 9366 - DNA, 52 bp, Homo sapiens
  chr19:34963061-34963113
  hypo
cgcgtgccctgtcctcaccctgctttgtagacacagttaacaatgtgttccc

SEQ ID NO: 9367 - DNA, 134 bp, Homo sapiens
  chr19:3571360-3571494
  hypo
cgtgagccactgcgcccggcccatggcggataatattctgttgtaaggatatatcccgtcatcgatccatgcatcattagcagacgtttgagttgttttcactttttggctattatgaatcacgctgctaccga

SEQ ID NO: 9368 - DNA, 381 bp, Homo sapiens
  chr19:3576162-3576543
  hypo
gggagctggagccggctgagcagcgctgacctagggtgcagggcgtggtccctggaggcctgggaggctgaccctgcccttcccctcccccgccagaagactcgagctctgggctcatgaacactctcctgaatggacacaaggtaagcgaccttcttcctctcaaagcacctgggggagaaaggtctggaggcttctagaaccctgagtcagagccagtgctcgcccagatgtgtgcaagcaggggcggtgccactgcaccgtgggatcgctgttgattgtactcccaccggggtgtcccaggagaccctcctaggcttggggcacacccagagagcgtggctgcctcctaccaccagtaaattgccaccttgtcccttc

SEQ ID NO: 9369 - DNA, 566 bp, Homo sapiens
  chr19:36592549-36593115
  hypo
cgactctgtccttcagactcgggggagtcagaggccgacctggagtgcagcttcgcagccatccactccccagctccgcctcctgaccctgcccctcggtttgccacgtcgctgccccatttcccaggtaagcaggggccagacacgcaggggactcgctgctcgggcctggcttagggccagtcacaatgtctaagcacaggccctgcacttggagcccactgagcctggaagacggggatccctgcttctcagcctgcgggcaacagggcagggatgggtggggcccgctttctccatttcaggtggcgtctgctgtgactcatggtgttggctcctcttgtccctcccctccttccctgtcaggatgcgcaggtcccacagaagatgagctgtccctgcccgagggacccagcgtccccagcagctccctaccccagactccggagcaggagaagttcctccgccaccactttgagacactgactgagtccccctgcagaggtagggccctgcctcacccacacctgccgaggccgtctgtgcagcctgggcacagcattggc

SEQ ID NO: 9370 - DNA, 209 bp, Homo sapiens
  chr19:36980725-36980934
  hyper
cggacccgtcctactgcccccaggcgctggacagcctcagaaagaggacaagtctgcatggaaagataatcgcacaactgagccttctgggagatgtagttcggagctgggaaggcggttggaccctccgaaagtcatcttaattgctctcacagataagccggtgctgggctgccggcctgagtactgtgcgcccagagtgcgcaggc

SEQ ID NO: 9371 - DNA, 105 bp, Homo sapiens; identical to SEQ ID NO: 6042
  chr19:37096594-37096699
  hyper

SEQ ID NO: 9372 - DNA, 142 bp, Homo sapiens; identical to SEQ ID NO: 6044
  chr19:37342189-37342331
  hyper

SEQ ID NO: 9373 - DNA, 35 bp, Homo sapiens
  chr19:37406731-37406766
  hyper
cgtgatcctcctgcctcggcctcccaaacacaacc

SEQ ID NO: 9374 - DNA, 170 bp, Homo sapiens
  chr19:37407590-37407760
  hyper
ggtgattgtgatatttggttgcgcgggattatgatgaaatgtgtgatatgtgtgtgattatgattaaggctgtagcgagtgtgaacgtggcgaagtgtgcgtgattgtaatatgtctagtagttcttgtcttgagctggcttttctgtagcatttggcacagttggtaac

SEQ ID NO: 9375 - DNA, 296 bp, Homo sapiens; identical to SEQ ID NO: 5774
  chr19:37568994-37569290
  binary

SEQ ID NO: 9376 - DNA, 182 bp, Homo sapiens; identical to SEQ ID NO: 5775
  chr19:37569554-37569736
  binary

SEQ ID NO: 9377 - DNA, 187 bp, Homo sapiens
  chr19:37708883-37709070
  hyper
cgtgcagggccagcgtcctacggcagtttcactctgagcctgtgtctggatcacggagacgcggggtagcggttcggagtgcggagcagggatgtccccgagctgtgcagctgcaagaacccgaaaaaacaggcgccatcttctcggcgcggtcctactccggactgtatttcccagaggcccccgc

SEQ ID NO: 9378 - DNA, 84 bp, Homo sapiens
  chr19:37957588-37957672
  hyper
cgctggcacaaacgccaagtctcacacatctacacccacaagcacaccctaccttgtatccacagtttttcattcattcaagat

SEQ ID NO: 9379 - DNA, 38 bp, Homo sapiens; identical to SEQ ID NO: 6048
  chr19:38182720-38182758
  hyper

SEQ ID NO: 9380 - DNA, 188 bp, Homo sapiens; identical to SEQ ID NO: 6049
  chr19:38210751-38210939
  hyper

SEQ ID NO: 9381 - DNA, 296 bp, Homo sapiens; identical to SEQ ID NO: 8234
  chr19:38701255-38701551
  hyper

SEQ ID NO: 9382 - DNA, 86 bp, Homo sapiens
  chr19:38719834-38719920
  binary
cgagctttcagccccggccggggcaggcccggcacctccggagaccctgagggagagatggaggagagggaaacccctacccccac

SEQ ID NO: 9383 - DNA, 264 bp, Homo sapiens
  chr19:38719956-38720220
  hypo
gcgccgcattccttcactgacagcgacaaagaagaggcgcccccgcgaccctggaggggctcccgcccccaaccccagggggcgacagggggtggggacccccggggcaagggttcgcgctgggggcccccattcaactacggtccgcgcgctgcgtccccctcctcagccccagggcgggcgggggaagggctcctggtgggggggtctggacagggggcggggacggcagggacactcacgacttgagcgggttctgaatgg

SEQ ID NO: 9384 - DNA, 187 bp, Homo sapiens
  chr19:38720439-38720626
  binary
cgcgcggcggcgcccgagggcgcccctgcccggactacacgtcccagggggcgtcaggaggaccgcgctcccattggctgctggggatacagggaggggcggggctccccccagagcatctttcctccctccctgggagtgctcggtctccaactcgggatctccaccctccaggcaccgcgggcgc

SEQ ID NO: 9385 - DNA, 246 bp, Homo sapiens; identical to SEQ ID NO: 6520
  chr19:39277459-39277705
  hypo

SEQ ID NO: 9386 - DNA, 86 bp, Homo sapiens; identical to SEQ ID NO: 7107
  chr19:39289891-39289977
  hypo

SEQ ID NO: 9387 - DNA, 57 bp, Homo sapiens; identical to SEQ ID NO: 6521
  chr19:39329516-39329573
  hypo

SEQ ID NO: 9388 - DNA, 571 bp, Homo sapiens; identical to SEQ ID NO: 8246
  chr19:4094519-4095090
  hypo

SEQ ID NO: 9389 - DNA, 121 bp, Homo sapiens
  chr19:42498155-42498276
  hyper
cgcacacccaatgtcaccggccccacaatgtcacacggaagcggcgcccagccggctcagcacctacccccatcttggcggctccgcggcgagagagccaggcgggcggggcggggacctc

SEQ ID NO: 9390 - DNA, 270 bp, Homo sapiens; identical to SEQ ID NO: 6051
  chr19:44529438-44529708
  hyper

SEQ ID NO: 9391 - DNA, 48 bp, Homo sapiens; identical to SEQ ID NO: 6052
  chr19:44529774-44529822
  hyper

SEQ ID NO: 9392 - DNA, 68 bp, Homo sapiens; identical to SEQ ID NO: 6053
  chr19:44711963-44712031
  hyper

SEQ ID NO: 9393 - DNA, 84 bp, Homo sapiens
  chr19:45903713-45903797
  hypo
cgcctctgtctgggaagtcgaaggaacagaacctgttcaggctggcggctcatttggatgaacagggagtgtgtgaccttgggc

SEQ ID NO: 9394 - DNA, 38 bp, Homo sapiens
  chr19:45931075-45931113
  hyper
cggggcctctctgctccgccagaacccagcgggggcag

SEQ ID NO: 9395 - DNA, 57 bp, Homo sapiens; identical to SEQ ID NO: 6054
  chr19:46929939-46929996
  hyper

SEQ ID NO: 9396 - DNA, 168 bp, Homo sapiens; identical to SEQ ID NO: 6522
  chr19:47482472-47482640
  hypo

SEQ ID NO: 9397 - DNA, 259 bp, Homo sapiens
  chr19:47523724-47523983
  binary
ctggggggatccctgggcaggacacaggatgggggtccctgccctctgccccctgcctccttagcccagccgggaaaacagggtgcagatccggggagtcagacaccggggatgggcttggggggcgggtcctcggggcagagggctccgggggctggggcgtgcgtgcctggcccgggaggcgcccgccccccgcccggcttgggcatgcttggcacgcagcgcgcgggccggttcgatccgtatgcgcgccgcgtgc

SEQ ID NO: 9398 - DNA, 196 bp, Homo sapiens
  chr19:49014625-49014821
  binary
cgggccctgctgggctgcgggaagacgcgcaccaggtgacggggcaggacccgcagacagacccctgggcagacagcgaggccgccgcgggggtgggggccaccggacagactgatggcccgacagactcaccggggtgggccggggacgccaggcagccggaggcggagacggccgcaaggaggatgagggcgcc

SEQ ID NO: 9399 - DNA, 457 bp, Homo sapiens; identical to SEQ ID NO: 6524
  chr19:49971410-49971867
  hypo

SEQ ID NO: 9400 - DNA, 219 bp, Homo sapiens; identical to SEQ ID NO: 5779
  chr19:50553779-50553998
  binary

SEQ ID NO: 9401 - DNA, 231 bp, Homo sapiens
  chr19:51161455-51161686
  hyper
gtggttggttttagagcgctgagggacgtggccaagagtgaaagcatgaatgggcggggcccggggcgactagataagagcgtggttggtgtaagggtgctgaggggcgggccccggagccactagataagagcgtggttggtgtaagggtgttgtgaggcggggcgacagtggagtgacagcttgggggggcggggccaggagggactagataagagcgagattggtgca

SEQ ID NO: 9402 - DNA, 88 bp, Homo sapiens
  chr19:51925272-51925360
  binary
gtctttgtgtcctttgagctccggacctggtcctgggttcctcccacctcgggctgtgctgcagttcaggacgccgcccccagggggc

SEQ ID NO: 9403 - DNA, 78 bp, Homo sapiens; identical to SEQ ID NO: 6055
  chr19:52531282-52531360
  hypo

SEQ ID NO: 9404 - DNA, 208 bp, Homo sapiens; identical to SEQ ID NO: 5780
  chr19:52531884-52532092
  binary

SEQ ID NO: 9405 - DNA, 32 bp, Homo sapiens
  chr19:53030704-53030736
  binary
cgctctcgcctccacaacctaaaaacagagac

SEQ ID NO: 9406 - DNA, 396 bp, Homo sapiens
  chr19:53030790-53031186
  binary
cgccctctgccggttctaaagggcaaggtctcagcgcctcgcgccccgccgctacctcgcccaggccccgcccacctcctcccacctcccgcccaggcctggcttccgtcctgcgcgcggagattaacgcaaacccggaagcggatcgggtggagtgaaggtcacgtcgccatggtgagttttgctctgtgttgcattaagtctccgcttcccaggtccccgccgcttctgtccctgggacgtggggtccccacagacctggaaattctcgcccgtcttccttcgcccagagcaaattgagacagcccagtgagaggccgggtgtcgcttcctttcgggtttaaagtcgtctggaggctggtcccgtcccgggtctgtctgctatagggcaatgta

SEQ ID NO: 9407 - DNA, 80 bp, Homo sapiens
  chr19:53031215-53031295
  hyper
caaaaccttcttctgactcttccctcctcgcgctatttaaagtcttcacccacgaggtggattcttgcccggggcgcacc

SEQ ID NO: 9408 - DNA, 164 bp, Homo sapiens
  chr19:53031347-53031511
  hyper
agggaggccgcgtcctctgcctggtcctgggatcttgcagaccccatccttctcccaaggcgccgtcccccctcctcccacctccctactcgtgccagagcctgcggctccccaggtctctcctccgcagtcaccgcttccattgaacccacactgggaaggac

SEQ ID NO: 9409 - DNA, 61 bp, Homo sapiens; identical to SEQ ID NO: 6060
  chr19:53141353-53141414
  hyper

SEQ ID NO: 9410 - DNA, 819 bp, Homo sapiens; identical to SEQ ID NO: 5781
  chr19:53237625-53238444
  binary

SEQ ID NO: 9411 - DNA, 149 bp, Homo sapiens; identical to SEQ ID NO: 6062
  chr19:53465713-53465862
  hyper

SEQ ID NO: 9412 - DNA, 140 bp, Homo sapiens; identical to SEQ ID NO: 5784
  chr19:53606073-53606213
  binary

SEQ ID NO: 9413 - DNA, 222 bp, Homo sapiens; identical to SEQ ID NO: 5785
  chr19:53606354-53606576
  binary

SEQ ID NO: 9414 - DNA, 428 bp, Homo sapiens; identical to SEQ ID NO: 6064
  chr19:53606605-53607033
  hyper

SEQ ID NO: 9415 - DNA, 111 bp, Homo sapiens; identical to SEQ ID NO: 6065
  chr19:53607111-53607222
  hyper

SEQ ID NO: 9416 - DNA, 84 bp, Homo sapiens
  chr19:53696029-53696113
  hyper
cgggcacctccccaacgcgggctcaggggaaacggtgactgcgaaggggaggcctagggagcagcagggcccggcacgaggagg

SEQ ID NO: 9417 - DNA, 198 bp, Homo sapiens
  chr19:53700110-53700308
  hyper
cgcaggctcccacccgccttccttaggtccctcccggccccgccccctgcctgtccaggccccgccccacccttcgcgttttctccccagcccactccctgtgccggtcacgccccgcctaggccccgcccctaggccacctcagtcccctccggccccgccccctgccggtctctccctggccaggccccgcccctt

SEQ ID NO: 9418 - DNA, 292 bp, Homo sapiens
  chr19:53868337-53868629
  hyper
cgaggaagggagccctgcgggagggggtgttactttgtcgcccaggctggcctggacccccaggttcagcgatcctcccgccctgcttcctgagtagatgggacctcaggctcccgcgcccgcgtccgcatccttgctgtgtttatccggcaggtggtgacctcactcctcgctggcctgagcactccgtccagcatcccaggcggtggctttagggaagtctctgcagctgagcacagggtggactctccctccggagtgaatggagaatagaaagggagaggatttctat

SEQ ID NO: 9419 - DNA, 578 bp, Homo sapiens
  chr19:54385484-54386062
  binary
cgccgccgcccgtgcctccggctgccggcgcccctgcctttggctcttcctccccactcgcccgctccccctggcggagccggcgcgcccggggtgccgctccctgcctggcgcgctccgcacctggaggtgccttgcccctctcctgcccacctcggaatttccctgtggctcctttgatccttcgagtctccagctcctctcccttccacctgtttcccccaagaaaggcaggatcctggtccctgctacgtttctggggccatggctggtctgggccccggcgtaggcgattcagaggggggaccccggcccctgttttgcagaaagggggccctgaggcagaaggtggtccacgaagtcaagagccacaagttcaccgctcgcttcttcaagcagcccaccttctgcagccactgcaccgacttcatctggtgagggaagggggctgggggactgggggacgaggggactaggggtgcagactcctatcacgccgacccctgtggaaggaagaaggagggggctgtagtcccgactcccaggttctaggatggccagggaacgctgggagcttc

SEQ ID NO: 9420 - DNA, 85 bp, Homo sapiens
  chr19:54412564-54412649
  binary
cggctccgtccgccgagtgaggccgcggccgcggggggtggggggtgggaggccgggagggggccgggacgccgggctccggggc

SEQ ID NO: 9421 - DNA, 182 bp, Homo sapiens; identical to SEQ ID NO: 7132
  chr19:55691158-55691340
  hyper

SEQ ID NO: 9422 - DNA, 132 bp, Homo sapiens
  chr19:55952964-55953096
  hyper
aatccagcgccctctctctcaacactttccgctgattttcttcacagcagtcatctaaaattacactgcacatgcttacggactgggccactgatagttaatgagcccttaccgtgtgccaggaccctgcac

SEQ ID NO: 9423 - DNA, 134 bp, Homo sapiens; identical to SEQ ID NO: 6067
  chr19:56112791-56112925
  binary

SEQ ID NO: 9424 - DNA, 171 bp, Homo sapiens; identical to SEQ ID NO: 6525
  chr19:56807013-56807184
  hypo

SEQ ID NO: 9425 - DNA, 47 bp, Homo sapiens
  chr19:57079253-57079300
  hyper
gggcaaagtcctagagcccggggaagttgcccgggcggggcagcctc

SEQ ID NO: 9426 - DNA, 61 bp, Homo sapiens
  chr19:57276931-57276992
  hyper
gtgtgggcgcgtgatgtgtttgaaggtgtgtttgttcgagagggtgtgtgttggggtcaac

SEQ ID NO: 9427 - DNA, 86 bp, Homo sapiens
  chr19:57751590-57751676
  hyper
cggaggggaaataatgcaaggtggaagtcagagtccggagcctggtccagggtctctgcactggccctgaccctggcaaatgtccc

SEQ ID NO: 9428 - DNA, 373 bp, Homo sapiens
  chr19:57751755-57752128
  hyper
ggacagaggcaggtctgagccgggctgtaggcccgctgcgacttttacaccgaggcctgccggctcaggatctgtcccctttgcaggtggtttgtagagaaaaactacattaactacaaggcattgccaggtgcgacggcgggccctggggccaatgatggtccaggacaggggcgtttcctgtgggttgcgaagcttggggcgggacttccggcatttggatgggacgtaatttgggagcgacggttccgtccacgccggctctagggagggggcggtgttccgtggccgcctccctggcggcgctggggaaatgagcaggtaggaggccgacagcgacctccgcgtctcggagcgaaccgtgagcctcccc

SEQ ID NO: 9429 - DNA, 461 bp, Homo sapiens; identical to SEQ ID NO: 6071
  chr19:57874412-57874873
  hyper

SEQ ID NO: 9430 - DNA, 218 bp, Homo sapiens; identical to SEQ ID NO: 6072
  chr19:57875005-57875223
  hyper

SEQ ID NO: 9431 - DNA, 43 bp, Homo sapiens; identical to SEQ ID NO: 6073
  chr19:57875252-57875295
  hyper

SEQ ID NO: 9432 - DNA, 133 bp, Homo sapiens
  chr19:5789558-5789691
  hypo
cgggcctcaggtgggccccagcgaagcggcaggtcacgccgtaggggcaccggccgaaggtctcgaagagcacgcagcgggggcccaggtcggccggcttggtctccaggtagcgccccacgtcgtgcagaaa

SEQ ID NO: 9433 - DNA, 242 bp, Homo sapiens
  chr19:5789927-5790169
  hypo
cggaatggcatcagagcaagctcactgctcgttgctgaaggcccaggagctttctaacaattacccgctgccaggaaacacaccctgctcctgcctgccccggcaggaatgctcacgtggccgcacttgcctggattagggagggacacagcctgttcttgtcgtagttcgtgggcttcacatggggccggcccttgttttgtccccgggccctcttctgagtctgtagctgctccccgggc

SEQ ID NO: 9434 - DNA, 138 bp, Homo sapiens
  chr19:5790213-5790351
  hypo
cagtcggatccgcttagcctcaggctcagccagctcattgccagcagggtctcctacctcggtttcccggcaagtcttctcctgccctttggcttccaggaattggtgaaactgctccttggtggtgaggtatctgcc

SEQ ID NO: 9435 - DNA, 63 bp, Homo sapiens; identical to SEQ ID NO: 6074
  chr19:57998890-57998953
  hyper

SEQ ID NO: 9436 - DNA, 35 bp, Homo sapiens
  chr19:58070535-58070570
  hyper
cggaaacaacatcctgagcgacgtccccggaccgt

SEQ ID NO: 9437 - DNA, 81 bp, Homo sapiens
  chr19:58090396-58090477
  hyper
cggtgccctccctgagattcacccggaacaagggctaagcggcccgcggagggcgctaggaaaaggcgcgacaccaagagc

SEQ ID NO: 9438 - DNA, 38 bp, Homo sapiens
  chr19:58094924-58094962
  hyper
cgcctcccgcctctgggtacagtcaaagggctcaggtc

SEQ ID NO: 9439 - DNA, 31 bp, Homo sapiens; identical to SEQ ID NO: 5786
  chr19:58125385-58125416
  binary

SEQ ID NO: 9440 - DNA, 170 bp, Homo sapiens; identical to SEQ ID NO: 6075
  chr19:58144201-58144371
  hyper

SEQ ID NO: 9441 - DNA, 210 bp, Homo sapiens; identical to SEQ ID NO: 6076
  chr19:58144745-58144955
  hyper

SEQ ID NO: 9442 - DNA, 295 bp, Homo sapiens
  chr19:58193143-58193438
  hyper
cgaagtcgccatttccctgcacggggcacagcacctcagaatacaagttcgcagaggtcaaagcagtggacacactccgaagagctccgtggagttttggaaactacattatccagagtgcagagcgcaaaacggcggcggagttgagccaatgacagcccaggatagcaacacttccgcgcacgcgcagcgcgacgggccggaacttccggcgtcctcctcgtggcggtcattttggcctctgtcctgtttgtccagcccgccagtttctgcagtggaggtcgcgactgaggga

SEQ ID NO: 9443 - DNA, 345 bp, Homo sapiens
  chr19:58193585-58193930
  hyper
gcagtcgcgctgagggactcggctcaggtgagttgtgcgtcctccgggtctcgcctacctcccccagcagaagccttaaggcccagtgagggatgcctgctcacagccctgcagcccaggccccagtaccctggacaagaaggcgcttgtggattggacccgtttgtgacgcccagtgtgtacggaaatgtgacgggcagttgactggcgcgtgcagaacttggagctgcgactaagctgggggggattcaggagcctggggtccgtctcgggtctgcaggaacatagagtgaggcagagttgcacctgacgaatttgacgattctgaggacactggcagccttc

SEQ ID NO: 9444 - DNA, 627 bp, Homo sapiens; identical to SEQ ID NO: 6077
  chr19:58258088-58258715
  hyper

SEQ ID NO: 9445 - DNA, 146 bp, Homo sapiens; identical to SEQ ID NO: 6078
  chr19:58280766-58280912
  hyper

SEQ ID NO: 9446 - DNA, 176 bp, Homo sapiens; identical to SEQ ID NO: 6079
  chr19:58281371-58281547
  hyper

SEQ ID NO: 9447 - DNA, 53 bp, Homo sapiens
  chr19:58459305-58459358
  hyper
gagacgtacccaggtttctaccgattgctgtctgccagtgtttgtttggagac

SEQ ID NO: 9448 - DNA, 344 bp, Homo sapiens
  chr19:58694209-58694553
  binary
cgcgacttccgtcttccagtccccctccttccccaaaagttgcgtggactctagccccgcctcctacattctccccgccctccctgtccccgcccctccacccagatggacggccagttaggcccgccccctgcacttccggccctacccgcccttcctcttcccaagggacgtcataattaatcccgcccccaccgccacccaaccaagcatcacccattccagcacttccggcctgacccctgtccagcgcctttcctttctccagcttctgctctgccccaagagtggtcgccttcgtggcagggcacgactctctcccagctcgggtcgccgcccacatt

SEQ ID NO: 9449 - DNA, 291 bp, Homo sapiens; identical to SEQ ID NO: 7147
  chr19:813406-813697
  binary

SEQ ID NO: 9450 - DNA, 322 bp, Homo sapiens; identical to SEQ ID NO: 7149
  chr19:813830-814152
  binary

SEQ ID NO: 9451 - DNA, 102 bp, Homo sapiens; identical to SEQ ID NO: 7151
  chr19:814741-814843
  hypo

SEQ ID NO: 9452 - DNA, 119 bp, Homo sapiens
  chr19:874809-874928
  hypo
cgctgagctgggactgcgtcaccgtgctgcaacctggatgacacagtgagaccgtctctaaaagcctgggtgtggtgtaatcccagcctttaggctatatcccagcactttaggaggcc

SEQ ID NO: 9453 - DNA, 159 bp, Homo sapiens; identical to SEQ ID NO: 6528
  chr19:883424-883583
  hypo

SEQ ID NO: 9454 - DNA, 544 bp, Homo sapiens; identical to SEQ ID NO: 7154
  chr19:884311-884855
  hypo

SEQ ID NO: 9455 - DNA, 112 bp, Homo sapiens
  chr19:8942745-8942857
  hyper
cgtgctgacctaagctcacagcccgaggcctcatgaaccgaaacacggctccctggagggacgcagggcccgtggctggcggtgtccgcggcccacgtcgccccctggactc

SEQ ID NO: 9456 - DNA, 123 bp, Homo sapiens; identical to SEQ ID NO: 7160
  chr2:10047588-10047711
  hypo

SEQ ID NO: 9457 - DNA, 147 bp, Homo sapiens
  chr2:101033445-101033592
  binary
cgcaccgaagctgcacatgctccttcttccctgccttcctctgcatgctccttggacccaagctgaaccctttcttcctctctccatctacaattacaaacgcaaattctcagccaaggatgaaagaagtaaattgtaggctcgcac

SEQ ID NO: 9458 - DNA, 166 bp, Homo sapiens; identical to SEQ ID NO: 7161
  chr2:10152421-10152587
  binary

SEQ ID NO: 9459 - DNA, 91 bp, Homo sapiens; identical to SEQ ID NO: 7162
  chr2:10152958-10153049
  hypo

SEQ ID NO: 9460 - DNA, 327 bp, Homo sapiens; identical to SEQ ID NO: 7163
  chr2:10153562-10153889
  hypo

SEQ ID NO: 9461 - DNA, 63 bp, Homo sapiens; identical to SEQ ID NO: 7165
  chr2:10156251-10156314
  hypo

SEQ ID NO: 9462 - DNA, 111 bp, Homo sapiens
  chr2:105460811-105460922
  hyper
cgggatccgccacatgcccctcgaccctctcccaagagaaggaccctatttgacaaacaataacagagcagtaactcttgcaatctgcccacacctttgggggtggctggg

SEQ ID NO: 9463 - DNA, 97 bp, Homo sapiens; identical to SEQ ID NO: 5789
  chr2:105468467-105468564
  binary

SEQ ID NO: 9464 - DNA, 144 bp, Homo sapiens; identical to SEQ ID NO: 5790
  chr2:105471069-105471213
  binary

SEQ ID NO: 9465 - DNA, 338 bp, Homo sapiens; identical to SEQ ID NO: 6080
  chr2:105489278-105489616
  hyper

SEQ ID NO: 9466 - DNA, 64 bp, Homo sapiens
  chr2:106016398-106016462
  hypo
gaatacatcctccagagaaggcgggaagaactccgtgattgctttcttttaattgatactctcc

SEQ ID NO: 9467 - DNA, 31 bp, Homo sapiens; identical to SEQ ID NO: 6084
  chr2:118981062-118981093
  hyper

SEQ ID NO: 9468 - DNA, 144 bp, Homo sapiens; identical to SEQ ID NO: 6531
  chr2:120005222-120005366
  hypo

SEQ ID NO: 9469 - DNA, 179 bp, Homo sapiens
  chr2:121494270-121494449
  hyper
gagcgtgtctgcgggcgtactgagcgcggaggggctgcagccagccacttgagaacttcgaactccacttctccgcgctgcgcgtcccggagccctgcctttctttcttccttcctcaatccttcctccccctcgcccggcccggccgccccctccccctctgctgggctctcctcctc

SEQ ID NO: 9470 - DNA, 44 bp, Homo sapiens
  chr2:127643937-127643981
  hyper
cgtggccgaccctcccagccccctaaccccggtcgggcccatca

SEQ ID NO: 9471 - DNA, 49 bp, Homo sapiens; identical to SEQ ID NO: 6085
  chr2:127782995-127783044
  hyper

SEQ ID NO: 9472 - DNA, 164 bp, Homo sapiens
  chr2:128127780-128127944
  hypo
cgcagcgcaagcacaggcttgtcagggcctcagccgctgactctttatacaccctcctcagtgtctgtgggcggcccagtcccctagcccactctttcactggcttcctgtgtctgagttcatttgttcatctgttgttcagccagggtctgcgggtcggaccc

SEQ ID NO: 9473 - DNA, 105 bp, Homo sapiens
  chr2:128459397-128459502
  binary
cggtgttgctgctgcgcgcgcgcaagttcgcgctgctctggtcactgggctcggcgctggcgttggcgggaagcgcgctgctgcggggcggcgcggcgtgcggac

SEQ ID NO: 9474 - DNA, 136 bp, Homo sapiens
  chr2:131792037-131792173
  hyper
gtcagtgaagaggggcccctcagggtggatcgctcccaccggagtttaaatcctgcctccgccatccctgcattcctgcgcgattttatgactgagcagaatccctaacctttcagagccacgtttactcatctgt

SEQ ID NO: 9475 - DNA, 129 bp, Homo sapiens
  chr2:136873862-136873991
  hyper
cggcgtggggggtggggtgggtgctgctaggaggggcagtgattaactttttgtaagaagtttttcgcccagggagggaagaggggagaagggaggatcacggggggagggcgggggcgttgcaaagac

SEQ ID NO: 9476 - DNA, 913 bp, Homo sapiens
  chr2:136874020-136874933
  binary
ttcccacgcctgcctaaatacaaaccattctgggcttcaagcaacttgtagtgggtaaagagaatgcggtcttaaaacgaaggcccttcggtgcttggggtatattgggcgggagtgtcagaaaatgaacaaacggcacctcctcccccaagcgggcgctcctccggtgtgtgggtctcttgccatcctcgtgtttatcacttggcgcgtttgggacgttagggagcggggcattttcctgggtggagaaggtaacggggtctgcacccgtggtcctcgccccaagtttcatttcctcactctcccgggtggcttcccattaccccgccactgatccagttaacccggccggaggtgggcagctggaagcctccaggcggtgggcacgcggggggccgggtcgtccagccccgggccgccgcggctgcccactacacccacgccaaccgcccgcaagcagcgctgcaggggctccgctgggcgacacgccaggctctgtcccacagggtgctggggagcgactgggcggctccgccgcgagcgtctttgaattgcgcgccgctgcaggaaaccaaaaactccctagcaagagggtttcaaaaggtttctggaaaccaccgacggttaaacatcacaactggactcggagagagccaaacggtttccccacttgcacctgccagtcttcgcggcggcgacctggcagcccaggtgcggtcttaaccgcccccgcccctcaccccgtacccgctcctatccccggagcgcaaatctcagggctggcagctgcgcggtgtcaaaggggaggtcaaaccactccgctgacctctgcacgaccccaaactctcgaactgcaggacccactcgcggccgtggggaagaggcgcgcttcggacggcgggaaggttttccc

SEQ ID NO: 9477 - DNA, 483 bp, Homo sapiens; identical to SEQ ID NO: 5792
  chr2:136875399-136875882
  binary

SEQ ID NO: 9478 - DNA, 218 bp, Homo sapiens; identical to SEQ ID NO: 6087
  chr2:136876145-136876363
  hyper

SEQ ID NO: 9479 - DNA, 51 bp, Homo sapiens; identical to SEQ ID NO: 6089
  chr2:149632592-149632643
  binary

SEQ ID NO: 9480 - DNA, 544 bp, Homo sapiens
  chr2:149634146-149634690
  hyper
cccctccctctctatctcccttccccaccttttctcccccaccccctccccctacttagctccctctctgcagctggggctgctggtagggggagggaacaccaatggattgtagttcttaaaggaatctgtcagatgaaacaaaccagctcggtcccccgccccttccccgcccgctgtccgtagcgtgtgtggctgatggtgccccctttgtatgcgagccgcgtggggagggaccgagttaatgggagcctcccggtccccgctgacacgttcctggcagcctgctccaggctgctgatgcagccttcccgtccccagcattgattaagtgatgtcatcctgatcactgagcatgctccgactaaccccctcctccccttcctccagtggctggtgtatttaggtcaagtgattgacaggtgacagtttaccgagggtattgcaggagtccgcctggcctttctcaagcgccagaggccgacgttttccagcccgggcggtccccagcatctttgccaaggttgtctgccgcagtcgcagc

SEQ ID NO: 9481 - DNA, 115 bp, Homo sapiens; identical to SEQ ID NO: 6090
  chr2:149645382-149645497
  hyper

SEQ ID NO: 9482 - DNA, 64 bp, Homo sapiens; identical to SEQ ID NO: 6091
  chr2:149645987-149646051
  hyper

SEQ ID NO: 9483 - DNA, 807 bp, Homo sapiens
  chr2:155554232-155555039
  binary
cgcctggaaggagggcacagcgccaaggaacccacgagcccccgctcgagtcattctgtgctctgtgcgccaaggatctttctggcagggacagcgcggtgccctcagggaggtgcggagcttgggggacctgcattggcgcccatcgtggtacaccaggaaaagtgggaacgaggaaaacagccgtgagcgcagagtgcgaggccaggctgccgctaccgcccgctgcgccgcctcctgccctctcccgctgggtgagtgcccaggcttcgcgcactgccgtgtctcagctgagcgcgggggcggcctgcgggcccttgagggtccgccggagggccccggtggcgcccgcggaaactcggcggtcgggggacgccaggcggacaggtctctggagtccggaacccgggaatctgagcccggagggcgtgggtagggggcgttgcaccagtgcccggcagacatgcctttgggcgggattttggctaaaagataggagacaggtgcgccgggggtgcggggagcggtcccagggggcgggagattggggagcggcggggaggggggagggtctggtccaggcaggtaaaggcagcttcttaggcagccagcgagttggcaggtgggttgggactcgcttgtcaactcattaattttaagcagtcagtttgggggtactgcaggataatcaggagggccgtggggagtcaagaggtgacccgggatgccggtggtggggaaagaaaagaggagcctctggaagcttggaggcaaaattgcgcttgggttcctgttccttgcatccct

SEQ ID NO: 9484 - DNA, 95 bp, Homo sapiens
  chr2:162930102-162930197
  hyper
cgttagaagagggagaccgcgggctgggggtgggggtggcgtctggagtgcgccagttggagttctctaaggcgggtgcccttgaacttgtgcct

SEQ ID NO: 9485 - DNA, 263 bp, Homo sapiens
  chr2:162930659-162930922
  binary
taaaggcgccgcgggcaggctgcagggcaggcggcgcgggagcaggcgcgcgtggcgcggggcactggcatcccggccggggggagcccgcgagggccccctgagggcggtgtagggcgctgggcggcagccggggcgcagagtgcggggcccggaggagccgtgggggaggggaaagggcgcgcggcctcggatgcgcagaccctgggccggcgactcggggaccctgctccctcttagctaaaaatgacgtcggcgttcag

SEQ ID NO: 9486 - DNA, 205 bp, Homo sapiens; identical to SEQ ID NO: 6095
  chr2:165873413-165873618
  hyper

SEQ ID NO: 9487 - DNA, 101 bp, Homo sapiens; identical to SEQ ID NO: 5794
  chr2:168148871-168148972
  binary

SEQ ID NO: 9488 - DNA, 240 bp, Homo sapiens; identical to SEQ ID NO: 5795
  chr2:168149264-168149504
  binary

SEQ ID NO: 9489 - DNA, 152 bp, Homo sapiens
  chr2:168149556-168149708
  binary
ccgccgcggctgctcggctagtgcagctgggcgagctcgcgcgggcgccgccgccgcctctgctgctgcccaccccgccgcgccgccggcgctgccggtcttgcaggcggccgccggggaggggcggccgagagagcggagcacgaggaggc

SEQ ID NO: 9490 - DNA, 89 bp, Homo sapiens; identical to SEQ ID NO: 6096
  chr2:168150962-168151051
  hyper

SEQ ID NO: 9491 - DNA, 98 bp, Homo sapiens; identical to SEQ ID NO: 6535
  chr2:171815760-171815858
  hypo

SEQ ID NO: 9492 - DNA, 231 bp, Homo sapiens
  chr2:172950233-172950464
  hyper
cagcagcatcatgcttagacttttcaaagagacaaactccattttcttatgaatggaaagtgaaaacccctgttccgcttaaattgggttccttcctgtcctgagaaacatagagacccccaaaagggaagcagaggagagaaagtcccacacccagaccccgcgagaagagatgaccatgaccaccatgccagaaagtctcaacagccccgtgtcgggcaaggcggtgtt

SEQ ID NO: 9493 - DNA, 233 bp, Homo sapiens
  chr2:172950493-172950726
  hyper
tgtctccttctcccatgtcccacgggcactactccatgcactgtttacactcggcgggccattcgcagcccgacggcgcctacagctcagcctcgtccttctcccgaccgctgggctacccctacgtcaactcggtcagcagccacgcatccagcccctacatcagttcggtgcagtcctacccgggcagcgccagcctcgcccagagccgcctggaggacccaggtacgtgc

SEQ ID NO: 9494 - DNA, 86 bp, Homo sapiens; identical to SEQ ID NO: 6097
  chr2:173099596-173099682
  hyper

SEQ ID NO: 9495 - DNA, 150 bp, Homo sapiens
  chr2:175198369-175198519
  hyper
cgcccacgtgtggcctggtcctccgccctcccgggtgaaagtcctggagagatttctcgggcgcgtccgtgaaagcagggcactaatggggagcctacctcttaaaacagcgcacttgccctacggacgagcctctaggccctggtggtc

SEQ ID NO: 9496 - DNA, 297 bp, Homo sapiens
  chr2:175199018-175199315
  hyper
gtacagagaggcctatttcgctcctctcggaggagctgtcccttcgcgccccctccccagtataactgtgagagtgaaattgaatctagtggaataaggaattgggtagaagacacacgaaaatgataaaaatcacaagcaagaatgatagatacaagctgaagttgtgttctgtaggcaaaagcctggacacacaaagtgagggctcacatttccgtctccacttgggccctgctggtgcgggctgtgtctgggtgtctcctcccctcctgcctcctttcctacaagtggggagtc

SEQ ID NO: 9497 - DNA, 85 bp, Homo sapiens; identical to SEQ ID NO: 6098
  chr2:176975945-176976030
  hyper

SEQ ID NO: 9498 - DNA, 160 bp, Homo sapiens
  chr2:17721363-17721523
  hyper
cggctcccagtactcctagcagaagaccctctgatgaaatggcccatgacaaaatgaccaccataaccgttccttcagtaagccaggtagacgtgctcacagcttgctgggaagtcttctttcggagatttctgcagttttctccttcaccttacagcct

SEQ ID NO: 9499 - DNA, 241 bp, Homo sapiens
  chr2:17721867-17722108
  hyper
ggaagagaggaaaggggagggggtgcctggagaggcggaggctcgcgcgcctgcgcatccagctccagggaccctaggttttctatgggattcccaatctgcagcagagatttacccgagcgtgttgcggcagcggctgggcttgcaaggcgcgatccaagagggatttaagcagcccagagctccagagaaaaagagagcgagagagaaccacacacagagacggcttaagcgtttaccc

SEQ ID NO: 9500 - DNA, 34 bp, Homo sapiens; identical to SEQ ID NO: 6099
  chr2:182323095-182323129
  hyper

SEQ ID NO: 9501 - DNA, 72 bp, Homo sapiens; identical to SEQ ID NO: 6100
  chr2:182818959-182819031
  hyper

SEQ ID NO: 9502 - DNA, 740 bp, Homo sapiens
  chr2:208031094-208031834
  hyper
cggccgcccggcggccgggcagcgcgagcgcaagggacagggagggtcgtggcgacactcgcgccagctcccgggacggctgggctcgggctggtcgccgacctccgaccctccactagatgcctggcagagcccggcgcgtccggagcccgcgcccctcagagggaaggggtcgcgcgtcgccgcggcggccctgaggctgacggtcgggaggtgaaaggccggagtgcggggtcaggacgcctcctggagggggcgcggcgcagggggccgcggggaagccgccgagggcgcggagcgggaaggaaggacagtggccaccccgcctccgcctgggcacggggcagggacccgcgcgaggcggtgccggggaggtcctcacgtactcaaaaacaagcagaaaaggcatccagggccccttcccgaactccccacgggctgccagggtgcagagaagaagcgcctgaggaggaagtgccacacaatgggagagaacaaaggggagcggagcgagaccgcggcctgcgcccgccccccgcttgcgcacagtccccgccccgccccgcgggcgccgccgccgccgccctccctcccgcgcctccttctgaccccgagcgagagacctggtcgggagtccggcggctagagttgattgcaaggggcctgttgctcgactgtgcgttaaagaggctagagggagcctaggtagacgtggggcgcaagctggagccggcagcttg

SEQ ID NO: 9503 - DNA, 56 bp, Homo sapiens
  chr2:208031939-208031995
  hyper
ggatgtagacatagagagatctgttacatctgagatgaaaaccctgcacaattcac

SEQ ID NO: 9504 - DNA, 511 bp, Homo sapiens; identical to SEQ ID NO: 6106
  chr2:21022197-21022708
  hyper

SEQ ID NO: 9505 - DNA, 394 bp, Homo sapiens; identical to SEQ ID NO: 8319
  chr2:220348591-220348985
  hyper

SEQ ID NO: 9506 - DNA, 61 bp, Homo sapiens
  chr2:223170211-223170272
  hyper
tacgacccacacagggacacaaacaaccacacatgtacacacacacacacacacacacact

SEQ ID NO: 9507 - DNA, 560 bp, Homo sapiens
  chr2:228028714-228029274
  hyper
cgccttacctgtggggacgcccgcagcgccaggagctgccgccttgccaccccacgggacgcgcacctccagccccaatccacccgcgccccgctgcctcttcgcggcgctctcgcagccaagcccggcggccgcaagttggaggcgggctggaggcggggaacgcggaccgccgcgggcgcggggaacaagcggggcctcccgagtgcagacgcccggcgcgcctcccgcttaatctgggcagggccgctggccactccctccaccctgcgcagccacctccccaccgcgcagccacctccccaccgcacacccccaaacgccccacctccgaccgcaccccacttccccgcctgggcccccggaccttgggagcatcacctccttaaccccttaccctggatccgcgcccacctgcccctcaggcgcccagccctttctcgcctcctgggcacgatgcccgggtagaagggacactgcctggtaagttgggagggagggggtatgagggcgggacctgagccacgtcttccctcccttgaagccacaaccaaaaagcc

SEQ ID NO: 9508 - DNA, 51 bp, Homo sapiens
  chr2:232651379-232651430
  hyper
cgcggctcctcactccacgcctgcggccctgcttggagcataccgcccacc

SEQ ID NO: 9509 - DNA, 624 bp, Homo sapiens
  chr2:232790030-232790654
  binary
cggctcgcgcgcctccgaaggccggctgggcggcgggcggtcccgggccgggctggggctgggcgtcgggtgggccgtactcaccgccgccagggggcgccgcactaacatcccaggccgctcatggagccgattcggtccagcttgaggccgaagcagcccttggacaagcccttcttgttggctcctttgtatttgcgcgcgttggggtgctcttgcagaaggcgagcccacgctgcccgcgacttggtgtccacgcgcaggtcccggagcagtcgcgaccggtcgcccttgagattggcgcccccgcccccgggagccttgtcgcccttcttctgaccgccgcccgcagcctgcggctcggccagctcctctgccggcggggttcgcgggacctgtccgaggaaagagcgggcaggtgaagggacacgcggctgcagcacgggggactctgatgctccagccccacgcgcccgccggcgcggggtgtccctcccaagcccagagccgcccccaccgatgccggccagcttggccccgcatccacctgccacgcggccgccttcgccgctccctccggaagccccctgccctccctttgctgctcgccgggcaggccacact

SEQ ID NO: 9510 - DNA, 226 bp, Homo sapiens
  chr2:238617178-238617404
  binary
cgtttcaggcggaagcccggctcgctgcaaaacgggcggcccgcgcggaggctcgcgagatccgcatgaaggagctggagcggcagcagaaggaggtaacgcttggggctccttgttgggtcttttcacagtgatttgcgtgctgggcccagggtgcaagtgcaggcacctgttgctgcagacgcacctggctgtctcacgttgctcacggtcagagtgcgtttgc

SEQ ID NO: 9511 - DNA, 158 bp, Homo sapiens
  chr2:238625990-238626148
  hypo
cggaatggctctgagcttctgcttctcttcgatggtgttttattccttcatcgcgtttgctttgaaggcatgagcagcctgttggagggggcgtgaaggctgctgggccggctttactgtcctgctctcccccgaggcccttcacctggggaagcttc

SEQ ID NO: 9512 - DNA, 82 bp, Homo sapiens
  chr2:242269474-242269556
  binary
cggggagtaaagcctttaaagaggagcctctactttttacatatacacgagctagacatggacatcttaattaaatcttacc

SEQ ID NO: 9513 - DNA, 54 bp, Homo sapiens
  chr2:27069931-27069985
  hyper
tctgcagctgcagcttggaggtccttgatgctgcattttaacgcgcatcgcaac

SEQ ID NO: 9514 - DNA, 38 bp, Homo sapiens; identical to SEQ ID NO: 7206
  chr2:30453530-30453568
  binary

SEQ ID NO: 9515 - DNA, 425 bp, Homo sapiens; identical to SEQ ID NO: 7209
  chr2:319186-319611
  hypo

SEQ ID NO: 9516 - DNA, 34 bp, Homo sapiens
  chr2:32367753-32367787
  hypo
cgtgcccggccagaaatcgaaaatttctagaaac

SEQ ID NO: 9517 - DNA, 314 bp, Homo sapiens
  chr2:3582036-3582350
  hypo
cgccctgctcgccaagtcacaggtggtgggaacggttgagctgtgacacccttggggctctgcggttcctggtgtctctgagttttgggtgccaccacgttcccctcatccagacaccggtgcccaaggcagaagcgggttgcggcatgcccggcccaaccgccggctgagcgcggatcctgtggcaagcgtgggatctgggccggggtgcaagccgagcacagcccactgggccgaatgtgcagagtatcaccagcagtgatccttgggccgagtgaggccaggcaggggcgccagcggccatggaggtctcc

SEQ ID NO: 9518 - DNA, 226 bp, Homo sapiens
  chr2:39186687-39186913
  hypo
cgcaggtggtgaggagggtcagggcttccacgcggggtgatgacagtccctggcccgcaggccatttcccagaagctcagacaataccttcgggcctccgctcgacggactgccttgtccactctccgcctgggaacgggggttcgtgggagcgccttagtggaagtttgtggagctcgggaggtggcatgcacaggcgcctcggagcgcggccccgaggggcgcc

SEQ ID NO: 9519 - DNA, 40 bp, Homo sapiens
  chr2:39188224-39188264
  hypo
cgtttctatgttgagaatatggaacacggtgcgccagcct

SEQ ID NO: 9520 - DNA, 125 bp, Homo sapiens
  chr2:60706396-60706521
  hypo
cgtggggactcagcctatggacacctggcctctgcgggcacagcggccacacaccacggtgggacccggagaccattttttgttttgagtctctctaagactgcttgggaaatgaggtctctcag

SEQ ID NO: 9521 - DNA, 208 bp, Homo sapiens
  chr2:60706550-60706758
  hypo
gaggctgaccagaggccaccaacgtcaagctctctcaggtctactaggaacaggaaagaataactctcccttaacaagcccctcaggctgaaatccttttgcttccagggcctcaaccttctactgctgggtagaaagccccctctgtcaccggcccacagatctcagctgccatcgcactcaaaccctgtcaggcggtggagagtgt

SEQ ID NO: 9522 - DNA, 542 bp, Homo sapiens; identical to SEQ ID NO: 6111
  chr2:60783811-60784353
  hyper

SEQ ID NO: 9523 - DNA, 373 bp, Homo sapiens; identical to SEQ ID NO: 5802
  chr2:60784505-60784878
  binary

SEQ ID NO: 9524 - DNA, 91 bp, Homo sapiens
  chr2:61505030-61505121
  hypo
cgctttcgcttggttctcattctttttttgcctgccgccatccacataagatgcgacttgctcggacttgcccggacttgccttccggcac

SEQ ID NO: 9525 - DNA, 92 bp, Homo sapiens
  chr2:64538788-64538880
  hypo
cggtgtaattagaagctgcaagtggatacacatgagggcgtaatacctgccgtcacgcagctgagagcgctcggggcactctggaagaaagc

SEQ ID NO: 9526 - DNA, 123 bp, Homo sapiens; identical to SEQ ID NO: 7218
  chr2:69928507-69928630
  hypo

SEQ ID NO: 9527 - DNA, 136 bp, Homo sapiens
  chr2:73520107-73520243
  binary
cgctccgataaccgcacaggttcctgcggaggcgctggcggcccagtgtgggtgggaatgggggtgcgcaccccaggactcctaagcttcccatcgcccctattctcatagctccaatgtcccagtccctcctggt

SEQ ID NO: 9528 - DNA, 236 bp, Homo sapiens; identical to SEQ ID NO: 5803
  chr2:74781700-74781936
  binary

SEQ ID NO: 9529 - DNA, 123 bp, Homo sapiens; identical to SEQ ID NO: 6112
  chr2:74782349-74782472
  hyper

SEQ ID NO: 9530 - DNA, 64 bp, Homo sapiens
  chr2:86914559-86914623
  hypo
cgaaaatgaaaagttttctctctcaataccattagtcaacgtattgatgatacatgccataaac

SEQ ID NO: 9531 - DNA, 46 bp, Homo sapiens; identical to SEQ ID NO: 6541
  chr2:8868792-8868838
  hypo

SEQ ID NO: 9532 - DNA, 60 bp, Homo sapiens
  chr2:8978298-8978358
  hypo
tggtgcggggtggggacaatggctcactcctgtaatcccagcattttgggaggccaagac

SEQ ID NO: 9533 - DNA, 140 bp, Homo sapiens
  chr2:91635538-91635678
  hyper
cgcggctttttgcccccgccgtcgcggctttttgcccccaatgctgcggctttttacggctttttgtgcccatcaccgtagctttttgcctccgccaccacagctttttgcctccgccaccgcggctttttgaccccgcc

SEQ ID NO: 9534 - DNA, 63 bp, Homo sapiens
  chr20:20344267-20344330
  hyper
cgggagaagagggaaaggcggaggagagaggaacggcggtggggggggaggagcacccgccaa

SEQ ID NO: 9535 - DNA, 206 bp, Homo sapiens; identical to SEQ ID NO: 6114
  chr20:21080357-21080563
  hyper

SEQ ID NO: 9536 - DNA, 185 bp, Homo sapiens
  chr20:21086682-21086867
  hyper
ctctaagcccccgtggcagagaaaagaggaatttttaaaaacaaatcttcccttgcctgaggccattttccagccttccacgcgcctttgccggggaaagagtcgatgactcgccctgctcatcggctcagaccagagctaccctgagcccacacctctcctcctctctgcaagacatcccttcc

SEQ ID NO: 9537 - DNA, 222 bp, Homo sapiens; identical to SEQ ID NO: 5804
  chr20:21686742-21686964
  binary

SEQ ID NO: 9538 - DNA, 69 bp, Homo sapiens
  chr20:22565361-22565430
  hyper
cgcggagcggacaagtgccgcagtgacgtgggaggctggtgatatagcgcggcgcgctggcgcgggcct

SEQ ID NO: 9539 - DNA, 144 bp, Homo sapiens
  chr20:22565459-22565603
  hyper
gaataatcagctcacacctaggtgagaggtagccgcagccggcgctccgcacctgcccctcagcgcctgccgtccgccccaccgccgcggcgccccgcactcctgggcgggccaggggagcgggctgggcgggcgatcgggcac

SEQ ID NO: 9540 - DNA, 319 bp, Homo sapiens
  chr20:22565634-22565953
  hyper
cgggtccacagcgagtcccctgaggaaggagggacctgggaggaaaccaccctctggggcggctccggcctccagcccccgccccgtctcatcgcgccgggcgcccggtgcgcctgtcggagggcgcgtccagcctcagtgcccggcagatccctatgaaagccggatttatttatgccgggtttcttcgctctcagtgctcattctctgtcaaaacagcaagtccatgacagccaatttgcaaagcgctgtcctatttagaaaaactacgtacacacctttaactcgcccgctgctgctcctgcgaggcccctccctg

SEQ ID NO: 9541 - DNA, 67 bp, Homo sapiens; identical to SEQ ID NO: 6117
  chr20:22567768-22567835
  hyper

SEQ ID NO: 9542 - DNA, 68 bp, Homo sapiens
  chr20:3052452-3052520
  hyper
cggggagggagggacccgcagccacaggggcgcgccccgctccggcctcgcctgagaactccaggagc

SEQ ID NO: 9543 - DNA, 62 bp, Homo sapiens; identical to SEQ ID NO: 6121
  chr20:30639044-30639106
  hyper

SEQ ID NO: 9544 - DNA, 139 bp, Homo sapiens; identical to SEQ ID NO: 6122
  chr20:30639494-30639633
  hyper

SEQ ID NO: 9545 - DNA, 95 bp, Homo sapiens
  chr20:30946060-30946155
  binary
cgactcccaggcgccctttcggtttgtttttgttcaaaaaaaaaaaaccccacactccccctcctcactcttcacacacactcacacacacccac

SEQ ID NO: 9546 - DNA, 113 bp, Homo sapiens
  chr20:30946218-30946331
  binary
cggtcctgtctcagtccctcagcagagcgggaaagcggaggccggagccgtgacctctgaccccgtggttatgcggagccgccgcattccttagcgatcgcggggcagccgcc

SEQ ID NO: 9547 - DNA, 285 bp, Homo sapiens
  chr20:30946345-30946630
  binary
cgactgacgcagcgcgggcgcgtggagccgccgccgcccctcccccaccgccgctctcgcgccagccggtccccgcgtgcccgccccttctccccggccgcacccgagacctcgcgcgccgccgctgccacgcgccccccccaccgccgccgccgccccagccccgcgccaccgccccagcccgcccagcccggaggtcccgcgtggagctgccgccgccgccggggagaaggatgaaggacaaacagaagaagaagaaggagcgcacgtgggccgaggccgcgc

SEQ ID NO: 9548 - DNA, 155 bp, Homo sapiens
  chr20:31334709-31334864
  hypo
cgcgcccggcctttttccagtctttttccacatcgcaggtcactggggttgtgtgatttgttttcgttttacatacacaggactctcgcatttcaccaagttatttaataatccctcatactccacgtgtggttccttggaccagcagtgcaggc

SEQ ID NO: 9549 - DNA, 266 bp, Homo sapiens
  chr20:3202153-3202419
  hypo
tttctttctgtctatctttcaaagtagcctcattgttcttcagtgatgtcccaatttgtcccgggtgtggctggcgagggcgcgtggccccggaggtgctggtggtcctgtgggtccatgcctcctccctgtgtgtgagggaagagctgccccgctctgctttttattgtattcagcaaacatttgcaggtgctgtaggggccttgcaactacattttgcgtaagttgggtcaaatcaaattcacagactcaccaaactcatactg

SEQ ID NO: 9550 - DNA, 161 bp, Homo sapiens; identical to SEQ ID NO: 7242
  chr20:36802873-36803034
  hypo

SEQ ID NO: 9551 - DNA, 110 bp, Homo sapiens; identical to SEQ ID NO: 6547
  chr20:37657005-37657115
  hypo

SEQ ID NO: 9552 - DNA, 202 bp, Homo sapiens
  chr20:40321525-40321727
  binary
tctatttggctgcaagagcgctctgtcgcctgcctcggactctgtttcccagaagtcttcctggaaactacatttcgcagggggctttgcggcgcctacttcctcctggctgattagatgggactggtgccgttggccggacgtttttgggagcttcacaggctgatggggaagggcgaaacctgctcgattaaaacaaccc

SEQ ID NO: 9553 - DNA, 55 bp, Homo sapiens; identical to SEQ ID NO: 7245
  chr20:42833281-42833336
  hypo

SEQ ID NO: 9554 - DNA, 135 bp, Homo sapiens
  chr20:43104449-43104584
  hyper
cgccgcggggaggcgtcgcacatgcgcgctcctaggcggagccccgcctcccacgccctggatcgtcacttccggcgcgagaggccgggcaggccgggcagggagtgcgggtcggttctgcgtgcgctgccggac

SEQ ID NO: 9555 - DNA, 63 bp, Homo sapiens
  chr20:44602364-44602427
  hypo
caaacaaacaaacaaaaagtcctaaggagaagacctattaataaggagaaaaggtccgggctc

SEQ ID NO: 9556 - DNA, 51 bp, Homo sapiens
  chr20:47934774-47934825
  binary
cgaggaggggtcgggtctgggagcctccgcccccaactcaaggcaggctac

SEQ ID NO: 9557 - DNA, 174 bp, Homo sapiens; identical to SEQ ID NO: 7251
  chr20:52374073-52374247
  hypo

SEQ ID NO: 9558 - DNA, 32 bp, Homo sapiens
  chr20:52484682-52484714
  hypo
cgctaatatttacgactagaacattctttatt

SEQ ID NO: 9559 - DNA, 535 bp, Homo sapiens
  chr20:55964187-55964722
  hyper
cgtggagacatggggccgccggagggggggagggattggtgatccagatacccaagggggcccgggggcggggggcgaaggagtgcgactggacccgcacctgggcaaccgcgtctccagcctccacggccctgtcccgcccccttccgggcaggcagaggccccggggctgccctgccgcctgggcccggcccccgcggcagcagccgagcggccgcacccctttgtggggctgtcgtgccgggaggggcgcgggcgaggcgggcccgggcggcgctgggacttgtaggccgggagcccgggcgcctccgggctgaagcccgtggccacgccaccgacgcggctccagcctgcccaggcaacgcgacggctggggacagccttggaaaaactgaaggggaaaccgaggcctggtgaagggatccagctggcgcaaaagcacgcggccgcgcagtggccgcctcccccggcctctagggggcaagtgaaggtcacacttaaatgaaagttttcaaagtcgcttcgaagggcctcc

SEQ ID NO: 9560 - DNA, 91 bp, Homo sapiens
  chr20:56772299-56772390
  hypo
tgctaggtcagcagatctttgaggacggagccaggctcacacttctgtggcactgatgctgtcccaccagcacaccgtcgtaagcattcac

SEQ ID NO: 9561 - DNA, 431 bp, Homo sapiens
  chr20:56784811-56785242
  binary
cgtggttacatatttttcaaaacagtgtctactatccaaagatcaacagagcacaaaagtaccaagagtggaaaatctctggtgtataacggcctaacgggaaaggagaaaattggggaatgcaacaggatctgcaattcgggtgggggcggatggacgcggatggacggcccgcctggatccgcgcgaggcgccactcggggagttgatctgcggtctcgcagtgacacctacaggccgccgtggccgcgcacctgcggcaactgcgttcgacagcgccacctggcgggagccgacgccggcaggcccggagaggattttcttcgtgaatccaagacagaggggtggaaagtgctcaggacctctggggtgtgtcctgtgggccgctggggctggggtgcagcccacgaggaagtgtccgtggggtgtgc

SEQ ID NO: 9562 - DNA, 307 bp, Homo sapiens
  chr20:56941603-56941910
  hypo
cgatacaggtatcaaaatatcataggcacctcaaagacatgtacaactcttaatttaacatttttgaaagaaaaaaaaaccggccagagcattaaaacaaataaaataagaaacacagaggccagtgttaggtgaagaactccgctgcttcagaaagagaatagcagcgctcgcttaccgtgggaacacggccagttaacaaaatgggttttggttttttgttttgttttgttttaccattggtaataagatagttaacataagtggtcagaacttcgctgaatttgtaataaagcatttgttaagc

SEQ ID NO: 9563 - DNA, 164 bp, Homo sapiens; identical to SEQ ID NO: 6548
  chr20:57268976-57269140
  hypo

SEQ ID NO: 9564 - DNA, 327 bp, Homo sapiens
  chr20:57797949-57798276
  binary
cgaaggaagggagagcagggttttgatcctagttccttggcttctgcaaatcggctgggaccccccgctgagcaagcgactgtcgtcacggcccccgcaccagacgaccccagcctgtggatgatgtttcactgccctcacataaacgccacccagaaatgcaagagtaagaatgttcacgaagaggggaggcaggagccccagctgataacaggaggaggcaggaagggggccttggaggaggtcagaggggggacattatttcagtttcccaggaccagggtgagagatgggggtgaaagaagaaaaaggacaaaacgaggtgcc

SEQ ID NO: 9565 - DNA, 181 bp, Homo sapiens
  chr20:57875361-57875542
  binary
cgcgcgtgtgcgtgtgtgcgcgcgctctcgtggccttccggcagctggcagctgtcccggcccccaccccaccctaccccaccccacccagccgcgccacgccacgccgcccccgcccctcgctgtcctgggtgcgcctcgggccgctgcgctcctggccagctccccccagcgcctggga

SEQ ID NO: 9566 - DNA, 220 bp, Homo sapiens
  chr20:57875889-57876109
  binary
ttttcgggctcacagtgacctccgccgcaggtaagcgcacggggcggcgcgcctctcctggcgcgagcgcacacaaaaggacccagggcgggggacccgaggcgcggagaagatgtgcgtcgcggggagcaaactcttgcctgggctctgcactcgtgaagacgcctgggggagggctggggagcagaagcggcgcgcaacgactacccgcacgggctcc

SEQ ID NO: 9567 - DNA, 233 bp, Homo sapiens; identical to SEQ ID NO: 5806
  chr20:57978841-57979074
  binary

SEQ ID NO: 9568 - DNA, 354 bp, Homo sapiens
  chr20:58507061-58507415
  hypo
cgacttcggaaaccgagaacagaataataatgtttcaagagaagcgtggatttacctgacaagtaagcaggctctgggctccagtctactgaactgggggactggttagcgagcaacacagagaactagtaagatgatgattgtgtatctgcaggcagataaaagcgttacggataaaaacaacaacaaagaaaacaatttggcagatgggggaggcaaagattttcccccaaaggaaaaactgctgaatgaatgcaagcagcagtagataattcaaagtcccctctgccctggtaactaacatagctaaggtgtccaaaaagacattaaaggtgaatgaaggggagggaaggc

SEQ ID NO: 9569 - DNA, 260 bp, Homo sapiens
  chr20:58508063-58508323
  hypo
cagggtcacccccgaaccaacaaagcacacacacacccgagatgcgccccaggccgcagcgccaaccccccttcagatgtcccggagacaggcgagcagcggtccccagggctcccgtcgccaccgcttctcccgcacccctcagcctcctcgggccggcgacgcgcgcagccccaggcctgctccccgctcgccaagcgcaccgccccgcgcctcagccaccttgaccgagtcgcccacgcgcgggggcggctccgagc

SEQ ID NO: 9570 - DNA, 57 bp, Homo sapiens; identical to SEQ ID NO: 6549
  chr20:58514041-58514098
  hypo

SEQ ID NO: 9571 - DNA, 115 bp, Homo sapiens; identical to SEQ ID NO: 5807
  chr20:58514400-58514515
  binary

SEQ ID NO: 9572 - DNA, 176 bp, Homo sapiens
  chr20:60781114-60781290
  hypo
cgtgaaatgccctctagtcaaaaagccaaagacagccacacgcgcccaggctctgcacagttgggcccaccaccctctcgtgcacgcactttccacacttcacgttagccgccgtcgcccccccgccctaagctcctggagaacagagacctcgtttgtctgtatgcagtgcccgg

SEQ ID NO: 9573 - DNA, 256 bp, Homo sapiens
  chr20:60781567-60781823
  hypo
attggcggtcctcgggctgaggagggcgggagggtggaggtagccgtggacacaaaagggccatgccagggtcctcagaccatcaccctgtgtgttggcggtggggccacgagtctgcacgtgcgaaagaatcctgttggcttagtgtttcaggctgggaagatgaccggctctgaaggtggagggtggtgatgggagagccactgaaccgcacacttcagatagctcaagtggtgaactttatgtttatcaccac

SEQ ID NO: 9574 - DNA, 44 bp, Homo sapiens
  chr20:60794658-60794702
  hyper
cgggtcccctggtggggcgtgtgcctgcgggagccacccaggtc

SEQ ID NO: 9575 - DNA, 64 bp, Homo sapiens; identical to SEQ ID NO: 7258
  chr20:60842033-60842097
  hypo

SEQ ID NO: 9576 - DNA, 237 bp, Homo sapiens; identical to SEQ ID NO: 7260
  chr20:61287746-61287983
  hypo

SEQ ID NO: 9577 - DNA, 60 bp, Homo sapiens; identical to SEQ ID NO: 7261
  chr20:61288557-61288617
  hypo

SEQ ID NO: 9578 - DNA, 210 bp, Homo sapiens
  chr20:657125-657335
  hyper
agagtaagtctcccctcccccctgctcgggctcccactggagccccctgttgggtttggggttcaactttcttcttccagaactggtggggggagcaagtcccccacgccgatgcctggccttgctcggttggtcctgttccggtgcctagctcaggcgggcgctgcaagaggaagtgaaaatcgtccagtaattaattttcctgctgcc

SEQ ID NO: 9579 - DNA, 47 bp, Homo sapiens
  chr20:708554-708601
  binary
cgggagccaccgcgcccggcgggatattatatttccataaggccctc

SEQ ID NO: 9580 - DNA, 52 bp, Homo sapiens
  chr20:708851-708903
  binary
gccgggccgggtccgcagctgacggtgggggtggggagcagacgggcggggc

SEQ ID NO: 9581 - DNA, 460 bp, Homo sapiens
  chr20:708944-709404
  binary
cgggccgactccgggccagctgcggaggcgggggaggggaccccgctttccatggcagtgccgaggcggcgcgcacaaaggcgccgcgatcagcgcttcatcggttcgagtcaattatctgaggcgcggaggcggcgggcggggcgaggcgattccccggtggggctgcggagcgcggcgccgagactcagaggagggggcgctggggaagcggcttctccgtctcctgctccgccccgggcttcgtggcgaggcgccgtcgccccctggtggggcctcatccattcctcgctcactcgctcgttcacctttttctcaaccttacagcgggtggctctacggtacgagctgagggtgaagtgctgagaacagggcaagcgggccgtacctttaaatgccctgtcgggagctgggcccctctgagtggccaacctcaccaggaaagggcgctcagcctcgc

SEQ ID NO: 9582 - DNA, 58 bp, Homo sapiens; identical to SEQ ID NO: 7264
  chr21:19274771-19274829
  hypo

SEQ ID NO: 9583 - DNA, 123 bp, Homo sapiens
  chr21:27011487-27011610
  binary
ccatctcctcagagcgccaccccctcagcttcgcccgttgggcagaattttccaaatatctccacccctaggctgaaaagccagaaagaagttttgagccaacgaggggaagaaaggagttgg

SEQ ID NO: 9584 - DNA, 134 bp, Homo sapiens
  chr21:27011639-27011773
  binary
atacatccccgtccccgagacacccaatccccccacccccagcctgcccgcgcctcccgcccccagctcctcgccctggggacagctggcagccccgcgcggaccagacacaaagccgatcaatcccggaggcg

SEQ ID NO: 9585 - DNA, 153 bp, Homo sapiens
  chr21:27012725-27012878
  hyper
agaattacttttatcctctccacctgcacatctacattcacttagagaagtctggtctggggactctagccagctgctctgtcctcaggggacatccaacgggacgattgttagaaagattcagaagccacatgatccagtagctggggagac

SEQ ID NO: 9586 - DNA, 246 bp, Homo sapiens
  chr21:38603108-38603354
  hypo
cgggcgggggcctgcgaagggcagtaggcaggtatcacaggtgagctcaccagatgggggaagctgccacagactggcaccacagcttcctgcaaaggggatctcccacccggaaaagcagactcggggcaaggtaggacaagtgtcccacgtcattcacagccacaatgcagacagcgagcctctggactcaggagacaagctgcctacaaacaccccggccacgtgccacacccagggcagagc

SEQ ID NO: 9587 - DNA, 79 bp, Homo sapiens
  chr21:38918381-38918460
  hypo
cgtggatatgatgagcggttatgcgggctctgcttcttgccacctacttgcaggttgaaggatgtgcctattccacatc

SEQ ID NO: 9588 - DNA, 169 bp, Homo sapiens
  chr21:38918561-38918730
  hypo
tactcacactctatacacctggattgagatcacagtattattattttcacaatcgaactgagcaaagatacggcagccactgaagactcactgtgaggtgcgtctaagggagaaaccatgggctgttgccgaagatctgggagaaaaagtgtggaaaaggcaaaaccgc

SEQ ID NO: 9589 - DNA, 749 bp, Homo sapiens
  chr21:40316188-40316937
  hypo
cgcactcggggtcccaattccacaccctctgcaaaggccctcgcagcctgcccgtgtctccgcctcctccccaaggtctcccctcccgcctgctcctccaacagatgggcccctggctttgcactactcctcttttcccttcctcaggactttatttttattttattttatttatttttattccggtaccacctctcagtgagacccactgtcaccccatcagcgccctctccaccctcccctgctttacttctccttatcatccagcatgcatctattcaccaatatattatttatcgcctggcttttctactaggcaaatgattctcaactggcggtgacatcgctcctcacttctcccgggggacagtgggcagtgcccggggtcacttttgattgtcacaattggaggaggcccctgacatctggtgagtggaggccagggatgctgcttaacatccttcaatgcacaggaaggcccagccacaaagcacgatccagcccaaaacgccggcagtgcctcggcagaaatgtcacctcctacaccatcaactctgtgagagcggggatttgtttgtcacgactgcgtcctggtgcccagaccaaagcctgcacatcacggtgctccgtggatgggtttgaaggagcggacctggaccagagcgtgctgtaggccacagtcagtgccggcccacccagaactggccactcagcggttacccatctctatcgctttctttcccagagtc

SEQ ID NO: 9590 - DNA, 66 bp, Homo sapiens
  chr21:45736431-45736497
  hypo
cgtacgtgcgtgggtaagcgtggtgtgtgggtgtgggtgtgggcagtgtgcacgcgagcatggcac

SEQ ID NO: 9591 - DNA, 731 bp, Homo sapiens; identical to SEQ ID NO: 6556
  chr21:47832850-47833581
  hypo

SEQ ID NO: 9592 - DNA, 130 bp, Homo sapiens; identical to SEQ ID NO: 7302
  chr22:19706042-19706172
  binary

SEQ ID NO: 9593 - DNA, 391 bp, Homo sapiens; identical to SEQ ID NO: 7304
  chr22:21319195-21319586
  hyper

SEQ ID NO: 9594 - DNA, 68 bp, Homo sapiens
  chr22:21368234-21368302
  hyper
cgccccgcagagggctacgtgccctgctggacagaggtctcctgcctcctcggcggcgccagcccacc

SEQ ID NO: 9595 - DNA, 94 bp, Homo sapiens
  chr22:21368697-21368791
  hyper
gtaggttgccgtagaaaccgtggctctcctgcgctgaggctcctcgcctgagaggataaactgcacgcgccacgggctatgcactgggctgggc

SEQ ID NO: 9596 - DNA, 46 bp, Homo sapiens
  chr22:21983041-21983087
  hypo
cgcaagtgctcaggcccacgaaggcgtctgtccacctgtggggggc

SEQ ID NO: 9597 - DNA, 192 bp, Homo sapiens; identical to SEQ ID NO: 6559
  chr22:22324565-22324757
  hypo

SEQ ID NO: 9598 - DNA, 137 bp, Homo sapiens; identical to SEQ ID NO: 5811
  chr22:22862472-22862609
  binary

SEQ ID NO: 9599 - DNA, 31 bp, Homo sapiens
  chr22:24819665-24819696
  binary
cgggggatgtggcgcggtccaggcccgtcgc

SEQ ID NO: 9600 - DNA, 174 bp, Homo sapiens
  chr22:24819901-24820075
  binary
cgggagccggcgtgcgagcggcaggtcagccggggtgctaggtctggcgtgcggggtcctgggtgccgggtccggggtgcggggtgccgggggtccggggctggtggccgggcggcgtggggccgtcgggggtgcggggccgggaggactgggaggctggggttctgctcccct

SEQ ID NO: 9601 - DNA, 61 bp, Homo sapiens
  chr22:24820486-24820547
  binary
aggtggaggagccgggcggagaccggttccccgggaaggtgaggcgcgggcagagataccc

SEQ ID NO: 9602 - DNA, 64 bp, Homo sapiens
  chr22:26999530-26999594
  hypo
cgtgggattgtcatggctactcaactcacggttcagtccaactataaaacaggcctggccgggc

SEQ ID NO: 9603 - DNA, 97 bp, Homo sapiens; identical to SEQ ID NO: 8441
  chr22:27053098-27053195
  hyper

SEQ ID NO: 9604 - DNA, 268 bp, Homo sapiens; identical to SEQ ID NO: 8442
  chr22:27053250-27053518
  hyper

SEQ ID NO: 9605 - DNA, 171 bp, Homo sapiens; identical to SEQ ID NO: 6134
  chr22:29550509-29550680
  hyper

SEQ ID NO: 9606 - DNA, 86 bp, Homo sapiens; identical to SEQ ID NO: 6560
  chr22:29587127-29587213
  hypo

SEQ ID NO: 9607 - DNA, 224 bp, Homo sapiens
  chr22:33192959-33193183
  hyper
cggcagccacgaacccagacgggatgttgactgagagctttgtggccatggcagatgggaggggtgagcttcacccactcaaaggcacccgcaccccaccgatgagtgtggaattgtgctctcccgccctcgcagtgagacgaccgaccaggactgcaggctgagcaaatgggtgttctctggcttatagcgccccctagcaccagccagcgggatagagctcc

SEQ ID NO: 9608 - DNA, 135 bp, Homo sapiens
  chr22:35420072-35420207
  hyper
cgagggcacggacacggtagaatcccaggtggaagaaggcaaagtgggcgggaggggagaacttgcatgttttaacctttttcctgcacccaaccccgccatccggacgccaagcttccagtcaaacctgagacc

SEQ ID NO: 9609 - DNA, 73 bp, Homo sapiens
  chr22:35420315-35420388
  hyper
ttaaattgttttaattaatcacagattgagcagtaaatgaaccactaagtggagagagcgcgcgggagcaagc

SEQ ID NO: 9610 - DNA, 96 bp, Homo sapiens; identical to SEQ ID NO: 6561
  chr22:36902565-36902661
  hypo

SEQ ID NO: 9611 - DNA, 391 bp, Homo sapiens
  chr22:38694593-38694984
  hypo
tgctgcccatggtggcacaagctgtcagcacggatgaggctggagggctctgggaccccagtgaggtcaaccacactgtccagctcgtacctcccgtctgtcgggagcccctcccgccaccagctcactctggccctctgagtcagggccttccccatccagtcccccaagcccgccttggcctccaggtgactcacgaatttcagcatgttccagtcaaagacgtagtcataggagaagccctgccggtggaagaggttgcggaagagctgacgtaggtaagagtagtcgggcttgtcgtcaaaccgcagggagcggcagaagttgaggtatgttgagaattcggctggagggtgttgcagaggatagagaaggccactgtgaggcccac

SEQ ID NO: 9612 - DNA, 317 bp, Homo sapiens
  chr22:40804031-40804348
  hypo
cggccctcgtggttgctccttacagggcctgtttttcccacaggctggtttccagccaagttcgtggaagtcctggatgagcgcagcaaagaggtgaggggggtgggcgggctaggcacggctggcacccttctagccagggcctgcgtgcctagcgagtcctggcctgtagcatggcagagaggacagaggagggtgactggctgcaggcgtcaggcagggctttctcagacccatccctcccatcagtactccatcgcgggggatgactcggtgacggagggggtcacagacctcgtgcgagggaccctctgccc

SEQ ID NO: 9613 - DNA, 106 bp, Homo sapiens; identical to SEQ ID NO: 7311
  chr22:41634855-41634961
  hypo

SEQ ID NO: 9614 - DNA, 366 bp, Homo sapiens
  chr22:41639303-41639669
  hypo
cgcacccggcttcatctattttaattttttttttaaattcagcattccagccttccattctataaatatatgacaacagtggcatggggcaggggcgggaggcagtctgcccacaatgcaggcagtaagcgggtgtgctgtcagtggagaagtgagacacaatggaactgacttaaagttggtctctgctttttattatcatgtgctgacaagtctaaacaatgtcaatgctaaaatatttcttcttgggcagaccattcctaccttctcggtaccacaccgtaccacaagtagcttacccattcctctagtgatagacatttgggttgtttccagcatgggtttattagaaagagcactgtagcc

SEQ ID NO: 9615 - DNA, 143 bp, Homo sapiens
  chr22:41669366-41669509
  hypo
cgtatcagaagactggtgtttaggagaacctgtttggggaacacggggctagaataacctgacttgccctttgcgttggccaaaaagggcaccacttggatctaaccttcaggagaacttgccagccgcacgcagtggctcac

SEQ ID NO: 9616 - DNA, 50 bp, Homo sapiens; identical to SEQ ID NO: 6566
  chr22:42395290-42395340
  hypo

SEQ ID NO: 9617 - DNA, 33 bp, Homo sapiens; identical to SEQ ID NO: 6567
  chr22:42667137-42667170
  hypo

SEQ ID NO: 9618 - DNA, 78 bp, Homo sapiens; identical to SEQ ID NO: 8460
  chr22:42995235-42995313
  hypo

SEQ ID NO: 9619 - DNA, 107 bp, Homo sapiens
  chr22:42995599-42995706
  hypo
cgagatgtcgtctcaaaacaaaaaaaacaacaggttctattcaacacgacctctcccacctgcctgatcagacacgcagtgtaagaaaacatgaaatgccataccat

SEQ ID NO: 9620 - DNA, 187 bp, Homo sapiens; identical to SEQ ID NO: 6568
  chr22:43570061-43570248
  hypo

SEQ ID NO: 9621 - DNA, 298 bp, Homo sapiens; identical to SEQ ID NO: 6569
  chr22:43570314-43570612
  hypo

SEQ ID NO: 9622 - DNA, 560 bp, Homo sapiens
  chr22:44419919-44420479
  binary
ccggcaccactagcggagccgagcagagcccagggctccaacgcgtagggaaaaggctgcgccgctcccggggtggccccacgccccttctctgagcttgagcggcggcgcgggacggggacggctctggccgggaccagcaggcctcgggcatccgggacgccggggccgcgctccaggccaggggcgggggcgggaccggggcgggggccggcggcggggccgcgccctcggcctctccccggggcgaccgggcggctccacacgcgctgcgcccgccgccggccccacgcgcggcccatgtcctccgcgccgcgctcgcccaccccgcggccccgcaggatgaagaaggacgagtcgttcctgggcaagctgggcggcaccctggccaggaagcggagggcgcgcgagggtgagtgcgcgcccgcgcccgccgacccccggggacctgcccggcggtgcccgccctcggccctagagccccacgaggccgcccccgccctcccccacgcaccccgcccggcccacgcggctgcgcgaccttcgggacaggccaggcc

SEQ ID NO: 9623 - DNA, 109 bp, Homo sapiens
  chr22:44420680-44420789
  hyper
ttccatgagcagtgacgctcacgtgtgcagggcactctgggcagacacggcctgggggacccactactgggtgttgcgcgggcgccctgcagggtgcggggctcagggc

SEQ ID NO: 9624 - DNA, 116 bp, Homo sapiens
  chr22:45123856-45123972
  hypo
cgcccctcgcttgatgcggcacattctggcggtgcctgtacctcccaccagatctggcctaggggagccggggctctcggagaagggagttttgtgtggcttgaaaggagctctgc

SEQ ID NO: 9625 - DNA, 404 bp, Homo sapiens; identical to SEQ ID NO: 6570
  chr22:45593240-45593644
  hypo

SEQ ID NO: 9626 - DNA, 258 bp, Homo sapiens; identical to SEQ ID NO: 6571
  chr22:45593715-45593973
  hypo

SEQ ID NO: 9627 - DNA, 567 bp, Homo sapiens; identical to SEQ ID NO: 6572
  chr22:45808579-45809146
  hypo

SEQ ID NO: 9628 - DNA, 225 bp, Homo sapiens
  chr22:46929401-46929626
  hypo
gcagagttgcccgggcccggcccaattgcgccccggcatgccaggcggagcccttggcgggttcctgaggctctccaggaggcccatcaggagctactcctcccaccccgacggccactcaccagacacagacacctccatgagcgcctccagcggccggttgttgtccaggtcgcggctgagctgcagttcgcccgtggcggggtccagcagcaacaggcgcag

SEQ ID NO: 9629 - DNA, 204 bp, Homo sapiens
  chr22:46929718-46929922
  hypo
tggacttgttggtgacatagttgttgaagaggatctggaagtcgggcagcacaggcgggttgtcattctggtccacgagaaggatgtgcaccgtggctcggctcaccagcggagccgacgtggcctgcaccaccagcacatactcccgccggacctcaaagtccagctccaccatggcacgcaggtccccgttgagcaggtcca

SEQ ID NO: 9630 - DNA, 282 bp, Homo sapiens
  chr22:46931438-46931720
  hypo
cgggggccggcccccatcctgggccttaatgctcagcgagtatttctggacatcctcgaaatccaaggggttgatcacatccaggatcccgctcagcgagtgcaggtagaactggccggccacgttcccgctgaggatgctgtagtgaatggccgcgttctggccctggtcccggtccgtggcctgcactcgcagcacagccgtgttgagccccacgtcctcgggcacctggaccacgtagttctgctcgctgaactgggggtagttgtcgttctcgtcctc

SEQ ID NO: 9631 - DNA, 68 bp, Homo sapiens
  chr22:46932128-46932196
  hypo
gcggtccagtacgctgtccgtgctcacggcgcccgtggcagagtcgattcggaagtagccccgggagc

SEQ ID NO: 9632 - DNA, 359 bp, Homo sapiens; identical to SEQ ID NO: 6573
  chr22:46979972-46980331
  hypo

SEQ ID NO: 9633 - DNA, 135 bp, Homo sapiens; identical to SEQ ID NO: 6574
  chr22:47022417-47022552
  hypo

SEQ ID NO: 9634 - DNA, 413 bp, Homo sapiens; identical to SEQ ID NO: 6575
  chr22:47022632-47023045
  hypo

SEQ ID NO: 9635 - DNA, 58 bp, Homo sapiens; identical to SEQ ID NO: 5813
  chr22:47023191-47023249
  hypo

SEQ ID NO: 9636 - DNA, 263 bp, Homo sapiens
  chr22:47054031-47054294
  hypo
cggggtcgcgtggacatgagcgatggtcacctggccgttctctcccccatagaggaggagctccggaagctgcgagaagaaaccaacgcggagatgctgcggcaggagctggaccgcgagcggcagcggcggatggagctggagcagaaggtgcaggaggtgctgaaggccaggtaccgcgccttcctcggggccctggcctgtgtgcggctgccccaaccccccaccccacccgccccgccgtcctctgctgcacccatagc

SEQ ID NO: 9637 - DNA, 237 bp, Homo sapiens
  chr22:47327916-47328153
  hypo
cgaggaatgccttattctgatgttacgcggtttctttcctggctcatgcatgcccccatttgtgcgtttatagaaagtgtaagtcctgtgctagtcagagcaagactctgtcagtgaagacgatggtgactagtggcgggttcaccgtgtcagacactgcgctaagcaggtcattacatgatcacctggaattcttaaatgccctctggcgacaccaccatacatgactgttgtgac

SEQ ID NO: 9638 - DNA, 350 bp, Homo sapiens
  chr22:47436589-47436939
  hypo
cgtgcgggacgtgactcagcagcagaggagcagctggggtaggccgtggaatgaaaaagaacaacaggttctgacaggacattcaaagccaggttcttttctctaaatcccggtgacttcttcctcttggggaacattcagggctctgagtatggtgagtgagcagcagccaagccggcctcctgggcctgggaggttccatttccagtttggtgaaggccacctctcgtttgagatcctcggctgccttcagggctgcgggtacacctgaaacggttacttacgctgctttagaatggctcctcacacacatcctgtgcaggtggcgggggactcgctggtaaacgggc

SEQ ID NO: 9639 - DNA, 59 bp, Homo sapiens; identical to SEQ ID NO: 5814
  chr22:50170525-50170584
  binary

SEQ ID NO: 9640 - DNA, 160 bp, Homo sapiens; identical to SEQ ID NO: 6576
  chr22:50170790-50170950
  hypo

SEQ ID NO: 9641 - DNA, 110 bp, Homo sapiens; identical to SEQ ID NO: 6577
  chr22:50177139-50177249
  hypo

SEQ ID NO: 9642 - DNA, 50 bp, Homo sapiens; identical to SEQ ID NO: 6578
  chr22:50177299-50177349
  hypo

SEQ ID NO: 9643 - DNA, 152 bp, Homo sapiens
  chr22:50873262-50873414
  hypo
cggacactgggcaggggccgggcacttgctctccgaagtgaacctggaggcctctgccacttggctctctgggtcgtgggtctggcaaggtcggggccaggaggccgccccgatggtgcctgttgctttcagggcagcgggtggcatgagac

SEQ ID NO: 9644 - DNA, 153 bp, Homo sapiens; identical to SEQ ID NO: 7319
  chr22:50899708-50899861
  hypo

SEQ ID NO: 9645 - DNA, 379 bp, Homo sapiens; identical to SEQ ID NO: 6581
  chr22:50942715-50943094
  hypo

SEQ ID NO: 9646 - DNA, 308 bp, Homo sapiens; identical to SEQ ID NO: 6582
  chr22:50943412-50943720
  hypo

SEQ ID NO: 9647 - DNA, 413 bp, Homo sapiens; identical to SEQ ID NO: 8479
  chr3:10206343-10206756
  hyper

SEQ ID NO: 9648 - DNA, 238 bp, Homo sapiens
  chr3:106959642-106959880
  hyper
cgttggcttctccacgagtgacaaccatgttttcccagatagaagaccggagccctgctcctttgcgatccgccgagggctgcagagagcatcctcatccatttgggcacccctgcccaggaagagcccggccatccctttccggactggatccttaagaggtgaattttcttccgtggattccgatttgctccgtctgaccagcctaggcaatccagcatcgcgtggtaccagtgcc

SEQ ID NO: 9649 - DNA, 228 bp, Homo sapiens
  chr3:107148769-107148997
  hyper
cgcccaggctgggaggcccaagtcccggcagctgctgcggtggacttagaggcagcagctcctgcttctgccccaaacgttcagtgtagtcggattcccggggacagcagggcagtctgcgcgcacatccccggggcatcgcaggacacctgctgccccctatcggtggtgagaacaataacccgaacccggttggaatcaactggaagaggccttttgaaaaaaaga

SEQ ID NO: 9650 - DNA, 49 bp, Homo sapiens; identical to SEQ ID NO: 6136
  chr3:115231437-115231486
  hyper

SEQ ID NO: 9651 - DNA, 127 bp, Homo sapiens
  chr3:119422082-119422209
  hyper
cagaccttcctccgcgtccgtcgcctcctaggccaggtgggctcccagatggtgggacctggccaggggcatggcgaacgaaacacgaccctctggactgacctcttgcccacggttgtccttggtc

SEQ ID NO: 9652 - DNA, 129 bp, Homo sapiens
  chr3:120626737-120626866
  hyper
cgacccccagcatactggccaataccgctgtcaatcaaatacctcacctacttctctaaattcccccctcccactgtcattggctttaccttcggcctatccacagatttcttctgccctggagaccac

SEQ ID NO: 9653 - DNA, 60 bp, Homo sapiens
  chr3:120627258-120627318
  binary
cacctgtgtgtgtctgtgtgagtgtgtgtgtgtgtttgagagagagagagacagagagag

SEQ ID NO: 9654 - DNA, 185 bp, Homo sapiens; identical to SEQ ID NO: 7332
  chr3:128737561-128737746
  hypo

SEQ ID NO: 9655 - DNA, 49 bp, Homo sapiens; identical to SEQ ID NO: 6138
  chr3:129694299-129694348
  hyper

SEQ ID NO: 9656 - DNA, 216 bp, Homo sapiens; identical to SEQ ID NO: 7334
  chr3:130424529-130424745
  hypo

SEQ ID NO: 9657 - DNA, 604 bp, Homo sapiens
  chr3:131753369-131753973
  binary
cgccccaggaacacaggaatgaagagttggcatttacttacctgggtgtgccaatctcgaagagtggagagagaattcagcccgggacgaggtctgtcccgcccccaggatgcaaaatccggctttgaagtggaggtggttggtgtggtagttttgtactgatgtaaggggcgtcgcacctccttcccctctcgtcctccgaggtcagtttagcaacagcggctgggaaaggtgctgagagcagagttcggtctctccggaaaccctgactccattctcggtgatgggggtgggggaagagggtgaaaatgttggagatgtcaggtcggctctcagttaactcggagagtaaagaggagggtactgagaaaagagggagggagtggagtggagcgagggaggaaggaaaggagggtggcagaaagagaaggggacgagcgggtggcggggagatggcagcttctcacagagagatttccaccttctgacgaatcccatgcacccagcaacccggcaagagactggttccgaaacctccgcgcgagcgccccctgggggttgctgacggagacgagcattgccccgggaacccgagctcaggccc

SEQ ID NO: 9658 - DNA, 323 bp, Homo sapiens
  chr3:134513748-134514071
  binary
cgaaggctcgtttgatcatttaaagcggatccagtcctgggtgggatgtaagggcacgaggcctccccagctccttcgctgggcaccctatggggggacagggtgagttgggcgggccgctgcggttctccgagagcaccacgagggggagcccggacccctcctagcgccttccgagccctcccgcacagccttgcaagcaaaagtttttcttaaactaacaatgccagtgtaaggaggtgctcgcgcctgattggccgggggaattttgcaggtttgattccttgattggacaggaggtgttaggggtggggagagagctg

SEQ ID NO: 9659 - DNA, 36 bp, Homo sapiens; identical to SEQ ID NO: 6140
  chr3:136751341-136751377
  hyper

SEQ ID NO: 9660 - DNA, 192 bp, Homo sapiens
  chr3:137480764-137480956
  hyper
gtcggggggtcagctggcgccctgcccaccatcgaacgcccttcgtatcactccgctcctcattgcgaattggactgcgcattggctgcgacccaaggctgaacacaagaagcttggagaggagctcgggcgtttgaggagaaggaaatatgaggaattgcaggaaggcgctcgcctgcccgaactgcctcc

SEQ ID NO: 9661 - DNA, 181 bp, Homo sapiens
  chr3:137488090-137488271
  hyper
cgccggcgcggcaggagcagagttgtttgggttttacctaggtttgctttcttaaaccttggctgccatctggctcaggggtacactggctacatcttcagagagatgtggaattcttgacccctttccgcctctggcctccctcattccgagaactccgtcagcctttcatgcacttctc

SEQ ID NO: 9662 - DNA, 79 bp, Homo sapiens
  chr3:139655101-139655180
  hyper
gcctgggagcgtcgggagctctggggtggggggccgggtctgaaacaggaggtcacgtgcttgcagggggtggggaggc

SEQ ID NO: 9663 - DNA, 147 bp, Homo sapiens
  chr3:141622422-141622569
  hypo
cgcacgtgcacatttcataagttttattttcttttacaggtttgatcttgctcttctacctagttttttatgggttcctggctgcactcttctcattcacgatgtgggttatgcttcagactctcaacgatgaggttccaaaatacc

SEQ ID NO: 9664 - DNA, 216 bp, Homo sapiens; identical to SEQ ID NO: 6583
  chr3:148804777-148804993
  hypo

SEQ ID NO: 9665 - DNA, 77 bp, Homo sapiens; identical to SEQ ID NO: 7342
  chr3:150187009-150187086
  hypo

SEQ ID NO: 9666 - DNA, 86 bp, Homo sapiens
  chr3:150802802-150802888
  binary
cgtgggttcaaattccgactcgtttcgtggctttcggcaagtgagtggtcctctctgagctggctcaatttctccatccataaaaa

SEQ ID NO: 9667 - DNA, 98 bp, Homo sapiens
  chr3:152553725-152553823
  hyper
actacctgccggctgtctacatcttggtattcatcatcggcttcctgggcaacagcgtggccatctggatgttcgtcttccacatgaagccctggagc

SEQ ID NO: 9668 - DNA, 32 bp, Homo sapiens
  chr3:152878837-152878869
  hyper
cgtgactggaaaccgaggagtcagaccctctc

SEQ ID NO: 9669 - DNA, 192 bp, Homo sapiens
  chr3:152879611-152879803
  hyper
cggggctgagtgaatggcgtccttgggcctttgataacgggagttggcaagaccacagcctactccatccctgaggcggcccgccgcgcccacgtgcttctcgcagagccgccgcccttgtccaccactcccacagctgtaaaataaagcggcctgcatgcttcctacagcgctttcctcgctcccatatac

SEQ ID NO: 9670 - DNA, 64 bp, Homo sapiens; identical to SEQ ID NO: 6142
  chr3:154797121-154797185
  hyper

SEQ ID NO: 9671 - DNA, 121 bp, Homo sapiens; identical to SEQ ID NO: 6143
  chr3:154797214-154797335
  hyper

SEQ ID NO: 9672 - DNA, 370 bp, Homo sapiens; identical to SEQ ID NO: 8498
  chr3:16553609-16553979
  hyper

SEQ ID NO: 9673 - DNA, 78 bp, Homo sapiens
  chr3:16555426-16555504
  binary
cagaacccaggggtcaggggctcatcgatcctccctcccagcccctcctaatcaaggttgtgtgctgtcaggaagagc

SEQ ID NO: 9674 - DNA, 123 bp, Homo sapiens
  chr3:168608983-168609106
  hypo
cgaaagcagatttggtgccaacgaagataattatatggacaatatttacaagaatgttttctgttagtgtggctttcaaataacatgaaagtacatgctcccgagccgggcgcggtgactcac

SEQ ID NO: 9675 - DNA, 271 bp, Homo sapiens
  chr3:169379645-169379916
  hyper
gcgttccgtaaacaacacaattagagagttttgttttcggcgagtgcgagtgtgggagagagaaccgcggcctgtccactcccgaggcagctccagccccgcctattgacacctcaaggaagagcgctcccagccgctccggggctcagtgtccctgagtccccttcaactcgaagtagaagcatttggacaaacgcagtcctgtcgtctacagtcctggcggagcatcacaccgtgtgggaaagtgtgggccccgccggcaaagccaggc

SEQ ID NO: 9676 - DNA, 54 bp, Homo sapiens; identical to SEQ ID NO: 7349
  chr3:169540679-169540733
  hypo

SEQ ID NO: 9677 - DNA, 108 bp, Homo sapiens
  chr3:170626349-170626457
  binary
cgcctttcgtctgcgcacccgcgctggtcccctacagcagcggcgccggcagcggcggtggcggccgcggcagttccaagagacggggcggggccgccacactttcca

SEQ ID NO: 9678 - DNA, 508 bp, Homo sapiens; identical to SEQ ID NO: 5817
  chr3:170626710-170627218
  binary

SEQ ID NO: 9679 - DNA, 97 bp, Homo sapiens
  chr3:179377859-179377956
  hypo
cgatttaattgtacaattcagtggcattaaattacattcgcatggaaacattttaactcgttttaattgtacaattcagtggcattaaattacattc

SEQ ID NO: 9680 - DNA, 87 bp, Homo sapiens; identical to SEQ ID NO: 6148
  chr3:179754092-179754179
  hyper

SEQ ID NO: 9681 - DNA, 135 bp, Homo sapiens
  chr3:180319921-180320056
  hyper
gtgctgtctgtgtacttccggcagcctccagacagtttcttccgcttcctgtaccacccggctcaagtagcggacacggaacagggaactatcagcccgtcggcctccgggccctgcattctctagccatggacc

SEQ ID NO: 9682 - DNA, 170 bp, Homo sapiens
  chr3:180320087-180320257
  hyper
cgggtcgtctttgctctctctacttcggagcgaacagcaggacaatccacacttccgtagcctcctggggtcggccgccgagccagcccggggcccgccgccccagcacccgttgcagggcaggtaatgagacgttggtgccactgcgccacggaagaggggacgcagct

SEQ ID NO: 9683 - DNA, 98 bp, Homo sapiens
  chr3:180320294-180320392
  hyper
aggaagtggagccgcggccgtgagcacaggacgatcgcgcgctggtgtcttgggctgggtggacggggggcgctcctgggttgtgcaatgcgggatgc

SEQ ID NO: 9684 - DNA, 207 bp, Homo sapiens; identical to SEQ ID NO: 5818
  chr3:180397104-180397311
  binary

SEQ ID NO: 9685 - DNA, 48 bp, Homo sapiens; identical to SEQ ID NO: 7353
  chr3:181444767-181444815
  hyper

SEQ ID NO: 9686 - DNA, 809 bp, Homo sapiens; identical to SEQ ID NO: 5819
  chr3:183165024-183165833
  binary

SEQ ID NO: 9687 - DNA, 117 bp, Homo sapiens
  chr3:183275024-183275141
  hypo
cggtcacaagtacagtcatgcccagcacaatgacatttcaatcgatgatggactgaatatacaattgtggtcccaaaagattataatggagcatataaagaaacctgacggccgggc

SEQ ID NO: 9688 - DNA, 140 bp, Homo sapiens
  chr3:183419820-183419960
  hypo
cgcttaccgaaatgctcttcatccttcaagaatcaaattccgactcatccatgaagtgaactccagccttcgaaagctttttttccccctaactactacagaacagatgatatggaaacaatctgcatcaggccagccgc

SEQ ID NO: 9689 - DNA, 54 bp, Homo sapiens
  chr3:183643595-183643649
  hypo
agttttacactatctattgttttcttttctttcttttttttttttttttgagac

SEQ ID NO: 9690 - DNA, 939 bp, Homo sapiens
  chr3:184278877-184279816
  binary
cggacactggccgtcgccctcacgtacgctcgaggaactcttcctcctctgcaataaagctccttacactctacagcgatgacttaatcccacgtcctccactgctaagctagtaacacaagcctctgtcttgtccattgcggtagcacccgcaggtactacagtctgacacattgtgggcgctcacaaagatgtgctgaatgaatgactaaatacgcagcccagtgaaagaatgaagaaacgatgaagtcccttgtcacaggatacatcgcggtgggggtccccccaagtagcactaagctacagccacatgagggcgtcgcagggcagacgcgggccacatgggggcgcccccggtccgtcttagctggttggcacctcctcggactcagtttaggttactaatcgccaatgggcgccaggaggcggggttctccctctgatggacagcatcgctccgcccaatctaattcatcttttccttagccccgcccactccggcccctgagaccccgagggtgggcctggcggagacaccgccaactgaactccagctgagtgctctcgaggccgaaccagcgggcctggcggtctgtgagtgggtggccagccgctaggggcggggcctcagcgttgacgggcaggcaggccgtcccacccctctcgcccagagcggccgcgccagcgctggggacagcagaagtgagtacgtgagcggcgcagcaagatcccagctcggaccccggacggcgcgcgcccccgaagccccggatcccagtcgggcccgcagctgaccgccagattactgtgcatcccgaatcacgaccacctgcaccctcctgccccggcccgccccccaagtcctcaggcacccagctccccggcgccccggatcctcctggaccggtccgtccagattcccgcgggaccgacctgtcc

SEQ ID NO: 9691 - DNA, 253 bp, Homo sapiens
  chr3:184322331-184322584
  hyper
ggtctggcctggggggcgcctcccgccccctcttggggaaggtgctcggagactcccgggccctgggcggagagtgtggggaggctgggctaaaggcagagacccaggccgagggctctgacccacccaagaggaaatagctactaattagggacgggacgtttttatgctaatatgcacctggctgggcttttctggaggctgagaaagtgtggagtggaagggaagaagttccggagagcgggaaacttcc

SEQ ID NO: 9692 - DNA, 291 bp, Homo sapiens; identical to SEQ ID NO: 5820
  chr3:186079331-186079622
  binary

SEQ ID NO: 9693 - DNA, 46 bp, Homo sapiens; identical to SEQ ID NO: 7356
  chr3:187455297-187455343
  binary

SEQ ID NO: 9694 - DNA, 447 bp, Homo sapiens; identical to SEQ ID NO: 7357
  chr3:187456666-187457113
  binary

SEQ ID NO: 9695 - DNA, 509 bp, Homo sapiens; identical to SEQ ID NO: 7358
  chr3:187457654-187458163
  hyper

SEQ ID NO: 9696 - DNA, 56 bp, Homo sapiens; identical to SEQ ID NO: 6150
  chr3:192128140-192128196
  hyper

SEQ ID NO: 9697 - DNA, 154 bp, Homo sapiens; identical to SEQ ID NO: 7360
  chr3:193922622-193922776
  hypo

SEQ ID NO: 9698 - DNA, 63 bp, Homo sapiens
  chr3:195093160-195093223
  hypo
cgcctccgacctcagcacctgggagtcccggagacgatcactttagcacaagacctcagcagc

SEQ ID NO: 9699 - DNA, 473 bp, Homo sapiens
  chr3:195750601-195751074
  hypo
cgcacctgccaaacgcaacagcctctttcagcgtcattaaaatatttcaacaggaggactgagtttagactcaacctgtgttttctcccctggaaaacgaaggtttcatgaagcaaggaaggtctttactgtcctcatccgaaacgctgaggcatctgtgatgtctgctgtaagtgccaccaggctctccgctgaaatctcgcaacgggaaaatagagaccgtagattctgcttttagaaaggggagaatcagaagtaatgtggaaatgccatgtcctcgttcataaacatcttcttttacaaattccacaagtttagttactttgggattaatatgggcttatcttaaagtgcgtttattaacttagcgtgagttgttcaaatgcattctggatcctgagccgacatccagcaatgctgagtgtgcgcctgtgtgagtcaccagccctgatgagcctcaggttattgtgttc

SEQ ID NO: 9700 - DNA, 93 bp, Homo sapiens
  chr3:196434743-196434836
  hypo
cgcggattattctttaattgttcagcagctctggtgcaatctgggagagagaagaaaactatataccacatacgtaccacgtacatcatatac

SEQ ID NO: 9701 - DNA, 211 bp, Homo sapiens
  chr3:197023975-197024186
  hyper
cgattctaaaacggcaatcaaaaaactgacacacggaaaagcaagtgacatcgacaacagagttacggaataaactctcaccttgcttccggaccggcatttttctccagaatcaggaagagggcacacacctttaaaacacacaacggaaaggaaaaaggatagaatcatgttaaactagcattttcccctatcgaaatagaaaaccctc

SEQ ID NO: 9702 - DNA, 80 bp, Homo sapiens
  chr3:197330147-197330227
  hypo
atgtgtgagataataatagaagatattcctgagagttttgtgtatttttgtgtattttccttgcttgtggatggaagcgc

SEQ ID NO: 9703 - DNA, 151 bp, Homo sapiens
  chr3:197807078-197807229
  hyper
cgctctgagggtgcccagcgccctccaaggcccccgtcccaggggctgcggggctgcggggaagccgggcctggggaccccctcccaccccggctgagcccccgctacctgtcctgggcatccacgtcccggcacctgcgcgccaggcggc

SEQ ID NO: 9704 - DNA, 368 bp, Homo sapiens
  chr3:197807545-197807913
  hyper
ctcagcccgcgaagccgttaggcgcgcgcctgcagctcagcgcccgcgcggactccggaagccgctcccaagcccgcgctgccggcagggggcggctgcggctcgggcgcaggcgccgctggcttgcgggttctcctgggctcgcccgggacgtcccgtagtcgcaggcgcgcaacccgcccggcctgagggcccgcctggccgtgacccccgccccgctcctcctccgaagagagatcggggccgctggcaggggccctccgcagccaccagggatggggctgtggggcagttcccgccccggtgcagccgccgccgggcagaccgcctggcttggctgcagccgcggcatctggctccggttctgc

SEQ ID NO: 9705 - DNA, 559 bp, Homo sapiens; identical to SEQ ID NO: 5821
  chr3:32433054-32433613
  binary

SEQ ID NO: 9706 - DNA, 201 bp, Homo sapiens; identical to SEQ ID NO: 5822
  chr3:32433665-32433866
  binary

SEQ ID NO: 9707 - DNA, 81 bp, Homo sapiens; identical to SEQ ID NO: 5823
  chr3:32434068-32434149
  binary

SEQ ID NO: 9708 - DNA, 88 bp, Homo sapiens
  chr3:40350800-40350888
  hyper
cgattttacttacattacccggggcctcgagggtgactcatagagattagccctgagcgtcgacccctcggcgccgccactgcacagc

SEQ ID NO: 9709 - DNA, 190 bp, Homo sapiens
  chr3:49066961-49067151
  hyper
cgctgaagaaacagcgcatgcgtatagcacatagtggccttgtcactgaggagctgccacttcacgtcccaccccacactccccgcaggacctcggccagttcaattaacaggcaagggtttacttctactgtcccgccgggctcctccccaaaataaagagacgttgttcactaacatgttgaaaagac

SEQ ID NO: 9710 - DNA, 234 bp, Homo sapiens; identical to SEQ ID NO: 5824
  chr3:49906737-49906971
  binary

SEQ ID NO: 9711 - DNA, 49 bp, Homo sapiens; identical to SEQ ID NO: 5825
  chr3:49907379-49907428
  binary

SEQ ID NO: 9712 - DNA, 59 bp, Homo sapiens; identical to SEQ ID NO: 7371
  chr3:5165842-5165901
  hypo

SEQ ID NO: 9713 - DNA, 333 bp, Homo sapiens; identical to SEQ ID NO: 7372
  chr3:53032401-53032734
  hypo

SEQ ID NO: 9714 - DNA, 202 bp, Homo sapiens
  chr3:54156155-54156357
  hyper
gccgcccgcaaagtgcggagcgccgcgccctgccctcggcttccctcccgcgcccccaacccccaccctggctagggtcgcccggcccggggccagccccagagtcgcgcccgcggtggcggactgcggagttgtaaagaactcagcggccgcagtagcccgggtggggcagggcgcgctccgccgcggccaaggacactgg

SEQ ID NO: 9715 - DNA, 347 bp, Homo sapiens
  chr3:55521390-55521737
  hyper
tccaaccccaaatgtgggcgtgattgtgcaaaagaccttacgacaaataataataaaaagaaattcttcacaagagggtgaaaaaaatgtaccactactcaactgtggcccggggcgggggaaggggggcgatctgtgcgcccaggtgcccccagttcattcacaccacagattctgcaaactcttggcggctcacgcctcctgatctccagctcctcctctctgggtctgtagccgaaacgtctgcttccagacgctgatcctgcagccgcgagttagtgtggacgtctctgtacacacacagacacacaccccaacacacacacccccgctgcagctttggggcc

SEQ ID NO: 9716 - DNA, 128 bp, Homo sapiens
  chr3:57204027-57204155
  hyper
cgcctggcctgggaccgccttgcctgggacgaaaggccccagactcagctgattcctccagactcttcctgtctaggacgccaaaaacatggccttcctaaacccagccttggcgcctcctgcacagc

SEQ ID NO: 9717 - DNA, 322 bp, Homo sapiens
  chr3:57204208-57204530
  hyper
tgcgcccagaaatcccaggacgcccaccccatagttctggagcggtgcgtaccttggccactacacggaattcaccggcccacggccacttcccgtttcttttcccggaggaaaagaagagcggatgtctagtctccaaggtaaccgcgagggggcgcgcgcagtccaggtcggagaccgccgccccagactaccctgcactgcgaccgcacaacaagtctttctagatcaaagccgccagggcaggtgggagtactctgctgttattcagagctggtgctaagctttaggggaagtagagtccagggggtcgtaagaaaac

SEQ ID NO: 9718 - DNA, 447 bp, Homo sapiens; identical to SEQ ID NO: 6156
  chr3:62859445-62859892
  hyper

SEQ ID NO: 9719 - DNA, 206 bp, Homo sapiens; identical to SEQ ID NO: 6157
  chr3:62859964-62860170
  hyper

SEQ ID NO: 9720 - DNA, 86 bp, Homo sapiens
  chr3:63264169-63264255
  hyper
aaaagaactggtggatgagaagagcgagcgagggcgagctatggaccctgtgagtcaggtgagacagaactgggcagggcggctgg

SEQ ID NO: 9721 - DNA, 138 bp, Homo sapiens
  chr3:63264840-63264978
  hyper
aagctcagaaagttggtcagaactgagacagctcctctgcgggactgggatgctggaagcgcgtgttcaactgctccgcgggagcttcagggagggaaagatgctgcgaagctattacagactgttataaacggcggc

SEQ ID NO: 9722 - DNA, 1076 bp, Homo sapiens
  chr3:67048291-67049367
  binary
cggaagctagtcactggcaggaagtttacggaagaagaaaaaggtaaaaaaatgtgccgggggccaggagagaggcctaaaatggggaaattcgcacttgaagagctttccctaccccagcccctcagaatgacagttctcctccgccagaagactacctctcccggcaggcactgcgcgctcgacggccacaggctggccagctccctgctctccacctccatccgaatcagccaataggaattcccggcttgggcctccgcccgacccggaccacgcgggagccggggcaatcaaactacatttcccgacacgcatgtgctcgcgtcgtggccaatcagcgccaggaattcggaggctaggggtggagccagatgcacaggacaccccattggccaggggaagcttagaagagccggaacccgggagctagagaagcgaaatgacatttcctttttaaatagctggagtcggggccccatcgagaaatggccgcgtcggcaggtgggtcgtgtggtggccagggcggcgtggagggaggtgagggggaaggtgggccggggccggccacaggcagtgggatgaggacgtagcggtgcggagctagagggaaggatgaagcggtggaggggaatgagaagagggaggatgaatggtgcggagggcggtgggcggtccggcgggaccgggatggggaggctgggtacccgccggcgctgcgccccaggaggcagcgggaggcggcttgagggggcaccggcggccgccgttgttcgagcttccctcgtgaggctctgccctcggctctcggcggagtccgcgcagacgcctctcctgggctgcgagcgcgtttcctccgcgagcacgggtgccgggctcgccgggctccgcaggagcaggctggcctttgaacttgttccgccgatcgcgctccgccctctgtctcccagatccttaactcgcggtcccacgaggtcgtgcgtatatccacagacatttgtatatatcttgtagggggaaaaagcctagcaagcagacacacaaacagaaaaatcccgcgatgccgtaactggctc

SEQ ID NO: 9723 - DNA, 311 bp, Homo sapiens; identical to SEQ ID NO: 6158
  chr3:73674224-73674535
  hyper

SEQ ID NO: 9724 - DNA, 167 bp, Homo sapiens
  chr3:79815913-79816080
  hyper
ggggcagggagaaggagcaagaaggggccccagaagggcacggcgtttcatcaataatgcagaggctcctggacctccctgcaatacgttttccagctaaacgccaccaactggagcgcttcctggttcgtcccactcgtgtggtttttgtgtgtgaaagatgggac

SEQ ID NO: 9725 - DNA, 174 bp, Homo sapiens; identical to SEQ ID NO: 6159
  chr3:85008817-85008991
  hyper

SEQ ID NO: 9726 - DNA, 113 bp, Homo sapiens; identical to SEQ ID NO: 7378
  chr4:100555198-100555311
  hypo

SEQ ID NO: 9727 - DNA, 135 bp, Homo sapiens
  chr4:100729543-100729678
  hyper
cgatggatctaatcttgacttcaggtaaaacagctcccccgcgcccaccaacgcggtattactgccacctagtgatagcatatcctcatcacagaggtcctgcctgtggaagtggaggggaagaggtgtagtaag

SEQ ID NO: 9728 - DNA, 106 bp, Homo sapiens
  chr4:113627471-113627577
  hyper
cggggccgacacgagccaacttggctacatcgcccggcccaggaccattctctaaacctcttttctcagtctcacttcacacacagacacacatacagacacacac

SEQ ID NO: 9729 - DNA, 260 bp, Homo sapiens
  chr4:121993736-121993996
  hyper
tcccagccctaacccctcccgcctcaccgctgcccgcccgccccctccctcctctgcccgttgcctccccctccgtccctccttctctccctcccgctgcgcgccagcgcgcacgcacacacacacacacacacacacactcatacacatacacacactcacacacagacaccctctccctccttttctctctccctgtagccctccctccctctctttctctcacacacacaccaccctgctcagcgacccagcgctcc

SEQ ID NO: 9730 - DNA, 36 bp, Homo sapiens
  chr4:121994354-121994390
  hyper
ttgaaactcagcagctgttttaacaattgaaaaagc

SEQ ID NO: 9731 - DNA, 464 bp, Homo sapiens; identical to SEQ ID NO: 6590
  chr4:1225310-1225774
  hypo

SEQ ID NO: 9732 - DNA, 71 bp, Homo sapiens
  chr4:123747655-123747726
  hyper
cgtggtttgggtggtgcgggggttgggcgggggtgacttttgggggataaggggcggtggagcccagggaa

SEQ ID NO: 9733 - DNA, 225 bp, Homo sapiens
  chr4:123748993-123749218
  hyper
actactctcacccactctgttttatatttttccgaattgacgaaagctgaaagagcaaaaacaaaaaccaaccagccaaccagcaaaaaatccagatgttgttaataaagtgccatagctttgtttcagtagtgaaaagaagtgcaaacactttaatcttccacctgcagtgactagctttgagaccttgagccgacgcttaaccccagagccggtttcctcatc

SEQ ID NO: 9734 - DNA, 162 bp, Homo sapiens
  chr4:128702523-128702685
  hypo
cgatcaaaccaagagggagggcgctggaccacactgggctcttttttgaggaccacagggcagcggctggaggctaaagcacagacttggctggtgtgagtggcacacttaattaaggtcactttcctgtaaaactggtttccagagacaagggtcagcggc

SEQ ID NO: 9735 - DNA, 153 bp, Homo sapiens
  chr4:13546756-13546909
  hyper
attggctggctccagttgggcgacgttgactttaacagacaaaactgggcacgttgcgccgctaaagacagggtctgacttaaccccttctctcctaagcctggtcctcgaagcaccctccagcaacaaggaggctcatccgacccaaaccac

SEQ ID NO: 9736 - DNA, 353 bp, Homo sapiens
  chr4:141293964-141294317
  hyper
cgaatattaaagcaggatgccgctttgtgtcaagtactagattacgatgaacggtgtcacgaagaacactccactcttgataccgtatatgtgaccttgagcaagaaatgtgttcacgctcaggcttcagttcctttctgtgggttgctgtgaggctccacaggggtaaggtaagcacaagtgctatgcctcagtaccactagggtattttctcaattctaaaatattaaatggccacgcactacagatttaataatagtttcggaggaggggcgtgaggagaggaacattccactagctcaactataagctttccgatttcggaaataagaaaaatatgaaaaagtctgctt

SEQ ID NO: 9737 - DNA, 104 bp, Homo sapiens
  chr4:141294418-141294522
  hyper
ctttcctgaatgacttctctgtcgctcataccagcctctttcctgattttccacactgggattctcactccaattctcaggtttcctgatagacctgatgagcc

SEQ ID NO: 9738 - DNA, 89 bp, Homo sapiens
  chr4:141294545-141294634
  hyper
cgcttctttactgtcattggctgtcgctgttccaggtcccgcccacagcgacctcaatcctgattggatgtcagtgtccttttgttatg

SEQ ID NO: 9739 - DNA, 40 bp, Homo sapiens
  chr4:141295287-141295327
  hyper
tgggaggggaggctgaggtggggagggagcctagagagcc

SEQ ID NO: 9740 - DNA, 116 bp, Homo sapiens; identical to SEQ ID NO: 6592
  chr4:152591291-152591407
  hypo

SEQ ID NO: 9741 - DNA, 40 bp, Homo sapiens; identical to SEQ ID NO: 5826
  chr4:156298073-156298113
  binary

SEQ ID NO: 9742 - DNA, 353 bp, Homo sapiens; identical to SEQ ID NO: 6166
  chr4:15780742-15781095
  hyper

SEQ ID NO: 9743 - DNA, 54 bp, Homo sapiens; identical to SEQ ID NO: 6167
  chr4:158142705-158142759
  hyper

SEQ ID NO: 9744 - DNA, 269 bp, Homo sapiens; identical to SEQ ID NO: 6168
  chr4:158143023-158143292
  hyper

SEQ ID NO: 9745 - DNA, 213 bp, Homo sapiens
  chr4:158143704-158143917
  hyper
gggcgaggccgccaggggcgccgcggtcagcttgccagcccggcgcgctttgttctcaggtagctgggctccagcagaggcagccggggaaaaggactgggaagccgtgggatctggccgagtttgaaaatctggagaagtcgctgatcagccattttagtctttgcaatgctccatattaaccctctcactccgcgcagtgctccgggactc

SEQ ID NO: 9746 - DNA, 71 bp, Homo sapiens
  chr4:175750738-175750809
  hyper
agcagtaaacccagaccctggcggagggctggggaagagaagacaatgtggtgcgtgaacgcccgtggaac

SEQ ID NO: 9747 - DNA, 69 bp, Homo sapiens; identical to SEQ ID NO: 6173
  chr4:176922585-176922654
  hyper

SEQ ID NO: 9748 - DNA, 43 bp, Homo sapiens; identical to SEQ ID NO: 6174
  chr4:176986744-176986787
  hyper

SEQ ID NO: 9749 - DNA, 285 bp, Homo sapiens
  chr4:2042731-2043016
  hyper
ggggggcgcccgaggctccgggtcctgcacggcgagcggggcggcctccaggtaggggtgcggctccgcccaccaagaagagggtctggcgggaggtgtggttagtccctgagctcccggccacagcgcgggctgctgggtggggtggggggggagcgggggcgccagcacccacgtgcgcctggggcgccttctgaggaggccaccgcctgtgtcggtgtcggcgtgggggcctggctccgacggctgggaccatccctcccagggcgtccggggcccagattc

SEQ ID NO: 9750 - DNA, 50 bp, Homo sapiens; identical to SEQ ID NO: 6595
  chr4:2622600-2622650
  hypo

SEQ ID NO: 9751 - DNA, 196 bp, Homo sapiens
  chr4:46391158-46391354
  hyper
cgccacaaccccctcaaccaagaccacctccgcaaccacagcgggaaaagctaggggcaggcagcccacttttgcaattactctacattacagtgaactgcggtcctcacgtcttcttttcttcactccccttaacaaaataaaataaataatttcccttcctgcccacccacggttgcccaagaccaagtcttag

SEQ ID NO: 9752 - DNA, 296 bp, Homo sapiens
  chr4:46391383-46391679
  hyper
aaacgacgcgtttgacagctgctctggagccgaggatcacaataagagaaggcgcgtgaggctccggcagcaaacaccagccaggcaggcagcggtaatcacagtgagcaaagttgaagactataaaagagccaggctaacgtgctgccgagcaggtgtcctggattttattgtagttgcaaatatgcttctggtgataagtatcgaaattattttttaagtgcgctggggaggagggaggtgcgggaattgagcctcctccgtttccagggagcctctgaaagtggggtgggggg

SEQ ID NO: 9753 - DNA, 431 bp, Homo sapiens
  chr4:46391710-46392141
  hyper
caggaaagtgtctctatcgggaccaacgtgtgcgaccctacctgaaacggcaagcagaattcggtgttttcttccttttgccctgatcttgacgagataggaaacttgggagagagagagagagagagagagagagagagagagagagagagagagagagagagagagaccgagactgcagcagccaagagagcgtggagcgatgggctggtggaagccggagaggagcgctaggagccgcggcggcggcgcgaggtgtagaaggaggcgaaggcgttcgtagtggcggtgatgggcggaggaggaggaagaggaggaggaggaagaggaggagggggaaaacgatgacaggagctggggccggggggggaaattggggggacgcgggcggaggcgcggtgcgcgccggcggtggcgggcacgagccccgc

SEQ ID NO: 9754 - DNA, 635 bp, Homo sapiens; identical to SEQ ID NO: 6596
  chr4:513070-513705
  hypo

SEQ ID NO: 9755 - DNA, 221 bp, Homo sapiens; identical to SEQ ID NO: 6597
  chr4:513734-513955
  hypo

SEQ ID NO: 9756 - DNA, 354 bp, Homo sapiens
  chr4:54967511-54967865
  hyper
agcccccatccctctttaatcctgtgacttcgcatcctgcgcatcgaagacctttatttgctttgcacgtctcttttcttccccgctaagcaaccacgtgccttgaaatgggaaagggatacagatgttcggctgggcttccccgggtgggtccctgaaatgcgtcctggttagcacatggggtgggagcaccttgcccgagccttacctctctaccctctcttcgccggtccgcaggaggctctgacgccagccaggtacccaatggcaagaggatgaggacggcgttcactagcacgcaactcctggagctggagagagaattctcttccaacatgtacctgtctcgactcc

SEQ ID NO: 9757 - DNA, 94 bp, Homo sapiens
  chr4:57687545-57687639
  binary
cgaagcccaagcaagaactaaagagggtggctgactccacaaagccacccccacaacccccagttcgcgttcctccacctggcaggtcctctgg

SEQ ID NO: 9758 - DNA, 205 bp, Homo sapiens
  chr4:57687887-57688092
  hyper
gcgctcgtgcgacggggcgcggggagggcgggggaaggggcggggcgagaatgggaggaaaagcagcggtaggtggcgagggaagaggggcggcgggaagaggagcggcgggaagaggagccgtgaagggtcgggggagaaccggaaagggctgggaaggagaaaggtagaaggacgggggagggggccatggggaaggaggggc

SEQ ID NO: 9759 - DNA, 428 bp, Homo sapiens
  chr4:58029764-58030192
  hyper
cgtgagtcagtgattcccagtgttgctgtgcctgaaaacccaccactaatgtcagcgccttgtgctgttgagttgcacgcggcgcccctgcagtccagggctggggctagcccggcgagcgcgcggcaggcagagcattcccggacgagtccggtagatggtagcattgtgcagccgatgcgtcctctcccagcttgcgtctcatttttccctctccccctttcctgggctcagcggtgaggctcaggtaccggcgccgccctgatgcctactatgccgcgccatctccagatggtccgcacctggcgggtcacgacgagtctcaatccacagcatggggctgactcggactcaggagtttttgtggctccaggcgtaaccgttgctttggataaaattggtccagttcacttgaccaaggagaagtg

SEQ ID NO: 9760 - DNA, 80 bp, Homo sapiens; identical to SEQ ID NO: 6182
  chr4:6201800-6201880
  hyper

SEQ ID NO: 9761 - DNA, 65 bp, Homo sapiens; identical to SEQ ID NO: 6183
  chr4:6202658-6202723
  hyper

SEQ ID NO: 9762 - DNA, 37 bp, Homo sapiens; identical to SEQ ID NO: 7406
  chr4:71566942-71566979
  hypo

SEQ ID NO: 9763 - DNA, 230 bp, Homo sapiens
  chr4:73433670-73433900
  hyper
cgggcttcaccttgagcctccaaagggttgggggcagggccgaaaagaaacagagctgcactcaacttagctttaaaaagaggaggagttgtgcagagggggaggggagaaggcggccggcgcctgcagcctctgcccaggaaaacggagggcaggaaacgtctccagcccccctccccaactgtcaaatcctagcccggccgtggtactcccaggacacgtgtctactg

SEQ ID NO: 9764 - DNA, 125 bp, Homo sapiens
  chr4:73434163-73434288
  hyper
ggtgaagccctaggtgtgacaagactgggctcccggagtgggagtcgtaacctcccgtgcaactcaaccctctacccccaaaagcccgcacgctgcgcccagccctcaaaacaccgtttctgaac

SEQ ID NO: 9765 - DNA, 133 bp, Homo sapiens; identical to SEQ ID NO: 6184
  chr4:76555905-76556038
  hyper

SEQ ID NO: 9766 - DNA, 780 bp, Homo sapiens
  chr4:80993254-80994034
  hyper
cgatggagcgtggcccgcaagaggccacactcccatttcccaagaggccaaaagactggcaaacagtgaataccccaactccccaaagagccaagtagcccggggctccaatcactacccccgacccggctgatctccgcccacacagatccgaacgcgcttgccctttgaaagaagacagcaacagggcacccctccgcgggtttccaacaccactccccggggtgcgcacacgcatctcagcctcagccccagctgatccagtgccgccctcaccaggagaccctggacctccctcgcacactcacttgtccaggacgaagtagagatcaaaggctcttctgcaggagggctgctcctgggcgcgcagcagccccccgggaccgctgagcaccaacagccacagcccggggaacagccagctcccggggctgcgggccggggaccgctccgccaccatcctgcggccgggggcctgagactccctcccgctcgcagtcccctaagctcaggagggtcgcaaaggtggcgggagtcacccggcacgcactctggggtggggggcggcgagcagctgagacgccggcgcctgcggcagcgggacccaccagctgacagggagggagagagggaggtcctgagaggacaaagggagtctccgccaccgccgcagctgccgccggaactcttgacgaatcccagtggaagcgcgatccagtcctccccctcccgattccggagagttcctgcagacaatgcgggcccacggcgacagctcgc

SEQ ID NO: 9767 - DNA, 115 bp, Homo sapiens
  chr4:8609457-8609572
  binary
cgccccgcgcctggcggggtccccagtgcttcccaccgcagaggggtgcgtttccgggaggcgccggcagagggcagtgctgcagcgcgcatgctgcccgcccgtcctgcttccc

SEQ ID NO: 9768 - DNA, 616 bp, Homo sapiens; identical to SEQ ID NO: 6185
  chr4:90228673-90229289
  hyper

SEQ ID NO: 9769 - DNA, 115 bp, Homo sapiens; identical to SEQ ID NO: 6187
  chr5:100236036-100236151
  hyper

SEQ ID NO: 9770 - DNA, 87 bp, Homo sapiens; identical to SEQ ID NO: 6188
  chr5:100238197-100238284
  hyper

SEQ ID NO: 9771 - DNA, 345 bp, Homo sapiens; identical to SEQ ID NO: 6189
  chr5:100239724-100240069
  hyper

SEQ ID NO: 9772 - DNA, 400 bp, Homo sapiens
  chr5:101631635-101632035
  hyper
agtgaagcagaaagcctccaggtgtgttgcagcgctggagacattgaggatggaagttcctccagccgtaagacccctcctcaaactcggacagcgacagtgaccggagcttctcttcggagacattgggaggggctgaaggcagagatggctctggtgacttctggggctcctggggcttctgaagctcctgtggctgagaattctctctttgggggtcagaggacaaggcagagacttcgatttgggagggcgacgcagacaagcggcgcaggatgtctgggctggaggggacaaaagccaagttctcaatacctttggcgctcttcatgtctggatgggttctcccgactccggtgcttcagagcagcagagccaggtccctctctggctcctccca

SEQ ID NO: 9773 - DNA, 222 bp, Homo sapiens; identical to SEQ ID NO: 6191
  chr5:101632074-101632296
  hyper

SEQ ID NO: 9774 - DNA, 319 bp, Homo sapiens
  chr5:1039295-1039614
  hypo
cggtcccaacactcacggggcgacttctgtgacatgtcagctttggagaaaggtgtgtcctgcaagggtcaggagacggttgcaggccagaaggacgtcccagtgacgtttcggagtcttgcagcctgcaggggtccatgtggttacccggaacaggaaccgtgggggtgctttccgggacccagggggcccgtgccaatgtttctgagtcttggagcctgcaggggtccacgtgtttaccctgaacaggaacatgcgggtgttttccggaatctggcgaggccgcgcggcagttttgcatttacattccttgttttgt

SEQ ID NO: 9775 - DNA, 132 bp, Homo sapiens
  chr5:1039683-1039815
  hypo
gaatggcttggatgtttgtcgcctccgagtctcatgctgagacgtgatccgtggtgctgggtggggtctgtgggaggggtttgagccatggcggaagatccctggtgaatggcttggatgtttgtcgcctcc

SEQ ID NO: 9776 - DNA, 470 bp, Homo sapiens
  chr5:112629778-112630248
  hyper
tgagaggttgtttcttttttaagccactcatttcagactgaaatatcaagccagttcaggtcatttcctgagtagcactacaagttaaaacaagatccagaaaatctactaatcttcaattgcgctgcctccagactgggagcacagggggatagggtgtagggctgtggggaggtcgaggggagggggatttgtggaaaagcaaacgcccgagaaaccctagctcccgacctcagctgtttcttacctcactcagctcggccgaggagtcgtttccatatttcatggcaactccggaattcatgatgcacttttcagagctgggctctcagtcccccaggtctcggagcttaagagttggacttcacaggctcaatatccactgcttggtcccttctgccacattttagtctagacagccattttcacccaggacagttgcgaagcgcaaacggaggatgcaggcactc

SEQ ID NO: 9777 - DNA, 113 bp, Homo sapiens
  chr5:112630698-112630811
  hyper
gctagagggagaaaagggtgggggcgagtagcctggaggccgagcagaggagaccgtgctgggagagcagagcaggcatccttccagttctctgcaatagtaattaaggaccc

SEQ ID NO: 9778 - DNA, 219 bp, Homo sapiens; identical to SEQ ID NO: 6192
  chr5:113696733-113696952
  hyper

SEQ ID NO: 9779 - DNA, 51 bp, Homo sapiens; identical to SEQ ID NO: 6196
  chr5:115911175-115911226
  hyper

SEQ ID NO: 9780 - DNA, 74 bp, Homo sapiens
  chr5:11903295-11903369
  hyper
cggcgctttctggagcctggctgtctattgtcagcacgcagaagcccccgaaacctgtgaagccggctgcaaag

SEQ ID NO: 9781 - DNA, 95 bp, Homo sapiens; identical to SEQ ID NO: 6199
  chr5:124082318-124082413
  hyper

SEQ ID NO: 9782 - DNA, 925 bp, Homo sapiens; identical to SEQ ID NO: 6200
  chr5:124082442-124083367
  hyper

SEQ ID NO: 9783 - DNA, 38 bp, Homo sapiens; identical to SEQ ID NO: 5828
  chr5:124084158-124084196
  binary

SEQ ID NO: 9784 - DNA, 60 bp, Homo sapiens; identical to SEQ ID NO: 5829
  chr5:124084302-124084362
  binary

SEQ ID NO: 9785 - DNA, 112 bp, Homo sapiens; identical to SEQ ID NO: 5830
  chr5:124084660-124084772
  binary

SEQ ID NO: 9786 - DNA, 64 bp, Homo sapiens; identical to SEQ ID NO: 5831
  chr5:124084977-124085041
  binary

SEQ ID NO: 9787 - DNA, 95 bp, Homo sapiens; identical to SEQ ID NO: 6201
  chr5:125930492-125930587
  hyper

SEQ ID NO: 9788 - DNA, 170 bp, Homo sapiens; identical to SEQ ID NO: 6202
  chr5:125931062-125931232
  hyper

SEQ ID NO: 9789 - DNA, 121 bp, Homo sapiens; identical to SEQ ID NO: 7417
  chr5:137912553-137912674
  hypo

SEQ ID NO: 9790 - DNA, 50 bp, Homo sapiens
  chr5:139637-139687
  hypo
cgctgtgcgcccatgagaaggtggtggtgcagctggcgtccctgcacgga

SEQ ID NO: 9791 - DNA, 249 bp, Homo sapiens
  chr5:139745-139994
  hypo
ctagactggtcttgaaatgcctgtcccggctgggaagaggcacagaggaagtcaccgtccctgaggccatgtatggctgtgtcttcacgggggcgttcctggagtgggtgaaccgggagcggcgccatgtccccctgcaaacctgcttgctgacctcaggcttggccgtccaccgagccccgtggagcgacgtcactgaccctgtctttgtccccagccctggagccatcctgcagagctactccagct

SEQ ID NO: 9792 - DNA, 111 bp, Homo sapiens
  chr5:140023-140134
  hypo
ccctcagaggccccagtccccacccaagccacagcaggcccccatttccagggaagcgcctcttgccccgacaccctgacctcaccctgccgccgagggcatacgggcagc

SEQ ID NO: 9793 - DNA, 185 bp, Homo sapiens
  chr5:148033538-148033723
  hyper
cgtcgtgctgccccgcccccgccgcgtccccaccggcacccgtgggctcctggggtcccgacccccggcgcacttgccgcacatacccgctgccagaggcgagggagcgaggtgccctggcagattcgagcggccacccccagccgctgagccgagcttctgctgccgccgctgccgctgcgctc

SEQ ID NO: 9794 - DNA, 194 bp, Homo sapiens
  chr5:153859808-153860002
  hyper
attacgctgtggagagaaggacctcaacacacaatcctcaacacacgcccagtctttgtcctaatccaagtacaatctgcaacagtgcctctcagagcggcacactaggccctcagattatacattcacaggtacatgcacaagggctcacaaaaccttgccgccgtacacaaaagcccgtatcttcataagac

SEQ ID NO: 9795 - DNA, 315 bp, Homo sapiens
  chr5:1645162-1645477
  hyper
cggcccacagcgccaccgtgtggtctccgcgtccccagttcggagccgcagcttacgcgctgctggccctgagcctgttcccttcctgcagtccccaggagctgacgctattcggtttgtttttaaacactccagctgagcaagcgtcttctcaggacgtcctgcgtgctgcccacactctcttgtggatggtcccccgggtccggcggaatcccgcctgggaaggcttccccgaagccttcctccatcctgggcagtggcggggcttgcaggaggcctcagagctctgtcggggccggacggaccgctgtcgtc

SEQ ID NO: 9796 - DNA, 244 bp, Homo sapiens
  chr5:170171140-170171384
  binary
aagtctcgctcaggggagtggtgtgcatggggcagaggctgccagggacgctgaaggctgatagccgggttggcgcggaaatgggacgccgcagggtgggacaggcgggagggatgggatgggcagggtgtgatgccggacgaaggaaacgggcctgcccggcaggtggcagagagccacagaagagctccgagggggtggtgcgtgagatggcgctgcaggctggaaaggggctgcaggcagg

SEQ ID NO: 9797 - DNA, 388 bp, Homo sapiens
  chr5:170171413-170171801
  binary
tgcgagggaccgtgggaacttcaaggaaccgcaccgccctcctggaccacccgagaaaacaggggaagtgggcgaatgagtagaccaaagtactcatgacagggcaggagcaagtgagagaccctggaggaccatggagagaacgtggtaaccgatggagagggatgaaaaccgagccgcgggtgtgagtctgaggcgcccccaggcccaccagcgtgtgagcggcaggtgctgttcgccatcagccgctagatggagccggcgcctcgccgaatgcgccgggatccgtcgcgtggatgtcaggtccgggccagggagccaaagcggcggctccgcggggaccctccacagttccggactccagcccagcgccggcttcagggcgtgc

SEQ ID NO: 9798 - DNA, 210 bp, Homo sapiens
  chr5:176057164-176057374
  binary
cgcgcatcccccgggtctccctccattttccatccccttccccagctccctcctgtcgccccagtcccctctccatcctcatcccgttccccatccccggcgcgcggccgcctcacctggatgcggggccggggctggggatggagcggcggctgcggcgggcggacgcgggggctccgctaggccaggccggggtggaccaggggccgg

SEQ ID NO: 9799 - DNA, 195 bp, Homo sapiens; identical to SEQ ID NO: 5833
  chr5:176558657-176558852
  hypo

SEQ ID NO: 9800 - DNA, 144 bp, Homo sapiens
  chr5:176558908-176559052
  hypo
cgccctagggaccaggtaactcctgaggtgagcttcttggtggggatcaagcccagggggcgacggagtccgggctgggggaagggcccgaggggctggagtcgcaagttcaggcccagcttgggctccctgtcccgcccttcc

SEQ ID NO: 9801 - DNA, 77 bp, Homo sapiens; identical to SEQ ID NO: 6602
  chr5:176795049-176795126
  hypo

SEQ ID NO: 9802 - DNA, 238 bp, Homo sapiens; identical to SEQ ID NO: 6603
  chr5:176795288-176795526
  hypo

SEQ ID NO: 9803 - DNA, 184 bp, Homo sapiens
  chr5:178594471-178594655
  binary
ttgctctggaaggagctgaattatctatgctcttccctccttcagtcaaggagacgtgggaggaaaccgggatggggatcagcagcctggaggccgcctccgctggaaccgcgcccgccccgccaggaggctctgcctgctgggcaaggcgcactcagccagccccgcaggccgccacgcgacc

SEQ ID NO: 9804 - DNA, 604 bp, Homo sapiens
  chr5:180644001-180644605
  hyper
cgacctagggtagtaactggaactgcaggtatgcaccaccacgctcggctaattaaaaaaatatatatattttttcctagagatggggcggggggcgggggcgggggcggaggggacagtctcactatgttgcctaggctggtctcgaactcttaagcccggtttccgagtcgctggggctacagtagcgcgctgacacgcccgacccttgctttgccacttagatgttgcatttattcgactttcacgtcgggcagaggtgctgggaaagaggcggctggcccctgcgtaagtgtgcgggtgcggtgtgagaaagctggaagcctgttttctaggcggggaagcagcctgcgctgccggggccgcatcatggcacgtgggtttccccgggcttactctcctgccagtagcgctgtcctagggatcccgcccacccctccggcttcttctctgaagcctttgcagcattttccctgagattgctgaagaggcccctggggatcgggctcccaactcacccgccgcgtcccacggcccgaagccgacgagctgcaagtgaggatgggtgcagagggaggccgacggtcacgccttggagaggctg

SEQ ID NO: 9805 - DNA, 48 bp, Homo sapiens
  chr5:180644634-180644682
  hyper
ctgcgaacccaaaagccgtgtcagtgctgcaggcccgcccgaagtggc

SEQ ID NO: 9806 - DNA, 188 bp, Homo sapiens; identical to SEQ ID NO: 6208
  chr5:22853256-22853444
  hyper

SEQ ID NO: 9807 - DNA, 100 bp, Homo sapiens; identical to SEQ ID NO: 6209
  chr5:22853569-22853669
  hyper

SEQ ID NO: 9808 - DNA, 99 bp, Homo sapiens; identical to SEQ ID NO: 6210
  chr5:42950747-42950846
  hyper

SEQ ID NO: 9809 - DNA, 175 bp, Homo sapiens; identical to SEQ ID NO: 7436
  chr5:42995428-42995603
  hyper

SEQ ID NO: 9810 - DNA, 331 bp, Homo sapiens; identical to SEQ ID NO: 6604
  chr5:453948-454279
  hypo

SEQ ID NO: 9811 - DNA, 463 bp, Homo sapiens
  chr5:465360-465823
  hypo
cgcttcctgttccggaagctggcgtccgtgagtgtcgcgcaggtccgggctggagaaggcctgtcgctccgcggccctgttcagcctccaccccgggactcgggccagtagatgggagtgtgtcgtgtgtttgtcaggcggggggagcctgggtccaggtcctgcctgaccttgtggttggacacgaatgtccacagaggtagacgcgccggccccgccggcttcccgaggccgcccacagctccctgacggacgcttcccagtctgtcctgcgctgcgaggtgctggctgcctcccacggtctcgccctcaccccagacccctggccctgtcactgagctttcagagtagatcctgaggagtcaggtgaagagggaggttcccagtcaggaaggggctcagccagaatccagctgctcccagcgccgcgggacagccgagggcggctcctcacattgctgct

SEQ ID NO: 9812 - DNA, 258 bp, Homo sapiens
  chr5:465852-466110
  hypo
cggatactgcgacaccatcgtggctgtggccgaagtgatcaagctgacagacccttctctgctctacctggaggtctccactctggtcagcaagtatccagacatcaggtaagggatgcacgtcttagaatcctgccttagaatcctggagtggagcggcaggtccctccttctgtctggggcgggtggggctcctggttcgcaagttcagccctgcagcacggcaagggttcaggtgcggcacagcggggcccaggc

SEQ ID NO: 9813 - DNA, 368 bp, Homo sapiens
  chr5:476496-476864
  hypo
cgggatcaggcacggaggtcacagctgtgcccaccgccggacattctcgccctcctgccgcaggagctgagcacggatcccccgtggtcccaggaggggacgaggaagccgccccacggggtccctgcggggtcctccagcccccagcccgcagtgcccacctcctgccgcggcttgtacaggtactgctgtagcgtgtggtgcgtgaccatgtcctccgcgtcccggatgctccgccgtcgctgctccagagactgcatgtccaggcagacagcgctgacattttctctcctgcgtggggaccagcgctgagccatacaggctccctcagggtggggtctcttgcgcgcccctcgccttcccacggc

SEQ ID NO: 9814 - DNA, 50 bp, Homo sapiens
  chr5:49737299-49737349
  binary
gggagagagcttgggcaggtgatgtctagccaatctcgtggggagaggtc

SEQ ID NO: 9815 - DNA, 76 bp, Homo sapiens; identical to SEQ ID NO: 7437
  chr5:54518558-54518634
  hyper

SEQ ID NO: 9816 - DNA, 38 bp, Homo sapiens; identical to SEQ ID NO: 6211
  chr5:57878673-57878711
  hyper

SEQ ID NO: 9817 - DNA, 159 bp, Homo sapiens; identical to SEQ ID NO: 6212
  chr5:57878752-57878911
  hyper

SEQ ID NO: 9818 - DNA, 227 bp, Homo sapiens; identical to SEQ ID NO: 6213
  chr5:57879190-57879417
  hyper

SEQ ID NO: 9819 - DNA, 62 bp, Homo sapiens; identical to SEQ ID NO: 7438
  chr5:74753672-74753734
  hypo

SEQ ID NO: 9820 - DNA, 192 bp, Homo sapiens; identical to SEQ ID NO: 6216
  chr5:77148195-77148387
  hyper

SEQ ID NO: 9821 - DNA, 158 bp, Homo sapiens
  chr5:82767810-82767968
  hyper
tccccccaaactgcaataagccgccttccaaggtaatcacgtttcttttgttccccccttaaaaaacaaaaacaaaaaacttatagaaaaaaacccgcgagcttagaaaaaagaagcaattggtagaaggctttaattaaggcaaagagctgtaaggc

SEQ ID NO: 9822 - DNA, 542 bp, Homo sapiens
  chr5:82769369-82769911
  hyper
agctgacaaatgaatggctagtgtgaaatccctgcctttcccgtgctccaaggcagcagggagggaggagcgagggaggcggtgcgctccttcggatctgcccccagttcagctcacaagacttgcagaacctagatgtctaggaattgggagttttgcggcgggtgtgggcgccccctgatggagaagtcccgcacaggcggagaaaaacaagccccccagaccaagcgagcatctttcacaaccttgtgttcaaggatggaaggccctagttttcccttaagtcattcattttgcactccacaatctgcggcgtacatctaggagtttggaggaccctgaaaaaaggtcttggtctgtgcaaagtgcagagatgccttctcgcgagtcggctggaacgcacgcggcgccctgggtccagttcgccgcttagtggacgaacgcacatggccagggtggagccaggtttcggaggtctagacgcgccaccctgggcgtctttaagaaagataatacacataccgtgctctcaaaacccatga

SEQ ID NO: 9823 - DNA, 246 bp, Homo sapiens
  chr5:82770318-82770564
  hyper
ggtctggggcccgcccccactcgctcacctcgcgccaagggaggacccgcaacgggcgctccccgcagcggctgggttagccagccgccacgtgggttggcgcttcggctcccagccgagacgggtgtgacttcctgggctcagagactgcagtacagccgcacaggcggccggcgcagccgaggcccccacccaccgaggccaatgggggcggggcggggaaggcagggcccagcttaaccgaga

SEQ ID NO: 9824 - DNA, 46 bp, Homo sapiens; identical to SEQ ID NO: 6217
  chr5:87436549-87436595
  hyper

SEQ ID NO: 9825 - DNA, 735 bp, Homo sapiens; identical to SEQ ID NO: 5837
  chr5:87436769-87437504
  binary

SEQ ID NO: 9826 - DNA, 80 bp, Homo sapiens; identical to SEQ ID NO: 6218
  chr5:87957200-87957280
  hyper

SEQ ID NO: 9827 - DNA, 157 bp, Homo sapiens; identical to SEQ ID NO: 6219
  chr5:87969885-87970042
  hyper

SEQ ID NO: 9828 - DNA, 600 bp, Homo sapiens; identical to SEQ ID NO: 6220
  chr5:87970918-87971518
  hyper

SEQ ID NO: 9829 - DNA, 38 bp, Homo sapiens; identical to SEQ ID NO: 6221
  chr5:87975991-87976029
  hyper

SEQ ID NO: 9830 - DNA, 243 bp, Homo sapiens; identical to SEQ ID NO: 6222
  chr5:87976663-87976906
  hyper

SEQ ID NO: 9831 - DNA, 138 bp, Homo sapiens
  chr5:87982673-87982811
  hyper
cgcagacccccgcccagcccgcacccgtgttcccagtgtctggagcacacactctaaacacatcgggacccccacccccatgaattcgccctgtttgagactcagtttctgaggccaagagttcgttctcggtggatc

SEQ ID NO: 9832 - DNA, 454 bp, Homo sapiens
  chr5:88178399-88178853
  hyper
cgtctacttcaaggtcacagaacatgctgtgaaatattaaaatccaccaggctccacacgctccaccatatcaaacatgctaatgacgtgaactaacttcatgaaactttaaatacactggtgtgacaggaacgagtcaggagtgatttcaatagctgatggcaaacggatacgactatctaaaaagttacttttagcaacaaacaaggaaatcatggaatctaacgaaaaagaatgcacaacgagcctcaacttcagccttcaaaaaaggcacagggatagatagacacagtgccgtggaatatattgatgcagattttagagacaatacccgggttttctatttcctcgagaaatatcaggggtacttacatgaaggaagacccgatcagattagtccttgggatattttcctttcttaagagagagagagagagaaaaaaaaaataacaac

SEQ ID NO: 9833 - DNA, 423 bp, Homo sapiens; identical to SEQ ID NO: 6225
  chr5:88179429-88179852
  hyper

SEQ ID NO: 9834 - DNA, 42 bp, Homo sapiens; identical to SEQ ID NO: 6226
  chr5:88180346-88180388
  hyper

SEQ ID NO: 9835 - DNA, 287 bp, Homo sapiens; identical to SEQ ID NO: 6227
  chr5:89854237-89854524
  hyper

SEQ ID NO: 9836 - DNA, 97 bp, Homo sapiens
  chr6:100039474-100039571
  hyper
tcgcaagggggctgaagagccaaatggggaaactgatggagcctcacaagtttattcctttcccacgtctgtgtttgtctaagggtgctttctgtgc

SEQ ID NO: 9837 - DNA, 945 bp, Homo sapiens
  chr6:112193858-112194803
  hyper
cgggggcggagtctgggccagcctcgcccccaagccaattcccattttcacccggcgcccgcttgcgggcgaggaaatggggtccccatccccgcgctgcctcggggccgcaccccgcaggggtgtcctccggtgcaaccgcgggaagaccccaagcaccgactccccggcagccccgcggagcgccctggcggccaagggaccgcagcaccgggccctgcggcgggggcggcgtgcgcgggggcgccggcggccgggcttctccgcagcatccccgaggcctcccgcgacgcatccccgccgcctgcttacctgcgcggcgctgaggctccggagcccactcacatggtcctctccccgccctcctccggcgcggccgaggcggctccggggggtccccggcgggcccgggagccggtgggccttccgagagcaccgagggggcggcgccggggtgtccccggcccggcggccgaatccctccctggcgcgggcggcggccgccgggcggtgcggcgcgggcggcggctttgtgtgcgcccgggcggtcctcggtgcgctgggagaagcgcggcgcgcccgggcgggagaggacgcgccgctcgcacaacaacctcgcctctactctcgccgccgggcggcgggcgggtctcgaaggccttcggctcgcggcgacccctcctcctcgcccgcggcagccccctcctcgccggctccgctcctgacagatggcgcaactgcaacgacgcgccgccgccaccagcgcggctgctcgctgctactcttgctgatgctctgcccctccagctccggaggggagcgaggagggggcggggcgcgcctcgagagtgacaggcccggctgccctatcaaagagccccttgggagctgcgagccgcaaccattggcgcctggggcgtgggcgggacggcagtaggtggggcc

SEQ ID NO: 9838 - DNA, 133 bp, Homo sapiens
  chr6:118241526-118241659
  hyper
ttgcgaaattaaccgtttttcctccacaactgccagctcggcgaatggccttcaagcccatccaacaggagataatctgtccttggaactagtgcaagtcagtttttaactacttgcggagaaagtctgaaac

SEQ ID NO: 9839 - DNA, 547 bp, Homo sapiens
  chr6:122931206-122931753
  hyper
gaattgaaattcccgcagtcacgtcacagaaatcttagcagaacctcatcatcgcccaagggaactgggagtggcgggcggggaggacgcgggttgtgtgacgatcaccgataattagttggtggttaacgcacaagtaggataaaagagctcgccccaggctgccagcagaaaaaagctaccgtggcacgtgccccggggagtgatgcggtggcccggtttgcacggagagcgggacaccgcctggggagccgcgctcgtagcctgggggcgggacgcggcggccgctccctccgcccccgagtagctgccaccgcctggctgcgccccagcccagtagctcagacgcggccgcatcccggtggactgtagaggcggcagcgagctagagcccgagtcgcagctccgggccgcagagcgctgggcgagcgcgagcgccagggcaccggcagggcaggcagctgcgcgcggctggtacgtacctggtggagcgggcgcgtgagtgggtgtccctatgcgaggagggaggagtgggacttgggaagtc

SEQ ID NO: 9840 - DNA, 41 bp, Homo sapiens
  chr6:122932019-122932060
  hyper
cggctctcgcgccagcaatgccaagtctttcccctgggcgg

SEQ ID NO: 9841 - DNA, 291 bp, Homo sapiens
  chr6:130088466-130088757
  hyper
ctgtcatttcggcttattcatccagcagctgccggaaggaccgggctgaagcgtggccacgaggagggggatacccgtgcgagcgctgagccggcagagcggctgcagcccacgggctcctcggacccccgctgctgcgccgctgcagctgaccgtgcgaaagccgcatgttattgggtagagatcagctttccaggaacaggcatcagctgtgcacgagcccggcagcatctcgagacaagtgctagccggtgttggtgcaaaccaaagcttgctatgtgctcagaaagc

SEQ ID NO: 9842 - DNA, 97 bp, Homo sapiens
  chr6:134499457-134499554
  hyper
cggatacgtgatgggtggagcaggcgccccctgttctgtcccagcaacctactaagacttccgaacaggaaggtgacacacggcggaggggtgcttg

SEQ ID NO: 9843 - DNA, 160 bp, Homo sapiens
  chr6:134639003-134639163
  hyper
gatgcgctcctggaggcggcttgagagaggagagttgtttttgattgtgcaagttccagtgggagctgtagttaagcagctgagagaaggagtaagaaagagcagaagccagagggagggagggagaacagcgccagaaaggcagagggagcgagaaggc

SEQ ID NO: 9844 - DNA, 47 bp, Homo sapiens
  chr6:137808706-137808753
  hyper
cggagtagacggaagggaggcgagatggtgggaggctgaataaccag

SEQ ID NO: 9845 - DNA, 57 bp, Homo sapiens
  chr6:146349455-146349512
  hyper
cgggtcagggaattgcaactcactggtcaaagcgtcccttgcaggccctgccaggga

SEQ ID NO: 9846 - DNA, 68 bp, Homo sapiens
  chr6:157193700-157193768
  hypo
cgcctcagcctcccaaagtgctgagccacctcccaaggtgcgagccaccactcctggcctaacccatc

SEQ ID NO: 9847 - DNA, 139 bp, Homo sapiens; identical to SEQ ID NO: 7455
  chr6:158093637-158093776
  hypo

SEQ ID NO: 9848 - DNA, 172 bp, Homo sapiens; identical to SEQ ID NO: 7456
  chr6:158094082-158094254
  hypo

SEQ ID NO: 9849 - DNA, 120 bp, Homo sapiens
  chr6:16322061-16322181
  hypo
cgacgctaataaatttttacaagggctgtgctgttctggaaagtataaaagtgaagcattaaaaaacggaaccctctcaagagattatctcctatgaagaatcatacgtggccgggcgcc

SEQ ID NO: 9850 - DNA, 140 bp, Homo sapiens; identical to SEQ ID NO: 6231
  chr6:166298522-166298662
  hyper

SEQ ID NO: 9851 - DNA, 60 bp, Homo sapiens
  chr6:166422281-166422341
  hyper
gtgcgttctccaagagggaagctcagtatgagcactcccttcgtccccttaaggaggacc

SEQ ID NO: 9852 - DNA, 143 bp, Homo sapiens
  chr6:169653496-169653639
  hyper
cgtttacccgggttcccaggcaggtatatacattgaaatagcagcagccacaaccctcagagaggaaggggtgcccggctggtgaaagcacagccacggaggaaaagctgaggagcggccacgtgccttgctcttcaagcggg

SEQ ID NO: 9853 - DNA, 117 bp, Homo sapiens
  chr6:170178959-170179076
  hypo
cgcagactgtacctgcctggtgccctgtgagcgtgcatggcccctggcagccctgatgtagaccgggcgcctcagatggtgactcagagcaagaaatgcggacgtgcaggatgggcc

SEQ ID NO: 9854 - DNA, 291 bp, Homo sapiens
  chr6:26033454-26033745
  hyper
cgcctgaatattaggcaaaacgccaccctgcgcgatggtcacacgccccaagagtttattaagctcctcgtcattgcggatggccaattgcaggtggcgcgggatgatgcgggtcttcttgttgtcgcgggccgcattgcccgccagctccaggatctcggcggtcaggtactcaagcaccgccgcgagatacaccggcgcgccagccccgacgcgctcggagtagttgcctttgcggagcaggcggtgcactcggcccacaggaaactgcaaacctgcacgagaagaccg

SEQ ID NO: 9855 - DNA, 34 bp, Homo sapiens
  chr6:26034208-26034242
  hyper
aggtccttcaaatcgggcgcagtggctcatgccc

SEQ ID NO: 9856 - DNA, 71 bp, Homo sapiens; identical to SEQ ID NO: 6238
  chr6:26331633-26331704
  hyper

SEQ ID NO: 9857 - DNA, 324 bp, Homo sapiens; identical to SEQ ID NO: 6239
  chr6:26331811-26332135
  hyper

SEQ ID NO: 9858 - DNA, 243 bp, Homo sapiens; identical to SEQ ID NO: 6240
  chr6:26332283-26332526
  hyper

SEQ ID NO: 9859 - DNA, 248 bp, Homo sapiens; identical to SEQ ID NO: 6241
  chr6:26577475-26577723
  hyper

SEQ ID NO: 9860 - DNA, 56 bp, Homo sapiens
  chr6:27256447-27256503
  hyper
gaggagccctactccccccggaatcagaactgtgcatagcgggctctggatttgcc

SEQ ID NO: 9861 - DNA, 141 bp, Homo sapiens; identical to SEQ ID NO: 6244
  chr6:27356293-27356434
  hyper

SEQ ID NO: 9862 - DNA, 223 bp, Homo sapiens; identical to SEQ ID NO: 6245
  chr6:27356463-27356686
  hyper

SEQ ID NO: 9863 - DNA, 541 bp, Homo sapiens; identical to SEQ ID NO: 6246
  chr6:27470822-27471363
  hyper

SEQ ID NO: 9864 - DNA, 205 bp, Homo sapiens; identical to SEQ ID NO: 6247
  chr6:27560506-27560711
  hyper

SEQ ID NO: 9865 - DNA, 87 bp, Homo sapiens; identical to SEQ ID NO: 6249
  chr6:27640312-27640399
  hyper

SEQ ID NO: 9866 - DNA, 752 bp, Homo sapiens
  chr6:27655169-27655921
  hyper
cgaatccgggcctcgcctcctcctcccttttcagatcataggatttctctcccccgcaaataatggcccttacttcgtaaacacgctggctccgtaatccctattattgttttgggggtttggttctgtccagggaggaggtgagggcagatgctcaagagaggctgtccccaccgtccttttgtctcagcgaaccgcagtccgcgcccgagcgccactagctgtcctgggacgggaactgcagcggcaagtgtgtgactttcttgagcccggagccacaggcctgggaagcgccgctgagacttcagggtcgtagtgacagaggaaccacccgaggctaggcggggagagggtgcagtttccggatcccgaaggcttcgagaagagccgacctgtctggaagggtctccaagaacagagaggactctgcaaccatcactcgggagccgcgtcctttcatccttgagacagctccgtggtccaacggttccccgatccgctggccgagatctcaagcttggatgcaacttcggattcgccccaggcaggaggaaggaagccccgattggaaacgttgacttgaatcttctcggatcagaattagcaggttaagaaaaactgtttccccgtaagaagcagggttctttggtgttcaatgtggagctccgccactcccagcccgggtgaaggaaaactgggaaacagaatgaatgtgattatctattcgaagataaatttccacaaagcatgcc

SEQ ID NO: 9867 - DNA, 223 bp, Homo sapiens; identical to SEQ ID NO: 6607
  chr6:36198250-36198473
  hypo

SEQ ID NO: 9868 - DNA, 61 bp, Homo sapiens; identical to SEQ ID NO: 6255
  chr6:391113-391174
  hyper

SEQ ID NO: 9869 - DNA, 55 bp, Homo sapiens; identical to SEQ ID NO: 5841
  chr6:393764-393819
  binary

SEQ ID NO: 9870 - DNA, 157 bp, Homo sapiens
  chr6:40554364-40554521
  binary
cggttccatccacccgtggctccccgtctctccatccggctctccagtctcacatggacccggctctccccgctccccgccagagtttcacccccactgtaggaaataaagactaaagaaaggaaaggaaatctctcgcgataaggatgggcgaaaa

SEQ ID NO: 9871 - DNA, 316 bp, Homo sapiens
  chr6:40554860-40555176
  binary
gagccgcttattcagttatatccatggcatttagcaagaagaaggggggaaaagcacaacttgttctcttctcttccagattaaagaaaaataataataataatccctccctaggaggatgccggtaggattttccggatcgaagaaccccaggcattcccaggaacctcgggcatcttggaatgtggggtgtcttcaagttcagacgagcctgccgggttgtgtatgtgtgagtgtatgtgtgtctcagcgagagggagccaggcactcacacccacacgcacacacaaacacactcccccgtactccccgcatg

SEQ ID NO: 9872 - DNA, 478 bp, Homo sapiens
  chr6:4135305-4135783
  hyper
gcagagtgttaagtccacacgagtgataacggcttgcgtttacctcgcttttagcaagcgacgctttgcaccccagaagcagcccggctgggaagtgcaggcccgggtgctcagctggggcggctcacccgcccggagtccggccccaggaggatgggagcgtgcgcggaggcaggcggagaccttggggactgctgacagggaaccatagccctgacctcccgacgcgcccatcctgaccactccgggcccagcggtgcaggagggcgcgcgtgaggtcgtcactttttagcactacctcaccggaaaaccagcaaagcaaaatcctgttgccacctagacaatagggaaggagggtcttccaacggcggcgaccttcgcctggacagcggtatcctgcgggcgaccatgggccgaacggccgggactccaagcttacctcggacacgaacgccgcgccagtctccaagccaagtac

SEQ ID NO: 9873 - DNA, 373 bp, Homo sapiens; identical to SEQ ID NO: 5842
  chr6:46097250-46097623
  binary

SEQ ID NO: 9874 - DNA, 521 bp, Homo sapiens; identical to SEQ ID NO: 5843
  chr6:46097694-46098215
  binary

SEQ ID NO: 9875 - DNA, 402 bp, Homo sapiens
  chr6:4775543-4775945
  binary
gttgggtcaggaagccccttctttcgccaccgatggggcacgtccagggcccggcaggtgtgccctggcagtagatcttccctgggaagtggagcgcgggccagccctcgctgttctgagcgagggcctgtcgtgtagtccacaccgttccgcgaaaggaaccaccattgacagcctcgttcgattagaacccggacctccctggaatccagactcggtcccttcccagctgcgcttcggaggaggcggacgctccgagaggaacccagaggcctggcgtggggggagctgcgggcagagcggaggcagccgcgccctcgcgccgccctccgccgcgcccggctcccgccccccggatcccacccccggcctgccgcggagccagcgtgccagccggagctc

SEQ ID NO: 9876 - DNA, 80 bp, Homo sapiens; identical to SEQ ID NO: 5845
  chr6:6009552-6009632
  binary

SEQ ID NO: 9877 - DNA, 208 bp, Homo sapiens; identical to SEQ ID NO: 6260
  chr6:69344116-69344324
  hyper

SEQ ID NO: 9878 - DNA, 295 bp, Homo sapiens; identical to SEQ ID NO: 5846
  chr6:69344649-69344944
  binary

SEQ ID NO: 9879 - DNA, 72 bp, Homo sapiens; identical to SEQ ID NO: 6261
  chr6:69346042-69346114
  hyper

SEQ ID NO: 9880 - DNA, 571 bp, Homo sapiens; identical to SEQ ID NO: 8650
  chr6:71123134-71123705
  binary

SEQ ID NO: 9881 - DNA, 289 bp, Homo sapiens; identical to SEQ ID NO: 8651
  chr6:71123746-71124035
  binary

SEQ ID NO: 9882 - DNA, 55 bp, Homo sapiens
  chr6:71665452-71665507
  hyper
cggagtgcaaggggcgtgtgactgcagcccggccggcccggaggcccactcccgc

SEQ ID NO: 9883 - DNA, 223 bp, Homo sapiens
  chr6:71665723-71665946
  binary
tgggcagcccggcccgcgccaggaagcggctcaccagctcgctgcgcgccgccgcgtcctccaccaggatccagtgcagctgcgccacctggcggaacgtgttggccaggcgggtcagctccgctttctgcaccgggcggctgtaggtgggcgtgatggcatagatggtgggcagctgcggctccggctgtggctgcggccgagactggttgcgcttttgggt

SEQ ID NO: 9884 - DNA, 227 bp, Homo sapiens; identical to SEQ ID NO: 6263
  chr6:72596315-72596542
  hyper

SEQ ID NO: 9885 - DNA, 190 bp, Homo sapiens
  chr6:7726066-7726256
  hyper
cggggtattggtcagatcattcttactagcgatgacctcttcgcctttggcacctcgcggctcttcgcatgcctccaagaattcccgggtcttgaaacctacgcgcggcggaggcgacgcctctcgggagagggagggtgaaagaaggggcggggctatttaaatagcccgcgagcttcgcgtccccatt

SEQ ID NO: 9886 - DNA, 390 bp, Homo sapiens
  chr6:80487617-80488007
  hyper
cgagaaacaaaaaacccaagagagatttcatttttcactaggatgccaggtataaaatagcacatctcttttaatattcagaatagccggagtctccatttcgttattacaataatgtctttatcccttcccaggttctccccttccattctctacctctttgcgatcaaactgagcacccgggggtttcccaaacccagggttaccggatcctgagcatgcgcggaggagggacagggagccgcccacgccgggctccgcggctgcagttgctgttgtggccacaaggtggcactaagtctttggcggccgctggccttcccgaccgtggaaagtcggggccggtggggctaggtaggaagagcacactcctgtgaggttgccgggggc

SEQ ID NO: 9887 - DNA, 83 bp, Homo sapiens
  chr6:80657600-80657683
  binary
aaacaggacacgggaagaatgggtgttctgtgggcaaagatgaggtaggcgtggtgctttggtccttacctgacactcacctc

SEQ ID NO: 9888 - DNA, 354 bp, Homo sapiens
  chr6:86159095-86159449
  hyper
cgcgcgtcgcctctgttttatcactaaggttttaattgtgaataaacaaggaactggattcgaatgatttcttagtttctgagatttttttgtctaagcatcgtagacttcgtgcgttctcaacccaacaggaagcgtcacatctcagtgagcttcggctctcacagcccgaaactgcaaggagctcctctgcccggcctctctttactcctcctctctgcccctcagctcgctcatctttcttcccgccccctctcttttccttctttggttctttgaagtgatgagctagcgcaaccacaaaccatacattccttttgtagaaaaacccgtgcctcgaatgaggcgagactc

SEQ ID NO: 9889 - DNA, 270 bp, Homo sapiens
  chr6:86159509-86159779
  hyper
ggcgcaccagcagccgaactgccggcgcccaggctccctggtccggccgggatgcggccggtacccgctccccgccgggaacaacctctccactcttcctgcagggagctggtgccagccgacagccgcgccagggccgctccgggtaccagggtcggatcgggtgacgtcgcgaacttgcgcctggccgccaagccggcctccaggctgaagaaggacccgccccggccttgacccgggccccgcccctccagccggggcaccgagccc

SEQ ID NO: 9890 - DNA, 89 bp, Homo sapiens
  chr6:86159903-86159992
  hyper
tgggcgcggtgctgtggcctgcggctggcgcctgggagcttacgattttgcacaccaacgacgtgcacagccggctggagcagaccagc

SEQ ID NO: 9891 - DNA, 218 bp, Homo sapiens
  chr6:99272867-99273085
  hyper
ctgcggactgccccaaggaatggaaaacctgcactcagaagccaccccccaccccgcctctgccgtatctgctaactttgctaacactccccttcccctgccttgtaagtcactatttacgaccgcgtcgactcgcgctcacgcacgcctgcccttttctccagaagcctgaaagtggctgaattcaaacactgacacgtgaaaactctattctgagt

SEQ ID NO: 9892 - DNA, 209 bp, Homo sapiens
  chr6:99273114-99273323
  hyper
atcttgatccgccggtcctgcccaaagttcagagcagctgtccgaaaggtccccgcatttgctgtccctaggaaaggtgaggctaggaggaagggggaggcaacgcagggaatgtgagaggactggggccacactgtgtatctaggaggaaactctgaatcctaatctcaagaatgtaagtctttgcgcagtttccaaatcgagtccat

SEQ ID NO: 9893 - DNA, 327 bp, Homo sapiens
  chr6:99873227-99873554
  hyper
cgtttgtcatctgaagccataccatctctcatccaggtttgtgaacacgtgattgtgcggattgacatgtttcggcgccattttttttgtgggcaaaaccatctctactctggtcaacaccgggcaactgaaccattcctgcacgttactttttaacgtagctggcgccattcccgacccatctttatagtggccagaaagccaagaacgtaagtgttctacacatagggcgccttcaaattttttactttagcaacgtgatcttcctttaaggggaagtatgttccctcctagaaacactcccgccttggagaaggggttgagttc

SEQ ID NO: 9894 - DNA, 117 bp, Homo sapiens; identical to SEQ ID NO: 6609
  chr7:101475674-101475791
  hypo

SEQ ID NO: 9895 - DNA, 236 bp, Homo sapiens; identical to SEQ ID NO: 6610
  chr7:101475858-101476094
  hypo

SEQ ID NO: 9896 - DNA, 288 bp, Homo sapiens
  chr7:101616410-101616698
  hypo
cggtatccatcagagcgtgattggggtttcagcagagccaggcctgcttttcctggcagaggctgggcccctttagatttttcttgtagattttgcttgagcctcccagcccttccttgctcagcacctgtgacccactgggtcacagtgacccacatcccatggctctgaccgcagctggactcatctcacactcacgttcatcacggctcccagaaggcacgtgtttttaatgagaggctcatttccaccactgccccccagccctccgcagcaagccagtgcaac

SEQ ID NO: 9897 - DNA, 312 bp, Homo sapiens; identical to SEQ ID NO: 8663
  chr7:101652279-101652591
  hypo

SEQ ID NO: 9898 - DNA, 67 bp, Homo sapiens
  chr7:104917801-104917868
  hypo
cgtgagccactgcgcccggcccaacttggtatttttaagagacttctcgctgaaatgcaaaaggccc

SEQ ID NO: 9899 - DNA, 221 bp, Homo sapiens
  chr7:106685920-106686141
  hyper
ctttgccccctctgcctgggccggttggggtgggcatctgctagaaagacaactttcgctgtggttggaggtatttcgcttagaggataccattgtgcataaagaaactggcccgcttggcgtcttctttcagcccttgtatttattaatggaatgtcgaaagagaaaaggagaaccgtgtttaatatgattggctttactgttgttaggacggtagattc

SEQ ID NO: 9900 - DNA, 240 bp, Homo sapiens
  chr7:112726614-112726854
  hyper
cgcaggggccgcggcggcggcggctgcggtggcgagggcggcggcggggctgcttcagcctctgtggaaccagcaggaacccctacctgactccagagctggctgggtttattgactgccctgtccaatccaactggcagcattaagcttttgtcccttcgtggctgcttctgaacttttccctccccgcatttgtagtggggggctggaaaggccctttcaggacctcaggcccatcct

SEQ ID NO: 9901 - DNA, 230 bp, Homo sapiens
  chr7:113725472-113725702
  hyper
actccttggcccaagtgagacaggaaccagggcaacaatgaagagaaagacactcggcctctctccaccccaggccgcagaggcgcacaccgtgaaaagaaaggccaatcagcgctttaacgcacgctcgggtctccctttccgactaccatgtacttttaactccctgccaccgagggctttggatcccttcgaggctttctgcacttcaagtggaatcccctgtttca

SEQ ID NO: 9902 - DNA, 230 bp, Homo sapiens
  chr7:113725858-113726088
  hyper
ggagcaggaggtggggagaagggtgggggtgggggaaggtctggcgtagcacaaacaagttctccagcgggttgtttacatagcaggtggacctgacgtcagccaggaggctccgctgcaaatccgaacaatattcttccccgcgtttccccctccttaaagaagttagggaacggggggagataggtggacgggggagaaaggcatcctaaccagctggttccaaacct

SEQ ID NO: 9903 - DNA, 483 bp, Homo sapiens
  chr7:113726887-113727370
  binary
cacttgttgttctctttcattttgctttgtgatgggggaaaaaggggtggagaggggagatttgctgttggctcacggatgatttttagtttggataatgcaaaatgttgcttcgtccggagagacctcggctggaggagaatgtgtgtcgaaacaccagatgtgtgtttgtttactctcttctttttaattgtttgttgtcttttccccttcctccccgcacccccacccccaacctcgggaggagaaacaacagtaaaaacatctggcggttagaagcacacactttattgatccaactgctgacctttatttactcagttgggcaagtgcacgcttctcgcgtctaagttgggcacttcagcgttcatctcagaagtacttctccaggaaggagagagatggaaaggggacactcctgtttctggagtcaagaaactcctgggccctactgacgcttcgggataaccgtgcacagggatg

SEQ ID NO: 9904 - DNA, 86 bp, Homo sapiens; identical to SEQ ID NO: 8677
  chr7:134918319-134918405
  hypo

SEQ ID NO: 9905 - DNA, 132 bp, Homo sapiens; identical to SEQ ID NO: 8678
  chr7:134918661-134918793
  hypo

SEQ ID NO: 9906 - DNA, 83 bp, Homo sapiens
  chr7:140771242-140771325
  hyper
cgcctcgttcgcgcttttcaaaatgcaggaagggcgggggagagagagagagagagagagggaaaaaaaaaaagacaaaaaga

SEQ ID NO: 9907 - DNA, 220 bp, Homo sapiens
  chr7:140771550-140771770
  hyper
ggggctgaagttgggatgaagcggggcttgcctggggcccacccgctcaaggtctggggtccggcgctacctcccagagcccctgcagagcctaaatccagcggccacccttacaaaatgacaaaccctgcatcgaggtttcttttaaccccaccttccctcaacgctcgagctctccagcgttttcaaaatatctactaacggaccaccccccatccac

SEQ ID NO: 9908 - DNA, 203 bp, Homo sapiens
  chr7:140771841-140772044
  hyper
ggtggaggtgggtgtgtgtcggggtgcctggctctggcttgggactggactggggctggccggataactccgcagccgctctcagctcagtcctaggtggaaacgcctgtagcttgcaaggtagcgcctgtggctttctggggaaaaaaagatcaaatgcctcccaagacaccagcgacccaaaccggggatgcagggagctc

SEQ ID NO: 9909 - DNA, 107 bp, Homo sapiens; identical to SEQ ID NO: 6268
  chr7:145814199-145814306
  hyper

SEQ ID NO: 9910 - DNA, 669 bp, Homo sapiens
  chr7:148036392-148037061
  binary
cgggtgggaggatgcaagtacaattacgttttttaaaactccagtccagatattggcttttccttggatacttttgtgtggctctcccagtacagtcagatccgccgccgcagcctagcgctccaccccgggttttgcgtcctcccctcacctgcctttcagtggtgcggggtttgatcccgagagcggtggactcaaagctgcccgccgggactcgggctgccggccgacaaaggacggtcctcgggggttctgaagtctgacccggccagtgggaaagccacctgcatcacaaagcgaggggcacacctgaaccggggctggcgggaagaggcaagtattgcgcgcgggctggctcccacatggagctgcctcccggtgcaagtgttgcaagggtgcgctgctccagcccggggagcgcgggaggcggcggagagagcgtccgggtgatgagcggggcactgtaactggattttaacacctctgcaagcagcgcttttggtcaaaaaatttccgattcttgatcttctctctgcaaggtcgggggttctttggggagtaaatcacagcgtttgggtttgcattcgaagcactaccaagtctactccacagggtcactgcacggggagcaagtaaaggaaaacgaggagaatctgagagtgctccttc

SEQ ID NO: 9911 - DNA, 168 bp, Homo sapiens
  chr7:148523540-148523708
  binary
cgtacaataattgcacttacgatgtaggaagcagtcatatttaaaacatcgcctacagaaaagcgtatgaaaggagtgtaagctttgctctctctgaacagatttagcatttggtccatctatgttgggggtacattcaggaggaagtgcgcctgggagctgctgttc

SEQ ID NO: 9912 - DNA, 846 bp, Homo sapiens
  chr7:150671471-150672317
  binary
cggtctaactctagtccaacttgctctacgtgcccacacctgcccagggaaaaaaaggaccagaggagccagacccacagcctagcaactcctttgccctcctgaaaaccatctcagcagagtgaggcgcaggccccggaaccgcgcctcccacaggcacaccgcagggcccccgcccgcgtcacacccccacagaaccctgcccgggctcggggcgttctccagccgcccccacacccccacacccccacgcaccctgcccctcgccgtggtcccgcccctcttgaccccgcccctggtcgtggccccgccccggcccgctcctaccatctttccggtagaaggcgatttccactttgcgctcctcggcgcccagcagtgcctgcgcgatctgcgcggcagcgcggcgctgcgtgcgcggcccgtgcaggaagtcgcaggtgcagggtcgctgcatcacctcggcccgcgagtagccgcacagctcgcagaagccgtcgttgcagtagatgacggcgcagttctccacccgagcgttggcgatgatgaacttacggcctaggggggcggggaggagagtgcgcgtgagcggggaccccagcctccgggactcccagcccttccccacattctccactcacacagccgcccggggactccccgccacaggaagcatggctgggactggggtcccagcagggggcgaacgcagctgtgcgtgtgccccgatacaggtgcctggccggccgggccgcgcggcgcgccccctcctccgcctggcccgcgggcgggctgcgtggcttcccccgggcaggccgccagcagcccgccgcctcctccatgccc

SEQ ID NO: 9913 - DNA, 39 bp, Homo sapiens; identical to SEQ ID NO: 6613
  chr7:155581980-155582019
  hypo

SEQ ID NO: 9914 - DNA, 146 bp, Homo sapiens
  chr7:157151185-157151331
  hypo
cgtgatttgcccatccccagcagcctcatcactgaccacctgtttttacttgcaggacccattccaacaatctcgtaaaacatggtggattactatgaagttctaggcgtgcagagacatgcctcacccgaggatattaaaaaggc

SEQ ID NO: 9915 - DNA, 650 bp, Homo sapiens
  chr7:157202474-157203124
  hypo
cgctgtgcctgcaggtgtggccgacgacgatgccctcgctgaggagcgcatgcggagaggccagaacgccctgccagcccagcctgccggcctccgcccgccgaagccgccccggcctgcctcgctgctgagacacgcgcctcactgtctctctgaggaggagggcgagcaggaccgacctcgggcacccgggccctgggaccccctcgcgtccgcagcaggtgtgcaaagggaggcagccgtggagcaggcgcagagtgagacttctctgggtgccagaggacagcgaggacacaaaccgcgcctgggctgctgtgttctgacctgagcgggcgtgggcggtcgggcggggcgggaggaggtagcctcgctctgctcctctcccgctcgcggcgccccacgccacggtggctccgggccccccaccgttaaaacggggtccgcgtgtcctgtacgcagcgtgttgctccgcaaaggatgacagagctgccacggcagtgcgaggtgctgcttttaccgtagacgtgccttttcgtagctttcagcgtagagcttgaggcctgtggcttaggccgggtggtctcgtgctggtggggtctgcgtttgcccctgcccctccgtcagcttcaccttctcgtgccttcttctgc

SEQ ID NO: 9916 - DNA, 217 bp, Homo sapiens
  chr7:157476655-157476872
  hyper
gatttttccccatgaatgcctggccggcctattcattatctctcttctattagtaattttctgctccgtattcagcctcccaactcttcatttcctcccgtctcccagcgtacacagtgcctcttatgtcaggccgggcccgtttttatcttgtaatcataaaggccaccaaagcaattatcgccggtcttgactggaaaagctggtcattaattag

SEQ ID NO: 9917 - DNA, 250 bp, Homo sapiens; identical to SEQ ID NO: 8686
  chr7:157589680-157589930
  hypo

SEQ ID NO: 9918 - DNA, 95 bp, Homo sapiens
  chr7:1705153-1705248
  binary
agcggggcgggccaggaggagggggcgaggccgccactcggcttcccacgccgcccccgcggctggctccaacttcccctccggagcccccctcc

SEQ ID NO: 9919 - DNA, 77 bp, Homo sapiens
  chr7:19146849-19146926
  hyper
cgctgtaaatttcctatacaaatctcaaaatttttcttagcattgtcaactaccttcttggagacaggctacagcgc

SEQ ID NO: 9920 - DNA, 60 bp, Homo sapiens; identical to SEQ ID NO: 7522
  chr7:19156644-19156704
  binary

SEQ ID NO: 9921 - DNA, 210 bp, Homo sapiens; identical to SEQ ID NO: 8693
  chr7:23052818-23053028
  binary

SEQ ID NO: 9922 - DNA, 714 bp, Homo sapiens; identical to SEQ ID NO: 8694
  chr7:23053080-23053794
  binary

SEQ ID NO: 9923 - DNA, 246 bp, Homo sapiens; identical to SEQ ID NO: 8695
  chr7:23053819-23054065
  binary

SEQ ID NO: 9924 - DNA, 196 bp, Homo sapiens; identical to SEQ ID NO: 8703
  chr7:25896938-25897134
  hyper

SEQ ID NO: 9925 - DNA, 109 bp, Homo sapiens; identical to SEQ ID NO: 8704
  chr7:25897246-25897355
  hyper

SEQ ID NO: 9926 - DNA, 296 bp, Homo sapiens
  chr7:25901811-25902107
  hyper
cgtttccggaagacactctacacctctccgcctcttcataaatatttaaaccgcttctttctagatttgtcatttaaatctactagggaatgtgcctcaagggctcatctttcactgggtcgctcacacagaggtggggcgagagggaggaggcgcattagccctgcgctctcatttgcttaaacggccttcttacgtcatcgtaagcctaagccaatccgtgaagtgcactttgacaagctacccgcccctaatttgtcctttcaccgccagcctaagccaatagtgtggctgca

SEQ ID NO: 9927 - DNA, 208 bp, Homo sapiens
  chr7:25902138-25902346
  hyper
gcccccggctccgcccaatttcccacctcttcccggagcgcacagacgccagctgagtgggaggggcctagctgcgggcggagcacggaggaggaagggcacgaggaagaggcggagcgggccgaggcgcgcggagctgggtttgctgagtgcttccttcctcggccccacctcccgccgggcaggatgccgtttgatcattggctgg

SEQ ID NO: 9928 - DNA, 88 bp, Homo sapiens
  chr7:27651058-27651146
  hypo
cgagagctgatcaagttggaaccaacactgtggtagcagacccactgcgtgtgtgcgcgcacacacacacacccacccacccacacac

SEQ ID NO: 9929 - DNA, 308 bp, Homo sapiens
  chr7:35576961-35577269
  hyper
cgagcaccccccggggcagagcattgccgggtgagccgcatccctgcctggaacatatgagaggtgcggggtgtaggggaagtgggagcacgcggggggtctggggaggggacagaccgaaggcagagaccaccgcgacagacacctatcgaacttcacgctaaggactgctcgttttactgatccggactcagcccttagcgctgggcggtaccacgcgccgccagtgcggatcatctgggcactggcgccacctagtgctggcagcgcggcaatggcccttttaccgactcgcgcgtctatagtgc

SEQ ID NO: 9930 - DNA, 543 bp, Homo sapiens
  chr7:36894954-36895497
  hypo
cgaggaacagaatcagggcggtgagcaagatgccagctaggggctgaaagttgccagggctagaggtgatgctgaagggaatgtggacccacagcttccctttaccaaaggacggttccaaggcgtgggtgtgttttcattcctctctcctgttagctaggtgttccagttttggaaggggcatgtctgggcccggccacttcagttacagtcatagacgaagtcatagttgctgggctccttgggaatcggcggaggtgcgtcagggatctggatgttttccaggtccaggaggcggagcttgatttccatgctgagcagggtgtccaggtcattccgcgtcaggtcgctcatcatgtccttcccgagtagcgcattcagtccatccgtccagatacagtactggcaggaagggaggcaacagcgatcattactggtggcaattacagaagtattaatagtaaaaatagctaacagtgaatactcatccctcagtaggctgtgcgctaagggctctgcctacttcgtcatttcatatttggc

SEQ ID NO: 9931 - DNA, 168 bp, Homo sapiens; identical to SEQ ID NO: 5848
  chr7:37960958-37961126
  binary

SEQ ID NO: 9932 - DNA, 46 bp, Homo sapiens
  chr7:39454304-39454350
  hyper
taccccgcccccccaccacatttctgaaatgaaagagttatcaatc

SEQ ID NO: 9933 - DNA, 52 bp, Homo sapiens; identical to SEQ ID NO: 6279
  chr7:42927739-42927791
  hyper

SEQ ID NO: 9934 - DNA, 412 bp, Homo sapiens; identical to SEQ ID NO: 6280
  chr7:42928175-42928587
  hyper

SEQ ID NO: 9935 - DNA, 903 bp, Homo sapiens
  chr7:4801650-4802553
  hypo
cggcagggcccgcagggagcagagcaagggtagccgtcctgcctggcaggggtgcactgacctccggttccggcttggtggcttagcccctgtataggggacttgaaaaaagcagctgggtcctaaccagaccccagagtaaccctcttcttcctccactccagccctcaccagccctttgcagctccttgcgacccaagcgagttcatccgcgccggtggtggtcacccgggtgtgcgaggtggggcccaaggagccagcagcagccgtcgcggccacggccaccaccaccccagccactgccaccaccgcctctgcctccgcctcttccactggagagcccgaggtcaaaaggtcccgggtggaggagcccagtggtgctgtaaccacaccggctggagtgatcgcagctgccggcccccaggggccaggcaccggggagtgaggtcacctgcaacgcgggggagtgggactcacccagcggcgaccccgaagctggacccggcagctcaggcggccgcacccacagacggaggagaacagcccgcggcggcctgtgggcatcggcggcacctggacacacccagccctttccatttgatcgcctgccttcccgtggtttaagacaaaaacacataaacaagttcagacaactgattgtatgattctgggaattctttgctttcctttccttctccctcggcaccacctcctctccccaggcctccctgtcgggcatggggaggaggttggagctcagcatcttgaggaatgtgtcaagacagcccctccgctccgcgctgcacggccagccgcctttgtccgggaggacagacagaaacgcagcaaggcacacaccaaggctgccggggaggcccgggcaccggacagatgcctgttggg

SEQ ID NO: 9936 - DNA, 430 bp, Homo sapiens; identical to SEQ ID NO: 6620
  chr7:4802589-4803019
  hypo

SEQ ID NO: 9937 - DNA, 102 bp, Homo sapiens; identical to SEQ ID NO: 7551
  chr7:50344738-50344840
  binary

SEQ ID NO: 9938 - DNA, 110 bp, Homo sapiens
  chr7:64254700-64254810
  hyper
cgggttgttaaacgttatccaatcagggacgccgggctgggaacggtccaatcaggcacccagctggagcggacatgacgtcttccgggaggcggcggggtctttgtctc

SEQ ID NO: 9939 - DNA, 108 bp, Homo sapiens; identical to SEQ ID NO: 7552
  chr7:6443719-6443827
  hypo

SEQ ID NO: 9940 - DNA, 101 bp, Homo sapiens; identical to SEQ ID NO: 7553
  chr7:6443856-6443957
  hypo

SEQ ID NO: 9941 - DNA, 61 bp, Homo sapiens; identical to SEQ ID NO: 7554
  chr7:6443990-6444051
  hypo

SEQ ID NO: 9942 - DNA, 57 bp, Homo sapiens; identical to SEQ ID NO: 6283
  chr7:64734140-64734197
  hyper

SEQ ID NO: 9943 - DNA, 61 bp, Homo sapiens
  chr7:64974448-64974509
  binary
cggcgggggaaaaagccgcggcggagtggggcgaaaagcagtgggagctggggcaaaaaaa

SEQ ID NO: 9944 - DNA, 98 bp, Homo sapiens
  chr7:66204269-66204367
  hypo
cgtagcacacattaggcacttaggaagaatctgagaaacgaatcagttaatccctactttaccaataatgaataaagactgagaaactcgggccgggc

SEQ ID NO: 9945 - DNA, 90 bp, Homo sapiens; identical to SEQ ID NO: 7556
  chr7:66293278-66293368
  hypo

SEQ ID NO: 9946 - DNA, 57 bp, Homo sapiens
  chr7:7102882-7102939
  hypo
cggggggagtcagtgatattggcaatatcacagggtgtgtacaccacacctgttata

SEQ ID NO: 9947 - DNA, 37 bp, Homo sapiens
  chr7:7102968-7103005
  hypo
tgatactattgtcaaaacagaatgcgcggtacacccc

SEQ ID NO: 9948 - DNA, 59 bp, Homo sapiens
  chr7:76145303-76145362
  hyper
cgtcaccccagtaggctctccaggacccaggagcctccatcacctggaaggaccctctg

SEQ ID NO: 9949 - DNA, 322 bp, Homo sapiens; identical to SEQ ID NO: 6285
  chr7:8476750-8477072
  hyper

SEQ ID NO: 9950 - DNA, 168 bp, Homo sapiens
  chr7:87563203-87563371
  hyper
cgatgcagatgaatactggctgctgtaacggcccagttggtgcatctcggatgccaggaggcggtccagtgctgatctctttcttttgcccttccctcccgcccttccagtctgtgggatatagaggacctcacagtcacgaggtcgcgacggtccgtgccgtcgtgg

SEQ ID NO: 9951 - DNA, 216 bp, Homo sapiens
  chr7:87563614-87563830
  binary
cactgagccgcggtggaggttgcagcgccacggccgccgcagcaccggccggggctgggtggaggtggccgcggggaccccgggggcgcggagcgagggaaacggactcggcggcgccggcatgaggagctgagcgtctcgggcgaggcgggctgacggcagcaccatgcaggcggcagtggctgtgtccgtgcccttcttgctgctctgtgtcct

SEQ ID NO: 9952 - DNA, 440 bp, Homo sapiens
  chr7:87563890-87564330
  binary
tgggccataccatttcccgggaatctttggagccctcaggcgtattgaaaagggggcatccccatttcccgagtgcgcggggagattttttttttttttttttttaattcgggagggtggtgagaagtggagcaaaaatatatgtgtggaggcgcgcagatgcactggaagccttcggtcaaagcctgtttttctccttctgaagaggaatggggagaatgggaaaggggtgccctgcttctgggccccgctcctggttgctctcggatgagctggtccaaggctctcgggctggtgtctctgcgtccttcccagttgggttccgagagggagggggcggtggggattttcgtaggggagacgtaggactgcaggatggaggagtgagggtcagggtcattattttcgccttttctctccactccctcctttcccggttc

SEQ ID NO: 9953 - DNA, 207 bp, Homo sapiens
  chr7:87564359-87564566
  binary
gctagagaagaggaaggaaaaccgcttcgtggagcgccagagcatcgtgccactgcgcctcatctaccgctcgggcggcgaagacgaaagtcggcacgacgcgctcgacacgcgggtgcggggcgacctcggtggcccgcaggtgagaggctcggtccgggaggtggtcctccgcgcctcccggcccacccgagaccccacgattgc

SEQ ID NO: 9954 - DNA, 376 bp, Homo sapiens
  chr7:93203842-93204218
  hyper
cgttagtctcagtcctccctctccgcccctctcctggttttctgacactttaaatctgtcttaggtggttcagacccaagtctaggttgtattatcagctaaaagacaactgttctttcccctggcttgctttctacctccccagagtccaggaggctcaccttcccggcgccttcctgcgctctcccagctgtgaagctgtgcgcaaacttctcctgacttaagagtctcaatcctagcctgcgctcccgccccacccccgcccgcctcccgacaggcggcagaggaggtggcagcagaattgatgagagccagccccccttcccggaccccgccaccccagtcagccccctcctgtcccaggagagggaggggc

SEQ ID NO: 9955 - DNA, 39 bp, Homo sapiens
  chr7:94536809-94536848
  hyper
cggagccaacacccgaacaggaaggggccttgccccagg

SEQ ID NO: 9956 - DNA, 280 bp, Homo sapiens
  chr7:94537598-94537878
  hyper
tgggatctattgtttcctggcacattgggaggaaaaacaaagggatttattttcattaccctgtaattttttttcttttctatttttttaaatgtggccagggagctcgtctctctccgtgtcacagtgggatccgcctggcagccgccgggagctgcagccaatgtgttaggacttcaggtgcttcttggcacaaagctagactgcgacctcctaccatagcgcttggcgtcacctgctctcccggtcctgccccagggccgagggattgcgtcccgaa

SEQ ID NO: 9957 - DNA, 192 bp, Homo sapiens
  chr7:987241-987433
  hypo
cgacatcccgttgaccagcaaatatttcaagacgatccaggctttgaccctccccacactcacgccccgccctaggcctagccaccgccacccggcctcggtcactgcagcagcgtcccacccacctcccgctcccgcgctggccctacctgccctggaccctgtgacgcgtcgtgggctgggacactcctc

SEQ ID NO: 9958 - DNA, 174 bp, Homo sapiens; identical to SEQ ID NO: 6289
  chr8:110987222-110987396
  hyper

SEQ ID NO: 9959 - DNA, 818 bp, Homo sapiens; identical to SEQ ID NO: 6293
  chr8:114449602-114450420
  hyper

SEQ ID NO: 9960 - DNA, 541 bp, Homo sapiens; identical to SEQ ID NO: 7562
  chr8:121823361-121823902
  binary

SEQ ID NO: 9961 - DNA, 132 bp, Homo sapiens
  chr8:126042734-126042866
  hypo
cgggaaataacgacattggggtttagaaagaatgcaaaatcagtaggagccactggtatgcactggatgtcaagaaacccatcactgcaaagccgagatcacgccactgcactccaacctgggcgacagagc

SEQ ID NO: 9962 - DNA, 44 bp, Homo sapiens; identical to SEQ ID NO: 6624
  chr8:126044399-126044443
  hypo

SEQ ID NO: 9963 - DNA, 325 bp, Homo sapiens
  chr8:12989711-12990036
  hyper
aactgtgtgtgtgtgtgtgtgtgtgtgtgtgtgtgtgtgtttcctagcaagaagcacgtttgcaagccacggggcttgctaaactaccccaacactctccaggtacctgcggccaccaaaccgagacttccctggccaggtctgagttaattcccagcgcttaaagtatcttacccaaaaatggttgaaaaggaaaacaagtttttggtgaactttcaggcagtgatgaaaaaaaaaaatttccaagcgccactagggtctaaaatgttcccaaacagtaaactctcccggagttcactttgattttggactaagctggtgaatg

SEQ ID NO: 9964 - DNA, 393 bp, Homo sapiens
  chr8:136469763-136470156
  binary
cgggactggcggggatcgccgtggactgcctcaggggcgccgcagcccgctcggcccgagggcccgcctaaccgcgccgcccgcgcccgctcctcctcggcccgcgcccggagcgcgggggccgccggcgctgggtactcggcggccaccggggatcggggctgagcggtcggttcccgcccccgtgccgccgccgccgccttccggccgaccgcccggcttggccgctgctgccgcgtctggcccccgggtccccgccgctgggggcgcgggcggggtcgggggttgccgggcgccgccccccgtgcgcctggagtccacatcccgggcccggcggccggcgagcatggaggagaagtacctgcccgagctgatggcggagaaggactccct

SEQ ID NO: 9965 - DNA, 206 bp, Homo sapiens
  chr8:136470313-136470519
  binary
cccgggtggcccccggggtcgtttgcacggggacctgggaggctgtgggacacctaggggaagaccctgatgtgaattttggggacttggaaggagaaggctggggcgcatgggtgagacttgaaggaaatctttggggactcgggcacacccaggggaaacttctgggtgggggacagcgaccatctgggggcttcgttgggaac

SEQ ID NO: 9966 - DNA, 151 bp, Homo sapiens; identical to SEQ ID NO: 6295
  chr8:140643192-140643343
  hyper

SEQ ID NO: 9967 - DNA, 82 bp, Homo sapiens
  chr8:141624866-141624948
  hypo
cgggaggatggcaggacccacagagtcatgaccgcctaaagccctttgcaagcacctggcactcagcattcgccgtgccctc

SEQ ID NO: 9968 - DNA, 104 bp, Homo sapiens
  chr8:141634072-141634176
  hypo
cggggcaaggaggtcacagtgggtgatggagacaggacaggagagcccaccatagggcgagatgcacggggagccaggaaggtgcagggcgagcgcgatggacc

SEQ ID NO: 9969 - DNA, 934 bp, Homo sapiens; identical to SEQ ID NO: 6626
  chr8:142235190-142236124
  hypo

SEQ ID NO: 9970 - DNA, 121 bp, Homo sapiens
  chr8:143531858-143531979
  binary
cgctggcgggggtctaagggagccccccatggcccccaacagccacacatagacgcagcaggctccggagagcccccgagcgtgtccccctcctgctaatcacgtccagggccccctacag

SEQ ID NO: 9971 - DNA, 207 bp, Homo sapiens; identical to SEQ ID NO: 6628
  chr8:144414283-144414490
  hypo

SEQ ID NO: 9972 - DNA, 48 bp, Homo sapiens
  chr8:144589930-144589978
  hypo
cgccgggcccgccaggagggcagagacagggggaagggcggggcgctg

SEQ ID NO: 9973 - DNA, 220 bp, Homo sapiens
  chr8:144590082-144590302
  hypo
ccagggcacagacatgggtcagggaaggccggcaagggtagggtcagagaggccacccacagtgccagctctgcccaccgcctccgccggagcttgaagaccctccatcgccccgtggataaaaccctcaacccatgtggcacacacatccccagggcgcctggcagccgacgcttcaggagctagccagtgcagcctctgagaggcgggcaccagcccc

SEQ ID NO: 9974 - DNA, 85 bp, Homo sapiens
  chr8:16884239-16884324
  binary
caaatgcttatacctcatttgtgtcgtatatgtgaagatacaattgcaaatcgttcacgaccttgagtcaagaccttgagtttcc

SEQ ID NO: 9975 - DNA, 56 bp, Homo sapiens
  chr8:21959292-21959348
  hypo
cgagcgacctttcttcgagggccacttcctccgagtgctgtttgaccgcatgtccc

SEQ ID NO: 9976 - DNA, 197 bp, Homo sapiens; identical to SEQ ID NO: 6630
  chr8:23423722-23423919
  hypo

SEQ ID NO: 9977 - DNA, 260 bp, Homo sapiens
  chr8:24814801-24815061
  hyper
cgtgaaactgcggcactactgcaggtattggtttagcatttttaaacctttacagcagttaatccgcctgttagtgtttctagattttcacatttcttaactgagaatgaagccgcagatggctttaacgtgttgcagtgtgtgggtggtggagggcagagaaagagttggaaacacagagactgacttgctgaggcagccgcgcgctccgcagccgggagcttcaagctgcctggatcctcaccaagctaaattcctgc

SEQ ID NO: 9978 - DNA, 39 bp, Homo sapiens
  chr8:24815435-24815474
  hyper
gtcccccaggtttcatggagggattgcagagatttacac

SEQ ID NO: 9979 - DNA, 88 bp, Homo sapiens
  chr8:25904367-25904455
  hyper
ggtccgaactgcggagattcgcttgaaaacggatagggggttagggagtttgcggggcgggtgcacggaccgtctctgcacaggcccc

SEQ ID NO: 9980 - DNA, 106 bp, Homo sapiens
  chr8:26267649-26267755
  hypo
cgagccccgatatttaatgagtaaacaaactcatataaaaccagtttggccgggctggtgactggttttaagaaagtcagtgatgatttcacggtgtttggggagc

SEQ ID NO: 9981 - DNA, 372 bp, Homo sapiens
  chr8:28347825-28348197
  hyper
cgtctataaatcccgtcgctggcatccggggtctcttaggcaacaatgtgtgggctcctgattggccgcgagatccaggagggctggctacaaaattgggcacggggataaaattaacaagtgtggcggccaagagcgtgggagggactgcaatgtctcaatataaccctagaatgaagacgcgtcgaatcctgaaacaagtagcgttgaaaaccttcattcaagacgtagtgtgtcccaaatcagccctacctacggagcacgcccagtcacattgtcctggtcactccggagctgcgaaatgcaggctccactgtgccaggttttaagagtggccaacaggtaaacagagggttggaggaaaaagaattc

SEQ ID NO: 9982 - DNA, 267 bp, Homo sapiens
  chr8:30561955-30562222
  hypo
cgcaatgcttgtgctttcgtaaaatgggaagaataccacaaaagtacatgacactgaagttctacgctggagacggtgagaactcagactcttacttttggatttgctcttactggaatcctctgtacccaggccttcacttaggggctgctggcacgctttcgccagccatgatacatgcaggggcatgcaaatgtggtcaacttacaagaataatggaaccatgtaagcatgattacaaagtggaatgctttaacatattggaac

SEQ ID NO: 9983 - DNA, 95 bp, Homo sapiens
  chr8:30890537-30890632
  hyper
cgccgccgcccgtcccgcgctccgcggccccaggtctccagccggcgggcactcacatcatctctgccatcaccgccgccgccgatgcccttcac

SEQ ID NO: 9984 - DNA, 231 bp, Homo sapiens; identical to SEQ ID NO: 5851
  chr8:33372206-33372437
  binary

SEQ ID NO: 9985 - DNA, 113 bp, Homo sapiens
  chr8:49834207-49834320
  hyper
cgctcggtgagccccgcccgcgatccacgctctctgggagctaggaggggcgcaggagccggggtctctgccctgcccgcctggcttccagatgtggtgcagcgccagcgcgc

SEQ ID NO: 9986 - DNA, 606 bp, Homo sapiens
  chr8:57122656-57123262
  binary
cgttttctcattgtcggttgagttataaaaggcttttgcccttcgaaagttttaaaaaataaataaatattaactccttggtccctgcaaagtcaaaatggacttcaggggaaaggcggtacatacttttacctttagcgagaaaagggggagcatcccggatttttagggattttttgcgattttttaaaaatttttatttggttatatgcctgagttctccctccattttggttgtttatgatactgacaacaagctgtccctgctctgtgccgatctcctgctttcatttagcaccccctccccctaccccccctcgcagccacacaccccgggctcacacctccctgcagaccccgcaccccgaccccggcttgcccacctgaggaaagggcaaaaacaaattcatttctccagaaaagaaaaacctcttttgaaaaaggggcaaagttaccccaagtcactcaaagtgccccccaaatattgccgactgcgggtttccgccaggccctttgggaagcgaccttcccccgggatgttttggtggaaaatgcggagagtttactctcaaaactgaatttatattaatttttcccttatttttc

SEQ ID NO: 9987 - DNA, 32 bp, Homo sapiens
  chr8:593299-593331
  hypo
cagggacgggaagctggccaggcgcaggctgc

SEQ ID NO: 9988 - DNA, 200 bp, Homo sapiens
  chr8:60030947-60031147
  binary
cgcctcccaggtccctgcaccccgactcccggctgctcccctggcaactaatccggagaagggaagtggtgccacgagcccccactgcccggggagggagggagagagaagggggaactgggaaataaactgaattctcttactctgcctccgttcctggaccccagacacacccccaaagtattccacggttttctctt

SEQ ID NO: 9989 - DNA, 350 bp, Homo sapiens; identical to SEQ ID NO: 5854
  chr8:60031791-60032141
  binary

SEQ ID NO: 9990 - DNA, 203 bp, Homo sapiens; identical to SEQ ID NO: 6303
  chr8:60032288-60032491
  hyper

SEQ ID NO: 9991 - DNA, 293 bp, Homo sapiens; identical to SEQ ID NO: 5855
  chr8:61193765-61194058
  binary

SEQ ID NO: 9992 - DNA, 235 bp, Homo sapiens; identical to SEQ ID NO: 6305
  chr8:67026578-67026813
  hyper

SEQ ID NO: 9993 - DNA, 436 bp, Homo sapiens
  chr8:70745324-70745760
  binary
agcatcccacctcgctgcgccaggggtaccgggtgttcgccgcctgggctcgcggcaccctcgggagtgaagctgccgacctgcaaagcagaaagagggcggtcagcgaagagcggctgcggcttggggctagcgtcccagcgccccggggaccagggttaggtgaccccgaaccgtccctagagggacggaggagctagtcaggagcggagccccggaggactaggcagcagccggctgcagtctccagtcccggaacaataagcagcaggcggtcggcggagactctccctcattgtctgccgcggacctgcccccgtcccgccccttctgccttaaacattgcgtttgcttttatatgttaataattatcaacctggcagctctgactcagaggcagtgtcttttaatcgagtgaactaactgcagcctttcc

SEQ ID NO: 9994 - DNA, 898 bp, Homo sapiens
  chr8:70745885-70746783
  hyper
cgtgtgtagaaatgtgtgtgcacactggtgtgcgttggcacgtgtgcgcgactagatttgaatctgtctgctccaccagagacacacattcaaagccgaaggcagcagcaaaaaggtcaacatgcttgcctctttattcccaacaccaaaaataaccccctgaccgaaagaactcttcaattacaaataccaggggcattcgaggctgtggcccgcactaagtcccagagcgcggtatcaaacgaaaccgaaaatccgtctgctttgccgagagctagggaagccacaaccaaacaaagagatcccggcacgctgtcagagagcgcgcgaggagcccacggagccggctgggcgcacgcgggccggcggggaggtgtgctattgactgagcgcaccccgctagcgtgggcctggggagcgtgtgcgcgtgcgcggccacacacacacacacacacacacacacacacacacacacacaccggcgtactggaacctctctcgcgatcccgcacccagcttgaattcagcaagaatcgaaaacaggtgtgcccccgtggtaagaccccgcccctaatcttggggacccccactccactcctccagcctggggcaaggacggggggcggaatatgcaccaggtgggagacagccgagcttcactacactgggtttcattttgcagcgcgcctttgtgatgctgctgagaaaagaaaggaggaagggcaagggagaaaggcagagaggctgggcggccaagggtggccgctccggcatctccctcggctgtgctgggccaaacccgctcccagattcccggcctgccagccactcacaatcccgggcttccccgccgctgccttacccaggcgccttcccggggaaccccaccagccgctgc

SEQ ID NO: 9995 - DNA, 146 bp, Homo sapiens; identical to SEQ ID NO: 6635
  chr8:71447942-71448088
  hypo

SEQ ID NO: 9996 - DNA, 50 bp, Homo sapiens; identical to SEQ ID NO: 6636
  chr8:71448124-71448174
  hypo

SEQ ID NO: 9997 - DNA, 55 bp, Homo sapiens; identical to SEQ ID NO: 5856
  chr8:72756949-72757004
  binary

SEQ ID NO: 9998 - DNA, 77 bp, Homo sapiens; identical to SEQ ID NO: 6309
  chr8:75897394-75897471
  hyper

SEQ ID NO: 9999 - DNA, 837 bp, Homo sapiens
  chr8:81399496-81400333
  hyper
ggcatttcaatgggcgagggccggcgactgtggatctggagctggacgcgctggaggggaaggagttgatgcaggacggcgcgtccctgagcgacagcaccgaggacgaggaggagggggcgagcctgggcgacggcagcggggcggaaggcggcagctgcagcagcagcaggcggtcgggcggcgatggcggggacgaagtggagggcagcggtgtgggagctggcgaaggagagactgtccagcacttcccgctcgcgcggcccaagtctctaatgcagaagctccaatgctccttccagacctcctggctcaaggactttccctggctgcgctattccaaggatactggtcttatgtcttgcggctggtgccaaaagacccctgcagatgggggaagcgtggaccttcccccagtggggcatgatgagctttcgcgagggacccgcaactacaagaaaaccctcctcctgaggcaccacgtctctaccgagcacaaactccacgaagccaacgcccaggtacagtatatcctgctcctacttttttgagatcttttagggaaaggtttatcagcactcccttcacccccacccacccccgaaaaaaaacctcaaaaccattttcctgggtgaagacatcgttccagttgagaggtgcgggaagcttaggcgtgggggtttagaaagcctgggaacaagttttataaaagttctgtatgtgttgtggggggaaggggatggaatgacaattgtcgtggcgctggattttcttttttatgactcatttcttatcagattgaatcaaaaagaaagtgaggttgaaggttttaaccta

SEQ ID NO: 10000 - DNA, 125 bp, Homo sapiens
  chr8:8748226-8748351
  hypo
cggagcagttcctggctgggggtggaccgcgccatgggcggggagctttccccctccgccttgccctctccactggtccctaggagcagcttatgcagcagcaaagagggatccctctggaagaa

SEQ ID NO: 10001 - DNA, 85 bp, Homo sapiens
  chr8:8749088-8749173
  hypo
gggacaggaagaagggctggatcacctcataactttcatccccagctaagtcatacacgatgaaccgcaggccccgggaggcatc

SEQ ID NO: 10002 - DNA, 202 bp, Homo sapiens; identical to SEQ ID NO: 6314
  chr9:100610480-100610682
  hyper

SEQ ID NO: 10003 - DNA, 150 bp, Homo sapiens
  chr9:100849678-100849828
  hypo
cgctgatctaggtagattaggcgagactgggcagctgcggcgtacctggaggctgtcacgccggtcctggcccctagggcagccgggggatgctgatggccccctcccagagccgcagggccgggtagagcggctcctggaacgtggcgc

SEQ ID NO: 10004 - DNA, 188 bp, Homo sapiens
  chr9:114556879-114557067
  hypo
cgtaacatggcagagaaggcgaggtgcacctattttcccttattgtttagcccatacaacttctagttgatgggctgaaatcccaccagcatctctgagaccttcacaccttctattctcaggttaagtggacagtgggtctggggttttgtctctacagagccacatcggccgggcctcacagatgc

SEQ ID NO: 10005 - DNA, 46 bp, Homo sapiens
  chr9:115087431-115087477
  hypo
cggcaaaatgcctaggcaaagagggaagggtccccggagaaccttc

SEQ ID NO: 10006 - DNA, 392 bp, Homo sapiens; identical to SEQ ID NO: 6319
  chr9:122318421-122318813
  hyper

SEQ ID NO: 10007 - DNA, 110 bp, Homo sapiens
  chr9:126779038-126779148
  hyper
cggtaggccggtcggtggcgcggatttaagatttgctgaaggcactaccacagatgtagctctctggaacttccatccctcctctcctaccaccccccaaaaaaagacaa

SEQ ID NO: 10008 - DNA, 250 bp, Homo sapiens
  chr9:126780315-126780565
  hyper
ccagctttttgtgtgtgtgtgcctggcggcgtaattactgatttgattccaatccattatttagacaattgaacctacaatctcgtctttagtaaaatgaggcgaagtcagatttgattacaggttcagtcccagcgacaagagctcgaaacccgatgggttaataacagatcacgagtaaattattcatgattttacgagctctttagctccattgaatcggcctaattgagaggaaaaaaaaaaaaaa

SEQ ID NO: 10009 - DNA, 233 bp, Homo sapiens
  chr9:130637231-130637464
  hypo
cgagggacataaacagcggccacacaactgcagagctgctcccctcgaaactcccagaaaacagggcgcagggccagcgtctgcccagacaccttgacaacgctccccagggccagagggaagctgccaggaggtgggaggtggccaggaactatgtgtgtctgggatgaggtttggatggggatcctctaagggacagaggcctggggtgaaggaatctacaggagccgctc

SEQ ID NO: 10010 - DNA, 355 bp, Homo sapiens; identical to SEQ ID NO: 8799
  chr9:132393701-132394056
  hypo

SEQ ID NO: 10011 - DNA, 53 bp, Homo sapiens
  chr9:134126741-134126794
  hypo
caggaaggaggcagcccaccctccaagggacacgtggtccacatgagcagctc

SEQ ID NO: 10012 - DNA, 470 bp, Homo sapiens
  chr9:136399643-136400113
  hyper
gccgccgccggcagcagccaacaggcagctgggccggcctggccgggctccagaggcgcagagcgggttaaagtgtgcgccaggccggccggcgcgggcgggggagcggcctggtgggaagtgtgagtgttcctccccgtctgcctgacagctataaaggcggccgccggcgcagagccgccactgggctgcgcccctcccgggaaccccctctcttggatgctctttgaagtgggagagggaggcggcgcgggggaggaggggaaggggagagggaggccgggccgcagcctctgcactcacgccgcccccgcacgcacagcgcacctggcgccgtctgccctccgcagcgctcgcccctttctctgggaggacaacctgctgacccgaagccaggtaggccacctcgtccccgtccccctcacgttgcagcgtccaccaggccagcccactgctcagagtggggctgg

SEQ ID NO: 10013 - DNA, 275 bp, Homo sapiens; identical to SEQ ID NO: 7614
  chr9:138660497-138660772
  hypo

SEQ ID NO: 10014 - DNA, 34 bp, Homo sapiens
  chr9:139084513-139084547
  hyper
cgtcccgccaaggggacgccacccagagccctgt

SEQ ID NO: 10015 - DNA, 206 bp, Homo sapiens; identical to SEQ ID NO: 6644
  chr9:139698453-139698659
  hypo

SEQ ID NO: 10016 - DNA, 97 bp, Homo sapiens; identical to SEQ ID NO: 6321
  chr9:19127135-19127232
  hyper

SEQ ID NO: 10017 - DNA, 72 bp, Homo sapiens; identical to SEQ ID NO: 6322
  chr9:21395928-21396000
  hyper

SEQ ID NO: 10018 - DNA, 36 bp, Homo sapiens; identical to SEQ ID NO: 6323
  chr9:21396327-21396363
  hyper

SEQ ID NO: 10019 - DNA, 72 bp, Homo sapiens
  chr9:33023515-33023587
  hypo
cggcctgacttacgtgatttttgtattacaaagccctagtacactgcctggtaatattagacgtttattaac

SEQ ID NO: 10020 - DNA, 665 bp, Homo sapiens; identical to SEQ ID NO: 6651
  chr9:34318282-34318947
  hypo

SEQ ID NO: 10021 - DNA, 894 bp, Homo sapiens; identical to SEQ ID NO: 6325
  chr9:35756575-35757469
  hyper

SEQ ID NO: 10022 - DNA, 63 bp, Homo sapiens; identical to SEQ ID NO: 8817
  chr9:37034135-37034198
  hyper

SEQ ID NO: 10023 - DNA, 83 bp, Homo sapiens
  chr9:37118395-37118478
  hypo
cgcagttcaaacctcagccaggaacagctgggactccaggtgtgggccaccacgccctgttattattattatttttttgacac

SEQ ID NO: 10024 - DNA, 61 bp, Homo sapiens
  chr9:37118798-37118859
  hypo
cgtcttgctatattaccccggctggtttcgaattctcggccttaagctatcctcccacttc

SEQ ID NO: 10025 - DNA, 349 bp, Homo sapiens
  chr9:71320587-71320936
  hyper
cgctgtggggaagcgacaacgtcccgataacttgcagactgtggcgcaactggtcttggtagcggaggcacccgaatgctgcccgggtgaggtaagtttcctgtgcgtccccggccccttcccactagacccttctgaggggcttgcgcttaggggctctgcatctctgctgaaacccgtcggtctctctacccttccactttgcctgtctgcgttgtgctgggggtgacgtggagagggcgcccgtggccaccgaagcggaccttcgttccgcgggggccacagctgcgcgctcccaacggacacccacccgctcgtcacccggatccccggggccgcagtgacactc

SEQ ID NO: 10026 - DNA, 163 bp, Homo sapiens
  chr9:74640002-74640165
  binary
cgaatgatgaaagccgtccaggggattccgatgctgctcagggttaaaaaccacagcttgatctgaagagctgcaggggacagcgccctctggaggccacgtgatcacagcagccatagaaaagcagctgcatccagagaaaggagcaagagtctaggtttcc

SEQ ID NO: 10027 - DNA, 102 bp, Homo sapiens
  chr9:77111662-77111764
  hyper
cggacgtttttaaaggaaggggacagctacttccatgggactgcattttagttgtgctaaaagtgatgaaagtgggtttgcattattctaccaccaacaccc

SEQ ID NO: 10028 - DNA, 244 bp, Homo sapiens
  chr9:87283766-87284010
  hyper
cgatctgggaatggctacatcccgtcaggttaaaggatgagagaaaatgacgcggcgccacacatcggacaggccagggtggccaccgagcatttagaatacgcatcaggcgcgctcccttcccctcacatgtctctatttcccgggcgtgtgatggcagaaaacggcaggaaaaagacccacttagagagctagaattgtgtttggagactcccttccctctgcaaaagcaccaacaggaagc

SEQ ID NO: 10029 - DNA, 370 bp, Homo sapiens
  chr9:95570986-95571356
  binary
cggctgcacaggggcaggaaccggccctcagacccaaccccggtggctgcagagggccactggctagaggtccccagctccagcagaggaggagctgggcgggggcagggcctggcgggctctcaggccaggtgcactcgcgatctagaggcagcccaggccattctccaccacctgggcgcccaagctgcaggcgccctctacctgctggcaacagctgcctggccactcccaagctggctggcgctcccaagcctcgcagaaccggggctagatgtcgccgtggctgcggccaagcccggcggtctgcccggcggcggctgcaccgtggctggaaccgaccccccagtcccatcccccatggctacgg

SEQ ID NO: 10030 - DNA, 55 bp, Homo sapiens
  chr9:96155825-96155880
  hypo
cggcagtggcccgacgtagtctatttgccatctagtcaagggaatctgccctacc

SEQ ID NO: 10031 - DNA, 175 bp, Homo sapiens
  chr9:96717633-96717808
  binary
ctgcgccccctccccacgccgccgcgcctcttgcccggccagccccgcgtcaccgccccgccccgccccgccccgcgccgccgcccccaacccctaggctgagccggagggagggacccagaagggagggaggcggaagggaggccaaaaaggagggggccacgtgaaagaggcc

SEQ ID NO: 10032 - DNA, 294 bp, Homo sapiens
  chr9:97867233-97867527
  hypo
cgcgtctggcttatttcgctcagtgtaaagccctctaggttgggccgcattgttgcaggtgtgcattttataagagtacacaatagattctcgaaagcattctcgctgtgctggggccgggcccaaagaggtggcacctggcatgtggcagccagtcgtctttagccctgggccaccctcatgactcggattcgtcttagctgagacaccagcacctgggaggcacagcctgggcccactccacaggactgtcctaccaggatggagacaatctcctggccctggttcttggca

SEQ ID NO: 10033 - DNA, 37 bp, Homo sapiens
  chr9:97867556-97867593
  hypo
catggacattcacgtttcagtcaggcccggcctggac

SEQ ID NO: 10034 - DNA, 41 bp, Homo sapiens
  chr9:99984107-99984148
  binary
cgcagccaccggggatggggctgagggtcggttcctgcccc

SEQ ID NO: 10035 - DNA, 393 bp, Homo sapiens
  chrX:102862914-102863307
  hyper
cgggcagcgggggagcagcgagcgggcttccgcgagccggagaaggcacaggcctgtcccgggtcccggcaggtcagtgtgaaggtgggcgctgccggcggaaccacggaaggggtggaggtggctggcagtaggagtagggaggggcggagaaaggatccgggagactggtgaggagggggaagcggagcggtcggaggcaagggcgggggagcctggcccgccttctcgacgaccccctgcactgagccgtccatccattttagtactggaaatggagtacgggggggcaaccccgcagtgcaacagtgaaacgtagacatattctggaaataaccgcctctcacaatctgctcccatggaaacatctgacctccgcaaaaacggggtggc

SEQ ID NO: 10036 - DNA, 84 bp, Homo sapiens
  chrX:110924337-110924421
  hyper
cggccattacggatttccgcctccctcacagaaggcagtcactgcaacgtgcgtggcctcagttgcgtcatatccggcccttgc

SEQ ID NO: 10037 - DNA, 157 bp, Homo sapiens
  chrX:110924466-110924623
  hyper
cgtagggaccaccagctttgacgacctcattgcgtgtgtgtcggcgcccgacagtctgcaagtgagtgagggaggcgagcaggcggcggcttggctcgccacccgccatctccggccatactgccagccgcgttagccttgcctgaccgtcgcgctc

SEQ ID NO: 10038 - DNA, 85 bp, Homo sapiens
  chrX:123094093-123094178
  binary
cgcggctcgatcgggtccgcggcggaagcgcggccaaacgaatgagtaagtcaggcgcgggcacggcaccttgtttaccccactc

SEQ ID NO: 10039 - DNA, 87 bp, Homo sapiens
  chrX:123094335-123094422
  binary
cgctccctcccaacgggagccgggcgcgggttcgtggccgacagatggcgcctgcgcgttccattcgcctccaagtcgccgaagagc

SEQ ID NO: 10040 - DNA, 116 bp, Homo sapiens
  chrX:129171389-129171505
  binary
cgtgacaatgctggctacacagccctgcatgaggcttgttcccggggctggaccgacatcctgaacatcctgctggagcacggggccaacgtgaactgcagtgcgcaggacggcac

SEQ ID NO: 10041 - DNA, 158 bp, Homo sapiens
  chrX:133507338-133507496
  binary
cgtaagggcgctccgcgagcccgtctctcctcgaatgaaaggaaacaacctccggcgacagagccccgctctcaggcactgctggagaaccgagaccgacttctttctctttaccctcattggcgcttctctcctgcagtccgcctctgggccctgcc

SEQ ID NO: 10042 - DNA, 305 bp, Homo sapiens; identical to SEQ ID NO: 6329
  chrX:13706949-13707254
  hyper

SEQ ID NO: 10043 - DNA, 562 bp, Homo sapiens; identical to SEQ ID NO: 6330
  chrX:13707434-13707996
  hyper

SEQ ID NO: 10044 - DNA, 958 bp, Homo sapiens
  chrX:13752377-13753335
  hyper
cggctccaaaaggcaacagtgcagccgttaagaaaccctgggttagctgaatgacccagtgaaccgcgaaaccacagcccccgagagggcggacgtctgcaggtggaagggctgcgcggatgagccagcggagggctggcaggtccggcccggccaccccggggaggggtggaggtacaggaccaacatccgcgtcacgcaggggctacgaagtcctccagggactcaaaacacccgccccccgccgcacttgctccattccctacctgcagtgggaggccgacaacggaaacgcaatgtcagtttccgcggaagagacccgcgccccgaacctgtagccagaacgccgaagcagttctcgcgataccctgggatgtgctctcgcgatacgtaggcggagcttccggccggtgctgggcaaccaagctcatgcgccgtagctcttcagctcgggaaggctatatttagcaggtttccggaagttgccggactggctgtgaggcggtcctgcctcgctgccttcagtccctagtgtctgggtccccgccctccagccgcctttgagtcgtgcctgggtcctcgcccttgcctcagaaccgcgaagaaaggaagctcgcgtgtttgctagaaaacctagttgggagtgcgaggcagagaacgttcagcacctttgttcctcccgaaccctcgggacagaggcagggttctgagggcagggattccccctcgtcttggccccaccgcccgggctgggcactaaactcgggccgcggcggggcgagcgaggcgggctccggagggagctgacgcctgatgatggcgcaggtagacacacctgccccttctcgggcggaaataaagtcttgttttgtgttcgttaaactttcgccgctaggcctcttatggcttccccggaggccactggtctgttttcagacgttcacgttccctctgcccc

SEQ ID NO: 10045 - DNA, 132 bp, Homo sapiens; identical to SEQ ID NO: 6331
  chrX:15511311-15511443
  hyper

SEQ ID NO: 10046 - DNA, 140 bp, Homo sapiens; identical to SEQ ID NO: 6332
  chrX:15511544-15511684
  hyper

SEQ ID NO: 10047 - DNA, 117 bp, Homo sapiens; identical to SEQ ID NO: 8820
  chrX:15755988-15756105
  hyper

SEQ ID NO: 10048 - DNA, 300 bp, Homo sapiens; identical to SEQ ID NO: 8821
  chrX:15756366-15756666
  hyper

SEQ ID NO: 10049 - DNA, 225 bp, Homo sapiens; identical to SEQ ID NO: 5860
  chrX:16730628-16730853
  binary

SEQ ID NO: 10050 - DNA, 35 bp, Homo sapiens; identical to SEQ ID NO: 5861
  chrX:16730902-16730937
  binary

SEQ ID NO: 10051 - DNA, 187 bp, Homo sapiens; identical to SEQ ID NO: 8822
  chrX:23801086-23801273
  binary

SEQ ID NO: 10052 - DNA, 100 bp, Homo sapiens
  chrX:39871661-39871761
  hyper
cgcggccaggaatccctctgcccgcagctgccgcggaggggttgagggttaaacagacaccgggcagaggagcgagcctgccggctgcggccggcgcggc

SEQ ID NO: 10053 - DNA, 187 bp, Homo sapiens
  chrX:39871778-39871965
  hyper
cgggagggaagagggcgcacgctacctagcctcccgacgagaagacgtctcctccccacgtcaggccgggctctcgcccactcggctggccgcctctgctccctggcctctcaagtctcagcggaaagaaacgtagcggctgccaaaagcaccccactccttttattgtccccataagcctatacac

SEQ ID NO: 10054 - DNA, 510 bp, Homo sapiens
  chrX:39873113-39873623
  hyper
cgagctggcccacttggcacggaagggcaggcaggccaggcgacgcggcgcgagattccacagctcccgctccggaccgggggaaatcctggagtgccagagagcccggggagggggcgctccgggagcctctccttgaaaggcgggatgctttccccgttcctcccgcgcacgtgtcctcagcagagcaggcaagcgctgcgcgcctggggctgcgatcctcgggtgacagcgactgagagcgcgccctctccacccccacccccgccgtcgccgcctctcctggggagctccagtctccagggtgcgctcggggcaggccccaagagccagagaaacggaaaagtgccggggaggcgattaggaagagaagacattaaaaagcccagccctgaaagacaggcagccgagctgaaaaagacgcctgcgaacccccaccccgccgcccctcgcctactgcgcccagacggcccctccttgtcccggctgagcgcacccacccccggcctc

SEQ ID NO: 10055 - DNA, 863 bp, Homo sapiens
  chrX:39931611-39932474
  binary
cgttgctcccggctgagctgactggaatctgcatacagttcggtagtgacacatttgaatcggtcacccacgtaacccgctgagttggcgattctctttgccagcttagatggcttcggtttcagaactttgccatcatttgattcagcctcatcagctccatctttggtataggtgggggtcacatccacacttggtggggcactgcccacacaaaatggtttgggatcctcttgggttttaccaaaagttacagcagggccatcgctccccagaggtggctccaggaatggagtcgagactggcaaccctaggttctctttgttggtacctgccagaacactgtccttgcttacggtgaagactggctgtttgaaagtataagtttcgtggaagtcactgatgcgccccaactcctctctcagggcgatgaaatcacggtgctgctgcagggccggctcaactgagggcttggggggctcagcgctctggccaacactctctgctgcaaagctgggtttggacacgtttgtgtcagttttagcatctggttcttctcggagaaggtctacgtagacaagcttgtcgcttttgacaacagtcttcccttgattccagttggggttcggctttaggttcttgtcggtggggacatctggatgtaacttggtgctgctagtttccaaaatctcggaaaaccgattccggagggttgggtcctcgtaacgggctctctcatgggaccgggatctcctctctggtttctcctctttagtaatctctatgggcgtgtgtggtatcaacatgggatgcaccatgcccaaccccagggcatcttggtaggtcacaaactctggacggcc

SEQ ID NO: 10056 - DNA, 928 bp, Homo sapiens
  chrX:39953710-39954638
  hyper
cgggtcctctccagctccggccccccgcgctcccaccagcccggctgccggggcacagtcacagctccgcgcgctgggcagtcctatttttatcttgtctaatcctaaactgggcggggagcacaggcgtcgtgcttagagaacaagagataggcgcgggaggcggggaggagcagccaggcagcgacgcgagcgggagcgagttaaagacacagtggaggcgaccgcgggcaggaagaaagagcgggctgcgcgggcctcgaggcgccgcacgcaacgcgccgccccgcgaagttacactcgcttccccgccgtccctcgctaccggcccctccccacttcccagcggcgctccccgcagcctggacagcgaggccccggcctgtgtgggaggcggaggccaggacggccctgcaaagggctggagagaatcgctaatgagctgtgcagcccattgatccggagaacacttcctaattaactctcagtcacctactggtgacagcgcctcaaaggacagcgctggggccagccgagccccagccgcgacttgccggccgggcgcctgctgcccaaaacccgcgcgctcccctaaacaccccaaggcaattggtgtgcgtggcggtgtatacccgcacactgaaggccagcctcggattaaacctggatggcatattaatcatcgccttccccccccactccgctctacgcgctgaaaccctgcccaaaataaacacgaaaaccaacactgcaaaacccacaccagataacaggtcgagagaggagtgggcagggtcaaggaacgagcgtattccctaagtgtccacgtacaggaatctttgaggctgacaattaaaatgccttccacgcaagcaattctgttggcaaaaccgaacccaacacttcgtaaggattgatttcggcccgc

SEQ ID NO: 10057 - DNA, 1939 bp, Homo sapiens
  chrX:39954918-39956857
  binary
cgcgttggtttctttttaaggtttgtttctaaatacacataaccctcctccttccttcttcgctcttccattccccccacccccaccctccagacgccggcggcgcgcgccctggcgcgcgggcactcacagcctctagctggagatcgcggactttctggaaaagattcattaacagcaaattacgcctcgcccggccacggcctacacgctgccagactcgtccgtctccgggaccccgggaagggcccactcgagcgtgcgagcggcgggaagcccgccgggaccacgcgtgacttcggccgccctactccacacacggtgccccaaggctctctccgtaaacagcaggcgctcgtcaccgccgccgcgagcccccgagttggcggaggctctgcggcgcagccgcccgccggctccgagcgcgggccccgcggcgcctcgccctccccgccttggccgaggatcttgccccggtgcgcaagttcctcttcgcctacagcctccttgccacacgccctccgagtgggaccaacttcctccggccgcagactttcacacgcccatcagggctacccaccagactccccattgcccagcggagggcccaggtctcgcccgcccccgccctccctccacgacgctgcccccgcacaagcacattctacacccacccctgggggctcataacttaaaacctacgctgaacatcggggagggagaggagggggaaagcgggagggggatcgcagattataatcttaaaagaacatttacaaaacaaagcgtctgacctggctggcgggcgggccaagtcggaaccccttgctctgctcgatttcttagtagtttttttttttaatccacgtgattcgtgctttggggcaagccaagaaaaaacgggactcccctcccgagttgcgcggcagcggcggcaggtcgagctcggctcggcccgaggcactcgccacacaccctcgcgcacgcacacgccgacgttccacttggaggaacgaccggcccccggagaggcgagacgaggcggcggtggcggcggctgggggtttttacagttctttcccgagtcgaaaaagaaagcagacggcaacccgctgccctccccttcctgctcgcgagctaacgccgaacccagcttcccagcttccagcccacctcccccccctccgcccgactcgcggcgctcagcggcgaccgcgctcccgcgcacagacacacacaggctgcaaacttccactctgcgaactccctgctctcctcctggcccaccgggaggcgccaggcccccagccgcgccccctccctccctggtgcccacgcggggccgcttaggttggctgcattttaaataacatagctatgaaataaaaacgaaagcgagccaagcagccaaagggaagcgcgaggcaaaagcttcgcggggtacgctgcgggagggggccccgggagagggggccgactgcagccctcagcgcgcccgcccgcccacccgtccgcggtctcccgggggaaaggtgttccgggcactgacctgaaatccccggtgggggagtaggcagggagcctgcgatccggctctttgaagttttcccccaagcggactcgaggcggcgagaaggagcggggggcggttgggtgggtggagagagatatgaggggtggggggggttggcgacgttaacgagcggagaaggagccgggccggagaagcgcggcgagcagcaaagtttgcggtccccggctgcccgcagcccgctcgcggcgccgcgctcactcgactccctcgccgtctgctggcagccggctgccctcggggtcggccccgccgaggggtgggctctgggccgggtgggggcggggcggggcgggctcggggcctccgggcaggtggcgacagccccgtgcgatcctccgggctccc

SEQ ID NO: 10058 - DNA, 879 bp, Homo sapiens; identical to SEQ ID NO: 8826
  chrX:39957026-39957905
  hyper

SEQ ID NO: 10059 - DNA, 514 bp, Homo sapiens; identical to SEQ ID NO: 8827
  chrX:39958064-39958578
  hyper

SEQ ID NO: 10060 - DNA, 634 bp, Homo sapiens
  chrX:39963967-39964601
  hyper
cgcggacggattgtccctggggagctgaaaccgcccagcggggaaacccctcctctcgcccttccccgaaaagcttggccgcggtctaagctccgagcaagcgggtatccgctgacagccgggcctcacgtaaggcccacacgcgtcccattagtcagcccgagttcccctcgggcgagccgcctggcgcggccccaaggccgggctcaggcggggagagggtgcggggccgcagcgagctgcgggcggaggtgcgggctccgcggagcccggccaggctcggttccgcgttcctgggcccgcgggtaagctgagtcggcggggcaggccgctccctggctggcgccggggcgccaagctgcgcttcacgtgcccgccatatcagcagcagcggcggcggcggcgaggagggggtgctgggaggcgcgcggccgttcccgcggggtctccggaccccgcctccccgcccctccccgtgggggctgggccgagaccaccctgcggcccccatcccagcgcaagccgaaagcggcgctgccagacgcagagaggctcctggggcgccgttccgagagccgcgcggcggcagcagccaggggagggtgctcctcgcggccgccccgccgccgccgcc

SEQ ID NO: 10061 - DNA, 285 bp, Homo sapiens
  chrX:39964630-39964915
  hyper
cgccccgagcggcctccgctggccccagggctgttccagacgagggctggccgcgcgtcacccctgatccctcctcgccccaggcgaccacccgggccctgcggtatcccggtgtaagccgagaggacccttcctgcggtccgatgagatgtccctgtccctctgctaccaccataagcacgcccccccgcaccgctcgcagctccgcagctgggaccggaggggcgcggagccgccactccggccgggcaggaacacctgctcccaggccctgcagctgggcgc

SEQ ID NO: 10062 - DNA, 1317 bp, Homo sapiens
  chrX:39965255-39966572
  hyper
cgggagtaggtcatggcggcaccggtactccacccgcccccctccacgtagggacgtagggtcggctgcggggctcggactttgccactccacctagggaagggccaatggacgctccccgtctcctccgtgtccggaggagatccggcggcggagctgacctgcaaggcttgccctgcctcacccaccccccacctccgtcccaccctccccgactctcctggcccagggcccggcccgggaaggcgttgttttgccagcgggagccgagcgagtgcacagagaaaagcctccctactctaatgagagtgcacacagcgctgcagcgaggaggatgattacccggcgggcggggggcgcgggctcgggccgcgggcggcgtgtgcggcggccccgcgggcccggagtccccgcctgtctggctgctaatcgcacgctttctgctgttacggaggcaggcgggagccggcggccgagcccagcgccgacgactcggcgggtgacacggaaacatggcgcagcgcccctcccccgcccgcgctcccgcctcccgccctccccgcgctcccgcctcccgcctcgcacttcctcccgcccgcgcggcttttgcagttttaatgctctgctttcggcctggcaccattacgctagcagccgcttctccgcggccccgcgcgtctctttcccctttgttttcggggtctatagaaaacgtttgcttttgtcccgagctctcgttaaaccaaacttgtggtggcaacggaaggcggtgcaggcggggaggggtccggggattttggcagtagccggccagagcgtggtggaaacttctctcgctgggttctccgctccctcccactccccctccccaacacagagccgccggcctcccgacgcttctcccttcgcccccgagaggccccagtgctccaggaaggtctgggccacagagactgtgaccaggggtgaagaactcagagtgcgtgtctgtgagccccgaggttttggcactcgatgaccttgctccctgcagccccgacttacctctttccctttggtcattcggggctttgtatcagtcggtgaagaaggggagggaagagaaagtgtttctttcgtgcgtgtggtttttattttaaggatttgttggaatctgtcacccccaactgcacagccccctcccgtataggatctagggcgaaagcggggaaacgtcggatttagggggaaagggtcgggtcagaaacctagccctggaggctggatcgtactctcctggcgggctcagccacacttggtcggcacgcggggcggggc

SEQ ID NO: 10063 - DNA, 622 bp, Homo sapiens
  chrX:39968299-39968921
  hyper
cgcacgattcgctcggcggagcgctgcgctgctgggctgggagggcggcggggaggaggagagacgagggggcgggaggcgaacccgggctgcgcgccaagaggcccggagccgcagattagtcaccgctcggctctgcgctcccgggtgcgcccgggaaccgggagggcaggcgtcggccccgctcagccgggctccccggtcctcggcgcgggtgcccccacccccacccccgcgcgctcctggcgcggctggctcgactctcggggacccgcgcagccgagatccacttgtcaggtcaagggcaggacagaaactctgcaagcggagtcttgcttgcgaacaggaaatttctccttgatgaggtgctgcccctcccccacgccgggcttcaaaacaaaactccagagcgggcggccaggtacccagcctcgctcgccatggccggcgacctccgctcctcggccccggccccgggcggcggagccaagccaacagagccggcggacggactcggcgccggccccgcggagggcgccaggctgccaccctccggggcccggacggggtcggcgggggtgcggagccccggagcccccgcgcctccccaggttctacagcc

SEQ ID NO: 10064 - DNA, 247 bp, Homo sapiens
  chrX:39968950-39969197
  hyper
ccgccgggtcagcggctccccggagggcgtggggggcggggaggccgcgcggcgccgccgactcggcgaatcccgctgcgggagcccgggagggctgcgagctcggcctggcaaagttcctgtggaaactccatgttttgaaactcctgcggcgtcgcagaaggagggggagaggggagcgcgggaagcgcgcgggggcggtctgcacccgcctctccccgccggggagtgggttccgcggcccccc

SEQ ID NO: 10065 - DNA, 96 bp, Homo sapiens
  chrX:40005424-40005520
  hyper
cgctctccgcacggtagcctgatccatctcgtgggcgcggaggcggggcgcggggctccgctcccgcggaggcgcggagccggggctggggagccc

SEQ ID NO: 10066 - DNA, 230 bp, Homo sapiens
  chrX:40005842-40006072
  hyper
gcgatcagcagctctgcacgcgcttcagtgcatgaatggattgcggaagatgcctgcgtccgctccgctcaggaggctctaggagcgccccctccccgcccgccgcgcccgcccccgtggcctccctaggccctgcgggcgcctcggggttcgcaagctgggccctgcggcgcgatcactctcacccagaacccccgccgccgttcccagggccttggcacctcgccacc

SEQ ID NO: 10067 - DNA, 1545 bp, Homo sapiens
  chrX:40012993-40014538
  hyper
cggcggcatcagagtgcagccgcgggggttagggggtggcaaaggcccccgcgcggccggaggctcggggccgcagcagccagtgcctctgctctgcgttggggactcggagccgcagcgagaggcagtggagaggcagggctggcctcgtggcgggaggcgaggagggggtgcgagggctgccgcgccgtggggggcagggggcggggacgcagccccggcttcctgggccgcagctgcgaccgagggcgcaagagcagatcgtgctctgcggcggtggcggctcgggcccgccgctctagcagctgagaatcaacaaagggaggcggcgggggaggggcgccaccgagcgttcgctggctgctctggaataataaaaaataattaataatgataataagagaaaaatcccccggctttcatggctctgggtttccgtgtggctgcagcgggaagcgcgctgtccttgaggcggcctctctcgcctggcctgcccgcccctccccctcctcgccccctcccctccccaggaaccgggaagagaaaggtctgcagctgacaaatattatccattctccccatcgatcgcggagtgtacagatgtgagcgcttgatgtgcccgcggagcggcggatcctccctgctcgctcgctctcgcccaggctccgctcgccgtccccctcctccccctttgttctcctcccctttccctctctttaaatagatttcagggcgctgcctgttggagagcagctggcgatctctcccgagagagggagcgagcgaagcccgaggtgccctgtcaccagcctcccctcccccacctcggcttttctctacgtcccccccaccccacctttctccagtttccaaaatagaaaacaccgggaacacccacgtccactgcaccgcgagcccctgggagcctttggacccctcgtgctgttccttgtgtctgtgtctgtgcagaggaagggcagtgcagggaggggacccagggccgcggcagaagagccaagggtccggatctttccctggcagcagcagggacgcagcgtgggtcacgctaacagggtacagtttacccattagggaaagtcggcggagacggccctgttattcctcttttgcagatggcagattaatccggcagcacccggcctcaaagggaccggctgctcggcaaagggttaacccgtcggccggtaatcgtggacacgcgcgcacacacacacacgcacgcgcgcgcgcgtcctctccgcctgcccgagcgcccgccgcggcccgcagtgcgcccggggctgggggagtagctgcgggaggggagggggtcgggggaggggcggggcgggcttaaccaggccgctcgactgagccggggccacctcgccgtctgtcacttaaatgattgtcctccgctccgctcagtgcggtcagtacgggctgttaacaggcagttgcaatcagtttccgaaaggtcagccaaggtcctccggctctcgcagacggaaggcattacgaaaccgcttttgtatctgcaggcac

SEQ ID NO: 10068 - DNA, 298 bp, Homo sapiens
  chrX:40014669-40014967
  hyper
cggagtgacccagggcctccgggtttcggtggggaagcaggaagggggtggggagcaggcggcaagggaaggaggagtgggaggaagtgggagaggcgtcctggctcctctcctcacccagccaacagcccacacccggacccagacgggagcgggcggccttggacgcgaggagaccccactcggactctcaggccctcctggcgcctggaagtagggagggggtgtgggggggggaaagaccctcgccgagcgagcgagtcccagcgcggtgtctgaagacgctgctgccgccgcc

SEQ ID NO: 10069 - DNA, 145 bp, Homo sapiens
  chrX:40017447-40017592
  hyper
cgaagtggcaggactggccctcggggtccccgtgggtaaaggaggagcggcttcgcgccctgggacagcgcgcgccccggctgacacggggctgtcgccgcttctcccccggacgcgggcggctgcgcaccggccgccatcttgg

SEQ ID NO: 10070 - DNA, 32 bp, Homo sapiens
  chrX:40017968-40018000
  hyper
gttgaggccagagaggatttgagagttaccac

SEQ ID NO: 10071 - DNA, 187 bp, Homo sapiens; identical to SEQ ID NO: 8828
  chrX:40034239-40034426
  hyper

SEQ ID NO: 10072 - DNA, 668 bp, Homo sapiens; identical to SEQ ID NO: 8829
  chrX:40035057-40035725
  binary

SEQ ID NO: 10073 - DNA, 721 bp, Homo sapiens; identical to SEQ ID NO: 8830
  chrX:40035852-40036573
  binary

SEQ ID NO: 10074 - DNA, 203 bp, Homo sapiens; identical to SEQ ID NO: 6338
  chrX:40595088-40595291
  hyper

SEQ ID NO: 10075 - DNA, 264 bp, Homo sapiens; identical to SEQ ID NO: 5862
  chrX:41112874-41113138
  binary

SEQ ID NO: 10076 - DNA, 76 bp, Homo sapiens; identical to SEQ ID NO: 8831
  chrX:68758240-68758316
  hyper

SEQ ID NO: 10077 - DNA, 654 bp, Homo sapiens
  chrX:71526230-71526884
  hyper
cggcccgcctggcggccgcccactccccatacccgctccacgggagtcctcggccccgccgcccagcccggcgcccagcccggcggcccggcttacctctgagaagccgcctgccctggagagagggaagcgcggagctcggtgagccgcaagagaggcggcggagcccccagcccctggcacgcacgccgccgccaccgctaccgcgaaccggtcgcgctcagcgcccgcggccgcgccgttggccacccgaccccggggcgcctgggaaaagcccgcaccgcgccgcgccgccgctgcaccgcacagtgccgcgccaagcagcccctgaccgagctggtgcccgcccgcccgcccgcagcttcggcgccggactccggggcggtggcggtggcggccaccgcgctcccttcccggcgctggggacccggctctcaagcccccattgccgcccggagagccctgacgcacacgcacacggcagcagactggcctcggctaggaatcccaggaaggacagaccctttttttccctttttttttctcccctcaatttccacgtctttataaccggcttagggcattattagcacatgtcctggctcgtgggcgagttggtggcaaaatctgaactggatactcacggagggcccg

SEQ ID NO: 10078 - DNA, 249 bp, Homo sapiens
  chrX:71526917-71527166
  hyper
cctcaccgagaactgcccctcgccggcggactacaagagggcagccgggcagagcgagcttcctctcggcagctcagcggtgccccttctgcagctttgccgccgggcacatttttatagcagcggctggcgtctgtggccctttaaaggcgctcgagctggtgcagtcaccgcggatcgtgtgaaagcaaagggccggctggggaacggagtccacgcggccacgcgagtccggcagccctgtggacc

SEQ ID NO: 10079 - DNA, 214 bp, Homo sapiens
  chrX:8699223-8699437
  hyper
agaccttgaatctttggggttccgaattgaggcgcgcacagccactcgcacccccaacacgcgcatacacgcaccctggaacacgacttggcacaagtaccctggctggggctccaagggtgggcagcgagctctgagccctcagagagtgaaaaccatctttcaaaagagacaaagtgtcggcccgcgggcacctgcggggctggggctcgag

SEQ ID NO: 10080 - DNA, 99 bp, Homo sapiens
  chrX:8699940-8700039
  hyper
cgctggacgctcccggcagacagcgactcgtccagccgccgcgcagcagccgcgccggggccggccgccaggcagccgctggaggccgccagccagagg

SEQ ID NO: 10081 - DNA, 170 bp, Homo sapiens
  chrX:8700460-8700630
  hyper
ctgcccctcccaccttccccctccgtccaggtaaacgtcggtgtgagcaggtccaggcctgccaggaggggtgctcccttcagcaggagggaagaggcctcaggacccccaggggcgtcccacctgcctggggattgaccccgcgcccctaagtggcttgctttctcccc

SEQ ID NO: 10082 - DNA, 597 bp, Homo sapiens
  chrX:9432830-9433427
  binary
cgtgggggagcggggcgggcttggtagggacgctggtcccccgaccgtgggacaggggctgggttgggacgcgggtccccactaggagccgcgggggaggggcagggccggagtccctaccctcgtaggggaggggctggttcgggacgcggctcccccggggcgcaggggcggggccgggtggtacgccgggtcccctcccacggccgtgagggaggggccggcggcgggggcggacccctggcggtcctcctggctggggtccgcgcgctcgcggcagctccccgtggaggtcactgtccgtgccagtccctcccgctgtcccgccctctcccgctgccgccgccgccgccgccgcgcccgcctcagcgcccccactccgcgcttgggagcgaggagccgccagcgcccccgccccgccgccgccgcagcgccctcaggccgccattcgccaccgaaactttccagcgcccgcgctctctccgggactcggcggcggcggggcgggggcggcccgggggcggcgcgcggctgctccggggcgccgggccctcttcggccgccgcacggccgggactcggaggctgccggctggag

SEQ ID NO: 10083 - DNA, 242 bp, Homo sapiens
  chrX:9433471-9433713
  binary
cgctgctcgcgacgaggtgagtgcgcagggctcggcgggccgggcgcggggtccgcaaacttctgcggggaggcgggtcccgcgctgaccctccagggtccggccggcggctcggggcgcccgaacgctccacccgcccctggaactcctgtaggtgcaggtcgccaactgtccccgcggcgctcggactggggtgcggcgcgctcccaggagcctgaacaataccccgaggtggccgctcc

SEQ ID NO: 10084 - DNA, 583 bp, Homo sapiens; identical to SEQ ID NO: 6341
  chrX:9433838-9434421
  hyper

SEQ ID NO: 10085 - DNA, 245 bp, Homo sapiens
  chrX:95940048-95940293
  hyper
cggagaaagatggagcagcccggggcggcggcgtcgggagcgggaggcggcagcgaggaacccggtgggggccggagcaacaagcggagcgcggggaaccgggccgccaatgaagaggaaacgaaaaacaaacccaaattggtgagtgctcccgcagcccccgccggccttagggacagggagagccccgggatcctcctgccattgaacacgggggcacccggggccccctcccaaggatgacc

SEQ ID NO: 10086 - DNA, 147 bp, Homo sapiens
  chrX:9753679-9753826
  hyper
cggacccgcgcccggctcaggctgctggggggcgcccttcccggctctctaagtccagagtgtgagtgcgcgcagggccgcgcgggacgggcggtccctctgccccggggcagcggccacagcgcgggcaccagggcctcccgcggc

SEQ ID NO: 10087 - DNA, 300 bp, Homo sapiens
  chrX:9753862-9754162
  hyper
cgagaacaaagtgtgggcgccggcgggccgcgcgccccgagacggaggaggccggagactcccgccacgccaccccgcgcccatctcacctgccgcctcacctgcccggtcctggcctccaaccggcgggcgggggcgcccagagcttcgaagcactgcagagctctggcgcgggaggaaaggcccgacctggcgccggggcctccgcccccgtcctcgcccgcgctggctccgccagccccggggcgcgcgctcctcgaccccgaccccgaacccgctgaacggcgcgcgcgcctgagc

SEQ ID NO: 10088 - DNA, 280 bp, Homo sapiens
  JH636052.4:1361829-1362109
  hyper
agttacgcagctgagcttcccacgttagagaaaatgacagaacagcacacttgaaatgaaatagttgagtcgggtttaaaagccatttcagtaaccacaatatctgccctgccacataaataagattgcacctatctccgccccgccacagctccatacgcctcaccctttaaacgcacagtcacttgccccagcaccactccagccaatccccaaccaccccgagccctcctagccctaacacacagctgggactctcatgtccagccagtggtcctgg

SEQ ID NO: 10089 - DNA, 61 bp, Homo sapiens
  JH636052.4:1362132-1362193
  hyper
tccttcgtggcgaagcagcagcccctgcgctgcctcatctacatagaaacgccctatcggt

SEQ ID NO: 10090 - DNA, 289 bp, Homo sapiens; identical to SEQ ID NO: 5717
  chr1:101702081-101702370
  binary

SEQ ID NO: 10091 - DNA, 393 bp, Homo sapiens; identical to SEQ ID NO: 5718
  chr1:101702796-101703189
  binary

SEQ ID NO: 10092 - DNA, 49 bp, Homo sapiens
  chr1:107684495-107684544
  binary
tttggggaaaagcaaacaaaaaaaacaaaaaaacacttgccctattgcc

SEQ ID NO: 10093 - DNA, 306 bp, Homo sapiens; identical to SEQ ID NO: 5867
  chr1:108506290-108506596
  hyper

SEQ ID NO: 10094 - DNA, 489 bp, Homo sapiens
  chr1:1096415-1096904
  hypo
cgaagcccccagaccgggccctttgcccctcctgccccccggctctccctactgcccagagcctccgccagcacccagggacccacgtccacctcccagagcggccctgcccagggtccttccctgccctccacgattctccgtggcccttggagaaagagcagcttctccccaggctctgcccccagcccttccaccccagagcctctgcccagacgtcccgtcccatcccggggggctgtcacgcttccgccccacctctcgcccattcccggacagtcacagccgtggaacaacgcagcgtgtggacacagccccagggaagcttgactctgcctggtccccatggcgtgcggtggctcaccagccgcccccatcgctccatgaaatctgactacacctgtcccaaaaatcaaccagctcccaggcaggtcccgccgtgcagggggccaagggccacacctgggaccagtgagtgaggcggcgtgc

SEQ ID NO: 10095 - DNA, 365 bp, Homo sapiens
  chr1:110753530-110753895
  binary
cgccgccgccgcctcgtgttgaccgcaagcagcccgggcccacggagctccggctgccgtgagagtgtcggcctggccccggcagccgctcggaggacttgttgctgctgcgctgccgccgctgcggggaagccggctattccggggcttggtgcggtcttggagccggagggtggcccgtgtgagcgcgagcgccccggaccttcgcggtgcgcgtggactgtgcgcttcctcgtctttggtcggggtgaaggcgggggcgtgtccccggcccagagcgtttgtgtgtcccgtcgtagcgggggaccgcgtgtgtgcttgcttctacttccccgggtcctccctctctgcgcctccctctctcc

SEQ ID NO: 10096 - DNA, 47 bp, Homo sapiens
  chr1:110753957-110754004
  hyper
cgtcctagggggataggcaggggcaagcccaagccgcagagggggcc

SEQ ID NO: 10097 - DNA, 47 bp, Homo sapiens; identical to SEQ ID NO: 10096
  chr1:110753957-110754004
  hypo

SEQ ID NO: 10098 - DNA, 76 bp, Homo sapiens
  chr1:115261261-115261337
  hypo
cgaagaaccattaggcgaggagcactggcatcatccagagtgatattcttcaagcgattgaccaaccgatcaggtc

SEQ ID NO: 10099 - DNA, 64 bp, Homo sapiens; identical to SEQ ID NO: 5719
  chr1:12123950-12124014
  binary

SEQ ID NO: 10100 - DNA, 87 bp, Homo sapiens
  chr1:13910927-13911014
  hyper
gtggctggggtttccttcccatagagcggtgtgttggaggaatacgcacgcctcgggagaagctggcctcgtagaatcaggagggac

SEQ ID NO: 10101 - DNA, 77 bp, Homo sapiens; identical to SEQ ID NO: 6657
  chr1:14125492-14125569
  hypo

SEQ ID NO: 10102 - DNA, 54 bp, Homo sapiens; identical to SEQ ID NO: 6658
  chr1:14125622-14125676
  hypo

SEQ ID NO: 10103 - DNA, 169 bp, Homo sapiens
  chr1:14926204-14926373
  hyper
ttggctcagttgcatctggactttattttcttctcatttgaggtctctcaggcattggaatctatagatgcaacagtagatgctcagctcagcagggagtttaaatttccgcaaatataaacaccgagagcactttccagggggatactgtagacctcaaaggttgagc

SEQ ID NO: 10104 - DNA, 182 bp, Homo sapiens
  chr1:151699304-151699486
  hypo
cggtccatcttttagctctgtttattgtatctccctctgccccttgaattcatggttaagcttactcaggacattgtggggctgcatatctcccaccattcgtgggccggccggcatgttcttcatctttgcctcttgcccctggcttgagatctggttcagtgaaaatgatcgttgaggcc

SEQ ID NO: 10105 - DNA, 448 bp, Homo sapiens; identical to SEQ ID NO: 8846
  chr1:154297543-154297991
  binary

SEQ ID NO: 10106 - DNA, 73 bp, Homo sapiens; identical to SEQ ID NO: 8847
  chr1:154298038-154298111
  binary

SEQ ID NO: 10107 - DNA, 354 bp, Homo sapiens
  chr1:155911571-155911925
  hypo
gagtgctgatgatgctccgatgcctgtcaaattcctagccctgaggctcatggttgccctggcctatgggcttgtgggggccattggcttgctgggaaatttggcggtgctgtgggtactgagtaactgtgcccggagagcccctggcccaccttcagacaccttcgtcttcaacctggctctggcggacctgggactggcactcactctccccttttgggcagccgagtcggcactggactttcactggcccttcggaggtgccctctgcaagatggttctgacggccactgtcctcaacgtctatgccagcatcttcctcatcacagcgctgagcgttgctcgctactgggt

SEQ ID NO: 10108 - DNA, 83 bp, Homo sapiens
  chr1:155911954-155912037
  hypo
acctctcactcttctgggcccgaatagccaccctggcagtgtgggcggcggctgccctggtgacggtgcccacagctgtcttc

SEQ ID NO: 10109 - DNA, 48 bp, Homo sapiens
  chr1:156627098-156627146
  hyper
cgcgcagtagagtgcgcctgtgtgggccgggccgccgtgcagggggcc

SEQ ID NO: 10110 - DNA, 136 bp, Homo sapiens
  chr1:16085153-16085289
  hyper
cgcggggcgggaatcccgcgccccctccccccgagcctcaccttttatggtaaagcggcgcggggcggcggggcggagggagccgagggggcggggagggcggacgggcggaggggacgggaggcccagcggctcc

SEQ ID NO: 10111 - DNA, 92 bp, Homo sapiens
  chr1:207240948-207241040
  hypo
cgtccagcctcgcaccatttacctttgccggcatggagaaagcgagttcaatctcttggggaagattgggggtgactctggcctctcggtgc

SEQ ID NO: 10112 - DNA, 168 bp, Homo sapiens
  chr1:212605105-212605273
  hypo
cgggcatcctcattcctccgcatttatgcacctgatcctttgaccaaagtgctcttccctctagaccgcctccttcgcctcctgtagatttttatgcaaataccctgttctcagtgaggccttccctaacctgcctatttaaaatgaccatccccataaccgggcacc

SEQ ID NO: 10113 - DNA, 56 bp, Homo sapiens
  chr1:2170983-2171039
  hypo
gacctgaatggagtcaggaagggtttcaacctggatggcccgcgtgccggggaccc

SEQ ID NO: 10114 - DNA, 91 bp, Homo sapiens; identical to SEQ ID NO: 5720
  chr1:220102055-220102146
  binary

SEQ ID NO: 10115 - DNA, 33 bp, Homo sapiens
  chr1:224528889-224528922
  hyper
ctttgggatgcagagcacaggggacccaccgcc

SEQ ID NO: 10116 - DNA, 68 bp, Homo sapiens
  chr1:226814279-226814347
  hyper
cgctgagctcctgacccgtcttccttttcttcgggcaccttgtaatgcacccgaccgtccagaagggg

SEQ ID NO: 10117 - DNA, 85 bp, Homo sapiens
  chr1:226908290-226908375
  hypo
cggaacatgcctggcacataataggcacttctgaaatcattgctgctattatttttattattattgtgcatcctaagactgttta

SEQ ID NO: 10118 - DNA, 35 bp, Homo sapiens; identical to SEQ ID NO: 6686
  chr1:226924738-226924773
  hyper

SEQ ID NO: 10119 - DNA, 452 bp, Homo sapiens; identical to SEQ ID NO: 6687
  chr1:226925659-226926111
  hyper

SEQ ID NO: 10120 - DNA, 124 bp, Homo sapiens
  chr1:22777390-22777514
  hypo
cgtaactgtcagggacagaaaaagtggctgcatgtcagtgacagggtgactgtgttcagtgggccagcgcggaggtgactcagtttgttactgctggatctgatttaaatgtttgtgtaaggaa

SEQ ID NO: 10121 - DNA, 150 bp, Homo sapiens
  chr1:22777697-22777847
  hypo
acaaagagtgcgggctggggacgcggctcaggtcgcctctccgcctcgcacgtgaatgtgttgttttggaaaaacgaagccttttgtgttcacttccttgccctcctttgaaacaaaatcctaatcctagagctgccggagcgagactgc

SEQ ID NO: 10122 - DNA, 359 bp, Homo sapiens; identical to SEQ ID NO: 6691
  chr1:228528433-228528792
  hypo

SEQ ID NO: 10123 - DNA, 50 bp, Homo sapiens; identical to SEQ ID NO: 6692
  chr1:228529382-228529432
  hypo

SEQ ID NO: 10124 - DNA, 194 bp, Homo sapiens
  chr1:230404024-230404218
  hypo
cgtgtagggttgggtgaagcttacctctggtctgtggatgacaaaacggacgaggtgcccacccaggttccgtactgtctgggtgttgggcctcttgtgatccctggccagcctcacctccgtgtttaatctctggagttcccactgtcactctgcagtgttctgatgatttatggaaggttggagaggtcact

SEQ ID NO: 10125 - DNA, 196 bp, Homo sapiens
  chr1:230404365-230404561
  hypo
ctggctcaccccccgccagcattgcaccttaattaccgcacagctagtaacacgagacagagtctgggccctgtggaggtggcaggtctacgggaaccaaagactttgtctgtgtagctgctgcctgtgaccctcctcacctgccctcaggaggacagcctgtgtcccgccttcagggctgtggccctcacccccc

SEQ ID NO: 10126 - DNA, 173 bp, Homo sapiens
  chr1:231122207-231122380
  hypo
cgcaactcttctattttatcttctcagagtttccaaatgttatgcgtttgaattgtagccattccagtagtccccgttctctttggggtatatgttccaggacccacagtgagtgcctgaaaccacagatagtatggaacccaattaccatccatcggaacacgtttctgttc

SEQ ID NO: 10127 - DNA, 134 bp, Homo sapiens
  chr1:235955204-235955338
  hypo
cgatggggaaaactctctctatcagcctctttcttgctccgtgaaactcgtgctcttctcaataaacccatggccttactgtttaaaatcccaggatacttttgtgatgaaacaccgttgcttaaatttggagc

SEQ ID NO: 10128 - DNA, 117 bp, Homo sapiens
  chr1:241051980-241052097
  hypo
cgcgcgttgagaagaggtgctatcaactttcccattttgctgatgaggcaatttaggctggatgagaggacgagactgagtactactttcttggtggaggcgacagtcaaagccagg

SEQ ID NO: 10129 - DNA, 179 bp, Homo sapiens
  chr1:33219389-33219568
  hyper
cgcctgccccacctggactggccaggccttcccctgtgcgccctaggctgggcggctcagccggtctcccaggtcccgggaggggcggagccgacgggatgcgcgccaggccccgcccctcctccgggcccgcccccggcctggccattggccgcagagctcgggggcgtggtcgagct

SEQ ID NO: 10130 - DNA, 307 bp, Homo sapiens
  chr1:33219596-33219903
  hyper
cgcgagtctcgctgcctccctcccggggctgcgggcccggcggccgggctggctgggccgcgcttgggttcccgcgccggctcccgcacccgcaatggggaactcacaccacaagaggaaggcccccagcggtccccgggtccgcagcttctggcggttcgggcggtcggcgaagcggccggcaggtaggggccggggtgggggcggggcaggcagggaggagggtccctactgcggtcgtcgccaccgctgctgccccctcccggggcttggagggtgtgagtgtgggggggtcgggaatccccgc

SEQ ID NO: 10131 - DNA, 158 bp, Homo sapiens
  chr1:34629913-34630071
  binary
cctcctagctccgagcgccgagggaggggtagcatttgaggagggggatggcggccgcagtctgcagtcggttccagagggggcaccggtttcaattggagaaaatgggcgggggcagggaagggcagaccttgcagacgcagaaatggggagggggc

SEQ ID NO: 10132 - DNA, 253 bp, Homo sapiens; identical to SEQ ID NO: 8902
  chr1:35394790-35395043
  binary

SEQ ID NO: 10133 - DNA, 113 bp, Homo sapiens; identical to SEQ ID NO: 8903
  chr1:35396131-35396244
  hyper

SEQ ID NO: 10134 - DNA, 39 bp, Homo sapiens; identical to SEQ ID NO: 6714
  chr1:3659512-3659551
  hypo

SEQ ID NO: 10135 - DNA, 179 bp, Homo sapiens; identical to SEQ ID NO: 6715
  chr1:3663338-3663517
  binary

SEQ ID NO: 10136 - DNA, 101 bp, Homo sapiens; identical to SEQ ID NO: 6716
  chr1:3663983-3664084
  binary

SEQ ID NO: 10137 - DNA, 148 bp, Homo sapiens; identical to SEQ ID NO: 6368
  chr1:44132677-44132825
  hypo

SEQ ID NO: 10138 - DNA, 60 bp, Homo sapiens; identical to SEQ ID NO: 6369
  chr1:44351032-44351092
  hypo

SEQ ID NO: 10139 - DNA, 141 bp, Homo sapiens
  chr1:44717932-44718073
  hypo
cgcacacacgcttcccttcccctgggctgctgcaatttccatgcacagggaagcaggtgccgagctgctcccggctggctctcccctctcgtggctctgcccgccttggctgctgccccattagcttagtggccagccatc

SEQ ID NO: 10140 - DNA, 138 bp, Homo sapiens
  chr1:44718164-44718302
  hypo
gacacctcagcgcagcctgctattacatgcaaacactgatcgccctgtgaaattacattgctgggcccgcgaaatggaatcgtgtataatcagcctcctccatgcactgtcagtcccatcacaaacacggcgcccggc

SEQ ID NO: 10141 - DNA, 106 bp, Homo sapiens; identical to SEQ ID NO: 8907
  chr1:44726788-44726894
  hypo

SEQ ID NO: 10142 - DNA, 160 bp, Homo sapiens
  chr1:48190715-48190875
  binary
cggttcccctgggccaagccgagtcctccccagcacaacagcgcggcccctcggcctccgcttaacctgggcgcgcgggctggctgggccggggccattatgcgggcgcatggccggccgcgccggggcgcagagcaaacttaaccttcatttgggagcg

SEQ ID NO: 10143 - DNA, 48 bp, Homo sapiens
  chr1:48191178-48191226
  hyper
gtctcccaggacccgacctggagtctcaggcctccttcctgtctcggc

SEQ ID NO: 10144 - DNA, 109 bp, Homo sapiens
  chr1:49242191-49242300
  hyper
cggtcccctccgcccgggcccccggcccctcccggggtcccagcccccgcccgggtcccaccgtccctccccgcccgcttgctcacctgccagcgccaggatctgggcc

SEQ ID NO: 10145 - DNA, 107 bp, Homo sapiens
  chr1:49243013-49243120
  hyper
ggcaatcttgattgaatctcaaagtgtaaacttggaagccagcagaagtttggagtgttttaaatgtagccaccctacccgcgcccccagccccgcaccctccccgc

SEQ ID NO: 10146 - DNA, 193 bp, Homo sapiens
  chr1:52081937-52082130
  binary
cgagccaccgcgcccagccaataaatgcttaaattgcccctgtaggctgttagtgatctatccctacttctttgaccttatctcccaccactttctccctggctcactgctccacgcacactgacctccttgttgatccctcaagatgccacgctcactcctaacatttggtctttgcatttgctattccttc

SEQ ID NO: 10147 - DNA, 52 bp, Homo sapiens
  chr1:52879577-52879629
  hypo
cgccggagaagctaccgagacttggacaagccccgtcgctctcccacactgc

SEQ ID NO: 10148 - DNA, 434 bp, Homo sapiens
  chr1:59042557-59042991
  hyper
gcaccagcgtgcgggcgttcttgggggcgctcatgcgcgccttgagcagcagacacttggaggtcagcgtggagcagtcgaccgccatgcccgagcccagcgcgcggcactggcagcggccgccggggccgtcggggctgcacacggtcatcttgttggtgggacacgtgcagttgtcctgcgcggccgtgtggccggtcaccgccgccagcaccagcagcagcagcggcagccgcagcggtggcggcgcgaggccggggccccgagccatggtggggcggaggaacgcggaccggacgcgggcggatgaggcgcggggactcgtcggggctcgggctccggcgtctgggatggtctgcaggcgtctgccgcccggccgctccctccggctcttatactctacccgacctgcccggctggttccaccaccgacc

SEQ ID NO: 10149 - DNA, 502 bp, Homo sapiens
  chr1:6331654-6332156
  hypo
cggagcctgtccgccatccgctgtggcctctccgccatccgctgtggcctctcccagcagctgcaggcctgggttaattacctcctcctccacacccacccaggactgcaccagcctccagcagaaagcagccggaagtctcaaataatgagatcattgtggagagtcataaacaccctcaccaggggctcccctcacccagcagcaccggctcagactccgaaagaactgcccccaagtggggccaagaaaggaggcgtaaaggccaacgggaggctgctggcggaggcagggagatcgtcaccacaaaggggagaaaaggcattgggacttgggcctgggtggtggcctctcaggagcccctcctgcaggcacggagtgccgtggtcccgggacgctcggctcacagctcttgtgccggagtgtggacatggcggtccccaccctacaacaccaataatgatcatagctgtcacctgctgagtgcccactgtgggctagg

SEQ ID NO: 10150 - DNA, 182 bp, Homo sapiens
  chr1:94047877-94048059
  hypo
cgtgctgggcgatgaccttggggtcgttgttggtgaacagttcttttgcacgtttcaacattgctgtttccaggggcttattctcagggggaaggaactttgactcaaactcgttgggcctgaaggaggagacagtctccaggaggggcgtcacaaactcgcccttgtcccactgccccttc

SEQ ID NO: 10151 - DNA, 330 bp, Homo sapiens
  chr1:94048088-94048418
  hypo
tctttccctgtcatcatcatcaaggatcaagtagttgacgccagagttccggggacctggcgcctcattctgcttggctgtgagcagttctgtgtggcttccctgggcacatgagggtagctttgctcccctgccgcagcctgtggcaaacgctgggttcagttcacagtagttggcctctgagttgagccaggcagagggagacgagggaaccttgaggaacggcaccttgcagggcttaggcgggggcttagggcacagttgactgtctgatcccctcagcgcctccccagccctggcgtctgaggagaccctccgaaccactgctgg

SEQ ID NO: 10152 - DNA, 426 bp, Homo sapiens; identical to SEQ ID NO: 8928
  chr1:9711649-9712075
  binary

SEQ ID NO: 10153 - DNA, 124 bp, Homo sapiens; identical to SEQ ID NO: 5893
  chr10:100994695-100994819
  hyper

SEQ ID NO: 10154 - DNA, 57 bp, Homo sapiens
  chr10:101089476-101089533
  hyper
gcccccgggcggtggcggcgtggcccccagcgcggtccccactcgccccccgggacc

SEQ ID NO: 10155 - DNA, 237 bp, Homo sapiens
  chr10:101089565-101089802
  hyper
cggacgtggaagtcctggggcccttgcgtcccgggggcgtggcaggctcggccctggtccaggtgcgagtgcgggagctgcgcaagggcgaagcggagcggggcggcgcgggcggtggcgggaagctcttttcactctgcgcctgggatgggcgcgcgtggcaccaccacggcgccgccggcggcttcctgctgcgcgttcgcccgcggttgtacggcccaggcggggacctgctgc

SEQ ID NO: 10156 - DNA, 212 bp, Homo sapiens
  chr10:103535916-103536128
  binary
ggtggggaggtgggagggcggggaggggtgggggcggggggcgccgcaccgggcgcgaggggggagcgcggggcgggcggcgggagcccgcagcccccggctgggaactggggcctggatgcagcccggggcgggggcggggcggccggggaggggcggccgacgggttcgggattgagggtctgggctaggggaggggtctggggacccgc

SEQ ID NO: 10157 - DNA, 101 bp, Homo sapiens; identical to SEQ ID NO: 8932
  chr10:11207330-11207431
  hyper

SEQ ID NO: 10158 - DNA, 156 bp, Homo sapiens
  chr10:11207724-11207880
  hyper
caggaggaagggcgggtaggcaggagggctggaagcagccggtgctggcggcccctgtgctccaggggctgctcccgactcctccccgcacccccgcccgcctgcccgccgggacaggttggaggcgggagagagggaccgaggcagggcgggagc

SEQ ID NO: 10159 - DNA, 65 bp, Homo sapiens
  chr10:114252654-114252719
  hypo
cgtaatcgagttttatgacacttcttagaggctccctcacgatcatgtgcagtccgtcctcattc

SEQ ID NO: 10160 - DNA, 240 bp, Homo sapiens; identical to SEQ ID NO: 6731
  chr10:118891774-118892014
  hyper

SEQ ID NO: 10161 - DNA, 132 bp, Homo sapiens
  chr10:121301363-121301495
  binary
cgcacccaaaggcctgcacaggtcgtagctattgtgatgagcaaaagggtggaaggaccggaatcaagggcacggctccaccttcaccgtggggtctttggcctatcaagttgcccgagatcgtggctcagg

SEQ ID NO: 10162 - DNA, 323 bp, Homo sapiens
  chr10:121301911-121302234
  binary
agctctgcgctcccgtcgcggctgggaccgcgaaggtgcggtacccagcggggagaggtggtgcggtcggccggggctccagtctgggaggtaccaccgagccgcgcccgagcacaagagggagggcaggaggccgggcgggcgaaacggcgccccgaccccgagcccgcgggcccccgaagccgcttacctgacggcggccgcttcctgctcagccggctcacggcgcggttgaacatcgccgcgggcgcccgaggaggaagaaggagcagcccggcggcgcggcggctgagccggaggaaggcgaggaggaggaggagggc

SEQ ID NO: 10163 - DNA, 204 bp, Homo sapiens
  chr10:125851929-125852133
  hyper
cacgccgcctcccgagacgcggcggggcgcagggaggggacagcagtgggggcggggcggggaggaggaaggaggagggggcggggagcaaaagttcacaccgctcggggctcagccgctcccctatctcttcccaggcccgcccccgccatcccccttccctgaaccgggtcccacgggcttaggcgcgggagagctctggcc

SEQ ID NO: 10164 - DNA, 98 bp, Homo sapiens
  chr10:125853277-125853375
  hyper
tgtgtgttgcggtgattccaaataaaagcacatcgaaacccctgaaatctggcagtgacaccttgccagatacttcttttttttaaagacagagtttc

SEQ ID NO: 10165 - DNA, 162 bp, Homo sapiens
  chr10:134300856-134301018
  hypo
cgcaccaggtgtgggtgcaggaggacgtctggttagaggtcagaggcgtcatccccaaccccggccgatgttatcttacgtgcggggaaaggcaaggactggactcgttcatcttttacggaacgtggtgagtcaggcaagagacccgggccctgtgctccg

SEQ ID NO: 10166 - DNA, 180 bp, Homo sapiens
  chr10:135087233-135087413
  hypo
cgggagccctggcgttcgtccgccacacccacctgaggccggcacaggtgctgaggctggcggctgagtccgggtacccctctacgtggccctggtagaagcagtggtcctgcgggggaagcaggagaggggtccacaggctgtgcccccatggccccacaggctcggggagggccgccc

SEQ ID NO: 10167 - DNA, 100 bp, Homo sapiens
  chr10:135087645-135087745
  hypo
acccgagacccactcacctgttcttccgcaggtggagggtgaagttgtgccctgtggccccaaggacgtagctcaccctctctgggtgcaggccctgagc

SEQ ID NO: 10168 - DNA, 209 bp, Homo sapiens; identical to SEQ ID NO: 5728
  chr10:17270445-17270654
  binary

SEQ ID NO: 10169 - DNA, 116 bp, Homo sapiens; identical to SEQ ID NO: 5896
  chr10:17272233-17272349
  hyper

SEQ ID NO: 10170 - DNA, 96 bp, Homo sapiens; identical to SEQ ID NO: 6738
  chr10:1780056-1780152
  hyper

SEQ ID NO: 10171 - DNA, 63 bp, Homo sapiens; identical to SEQ ID NO: 6741
  chr10:22540645-22540708
  binary

SEQ ID NO: 10172 - DNA, 215 bp, Homo sapiens
  chr10:23001984-23002199
  binary
ccccagatgctaagtgactgcagtggctaaggtcatggtcaaaattcacagctcgtttaaactttcctggctgagccaacagctccgatcatgtttcctgatcctatcgaagtggattaaaactgcaggagtttctcgctgtcagatcagcaggaggctatttcagaccctcgaaccgcagtccgcatagcccgcagcggcgcatcctccaatcc

SEQ ID NO: 10173 - DNA, 286 bp, Homo sapiens
  chr10:23002228-23002514
  hypo
gcgttctccagcctttcccacaccccccacagcgggtgcggccaactcgggaccccctccgcccgcgcccgccgggacccccgcctgctgtccccgccccggccgcccttccgcagtcggtgacttctgcctgactccccaaagtggggggaggcgacgaagggaggaagactccccgccaagggctctccagcccgcacagcggcagggcgatgcgggagaagcgcagggatgccgcccgacgccagagccatatttacatcggctgctgctttgccaaaaagcc

SEQ ID NO: 10174 - DNA, 91 bp, Homo sapiens
  chr10:26726986-26727077
  hyper
cggccaactgagcgtggttaaacgtggggagggaggagggtgaggttaccaacctgatggttgagaaagggcctccgcccagcgcgccctt

SEQ ID NO: 10175 - DNA, 65 bp, Homo sapiens
  chr10:26728108-26728173
  hyper
aacccttgcacgtccagcaggtcagcaggtcagcaggtcagcaggtccgggagccccagtctccc

SEQ ID NO: 10176 - DNA, 56 bp, Homo sapiens; identical to SEQ ID NO: 8943
  chr10:27144571-27144627
  hypo

SEQ ID NO: 10177 - DNA, 791 bp, Homo sapiens; identical to SEQ ID NO: 8945
  chr10:31607954-31608745
  binary

SEQ ID NO: 10178 - DNA, 162 bp, Homo sapiens
  chr10:3160827-3160989
  hypo
cggcatgagtgaaaaggcagacgtttaccgctccttaattaaaaccacagactggggaaggcggccgggtggggaccggcgtggcgtcctgcggaccgcgtggagtttggggtgtctgacatcgttctccacgtggctattttcagcgttctcccggggaag

SEQ ID NO: 10179 - DNA, 253 bp, Homo sapiens; identical to SEQ ID NO: 7771
  chr10:31609416-31609669
  binary

SEQ ID NO: 10180 - DNA, 125 bp, Homo sapiens
  chr10:3161171-3161296
  hypo
ccagacccagcggccactggagaattgtagaacagcaggatagcaggtggtaagacgtggcctacgagtggcccagttccagtaaagcaacttaaccgagaagcaaaagcttgactccttaaccc

SEQ ID NO: 10181 - DNA, 309 bp, Homo sapiens; identical to SEQ ID NO: 6744
  chr10:3329809-3330118
  hypo

SEQ ID NO: 10182 - DNA, 202 bp, Homo sapiens
  chr10:49731801-49732003
  hyper
cctggagggcggaccctcccctccgctctacccactcccgcccaggggccggaccccacccccactcccacatggggaccgaggagccccaggatgcgcccccgcgccccgagtgaaggggagcctccccttccaaagttaggagactcagaggagcagcagccgcacctgagccctttccaaagctgaggcaggtgcgggc

SEQ ID NO: 10183 - DNA, 60 bp, Homo sapiens
  chr10:50323163-50323223
  hyper
cgctcctgctgcatctcccctcggggcctgccgctgggaagatctcggctgctgcgagag

SEQ ID NO: 10184 - DNA, 47 bp, Homo sapiens
  chr10:518263-518310
  hypo
cgcgtgctgcaggtccacgcccactgcacttctgcctcgcccagtgg

SEQ ID NO: 10185 - DNA, 131 bp, Homo sapiens
  chr10:518339-518470
  hypo
ggcagatggacgtattgtatcaccccaccccgtgcttacctgaccgatagcgctcatctcgtgaccctgaagaccgtcggcggtggtagcgagaggcggaggaaggagtgacaggagcccggcgttcttgc

SEQ ID NO: 10186 - DNA, 73 bp, Homo sapiens
  chr10:64578688-64578761
  hyper
cagggcgcggagggcaggaccggggctgggggcggggcggggtgcctgagcgagggaaaaccgcgaggtcttc

SEQ ID NO: 10187 - DNA, 57 bp, Homo sapiens
  chr10:7449898-7449955
  hyper
gtggtcggccgggctcctgcccagtctcggctcctccctcctccccaccagaaggaa

SEQ ID NO: 10188 - DNA, 61 bp, Homo sapiens
  chr10:7453036-7453097
  binary
tttttttttttttttttttaagattttgtgtgtgtgtgtatgtgtgtgcgtgcgcgtgcag

SEQ ID NO: 10189 - DNA, 229 bp, Homo sapiens
  chr10:7454077-7454306
  hyper
tttatggttgccaaagggggtaaaattacccagtcccccaaatctgtgtcccatgaatccctctcatagtacccctctccagggggccaagaggtcctccaggtccccgtgggttcgcagctccacccgcccttcctcgccctgcatccctaaggagaggtgtccgctctgaagggctaggggccagccatggagtgaggggaccggggctgaccacgcgcggcacaga

SEQ ID NO: 10190 - DNA, 103 bp, Homo sapiens; identical to SEQ ID NO: 5906
  chr10:83634159-83634262
  hyper

SEQ ID NO: 10191 - DNA, 47 bp, Homo sapiens; identical to SEQ ID NO: 5907
  chr10:83634499-83634546
  hyper

SEQ ID NO: 10192 - DNA, 82 bp, Homo sapiens
  chr10:92617016-92617098
  binary
cgaagggcatgaccgccacagccaccgagaggtcggccagcgccagggacacgatcaggtagttggagggctggcggagctt

SEQ ID NO: 10193 - DNA, 278 bp, Homo sapiens
  chr10:92617539-92617817
  binary
gcccgcgccgaccgctggggggcgcctggctctgtctcggagccccgcactccccggacccccggccgctgcgggtaacgcggcagcgcggcctcacggggactccctgcgggaggcgcttcggcccccgacggacgcctgggacgcgcggagtcgagggagctcgggctgggctccgctggcagctccacagttcgcagcagcagctcggctgcgccgagagcgcccgggcggcagcggcagaagttgcggagtgcgccccgcccctcgcgcccgcc

SEQ ID NO: 10194 - DNA, 644 bp, Homo sapiens
  chr10:94450726-94451370
  hyper
gttcatttcctctgtgtgggatgtgactttatggcagctaaaataaccagttgcttcctattttttttcgaggctgttttgcaccagtctgaagcctgacgcaagcaaaatctcgaaaaaacaatgctagctttcaaagcgttgaggtgcaggcctgcagacggacggacggaccgaccgacactactttgggagtaggaagcagcagctcctggtcgccagttaggaagggaagcagggacacatagggcatatattccagaacttcggggcttgtcccctcaatgtgcggcctaacaaataagccgcccgtggtccgcgctgtgggtgacccttggcgccttcgaggtctggagccctagggtaaataaggaaacggggcgcctctagagttttaaatgaactctgttattggaagcttcagtagggaccctgaaaacaattaacgtcttaattagcattttaatgtctccattattacggcgcgggctctagctcagccctttaccttaccttctcaccgttaacaggggagggggattgtatttttagttcatctttttatgtttttgagttgttatcctgtctgtctgattccagcctcgagggtttgatgatgcggcccgagcctggctgtggtcgcc

SEQ ID NO: 10195 - DNA, 51 bp, Homo sapiens
  chr10:97322758-97322809
  hypo
cgtctaggctgctatgcaccgtactatacttgtgctaagagctttacatgc

SEQ ID NO: 10196 - DNA, 66 bp, Homo sapiens
  chr11:111412304-111412370
  hyper
gaggaggtaaagtgctctggcttctggcttctttcagttgttctgcatgtcggggggagaacatcc

SEQ ID NO: 10197 - DNA, 439 bp, Homo sapiens
  chr11:126055123-126055562
  hypo
cgcctctcaaatccagcccacccatttattttccaaaactcctgggagagacgacagagggacagaggcgcagggctctgtggaagccaggcctgcacccctcccccaggcggcctcctctccactctgggaccagccctgccttcccccaggctgcggtgggtcccgtcggagcacagcggctgctcataaagctcccgatgaaaggcacgctggacaggagaggtcaaggttcacacaagcagctccgccttctgtttcatttacaagtggcagtcacctcattaaacccggtccccctccacccctaccccaccctcacccccagcccaccgcacgcatccccacacccggtccctcccgctcagccctggccggcacagagaggctgggttggagatcgagtggtccagagatgggcaggtgacctgctggacac

SEQ ID NO: 10198 - DNA, 129 bp, Homo sapiens
  chr11:128562635-128562764
  hyper
cgtcggactcttaaataaaagtgagcaagtccaaagcgtggtccggagagcgtggacaaggtaacctgttttggatgtccgggagaagggagtccggccgaaagggcccagcccctcgaggctgctcca

SEQ ID NO: 10199 - DNA, 76 bp, Homo sapiens
  chr11:130059543-130059619
  hypo
cgagccgcccatgtgtcctggagtcgctctgggcgcacgtgggggaaatggggcccagagctccgcctcaggctcc

SEQ ID NO: 10200 - DNA, 61 bp, Homo sapiens
  chr11:130059738-130059799
  hypo
cccgcgggcgcgctccctgaagtcctttgtggtcacctcagtggtggctttccgtgagtcc

SEQ ID NO: 10201 - DNA, 453 bp, Homo sapiens
  chr11:130060407-130060860
  hypo
ggcttccctgacagcccctaccccgctcatgcccgctgccagtgggccctgcggggggacgccgactcagtgctgagcctcaccttccgcagctttgaccttgcgtcctgcgacgagcgcggcagcgacctggtgacggtgtacaacaccctgagccccatggagccccacgccctggtgcagtgagtaccccggggggcgggtagggctgtgggagcttggcggctgccctgtagggggccagcttcttcaacgattgggatacagtttatgactcttggccgcaggccactgctaaacatccaggcagcaggaggcacgtgtggtgtgatcctcagctgcagctccaggggagtctgggaggtgatttttctcagccttggcaaagcagaggaaggctctatagtccccagataccaaatccagcctgtgcggcctgtgccctgaaccgcc

SEQ ID NO: 10202 - DNA, 161 bp, Homo sapiens; identical to SEQ ID NO: 5733
  chr11:133939437-133939598
  binary

SEQ ID NO: 10203 - DNA, 65 bp, Homo sapiens
  chr11:19247033-19247098
  hypo
cgagagccgggctgttcccgacaggtacggctgccacggaagttggtgagaccattagcttcaac

SEQ ID NO: 10204 - DNA, 38 bp, Homo sapiens
  chr11:20619974-20620012
  hyper
tcctcatccccgaggccaggggttccccgagctagacc

SEQ ID NO: 10205 - DNA, 155 bp, Homo sapiens
  chr11:36476175-36476330
  hypo
cgcgtaactcattccatcctccaaggtactgttgtgctttcagtctccaggtcacccgcagggtaggtgaccagagccagagaagcggtttattcccggggctccgcactgcacccacgcgcccgcgcctgtgtttgactgcacgaggattctcc

SEQ ID NO: 10206 - DNA, 87 bp, Homo sapiens; identical to SEQ ID NO: 6778
  chr11:47208495-47208582
  hyper

SEQ ID NO: 10207 - DNA, 106 bp, Homo sapiens; identical to SEQ ID NO: 6390
  chr11:47359237-47359343
  hypo

SEQ ID NO: 10208 - DNA, 575 bp, Homo sapiens
  chr11:492571-493146
  hypo
cgggagccatttgcacccacacccccgggtctgcctcggggccccgggcgtcaaaaagctttacttttagtatttttccttgactacttttggggaaaatttcaagccctctaagtcaagggctgtaatgtggagcacacacaagagcagcctctggggctcagcaggaagacgtccggtgtggccaccgcgcctagcagtcctctttccagtcacggccactcacagctttggcctccgtggccctgcacggatgagttcttccagctgccctgccctgcgtgctgcaggacacatggggccttagcattctgctctttgcaggtggcagctttgatcgctcaggaggaactgccacctgatctccccactgcaggggcccccactccccccctcacgcgctgcgggtcctgtcactccacccacgctgtccatccccgctgatgctctgagccaggtggtagcaggtgggggtggcgccccgctcacggtctccatctgctcttcccgaggagggcgaggcagggcttgtgattaaagtcctgtgttccggcgcccgtgtcccaaaggcagcc

SEQ ID NO: 10209 - DNA, 60 bp, Homo sapiens
  chr11:493199-493259
  hypo
gttcctcacgcgctgagatgctccggactcaccttgggcatctctcgccccaggcctggc

SEQ ID NO: 10210 - DNA, 78 bp, Homo sapiens
  chr11:57194101-57194179
  hyper
cgctcgaattctgaataccgtcccctaaaataatgacagcaactcaaccaggtgcagaggcagggagatttcatacag

SEQ ID NO: 10211 - DNA, 300 bp, Homo sapiens
  chr11:64088230-64088530
  hypo
cgagtggggccgagcccacaaggcggaaggcaaggtgaggtgaggggcctgcagggagtcaggaccaggtaggatattcttcttgtgacctttactttctctgcaggttcggctcctggctgatcccactggggcctttgggaaggtgagtgttcccctgaccgccacagggacatggcagtgcggggagcagtgggggcccttagcctcttcaaggatttctgacacttttctctgtctcttcttaggagacagacttattactagatgattcgctggtgtccatctttgggaatcgac

SEQ ID NO: 10212 - DNA, 95 bp, Homo sapiens
  chr11:66631185-66631280
  hypo
cggtcagggggccctccaagggccgggagcaaaggcaggcgggggctgcagcctctcaccttcacacctcggacgcggaactccgcaagggccct

SEQ ID NO: 10213 - DNA, 39 bp, Homo sapiens
  chr11:66631852-66631891
  hypo
ctcgccgtgggctcccagacagcgaggggacggcaggcc

SEQ ID NO: 10214 - DNA, 133 bp, Homo sapiens
  chr11:67895663-67895796
  binary
cgtccgtgtagccttggccgggcccccaagcttcttagaatgccatctaagaaggcagagggggatgagcggcggcggggaggaggggcaggccttgggaagatccactgggtcacagggaagcgaaggcgga

SEQ ID NO: 10215 - DNA, 63 bp, Homo sapiens; identical to SEQ ID NO: 6789
  chr11:73073669-73073732
  hypo

SEQ ID NO: 10216 - DNA, 133 bp, Homo sapiens
  chr11:75858240-75858373
  hypo
agaggacaggagcacttgggaaggaagcggtctggggggcctaactgagcagcaccctgcctcacaggagagcaagtcacagacgtttcagccccaacgctgccgctcactggctatgtgaccccggcgaggc

SEQ ID NO: 10217 - DNA, 40 bp, Homo sapiens
  chr11:76164370-76164410
  hypo
cgccaccgtgctgaagttcggagagcagtaaacgatgaac

SEQ ID NO: 10218 - DNA, 118 bp, Homo sapiens
  chr11:77383112-77383230
  hypo
cgcttgtgtactcgccttatttctttaccacgtcgcaaactcttctgggaaccgtcactttctgagtcttctttgtagttaatttgtcttttctgatttctccttgaccgccttcgcc

SEQ ID NO: 10219 - DNA, 339 bp, Homo sapiens
  chr11:79150336-79150675
  hyper
aactgcatttctataaaccctctctccacggttagggggtgggagggagttagagatcgggtgggggcttggcgcggtactgttgagggctctgcacccaactgagcagtaatacactcatccacatggacgcgggtgcataaatcgccttaacattttgccctgaaagcggagccaatttccaaagttaaggaccacgcagctgaatttccagtactttccaacctcgcctaggcgggggcaggcagagaaggggcgggcagcgggcagctaactcgcccgacccccccgccaagaaggactcactaggtgaaccccccgcccttcacccaagtagtt

SEQ ID NO: 10220 - DNA, 65 bp, Homo sapiens
  chr11:8284161-8284226
  hyper
cgtgccactctcgcaggccgctcccgcacaagtgctaccggccggcggcgggacactttcttcct

SEQ ID NO: 10221 - DNA, 191 bp, Homo sapiens
  chr11:8284345-8284536
  hyper
gccttcccctcgcctgccgggcaccctggcgctcgcgccgtcctcccgcgctcccgcttgccccgagctctggagcccgattctccccgaagccgctgatttgctcggcgctcagcgcctctcgggttacgcggcggctggcgcgagggtgatggctgcggtgagagcagcagcctcagacacgaaatgct

SEQ ID NO: 10222 - DNA, 70 bp, Homo sapiens
  chr11:8284961-8285031
  hyper
gactcggggcgcgctttggaggggcggccggtcttcgggcagctagcgggctctaattacccgcttgtcc

SEQ ID NO: 10223 - DNA, 94 bp, Homo sapiens; identical to SEQ ID NO: 6795
  chr11:829438-829532
  hyper

SEQ ID NO: 10224 - DNA, 58 bp, Homo sapiens
  chr11:85906179-85906237
  hypo
cggccaccgagggggtcggggaggctgcgcaaggcggtgagccccggcagctggagca

SEQ ID NO: 10225 - DNA, 208 bp, Homo sapiens
  chr11:85906275-85906483
  hypo
agcacgaggaagagatggcagcagaggctggggaagccgtggcgtcccccatggacgacgggtttctgagcctggattcgccctcctatgtcccgtacagggacagaacagaatgggctgatacagatccagtgccgcagaatgatggccccaatcccgtggtccagatcatttatagtgacaaatttagagatgtttgattacttcc

SEQ ID NO: 10226 - DNA, 129 bp, Homo sapiens; identical to SEQ ID NO: 5736
  chr11:8615887-8616016
  binary

SEQ ID NO: 10227 - DNA, 61 bp, Homo sapiens
  chr11:9112971-9113032
  binary
cccggcgggacggcccccgccagcagcagcagtggcggcagcagcagcagcagcagcagca

SEQ ID NO: 10228 - DNA, 90 bp, Homo sapiens
  chr11:93911562-93911652
  hypo
cgatcctcctgtacctgcccccgctgttctggcgtttcgcagctgctcctcatatttgctcagacttgaagtttatcatggaagaacttg

SEQ ID NO: 10229 - DNA, 81 bp, Homo sapiens
  chr11:93911800-93911881
  hypo
aaattctctgcccttctactgccagtctgggcccagagttctcattgctaggaggcggggcaggagtggaagcagggggac

SEQ ID NO: 10230 - DNA, 218 bp, Homo sapiens
  chr11:94474139-94474357
  hyper
gcccagacgagttaggtaagtctgctcattttgtcttttatttcttggtcgcaattctgcccgagaactgcgagtttggggggcgtccataggaactcagctagggatggggctggggttggagggcggagggaaagggtcaggggacacctgctgccttcgcggccggaaccggcctttcctcggcgctgtgctttcgggggtggcagggcaagtgt

SEQ ID NO: 10231 - DNA, 105 bp, Homo sapiens
  chr11:94474385-94474490
  hyper
gcgtgcgtgtgcgtgtgtgtgtgtgtgagtgcgtgtgtgtgcgtgttcgtctggggcagtggtgctgctccgaggagcctggcacagcaaacttccagagctggg

SEQ ID NO: 10232 - DNA, 220 bp, Homo sapiens
  chr11:94474547-94474767
  hyper
tgccaagtacctggcacgagaaggacgtcgtgtgggtcgtccttaccctgaatttaatgaagtcaggggctgaaaacggcggtgtaatcattaaactgtaagacctaggagctgcttccctccctgatttctattcctcagttagcctgtaggtgtctcgagataggacattccatcctcatgcctgtcatggtaagtggagatttgcgatgggtgaacc

SEQ ID NO: 10233 - DNA, 235 bp, Homo sapiens
  chr11:94502100-94502335
  hyper
cggaagggggtgtccggtgcagctttccccggcgcgagacaaaggcgcgcgcaccggcccgcccgacgggctctggcgctgtggactggaccctttctgcccgccggccagacccggctctggcgggtgggggcgacgaaagggtcgcaccccagccccagacgctcggatcgcgttagctgctgctccttctttgttctctccccagacaagtttctttgacaaactggagagt

SEQ ID NO: 10234 - DNA, 526 bp, Homo sapiens
  chr11:985466-985992
  hypo
ctggagaccatcctgaacaaagcccaagaaccgcccaagtcgaagaaggtccagcactccaacgcgaagaatgccgtgctcttcgaggccatcagcttaatcattcaccatgacaggtgtgtcggctgcctgtggagaggcttcgtctcgcgcacacacacacgttccttctcgttggcacgagactgggcggatcatgtctggtttgtccactccatgggcctccccttcgtcctgcctctgtgctccctgccggatgctttttttctttctgtgcagcccggcccctcctgctctgagctcaccgtggattgctttggtgactgtggtctcatcccacacgagggccttttcctccttcccctgagcatccccactcctgactggcttctcatgtagtggaacagagaggagacgggtggggtggggggtgtgcgcgcatgtcccgtggctttgctggatgtggagccgcacttggtgggtccagggtcgcagggcagtgctggaaacgtctgtgcccatccac

SEQ ID NO: 10235 - DNA, 106 bp, Homo sapiens
  chr12:104850139-104850245
  hyper
cgggaaagctcagctgtcgcctgacccgagggtcgtgcagtttccttaaccctgactttaagtcagccctctttaaccccgactcccaagctgggctgtcctttga

SEQ ID NO: 10236 - DNA, 349 bp, Homo sapiens
  chr12:104851545-104851894
  binary
gaccaggaggggcggtagtttttttttttttttttttcttcttctttttttctttgtgtcccttgtctgtctgtctgcgaggtagcagggaaacggagaggtgtgggaagcaaccgggggtgaggggctggtttgaggagaacgaaactccctccctgctgctgccgaggtcggaggatgaaagagttacccggagccggctgctctgcgcccgggcgagccgcctcttcctggttgccgggccgggggcgaagggtgtacgccccggcgaggttgcgagtccctgcagcaggctgggagcccgggactgggctcccacgtgtcccgggctccgcgcagagctgagcag

SEQ ID NO: 10237 - DNA, 366 bp, Homo sapiens
  chr12:111473017-111473383
  binary
tctgtttctttcctctcttccctgctctttctctctccttccctagggcgactcttcgaaaccccatcactttctccccatcctccctttgtgggagtctgtgtgcctcccctagatttggaggtgttctctgcggaccccgtaggagccggggctgggaggtggaatctcagagaacgcaccgtggaggcgcggctccggcctctgttctttcccggagtgccccggacgcgcctggcaaggccccccagccttggagtctcgcaaagtctcggcgggtgcggcggggatcaggggcgggaaaatggtgcggataacagggcggttagagcatcctgccttgaccgtgacattcgcggaagacgc

SEQ ID NO: 10238 - DNA, 52 bp, Homo sapiens
  chr12:111725459-111725511
  hypo
cgcaggccctgcctaatgacggggcgtgggggctgccggcagatgaaagcca

SEQ ID NO: 10239 - DNA, 63 bp, Homo sapiens
  chr12:111725564-111725627
  hypo
cccctgccacctaaacaaacaggccacagcagagtaaaacagggaagccgccttgttccagcc

SEQ ID NO: 10240 - DNA, 83 bp, Homo sapiens
  chr12:113495127-113495210
  binary
cgtacgccccccttgctgtcccccttcggttccccattgttctcagccgaatgctctcctgggaaggggggagggggtgctgc

SEQ ID NO: 10241 - DNA, 206 bp, Homo sapiens
  chr12:121203947-121204153
  hypo
cgagatcacaagctcactcaggggcttaagcagaatcacctccagcgaggagagtgcaaaccgaggcacaggccaatccaagttattgctttcacaggtttataactgctgctctcacctttaaataggccatcgtgaggagtggcaataaagtaaatggcaccaaatagagaagggcgggctgggcggcccggtgaatgcgagac

SEQ ID NO: 10242 - DNA, 173 bp, Homo sapiens
  chr12:132423854-132424027
  hypo
ttgtagatggtcttgcagagacacgaggctatgcatgctcctgccttttccaactgtctctgatgcagaagcgtagtcagagttgctttgcagctggttctgaccttcagaaacgggagccactagacaggagtagaaagctgttcatttgcagtgcttgttgctacacgggc

SEQ ID NO: 10243 - DNA, 178 bp, Homo sapiens
  chr12:132986274-132986452
  hypo
cgcagagagccgcggtgccatctccaccctggctttccaggccctggagggcaaaggtcagtcagatggagggagcccggggtccctggcaggagtgtggccaagtcccagcagcgctgccccgagagaggaggacggcgcagctccattgctccacctgcccggctcagggatggaa

SEQ ID NO: 10244 - DNA, 268 bp, Homo sapiens
  chr12:132986701-132986969
  hypo
cgcccacaccccacctccgtggtgacccctgaacccccggagctcaccatccacaccagggtgagaggagaggatgggcaaggaaccgtcaaccagaggggatgctcagctgcgtgcacgtggcgggtggtacatgggggctcggggaggcacccagagaggatgcgtgtgtagtgcagaaaatgaggctttggggcccgcacaccgagcccaggacagcacggaggcgggagacactgccaagcccccctcaccctccttgatggac

SEQ ID NO: 10245 - DNA, 103 bp, Homo sapiens
  chr12:133464006-133464109
  hyper
cggcccggccgcccgcgcccacgcagccccgcagcccggcctggacgccggcgggcgccccctcccacggccgcaaccaggtcccccttcgccgcccgccgca

SEQ ID NO: 10246 - DNA, 238 bp, Homo sapiens
  chr12:133464166-133464404
  binary
cgccgccgctgtcaagagacattgcggctccctcagctgatccgcggggcggggccagaggcctctgcgccccgcgattggctggcggcggcgctcaccaagagcggcagctaaagcggagccgggagtggcccgcgagagtaggcgcgtggagggcgctcggccatctttgatcctgaccaggcgacttcgtcgcctgcggatcacggaagtggctgcggtcggcgccatgttatgt

SEQ ID NO: 10247 - DNA, 219 bp, Homo sapiens
  chr12:133464555-133464774
  binary
acagtggatcacacagatccgaagtctgaggcacagggcgcggtccgcgagtgggagcggctgcttgtgggcagggtggacgcggggccacgtcttggccggcgttttgcggggtcttcctgttctgaacgcgcgtaacttttgcctcagtatctcacttcttggaatccggcggcgttcacgtgtgtgctccagagaagggcgccagagggtattccc

SEQ ID NO: 10248 - DNA, 94 bp, Homo sapiens
  chr12:15374050-15374144
  hyper
cgagcgcgctcagggctcggaatgggtctgcaggaagtcgtcccgaaagagctgcctggacacgtgcgtgacactcacctgttcacactctcca

SEQ ID NO: 10249 - DNA, 235 bp, Homo sapiens
  chr12:1639655-1639890
  binary
gcctccctccggatcggccgcaggctgcgcgcccccgaccgtccccgcccgctgagttcgggggtccccggcgcggagcagggagccctccgggcggcaggagggcgcgcagactccgagcgccggggctgcctggccgggctccggtggacacctcggaggctgccccagcatcggggggggggcccgagacgcctcggcgggaccccgggagccgagcacgcccgcccgcgcc

SEQ ID NO: 10250 - DNA, 253 bp, Homo sapiens
  chr12:24715505-24715758
  binary
gacgaggtgaaatccctttgctggtcatgaggcggcttcagagacaaacaacacaatgcgagtgcaaataacaaaaggcaaaaagacagtaggaacaatgggggaggcgagggcagcgcaccagccggcggtcaccgcggcccggcgcccgccccggggggtgcggcgggggcggggggggggcgcgggggcggtgccgggggctcccgctccctccaggtcgcccccgagctcccgcaagcccaccctgacc

SEQ ID NO: 10251 - DNA, 84 bp, Homo sapiens; identical to SEQ ID NO: 6832
  chr12:29373882-29373966
  hypo

SEQ ID NO: 10252 - DNA, 161 bp, Homo sapiens
  chr12:30861053-30861214
  hypo
cgtgcacaggactgctctcttggtgggtgggggaggggagcgggcatgttaattacccacacgtgtgttgactcaaagcttttgtcattaaatctgtactaaataaatacaaatattgctggcttattggggcttcactctcgctgtactctctcgtcagc

SEQ ID NO: 10253 - DNA, 164 bp, Homo sapiens
  chr12:32864298-32864462
  hypo
cgtaaggctctgtatattgacggcattcaaatatctccagacttgtatatctagttgctattcgacatatacacttaaatgtctaatagacatttcaaactctaataccgaattcctgacctgttcctcaactagatttggtatttctatagtcttcccccatc

SEQ ID NO: 10254 - DNA, 203 bp, Homo sapiens
  chr12:3414071-3414274
  hypo
cgagggcagggagtcacgcggcctcacacatccctgtgtctctgtctgtgtgtgctggcgccgcacgactgctgggccacttgcttgtaaaatggggccaacaaaaggacctgcgccctgggccatcgtgcggactgaaagaggtgattcatggaaagcaattagaagagagcctggcgcagcacccgcagttaatgagagac

SEQ ID NO: 10255 - DNA, 192 bp, Homo sapiens
  chr12:3414306-3414498
  hypo
gcgcgtgcccgtgtcatttacatccatggggtgctgctgggaggcctgacgctagccctggctctgcagccactgctttctgggggtcggtctcctgcctgagatgcaggttggggttctaactgttcccggcctgtgtgagggcctgcgttcgcgtgcactggtgccctgcaggtcttggtcggtgacacc

SEQ ID NO: 10256 - DNA, 54 bp, Homo sapiens
  chr12:41086129-41086183
  hyper
cgctggtcctgggggtgagagtgatatccctgttgtccaatcagagaagcgggt

SEQ ID NO: 10257 - DNA, 211 bp, Homo sapiens
  chr12:41086454-41086665
  hyper
ttgcttcccttcccccagccccgcccagccctcgtcacccccaaatctcctgtggtccctgcagctctcgccgtgcggcgcgggaaggactggggcggaggtggctggggtgcggggaagcaggggtgcgggatgccggagccctggggtgccgggcaaggcaggacggcagtgccctagaagagggctccgagctcggggtctgtgtctc

SEQ ID NO: 10258 - DNA, 53 bp, Homo sapiens
  chr12:41582155-41582208
  binary
cgccgccgcgagacggctgccccgggggtggcccggggaaggcaggggggctc

SEQ ID NO: 10259 - DNA, 180 bp, Homo sapiens
  chr12:5020472-5020652
  hyper
cacccctggtccctggctgcttcccaccccgggctctctcctggcctcccacccccgcgcccggcttccaccatgacggtgatgtctggggagaacgtggacgaggcttcggccgccccgggccacccccaggatggcagctacccccggcaggccgaccacgacgaccacgagtgctgc

SEQ ID NO: 10260 - DNA, 54 bp, Homo sapiens; identical to SEQ ID NO: 6843
  chr12:52401605-52401659
  hyper

SEQ ID NO: 10261 - DNA, 71 bp, Homo sapiens
  chr12:52627438-52627509
  hyper
gcgctccagaccacaccagccgccctaactagccctgcctgcgcgcgggccaggcgctggggagcactgcc

SEQ ID NO: 10262 - DNA, 182 bp, Homo sapiens
  chr12:54366668-54366850
  hyper
cgcccatcccaccgcccaccccaccccaaccctctctctcctcctttgctcgtgctgtggtatggagagaaggggagtgacgagagaaaaacgaatacaaatctgcaattgattttcataatgtttctgcggtgtttgcaaaccaatcgcctgaacgtccccgatcttacctaagagagaac

SEQ ID NO: 10263 - DNA, 192 bp, Homo sapiens
  chr12:54367630-54367822
  hyper
ggaggagaacacaaatcccagctcgtccggttcagcccactccgtggccaaggagccggccaaaggagccgcccccagtaggtagcagcggccggggaacgggcgggcagcgagggagggagcgagagagggagggcgagagaaggggggaggcaaggggagcggggacggcctcgtgttttgggtcagtcc

SEQ ID NO: 10264 - DNA, 216 bp, Homo sapiens
  chr12:54368432-54368648
  hyper
tgccccgcgggcttcccggggcgccagggccccggaagcggctctctggtgtctcggtgcctgctggccggcttcctccccgcctcccgactgctctcgccagatttcactgcttcgcgcctgttctcagctttccccccagatttctgggggaggggttgggctttccgaaccactaggagggcggcccaggaagggcccgagggcggaggggga

SEQ ID NO: 10265 - DNA, 258 bp, Homo sapiens
  chr12:54369002-54369260
  hyper
aaattccagatccgggaactggagcgagagtttttcttcaacgtgtatatcaacaaagagaagcggctgcagctgtcccggatgctgaacctgacggaccgacaagtgaaaatttggtttcagaacagaaggatgaaagaaaagaaactgagcagagaccggctgcagtatttctcgggaaatcctctgctgtaacctgcagaccgggcccttttgggggcggggggaggggaaaattattttattttatttttattt

SEQ ID NO: 10266 - DNA, 354 bp, Homo sapiens
  chr12:54369303-54369657
  hyper
ctgtggccagggctggcccccaccgctgtggccggcactccattccggaacctcctggaccctctatctgactctcgctgtgggacagggaccgggcctggaaagggggtgaagggaagtgtctgatgcacggcgagtgaacaccgttggcgccgaggccaagactttgatttaaaagaaaacacacctcggcgacaatgtcttgctgctcggattaggtgggggaggggcgacagtagtgagcgcctgagccgaacaatcctcgaactaaaagccttcccttgcccatgtgaaaagatccgctaagacagcatgtctgccagcggaaacttctcgagctcccccctctacccc

SEQ ID NO: 10267 - DNA, 130 bp, Homo sapiens
  chr12:54519801-54519931
  hyper
cgtggtccctcgtaccaatcgatcgaattctagtcgcaattctctgtctgtccctcggctctggggagaaagggggggctgtggcgtgggggctgaggaggggctaaggcgggaggggcgcctcatccct

SEQ ID NO: 10268 - DNA, 299 bp, Homo sapiens
  chr12:6334298-6334597
  hypo
cgtgtagctagagttactcgttttcactgctgtatagtgttctgttgcctataaaataccccttcagccaatgggcggcaggtaggtcactgtttattcctcgcttgctggtatttttagtacctgcatgaatcaaacacaccccgtaatggcatctacaactaccaggcgtatatgaggggcagagaccaagggtggtcacaaagtcctttgcaagtctcacccttaagcgcgtggggactgtgttgttgctggcagccagaattaatgctgatgtcctgtatgtcttgcagcttgcc

SEQ ID NO: 10269 - DNA, 72 bp, Homo sapiens
  chr12:8906544-8906616
  hypo
cgccatgaagcgccatacctgttccagaagtatgttaaagagtctcatggacgggatgtacgtgtcattgtc

SEQ ID NO: 10270 - DNA, 123 bp, Homo sapiens
  chr12:93710959-93711082
  hypo
cgacccaggactcccgcttctctttacaccatatactgttctttatgtgccgctgtttttctctttatagtttttctaggacaaaaaccaagctccatcagaaggttaaacctgtgtcaggtt

SEQ ID NO: 10271 - DNA, 127 bp, Homo sapiens
  chr13:103046539-103046666
  binary
cgccagctcccttccctttccttcagatgggtctcgggtccagagctggcgcccgctagcgggaggccagaccgggagggccaaggcagccacctgtggctttcccatccctcaggtccagcagtgc

SEQ ID NO: 10272 - DNA, 207 bp, Homo sapiens; identical to SEQ ID NO: 9064
  chr13:108518148-108518355
  hyper

SEQ ID NO: 10273 - DNA, 43 bp, Homo sapiens
  chr13:108519212-108519255
  hyper
cgaccccatcctctgtagagtgggaaacaataatggagagaga

SEQ ID NO: 10274 - DNA, 59 bp, Homo sapiens
  chr13:108519564-108519623
  binary
cgcgctggctctcccagagtccggagcctgggctgcctccggcggggcgctccctcccc

SEQ ID NO: 10275 - DNA, 166 bp, Homo sapiens; identical to SEQ ID NO: 5746
  chr13:108519932-108520098
  binary

SEQ ID NO: 10276 - DNA, 68 bp, Homo sapiens; identical to SEQ ID NO: 5747
  chr13:108520309-108520377
  binary

SEQ ID NO: 10277 - DNA, 199 bp, Homo sapiens
  chr13:111006048-111006247
  hypo
cgggctcttgtaaatgttggaattcctaagactctctctggaggacaggtaagatgtcagtgggaacacacatacacacatgcacgtgcgtgtgtgcacgcacggctggcatgtccatggaaactgccttggcgtggaatgagcagggctgcctctcaatgaggtattccttccctcacaatatagcactggagccatc

SEQ ID NO: 10278 - DNA, 401 bp, Homo sapiens
  chr13:111277855-111278256
  hypo
cggggcccagctccagaggcagggaggccctgtgggctgtgtgtgacaggtttgcagaaggtggaaacgaagggcctctgagcaataacaagacccttcctgcactcggcacatatgtctggtgccaggccctagcctgtgttccatgggtcagcgtggaactgggcaggcaaaaacctgcccccgtggggctcccccagaccgcctatgctatagagcttgctgtgtggaggtgttctctctgccgtccaggattgtggccactgagggcttgaaatgtggctgggaggtgcgggagcagagcgtttgctcttgtttacttttcattgtgtgtgtttgcaccgactggattgggctgtgctgctctggagacaagggagaggaggatgtcaggtggtgaa

SEQ ID NO: 10279 - DNA, 278 bp, Homo sapiens
  chr13:111278426-111278704
  hypo
tgcagggctgggccccacagggtgtggggctgctgtcagggctgtggctctggccctgagtaagcagggcagggccagtgtgggtcataaaggctcctacgcggctgtggggctgggccggaggctgtggtaaggacctgtgggagggaagggtgcagtcagatggtgagaggggccggattctgggtatgtttggaaagtttgggggtggaatttgccgacagattggattggaaaaggcaaggggcacagactccaccaagggttttggtctgagc

SEQ ID NO: 10280 - DNA, 42 bp, Homo sapiens
  chr13:111363839-111363881
  hypo
cgtgagccaccgcgtccggccaagtgttatagtcttttgtgc

SEQ ID NO: 10281 - DNA, 352 bp, Homo sapiens; identical to SEQ ID NO: 9070
  chr13:112760444-112760796
  hyper

SEQ ID NO: 10282 - DNA, 47 bp, Homo sapiens
  chr13:114189691-114189738
  hypo
cgcacctgggcaccgtcaccattgtcccaacagtgcacctgtgcacc

SEQ ID NO: 10283 - DNA, 304 bp, Homo sapiens
  chr13:114189809-114190113
  hypo
gcctgtacacaggtgtttatagcagctttattcgtattagccataaacagtccaaaggtacttcagtgggtaaataaatgttcaacaaactgagctatgtccataccacggaacgccacccagcagtaaaaccaccggcacacacctccgagaactgcgcagagtgggcaggcagcccccaaaggctgcgtactgtgtggttctttttatgtcacatttatgaggcgagaagattctgaagttgaggaaaggctcgtggttcccaggaattgaggatgggcagtctggggaggggctggggatg

SEQ ID NO: 10284 - DNA, 278 bp, Homo sapiens
  chr13:114190142-114190420
  hypo
ggcacctgagtgggggtctggggaggggatggggatggcattcgctgtgtttgctgtgtctatatcggcacctgagtcggggtctggggagggactggggatggatggcactcgctgtctttgctgtgtccgtatcagcacctgagtgggatcttgtgctgtaatttggcaagatgttaccattggggaaactaaagggtaatgaggactttgtattactcttaaaactgcaggttaatatataattatctcaaaataaaaagtttccggctgggcgc

SEQ ID NO: 10285 - DNA, 221 bp, Homo sapiens
  chr13:114300515-114300736
  hypo
cgaggatgtggagaaggcagagccctgtacacggtggggatgtaaagagccgcagccactatgaaaaaccaaatggctgtttttcacagaattaaaaacagaattaccctatgcccggcaattctgctcagcgtatacacccagagacatttgtacacccatgtctacacgtaccactattcagggtagctaaacagtggaggcacccgaagtgtccatcc

SEQ ID NO: 10286 - DNA, 133 bp, Homo sapiens
  chr13:114887185-114887318
  hypo
cgcgggcggccagaccagtccctgagtgcggcaccatggccgtgtgagtttatggcccattgcgctagccctgtacagtgaatgagatactagttgtttacagctgtgagcatacacaggccccccgccacac

SEQ ID NO: 10287 - DNA, 63 bp, Homo sapiens
  chr13:114917508-114917571
  hypo
cgccttgaggaacggcatcgtctgtgctgaagcaggcagcgcccagctgacgactgtcaatgc

SEQ ID NO: 10288 - DNA, 96 bp, Homo sapiens
  chr13:114917600-114917696
  hypo
ccatccagggtcctgtccagtgctgtgctaagcacttcacgtggtgacagctagctgcacaccaggcacggtcaggtgcttagcgtttattaagtc

SEQ ID NO: 10289 - DNA, 82 bp, Homo sapiens
  chr13:25746000-25746082
  binary
gaaattcgagtcgtaattatggaattcaaattccctcaactctcacccaccttcggattccttctctagactcgctcttcac

SEQ ID NO: 10290 - DNA, 282 bp, Homo sapiens
  chr13:26624917-26625199
  hyper
agatggtggcgtcgccgccgtcgaagcgctcgggacactggaagccgatgcgccagacgccctgcgcgtccagccagccgtggcagtactcgccgctggccctcgcccccgccgccagcagcgcagccagcagcagctgcaggagcgaagcggcgttccaggatgaggagacggacgagcggcgagcgccccacatggcaccaccctgggcgcggacagcgcgtctccagagagcgcaggacggtctccgagaagtcgtggccccggcgacccccgggcctc

SEQ ID NO: 10291 - DNA, 243 bp, Homo sapiens
  chr13:28745848-28746091
  hypo
cggcccacaaactccttgaaccccacagttaagggatttttatggacgcttcatctcgcaggcaagggaaattattaactcagcctgtagcccctctctcctcactggaagatggttgggtagggctgaaagttccaaactggtaatcagggcttggtctttctggtgaacggctcccatctaggtacctaacaaaagtcacctcattagaacaaacgctactcctatcaccctggaaattcc

SEQ ID NO: 10292 - DNA, 86 bp, Homo sapiens
  chr13:43620991-43621077
  hypo
cgtttctgatccagtgaggtgcacattgccgcacctgatcaggctaaaggctcgcctttgttactgcacggctaagtgccctaatc

SEQ ID NO: 10293 - DNA, 72 bp, Homo sapiens
  chr13:46948519-46948591
  hypo
cgtgttttaacacccagaggggtgcgccgttcctaggggtacagcaataccaagttgatgcatggagtggac

SEQ ID NO: 10294 - DNA, 97 bp, Homo sapiens; identical to SEQ ID NO: 6879
  chr13:99851706-99851803
  hypo

SEQ ID NO: 10295 - DNA, 41 bp, Homo sapiens
  chr14:100438971-100439012
  hyper
aggcccccaaatgtaccgctcgttgatgtatcacccagctc

SEQ ID NO: 10296 - DNA, 129 bp, Homo sapiens
  chr14:100644271-100644400
  hypo
cgcggttccccccccgggagcattgatacccccgcccctgggagcattgatcctcctgcccctgcagcccggagcccggagcagcccacgttgctcccgctgcggcccagcccagcccagcccagccca

SEQ ID NO: 10297 - DNA, 85 bp, Homo sapiens; identical to SEQ ID NO: 6896
  chr14:105472075-105472160
  hypo

SEQ ID NO: 10298 - DNA, 112 bp, Homo sapiens
  chr14:21439074-21439186
  hyper
cgcaatggaaagctcgtggcatacagcaggcgctcattatttgaagcctcttcattctcctgcttcctcggtggttaaggaggcttttggaagttcaagtccgtctcagcta

SEQ ID NO: 10299 - DNA, 590 bp, Homo sapiens
  chr14:21439317-21439907
  hyper
cacctccaggcagctctttccagagcagtgagggcaagtctggggattatctccataaaggaagcgaggtggctcggtggaggggcttcagatccccttcccaggaccctgtgacccgccatcggaagagagtggacctcattctatttcaatgtctgcatagtacagacatttgctgtgggcaaatcggacccatgagcccagagagcatcatcccgggaaagctttcccgaagcacaggcttccctgcaccaccatacacgcgcacacccgcacgcgctcactcccccagccctcctcccctccctcactcccgccctggaagaagcggggagctgaggggagaggtggaaccagcagagaaacgggccgggcaggagcccgcaccagcccggcttgggacaccgcagccgctcctgccctctgctggctggaaggcgcacttacacattgcggtcatcgcggatcgccgagggccgctggtgccgctctgccgccaaggacgctcagccattggagtagaagtgagagaggccgcgggctgagtagagaggggtgaggattccggaaaggaagcatcgtcaggaagc

SEQ ID NO: 10300 - DNA, 111 bp, Homo sapiens; identical to SEQ ID NO: 6903
  chr14:58599612-58599723
  hypo

SEQ ID NO: 10301 - DNA, 196 bp, Homo sapiens
  chr14:62105869-62106065
  binary
cgtaaccgctaactgcatcaaattaactgtagtacatactgtactactgtcatcattttatagccatctcctgttgccgttgtggtgagctcaactgttgcaggtatccacttaaaacgcgtgtgttgctaatcgtctccaagtaagcagtttatctctctactagatttcttattgttgtaaaaagtgatcttgc

SEQ ID NO: 10302 - DNA, 114 bp, Homo sapiens; identical to SEQ ID NO: 9129
  chr14:62584399-62584513
  hyper

SEQ ID NO: 10303 - DNA, 148 bp, Homo sapiens; identical to SEQ ID NO: 6907
  chr14:73238412-73238560
  hypo

SEQ ID NO: 10304 - DNA, 61 bp, Homo sapiens
  chr14:96342530-96342591
  binary
cgcagccgccggccctccccgcactggagctccccctcccctccctccccgcccctcggct

SEQ ID NO: 10305 - DNA, 78 bp, Homo sapiens
  chr15:28351681-28351759
  hyper
cgttgtccccaagggtctctccaccctccgggccccggcctccggccccgcctggcatgaggagcggggagcgcacag

SEQ ID NO: 10306 - DNA, 250 bp, Homo sapiens
  chr15:31561317-31561567
  hypo
cgaaagccttcacagttgcaagctttctgaagtggctgctcaacgagagggttcaggggcctatccacctgtcaccaggttgtggctgtgacaaacagtaaattctcctggcagcactgcgctctctcgggcaggcccctgagggtgacttggggcatcatcctagggacacgcctgttaacagctatgctggtatttttataagtctcttagtgatgggtggggggtgcagagggacaaagtcatttgc

SEQ ID NO: 10307 - DNA, 185 bp, Homo sapiens
  chr15:31564302-31564487
  hypo
cggaaaggctctgcgtggcccaaggtttcagtcccagagccagcctttttgtctttggcttcgaaaacctcaatcgtaaaatggagctaataaaaacaccaagcccagattggaggacgaaatggcatatggccctggtggggactccaccgggggggaggcatggcccaaaaggcttgggttgc

SEQ ID NO: 10308 - DNA, 218 bp, Homo sapiens
  chr15:31668823-31669041
  hypo
cggagacctttgtaccagaacttggatgcatagtccaccttactactgatacacgcctgagcaccctttagggcgaggcgccgcctcctgcctgctgtcctgtccctcagcatcagaagagttgaattcagcaggagacgggagcccggtgtccatgagggaagaggggtcgcgcttggtttctactgacccccatgaagatttcagacttgcagtgc

SEQ ID NO: 10309 - DNA, 211 bp, Homo sapiens
  chr15:45669920-45670131
  hyper
cggagcgattccagtactagaagcatgggagggtctgctgccagggcagccgagggcggggagcgcagaaactctgcttacaggctgcactcgccccgactcctctccagacgtgggatcccatgttatacttggagtgaatctggtcgctcgctccccgtccccgattcccactttgcttgcctcttctccccatccatctaccccacac

SEQ ID NO: 10310 - DNA, 275 bp, Homo sapiens
  chr15:45670188-45670463
  binary
cgccacccttttactaagaggagcctccgtcgtcccaaccccttgctccgagcgggaagcttggtgcagcgcaccaaggtccggtagaggggggcggcgccccctgcgccgtgggccagcaggccgcggacgcgcagacagcaagtggaccccaagggctggagccgcaacgcaagttccccctgactgggggacgccgcccagctcctggagcctgcgaaggctcttgaagctgagcttcccagggataccagaagggacactctcgtgcaatt

SEQ ID NO: 10311 - DNA, 78 bp, Homo sapiens; identical to SEQ ID NO: 5755
  chr15:48936649-48936727
  binary

SEQ ID NO: 10312 - DNA, 99 bp, Homo sapiens; identical to SEQ ID NO: 5973
  chr15:53080201-53080300
  hyper

SEQ ID NO: 10313 - DNA, 160 bp, Homo sapiens
  chr15:53082144-53082304
  hyper
cgcacggagtccggtcttcacatcggctgctggcgactgttgccttccttcctctcactgtggggctctgtctctctctctctctctctccgtgtgtgtgtgtccgtgtgtgcgtgtgcgtgtgtgtgtgtgtgtgtgtctcgccttccctcttaccccc

SEQ ID NO: 10314 - DNA, 133 bp, Homo sapiens
  chr15:57618572-57618705
  hypo
aagtctgcgatgacagtgctggcatgtggcgcgggggcgcagggtacacatccttgtctcagctgtcccacatggcagcagtgagcgcggacttcgctcctggatgcgctgccctggcctccacctcggtccc

SEQ ID NO: 10315 - DNA, 32 bp, Homo sapiens
  chr15:77906720-77906752
  hypo
cgggcatggagtcgttgccgcccgcgttggcc

SEQ ID NO: 10316 - DNA, 106 bp, Homo sapiens
  chr15:77906998-77907104
  hypo
ttgggcagtagcacatcagggaagtccttgaactccttgccctggacaaactcgggcgtggcgcacgtgggctgctgccggttgaagttgagccgccagcggcgcc

SEQ ID NO: 10317 - DNA, 238 bp, Homo sapiens
  chr15:79163927-79164165
  hypo
cgtaggaggataaaggtttacataggggatgcaggtaggctaagggctgtttgtggaaggatttaaataccaggctaaggactttgagatttatcgtctaaagttcattgagcacttattcattgttgggtaccgcgctaagcccgtatatgtaattctcacaataaactgacggaaatggtgctattttgcagcttagccaacaaagttgtttttgaacagggaacgacataaatcc

SEQ ID NO: 10318 - DNA, 61 bp, Homo sapiens; identical to SEQ ID NO: 9167
  chr15:79383268-79383329
  hyper

SEQ ID NO: 10319 - DNA, 62 bp, Homo sapiens; identical to SEQ ID NO: 9168
  chr15:79384146-79384208
  hyper

SEQ ID NO: 10320 - DNA, 60 bp, Homo sapiens
  chr15:83951722-83951782
  hyper
cgtctgggccgctttaaatgccctggccttcagaggactgaggcgagcacagccataaaa

SEQ ID NO: 10321 - DNA, 228 bp, Homo sapiens
  chr15:83952822-83953050
  hyper
atcagctgtttcacaaattctgaggtaaaagaaaaaaaaaaaaagaaggggtcgacccccacaggtggaaacagcaagtcctaacgtcctgggctgaagcctggggtgcgggcggcagagagtggcgtgtagggtacccgccgagtgccgccgccgatttccacaggctggcccgccggcacctccgacgcgcccgcagatccggcgcggagaccgtttgccagctcc

SEQ ID NO: 10322 - DNA, 76 bp, Homo sapiens
  chr16:15767635-15767711
  hypo
cggcatgaggcaccgcacctggctctgggtgtttggtgaaggaaagtaatttggaagcagagcaggaatagaatcg

SEQ ID NO: 10323 - DNA, 263 bp, Homo sapiens
  chr16:15820563-15820826
  hypo
cgcctctcctccaggaacgcaactagaggaaaggacttgccttgcagcaagagagacctcagcgagccgggaagaggctcctccccacagaactgggcaccacccagcactgcccaccacaccaccgcgccacctcctcacctgcagcttgtggactttgtcattgagctccgcccgggcccgctccccatcgctgcacttggactgcagctcctgcacctgcgcctccagcttcttcttcttatgttccacctcctgcttgg

SEQ ID NO: 10324 - DNA, 160 bp, Homo sapiens
  chr16:1807721-1807881
  hypo
cgtctgcggtgtctccctcgccgctctctccctcgcccacgctggggggcttttggagactgggtacctgccacaccctgccacacacactctcctcttcacaggcctgcatcatgggggctgcggggggcctgccctcctgatgggcgatgggagcaga

SEQ ID NO: 10325 - DNA, 431 bp, Homo sapiens
  chr16:1807999-1808430
  hypo
gctgctccctctctctcctgccctgcaacatgggagcagccgaatcattgctgggttttctgtaataagaatgtattgttagttccagtccctaattgacctttgtcccttccttcccctgcctctctgtgcgtcgctggactcgccaggggagttctcaggtgagtatctcactctcctgtctgtctcccctctgtgtgacggggggagtgggtggacgggggatgccccgagctatcccgtcaccgtggctgtgtggactgccccccacgtcgccgcagcgcctctgcttctgctcgcagccaccgccgctcggaagcttgttcggtttgctccaccagccacttgacaatgacctggatatccaacccccccagcctgaggagtcccccgcgggccatttctgaaggccctgcggagccctaagccac

SEQ ID NO: 10326 - DNA, 451 bp, Homo sapiens
  chr16:19566591-19567042
  hyper
cgtcttcgctccgccgccttctggagtcctttctgcccctagaggacgcaggtgagctaagcagcagtcatgccctttaccatcatgacgcccgcaggcgggaccacccggcactgtagacagctgccctttacaatcatgactcatagaaactacggcactctggccgtggccgacgttgctcctccgaagcatggcgccggcgggagttgtaacccgggctgtccggagcggggagctgcccctcacaagcatggcgtcagctgaaaatgaagcctgtgctgtgcggagcgtcgcctgcccctcacaagcatggcgtctgcagaaggtgctgtgcggccgctgcggggcggccagctgcccttcacaaacatggcggccgaggggtgcggggagtggcggggtaaggatgggaagccgagcagacggccccagaacaagcggtcatgtg

SEQ ID NO: 10327 - DNA, 280 bp, Homo sapiens; identical to SEQ ID NO: 8003
  chr16:2035689-2035969
  hypo

SEQ ID NO: 10328 - DNA, 50 bp, Homo sapiens
  chr16:2141860-2141910
  hypo
cgtagcccccgctgtcatacacggcacaggagccccaggaccatgccctg

SEQ ID NO: 10329 - DNA, 575 bp, Homo sapiens
  chr16:2141972-2142547
  hypo
caggaggccgcggcactcctggagaactactcccttgtccttggcgtagacgcccggggccctcgctctgctcaccccagcagatccggcgctgaataggcccacgtccccgagccattgtgaggactctcccagccaacgtcgtaatcgctggtgctgaagcctcctgcggccgagcacgtgtggaccctggggccgggagggtctgggtagagtgctgaaacacacagagccccaggccggggccagggcctcatcaaaacccaacaggagtgtttcctgctggccagctcgcctgagctctggttcggcgccaccccagggaaccctcccagcagccatcaattagacaacgttaccatctctcatatacagagaaggaaacggcggtgttaagagggcaaaggtcacacagctagggagcagggctgatgccagagctccgctaaaggctgctctctcaacaagaggaacgatttaagtcttggggcacgccctgccagctcaccttcctgcagccgcacctgccgcagccgtgggggccccagctctgggctggactggttcccgtggac

SEQ ID NO: 10330 - DNA, 391 bp, Homo sapiens
  chr16:2142628-2143019
  hypo
tgccccatgcccgcctcgagtgagcggccaccagagacccagggaacatggctcccactgccctgctggccacggctagacctgggcttctcagccttatcctggggatgttctggggcagacagttgtctgtcatgggcccgtcctgtgcactgcaagacacggacctgtgtccctcccctctgcctactgatgccagcagcacctacctccagttctagcagccacaaaggtatctacacatgtccacatgtcccctagggtctggctggactaaaggcaaaactaaagcccagaagacagaccagtgcaccggatgcccgtaccgcgtgatggccaggaaggcccggctgtgcagctcctgcttgatggcgctttgcagacggtaggc

SEQ ID NO: 10331 - DNA, 219 bp, Homo sapiens
  chr16:24849506-24849725
  hypo
cggaagatggtcattaaaatagtagcacacagttatttagcacttacggaagaaagctcaacagtttacaggtgttacctcattgaaggctcgccactattctgtgaaggaggtgttgttatttctccctcgtttagcggataatgaagcagatttgcagaggtgaagtaacttgcccacgtcacacacctactgagccgtgaagtctaaagacaaagc

SEQ ID NO: 10332 - DNA, 276 bp, Homo sapiens
  chr16:31142715-31142991
  hypo
cggatgttcttcatttcacttcacacatgcacggcaagttgtgctcaaacattttaatcatttctgccctgttactcccaccccagatccaagcgccagcccagttccggtgggggctcagtcctccggagtccaggagtcagggctcgggggcgctcagcggccagtgggcaagattggggcctttcctgtcctcgaagctgcacaaaggtggccccagcccagaacacagggagagggcagagagatgtgctcatcagtctgggcaggcgggcc

SEQ ID NO: 10333 - DNA, 50 bp, Homo sapiens; identical to SEQ ID NO: 5983
  chr16:3238043-3238093
  hyper

SEQ ID NO: 10334 - DNA, 368 bp, Homo sapiens
  chr16:4310368-4310736
  hypo
cgtggcctagggagaggcttccgccattcaagatcacctgtccccttcccggtccccagagcccactcccgggcgcctcctgctcacctgggtccgcagctgctgctgttcccgctccagcttctcctggtgcagcagcctcacctgttcctgctgctgctgcagctgcacctgctgcgcaatcaccttgagcttttccgggtacatgtgggcctccagcgagcgcacctggaggcaggacaacctgggctcagggccaaggccgggagcacaccctgccctgtcagtctcacagcagctcattcactcctgctgaaaaccctagcacagggcgggcccctctcaacagaggccagaagcctttccag

SEQ ID NO: 10335 - DNA, 86 bp, Homo sapiens
  chr16:56228284-56228370
  binary
cgaggggggacgttttaaaacttcagaagtctgtaatcagcagtggcggactcggagcccagtagaagccccagccacctgagctg

SEQ ID NO: 10336 - DNA, 57 bp, Homo sapiens
  chr16:56228591-56228648
  binary
cgcaggaggggaaggaggagggggagaggccagagtctgcaaattaactttgcatcc

SEQ ID NO: 10337 - DNA, 46 bp, Homo sapiens
  chr16:66638030-66638076
  hyper
cgcgcgcgcgcgcgtgtgtgtgtgtctgtgtgtgtgcctggagctg

SEQ ID NO: 10338 - DNA, 566 bp, Homo sapiens
  chr16:66638452-66639018
  binary
aagaaggtggagtctgcggaggccccaggccggggagggggcgggtcgggcccagcatcccccgcagccggggtccgagggggaggggcgggctggaggagcgggtgggggcggggcggggcgtggcggcgggggatgcgcccctgcgcgagccagtgtcgcctgccctccttccgcacagcccgggtttccgcttccctccgggcgcgagaagaggggagccaggccgagccccggccctaccgccgccgccgccatgtggcccccagaccccgaccccgacccggaccccgagcctgccggcggctcccgtcccggccccgcggtccccgggctccgcgccctgctgccggcgcgggctttcctctgctctctcaaaggccgcctcctgctggccgagtcggtgagtgcggcgggaccctcggccgccccgctaggactgcgcggctcctttcggaggaggacgtcggggcgcgggtggggtccgggggcggccgccgtgctccgataccccctctccgcgccgcctcggccgacttctctcgggcgcctggcgaagttgggtc

SEQ ID NO: 10339 - DNA, 300 bp, Homo sapiens
  chr16:67197294-67197594
  hyper
cgcgcgtccccgctgcccaacgaagcctgggtcgcgttgcgccgccgccaccctgggctggcagtggagctggagctggagcccgcgctgcccgctgagagcgtgacgcgcgtcctgcagccagccgtccccgtggctgcgctgcgcctcaacctctcaggcgacaccgtaggcccagtgcgcttcgcagcacaccactacgccgcaaccctgtgcgcgctcgaggtgcgcgcagccgcttcggccgagctgaacgccgcgctggaggagctggcggcgcgctgcgcggccctgcgcgag

SEQ ID NO: 10340 - DNA, 260 bp, Homo sapiens
  chr16:67709104-67709364
  hypo
cgggctcctccgtcagcacctccacagcctcccactccccggatcggctcgacctcttgatggcatccaccacgctctgcatgtacagcccatcctcgaaggaggcggccatggagacaggggtgcggtcccaggtgcggcggtcgccctgcccctggaaggactggcgcaaggcctgcaccatgtagaccatgcccttcaggtacagcagcgggacatcctggggcccctgctcaggcagtcctgcgcccactgccagc

SEQ ID NO: 10341 - DNA, 79 bp, Homo sapiens
  chr16:71715666-71715745
  hypo
cgaggcctccgggtctttctaactgcatgaagttgtgtcgcaagttgaggtaggtaatatcttgactatagaagagatg

SEQ ID NO: 10342 - DNA, 52 bp, Homo sapiens
  chr16:85485696-85485748
  hypo
cgccagagagacccgtgtccggcgcgaataattggattttaatgaaacgaat

SEQ ID NO: 10343 - DNA, 91 bp, Homo sapiens
  chr16:85485855-85485946
  hypo
gatgtttgatggccctgccagcgcggttatttatttatttacccaaccctcatgagctgggacgtgccagtgggccccggtaattaacagc

SEQ ID NO: 10344 - DNA, 114 bp, Homo sapiens; identical to SEQ ID NO: 6981
  chr16:85679455-85679569
  hypo

SEQ ID NO: 10345 - DNA, 274 bp, Homo sapiens
  chr16:87444932-87445206
  hypo
cgttttagacccaacagcagtccttctggggacctcacggcctatcatgaagatttccacgcgctttcaaagagcattcgaaaaattatttgctttacaaagaaagaagtttactcttcataaaaaccaagcatttgtgtgcactggtcctgcgggagcctggtgggcgcggccatggcgcgcgcttacctggccggttgaagtccatggacggctgtttgcagtcctgggcgcggtgaccagtggccccgcagttgtaacaagataggttccc

SEQ ID NO: 10346 - DNA, 315 bp, Homo sapiens
  chr16:89169100-89169415
  hypo
cgcgctgctctgtcctctctgggtgggagccacctgtgtgatgatgcctgagttcagccctcagcaggtgagttggggtcagggctctcggttgcaccctcagactaggcgcctttcccctgtcggggccagggctctcagccgcgccctcagcctaagcgcctttcgctggttggggtcagggctctcggccgcgccctcagactaggcatcttttcctggtgtgcagtcgcccctatccacaggggacgtgccaatgccgagaccctgggtagcatggaaccctgtacctacgatgctttttgctatacatac

SEQ ID NO: 10347 - DNA, 542 bp, Homo sapiens
  chr16:89169538-89170080
  hypo
cggtactgtgctcgtctgttgtgagactgcagtgggccacgcgtcattgaaaccgtgaatagtgagactggatgagcggaggtgactgtacaggccctgctgcccgcgagctcctgcggctgcggcgaatgctcacgcgcttggtttaaaataatgcgagtttgttcttacatgcttggaggccaggattctgagacgagtcttgcggagctgatgctgggtgtggtagggctgctccgtcaggaggctccagggcaaagtccgttcctgcctcttgcagctctggaggccgcctgtgcccttggctccagctgcttcacgtccagctctgcttctgcaggcacacggccttctctccgtagtcagggctccctcggcttccctttgtgcagcctatgcggatattccaagatcatctcccatcttgaggtccttcgcttcatccacctgcagttcccaccactgcgagaggtgacacattcggggtgtagggcgtagggcgtgaccctttgagctatgatgtggccactgtggcagccctc

SEQ ID NO: 10348 - DNA, 401 bp, Homo sapiens
  chr16:89409913-89410314
  hypo
cgagcaaatgagacagagctcgaggtgggctggaggcatgtgagggtgcacgcgaaacacagtgcctcctcttggagttgccagaattcacctcgttcagaacctcaccccagtcagaaaacacaaggcagcaactggccggaacttggtcagtcacatccataaaccaccaattaccttcacagaccacgactaacaggtttattacagatgagtcacagctcatgttttcaaggaagggtctccaactgagcagtcaccagtgcagcctgcgtcagggcgcgcctccctccagcggtccccgcgtcgcccatgtctgacacagtttatgcttcgcaggcggtaaggctccgctcctcactcccatggaccaacagagtagggaaaacgaaggcacgttg

SEQ ID NO: 10349 - DNA, 70 bp, Homo sapiens
  chr16:89504482-89504552
  hypo
cgctggccaggagggcaccgcaagcttggacacagcaggggcactggagatgggtccacgaaccgcgtgc

SEQ ID NO: 10350 - DNA, 489 bp, Homo sapiens; identical to SEQ ID NO: 8079
  chr16:89900815-89901304
  hypo

SEQ ID NO: 10351 - DNA, 65 bp, Homo sapiens
  chr16:9005277-9005342
  hypo
cgagccacatgctgagtgacaagctctcaatccaacacggaattgtatatccagagtgtatggag

SEQ ID NO: 10352 - DNA, 174 bp, Homo sapiens; identical to SEQ ID NO: 6995
  chr17:10632714-10632888
  binary

SEQ ID NO: 10353 - DNA, 245 bp, Homo sapiens; identical to SEQ ID NO: 6996
  chr17:10633350-10633595
  binary

SEQ ID NO: 10354 - DNA, 142 bp, Homo sapiens
  chr17:1412249-1412391
  hypo
cgtggggcagagggcggggaacagtctgcagacccaggctcactcgtggcggtcagcgtggggcagagggcggggaacagtctgcagacccaggctcactcgtgggggtcagcgtggggcagagggcggggagcggtctgca

SEQ ID NO: 10355 - DNA, 84 bp, Homo sapiens
  chr17:1412463-1412547
  hypo
aggctcactcgtggtccaggatgtttgggatgtctcgcccctcacaattctgcatctccaggatccggtcaaagtgctccagcc

SEQ ID NO: 10356 - DNA, 71 bp, Homo sapiens
  chr17:27044882-27044953
  hyper
ctgtaacacgatccccggaaattcctggagaagggccgccccccgcccctctcctggcggctccaggcctc

SEQ ID NO: 10357 - DNA, 53 bp, Homo sapiens; identical to SEQ ID NO: 7010
  chr17:27940911-27940964
  hyper

SEQ ID NO: 10358 - DNA, 74 bp, Homo sapiens
  chr17:28088056-28088130
  hyper
cgcgctcgccctcgcttgattgtttgctccccaggatgctggggaaagcggctgctgaaagagcaaactttctg

SEQ ID NO: 10359 - DNA, 69 bp, Homo sapiens
  chr17:30846659-30846728
  hyper
ccgccgacagcccctcccagcccgcctgcccgccctccttccggctgtttttgtttgtctgtctttccc

SEQ ID NO: 10360 - DNA, 308 bp, Homo sapiens
  chr17:33700165-33700473
  hyper
cggttcctgctccgcgccccgcagaaaccgcggctggctggccaggggctcttccaacttccagcgggagcaggtgcacaggtcaggcccgccccgcccctaatgccttctacccccattacccacccccgccccgcccgccagtcctccatagtccgctttttagggaacctgctgagcaaactagctgggcccccggacaggggagaaaagcacagatacccccactccactccacccccagcccctccgcacccctccagcccctccccacaccccacaccctggctggggtggggtgggaaggg

SEQ ID NO: 10361 - DNA, 207 bp, Homo sapiens
  chr17:33701376-33701583
  hyper
accccggtaaccgtcacgctgctagtgatatgaaaaaaacctgccagcgttctgcttttctgccccgctgcagtctttagcacccgccaggattctgtccgagtgtttggattttgtaatcctcctgtctttggccaactccccatccttggcggagcgctcgcccttggccgggctccgtgctgccagccttgcggaaccctaggc

SEQ ID NO: 10362 - DNA, 168 bp, Homo sapiens
  chr17:33701612-33701780
  hyper
cactgatgcggagtggcccgagggtgggagcagcggttaatgccgcactgattaatacaggctccagtgaaagcgaaagtaagaaaataaaacggatttcattatacatatacaatgtgtgtatggatacatgtacatacatattacacttatgtgtatgttacgcac

SEQ ID NO: 10363 - DNA, 34 bp, Homo sapiens
  chr17:33775294-33775328
  hyper
cgcaacgggggaagcctccaggacgcacttggct

SEQ ID NO: 10364 - DNA, 717 bp, Homo sapiens
  chr17:33814248-33814965
  binary
cgcgcccggccgccctgcggctttttaaggcgctccccagcccacgcacgggcggaagttttgtcatctacagctttcaagtcctccattgctaagtctacaacagcctgcggttttgacagacattgctacagagacaggagccaactttcccagaagggagagaaagcagcctcgggtctccccgagatcggtggggttgctctggcagcgccccacctcgtcccggagcccacggaccaccccccccggacccccggaataagaaacggaggctggaaggtttggcagtggagcgggacgaatttatctgccagcaattccctggaaacaggattccttgcaggcgctgtgccagcgcgggcccttaagcaactgaaagttaaacgcccacgtgaatagctctgagggatcacggagaagttctcgtttcgtctgtacctatttgtattttctaaggcgaaaaaaaagttatttaaagaaaaagagaacgaacctggcgaggtccatgtctgcgcactcttcaccaagtagggggacctgagttcttttccactttcctgctctccgcgtccgtgtgcggctagcccctcgctcagctgcatttctatcgggcactcgactccccggaagtggtggcaccgcacgcgctgttatcgactctgcgcctttggaaacggtgtgtctgcgaatccaacgacgggcgcggtgactcac

SEQ ID NO: 10365 - DNA, 55 bp, Homo sapiens; identical to SEQ ID NO: 8095
  chr17:37365986-37366041
  hyper

SEQ ID NO: 10366 - DNA, 36 bp, Homo sapiens
  chr17:37794000-37794036
  hyper
cgttccctcaccccgcatttttgggttagtcaatgt

SEQ ID NO: 10367 - DNA, 137 bp, Homo sapiens
  chr17:4144975-4145112
  hypo
cggacctttgccctctgaattcctagacaggtaagtcaattcctgcttgattagcaatgctatcaccatgactcccgcactctttgctgaagataagcagtgaacgagagacacaaatcttgcctcgggcccggcac

SEQ ID NO: 10368 - DNA, 219 bp, Homo sapiens
  chr17:46124683-46124902
  binary
cgcatcagctgcgttaaaatcaccccagcaggcaggttatccggccgccactccagggtcattaaatcagactctccagtgggacctcggaattcgtagcttagcaagctccccaagtgatgctgggagtaaactaacgtttgagagtcacaaacatgttttggcaatataaccagatgggactggagaaattaaaaaatgagaaacatccctaaaaaa

SEQ ID NO: 10369 - DNA, 164 bp, Homo sapiens
  chr17:46125148-46125312
  binary
ttggggtaccggtttccgccgccagcacccaagatggcggcacgagcgtcgcaaccacaagaaccacatgcttcgtgtcccgcctcagcattctcgggtctcactagacttttgcaagtcactgtgggaaccctcaaggcgagggtgttccgcactctggcggc

SEQ ID NO: 10370 - DNA, 54 bp, Homo sapiens
  chr17:46620299-46620353
  hyper
cgctaattcagtaatacctgaattttagcaaaacacataagtctatgcgactga

SEQ ID NO: 10371 - DNA, 322 bp, Homo sapiens
  chr17:46621458-46621780
  hyper
ttgttcttcacccctcttcctccctagctctgaattcttcctcttctcctagagttggggcagaaaggaccgaatcttttctgcttctagggtctatcccagcaacaacatactcattcccctacacagatacgggtgaaaacctcaatcaaatcattttcttctagcagaaaaaaaggcgtttccccaaccagcttccaaaatcagccatagggagagaaagagagagagagacagaaaaaaaaaaagacgctgttagcggccaggcctgaaccccagtgggatattctacttccccatcccaggaatggagggggtaagg

SEQ ID NO: 10372 - DNA, 304 bp, Homo sapiens
  chr17:46755701-46756005
  hyper
caggagatgctcggggtcggggcccagggcagggaaaaccctcagctctggtcaaaagccaagtgagcgaaggaggcgatgcaacgtcaccctggtggccaaggcaggcacccaggtctcgaggttccaggagagggacgcgctgtgaccaccagccccctaggctcctgtctgctcgatgagcgtccactcgccagttccagccgcgagcgcccccagcactcccggagctgggccgggcgccgccttccctcgggcggccggcaggggtcagtgtttggccgcaggtgaacagacagcggcc

SEQ ID NO: 10373 - DNA, 120 bp, Homo sapiens
  chr17:48845008-48845128
  hypo
cgggtaacgctcacatttcatttaaccctccaatgacaaaagacgggcaaacagacggggcatcagggtgggcctcagcatcaaaaaactggagggagctggctgggtgcggtggctcac

SEQ ID NO: 10374 - DNA, 216 bp, Homo sapiens; identical to SEQ ID NO: 9255
  chr17:56327007-56327223
  binary

SEQ ID NO: 10375 - DNA, 787 bp, Homo sapiens
  chr17:56429059-56429846
  binary
cgttcccaattccgttttatctattcctttctctagtctactcagggtcaggcatcctttccgactactcactcagcagcggatccccacccgcctctgactcccagtgtctttcggctccaacgtaagttcaccgaacgtctaagagctgaggattcaaaggcatgtaagaccgcccctgccctcagctgcaagacctgtccgcgatcctacgaggtaaacgatggcctccttcggcttctcactccccctgccacctctgagttctgagacttaacttttctctttactgtcccacagccccattccgccctctttccccgaccttggtcccccatgggccctacaaccaggtccccgactgacaccttgaccagcgaacacagcaaacaggcccgcagatgccgcaggtccttcggcaccgtctccagggccatcttcgccgatgggaagaacaacagggagatagacgaccacagcctgtgcacccgcaggaagtaaatagctcgttacccagaatgcccaccacttccggcgcttagacttcctcttccggtgtgggcggacgccagctccgcccctacccccgccagaggagatggtttctcccgccagcaggcggggaggctgggcggccggccgccacctgggccggagcgcgtcgcagccacctgagcccgccgagggcgcggcggaggctgtgtggggtagtcagcgggcccccggggcgggggggcggctgcgcttgcgcgggagtgtgtcgggctgagccgcagcgccgagacgc

SEQ ID NO: 10376 - DNA, 48 bp, Homo sapiens; identical to SEQ ID NO: 7019
  chr17:57297129-57297177
  hypo

SEQ ID NO: 10377 - DNA, 112 bp, Homo sapiens; identical to SEQ ID NO: 7021
  chr17:61777761-61777873
  binary

SEQ ID NO: 10378 - DNA, 76 bp, Homo sapiens; identical to SEQ ID NO: 7022
  chr17:61778423-61778499
  binary

SEQ ID NO: 10379 - DNA, 220 bp, Homo sapiens
  chr17:63152527-63152747
  hypo
cgaggtcgcccatcctgccatggcttccttgttcctcctgcacaggtgaattccagctgctgtagaaacaacacagggagaagccctggtcctgcaacaacagcaccgataaaaaaaaattatttaacttcttggacggcaggcgtcccagggcttcctcgggacaaaggtggctgatgcgggaggctgagcagcctgccaggctgtcaacgtagaccgc

SEQ ID NO: 10380 - DNA, 241 bp, Homo sapiens
  chr17:71160878-71161119
  binary
agagggaaaatagcgcttgtccttgccatgagtcttgaggagaccgaaaacgcttaaccttttacgcccccgcaggcgggtcccctctctccccgctccccggctgtctgtaagctctgcctgcggccacccgcaggcgtttcagccggtctcacccctgtccttctgcaggacccgggaggaggggttgggggggcggagcgaagccgctgtgacgtagcgggaggggggcgtggggaaa

SEQ ID NO: 10381 - DNA, 77 bp, Homo sapiens
  chr17:72931833-72931910
  hyper
cgagcccccgggagggtaattaacgagggattaatgagatttccaaagtcaacagaaaaatcgatgggccgcggagc

SEQ ID NO: 10382 - DNA, 81 bp, Homo sapiens; identical to SEQ ID NO: 7025
  chr17:73584287-73584368
  binary

SEQ ID NO: 10383 - DNA, 170 bp, Homo sapiens; identical to SEQ ID NO: 7026
  chr17:73584951-73585121
  binary

SEQ ID NO: 10384 - DNA, 271 bp, Homo sapiens
  chr17:73607997-73608268
  hypo
cgagtgcctgccgcctgaggttcctgcccggcccagcctgactctcccagcagacattgacctgttccctttctccagcttcgtcgccatcggctttcaggtgggcgcccaggcctaagctcttcccgctggcctcaccgctctgagttagcacctgcctgacagatgctgcgtttttttccccgctgtcagctcttgccctccttcctccccagcctttggggctgtgagtagcgctgaattgctctgaaaataaccgttgaatgtaatt

SEQ ID NO: 10385 - DNA, 536 bp, Homo sapiens
  chr17:73612827-73613363
  hypo
cgcccgggccccgtgcctgtgcccgtgcagccatccaggtgggcccccacggggaggtggccagggctgtcccgctcctcggggaatcaccctatgaacttagtgacctcttgcttctcccacgaggcctcccaaagctttcctgaggaaaatcgaccccaaggacgaggctctggccaagctgggtatcaacggtgcccactcgtccccgccggtgagcaccccagcctgtctcccccagagtgtgtgctgctgcactggggagctcaaggctctctggggcgaacttggccttgtgctgtgactcagcccgtgtactttctccgtatccccccagatgctgtcccccagcccaggaaagggccccccgccagctgtggctcctcgacccaaggccccgctacagcttgggccctctagctccatcaaggaaaagcaggggccccttctggacctgtttggccagaagctgcctattgcccacacacccccacctccaccagcgccaccactgcctctgcccgaggacccaggga

SEQ ID NO: 10386 - DNA, 527 bp, Homo sapiens
  chr17:73613424-73613951
  hypo
ggcagaggcagggttcgcacagactctcggtgcccagggctgaaggcatttctgcgtggctgaggccagctgttcgggcttctggactttggagccatacgtagctggggagtcccagcttccgcgttcccacccagggcagggcctgggcatctttggggctgtcatcgagaggctgtcacacacagggtgttgtccctgacacatacccgacagctctgtgaggaagttagtggccctggctgacatggtcatagaagacccacgagcctcacggacgccagggaaagtttagggcccaaaatggaggcaggagatggtgccatggaaggagtaaggcagctggaggttgggagagccgggcccttggaaggctcgtggggatgaaggtcttccctcccgtgcccccatcactctggctctgcagcccctcactgaggctcctcaccccctcctctctgccaggcttgacacagcccgtggaggaccagggggtctccacccagctactcgcgccctctggcagc

SEQ ID NO: 10387 - DNA, 689 bp, Homo sapiens
  chr17:75213347-75214036
  hypo
cggtccggcctcagaagagctttagctcatgtgggagtgtttcacaggtgagtggtcgttcaagaagagctttagctcctgtgggattgtttcacaggtgagcggtccggcctcaggtcacagccgtatgtttgctgatgcagaagcgaacccagtgtttgtcctcgcttctgtaagaagacatgatgtggtttttcttaaacgcagccagatctaacatcactgtgatggggcgatccctgctgtgatgtttccgttgtgataaaaaggattgctttcatcaggcgcctccaagaaaataaaagaggcaggtgtggacctttagaagcctggattaccttatctccactcccctgccaatcagtgggtcttcggggggtcataaaccagtgggcagagcaggctgctggctcggtgaagctcagggcaggccagaaggcggctcagggcagcgtgccagggtgcagaagccagtgcctccctaactgggaaccgcaggatcattggcattcctagtagtccgtatctgtccttggtgggacacagccaaggggtctggctggcacctgggtgggaagcaggggagaccgagggtgccctgcacgtccatgctgggcctgggccgtcagtgtgtccacaggcagtcaggaccttagccgtgccaaaatctgatgatttagtcaacctgc

SEQ ID NO: 10388 - DNA, 512 bp, Homo sapiens
  chr17:76991011-76991523
  hypo
cggttttggaggcaaatgcaggaggaagcaggttcccagcgactgggctgtggaagccacactgtgggctggggcaggcgtctcttacctggcggctggatgccggcagcagcccgcagggcgttgtagttggacacccagttctcgtggtccacgctgcccttgtagcccaccaccttcacccactccgggttctcgttcaccacatcacccgtagtggtcgtccactccttgcccaggccgcccacgtacagacgctcgtccttcactgccagccattcggccttgaagcctggccaagcagagtgtccttaggccccgcacccagctcccgccgcacccctgcacctggctcccacccggccccgcacctgtccttagaccccgcacctgactcccgcccggctccacacctgcctcccctccggcccgcacctggctcccgcccagggccggccggctgccctcccctcagctcctgaaggttcagtgaccactctcaagtctcctct

SEQ ID NO: 10389 - DNA, 632 bp, Homo sapiens
  chr17:76992727-76993359
  hypo
cgtggtcttgagaacctttgaaggtgtaaaaagggcgtgttcccagaggctccgagagcagcagcggatacagccgaaaacatcttggagagattccccacgtctcccacaggcctctagcgataagctcttcctcctagaaactgctcagtgtgaagtgacagtaggctatgctcctggctaagggtaagggggccgcaggtcagagcaagagggagacgtgctccctcaccacatccctggcttctaggtgtgtgaattctttaccatgtgcctgtgtttgccagccaggccctgagctcccactccccacccacacctccataaaacctcagggtccagttacctttctccacggtgccgtcgccgtcggacagaatcacccagggcacggctttgctgccttcgatctggtagacgacccccgtccggtcatccacggagtagagtttcccattgaaaacaatcaggtcggatagctccatgcctctccccttctccgccaggtgggactccaggaccccatggtctttgtcccattccacggccaccttgtccccactgtctgacagggtcaggtagccctttttcaggtaactgaaccaggtgttttcctcttgggcccttgactc

SEQ ID NO: 10390 - DNA, 142 bp, Homo sapiens
  chr17:76993419-76993561
  hypo
gggagacagggggtaggtgtcattgtaccagttggcgggcgcctggccgagcctccagttgtgtgcattgtgggtggggggcctgccgggggccgggcggtgggagcagagcagccagaggatggcagcacccacaaagaac

SEQ ID NO: 10391 - DNA, 116 bp, Homo sapiens
  chr17:77070114-77070230
  hypo
cgcttaggggtagagcaactactactgttgggcacaggcgtggggctgtagaaagaaatccgtgtttcactggaaaactatgcatcctacataggacaccagcttccacatggccc

SEQ ID NO: 10392 - DNA, 377 bp, Homo sapiens
  chr17:77073688-77074065
  hypo
cgattaatcctataatagtttccattaattgctcaatgtttctgtcctcggaccagttagatattatgacaaggacaccaccaaaccaatcagcttttacttgtcttcgctggaggagctcttggcgtggaagccccgcttggaggatggctttaatgtggccctggagcccctggcgtgtcgccagccccctctgagcagccagaggccccggactttgttgtgtcatgacatgatgggcgggtacctggatgacaggtgaggacctggccttacattgatgttgcttacattgttctcctttgctggggtgggggctggaggggcgggagagagtgccatgtgtagaaagagcactgggcggggagtcaggagac

SEQ ID NO: 10393 - DNA, 375 bp, Homo sapiens
  chr17:77074650-77075025
  hypo
cgctgggctctggctttcatgcacagagatgttacatgccccacccaccccaggtgcagacgtcccatccaaagttgccgtggagtccgcgcggcgcttttaaatgtccataaaacaatcttggaccctgtgattgatgggaaggcttgagtcagagccaaccatcaaggtagagatagaagcaggtggtgaaaccttgggcgcagctcacagggctttcaaccccgaccttcgagttccgggagactctgttctgagggactgcctacccctccaaatagagtgggaagccagagacgggactttgacacgagacttcctgcttcccctcctttctctcccttgttcattggctcacagggggtagcagtgctc

SEQ ID NO: 10394 - DNA, 202 bp, Homo sapiens; identical to SEQ ID NO: 5763
  chr18:25756986-25757188
  binary

SEQ ID NO: 10395 - DNA, 238 bp, Homo sapiens; identical to SEQ ID NO: 8157
  chr18:2848166-2848404
  binary

SEQ ID NO: 10396 - DNA, 80 bp, Homo sapiens; identical to SEQ ID NO: 6007
  chr18:44335955-44336035
  hyper

SEQ ID NO: 10397 - DNA, 323 bp, Homo sapiens
  chr18:46287816-46288139
  hypo
cgagatcctgaacagcatgcggaacaacagcagcgacgtggacaccaagctcaccaccttcatggaggaggcccagaactccaccaactccgaggagatgctgggcgagatcgtgcgcacaatctaccagaaggctgtgtccgaccgcagcttcgccttcaccgctgccaagctctgcgacaagatggcgctctttatggtggaggggaccaagttccggagcctgctcctcaacatgctgcaggtaactggacgccggccaccaccgccccgcgccccctgcccctctgcgttcggtgagttattcctagcgagaaggctgc

SEQ ID NO: 10398 - DNA, 45 bp, Homo sapiens; identical to SEQ ID NO: 8160
  chr18:53446783-53446828
  hyper

SEQ ID NO: 10399 - DNA, 273 bp, Homo sapiens
  chr18:7567478-7567751
  binary
cgggtcccgggcaggggaaggggagaggcggcgagctcagcaaccggaaccgagggaagattttggctccgcgggctcgccctccgctccctctgccagcggcgccagacgccgagtggggccagggacaggggaggaggacccaggaccctgtgcccgcgcccctggagccgctggagttcggacttctgcaactgttggcactttgggggcttggcttagcgctctgctgtttacccgtctctcctcgctgcctcggaaccaaagctcccg

SEQ ID NO: 10400 - DNA, 70 bp, Homo sapiens
  chr18:7568821-7568891
  hyper
cccggcacgctgtcacaggggtttacaaccaggatgacctttattacctgggtgacacaggtggatagac

SEQ ID NO: 10401 - DNA, 229 bp, Homo sapiens; identical to SEQ ID NO: 8179
  chr19:1004547-1004776
  hypo

SEQ ID NO: 10402 - DNA, 279 bp, Homo sapiens; identical to SEQ ID NO: 7074
  chr19:1005441-1005720
  hypo

SEQ ID NO: 10403 - DNA, 215 bp, Homo sapiens
  chr19:10400761-10400976
  binary
ctctgggctgctctgggcctggggctcttcggcctctcaggtaagagccccgctctggttcggggtggacagggcgggggcggagtccctggacctgagaaacggcctcctgtccctcccagctctgccctcgcctcgctcccacgcctctgcccccacctcgagcctgagtcttctccccttccccctcctccccaacacacacccgagcccca

SEQ ID NO: 10404 - DNA, 631 bp, Homo sapiens; identical to SEQ ID NO: 9301
  chr19:10530654-10531285
  binary

SEQ ID NO: 10405 - DNA, 328 bp, Homo sapiens
  chr19:10823276-10823604
  hypo
cgactgcgtcttccccacacggacagcggtgaggctctggcagaaggaggtcagggcgggagacgggtgggggactagggaggcaaggttaggggtggggggtggggagaatgaagccctgggtgacgcccctttccctgcccttcctctcccacagcgctttggctctgccctggtgcccactgggaacctgcagttgaggaagaaggtgtttgagaaggacttcggccccatagacccggagtgcacctgccccacgtgccaaaagtaggcaggatggcactgggagctggggcagggcatggaggggacagggcctggccgtgct

SEQ ID NO: 10406 - DNA, 46 bp, Homo sapiens
  chr19:10823633-10823679
  hypo
gccgcgccttcctgcacgcactgctgcacagtgacaacacggccgc

SEQ ID NO: 10407 - DNA, 192 bp, Homo sapiens
  chr19:10823721-10823913
  hypo
ccagtgcccggggcaaggtgggcgggggtgtcctaggtgcgtatgccccacgctgacctcccctccccgcagctgcagctcatgagcgccgtccgcaccagcatcgtggagaagcgcttcccggacttcgtgcgggacttcatgggcgccatgtacggggatcccaccctctgtcccacctgggccactgac

SEQ ID NO: 10408 - DNA, 123 bp, Homo sapiens
  chr19:10872413-10872536
  hypo
cgccagctctcagcttggcctcccaagactcctcactttcgtcctctggccccgcccaacctggcaagaaggcgtgtctccagtgagagacagcagccgatgggcccaccacctcttctttat

SEQ ID NO: 10409 - DNA, 189 bp, Homo sapiens
  chr19:11593453-11593642
  binary
actggtgaggaaccggcggggccaatctgcgcgtggcgccacagggctcccccgggcacgtgcctgagctcgcggctgcggtccccagggtcacgtggctgcggccaccagggcctacgcgcctcgcacgccacctagcggccgcgcctcgctccccgcccctctctctagcggcccgcaggaggcggc

SEQ ID NO: 10410 - DNA, 121 bp, Homo sapiens
  chr19:1449921-1450042
  hyper
cggggcacccccttccctcgggggggtttcgccccccgcactcacggcccctgagcccgcgcggaggcccgacgccccgcggccgacgccggtccccgccccgggccgccattggctgttg

SEQ ID NO: 10411 - DNA, 121 bp, Homo sapiens; identical to SEQ ID NO: 10410
  chr19:1449921-1450042
  hypo

SEQ ID NO: 10412 - DNA, 376 bp, Homo sapiens; identical to SEQ ID NO: 7082
  chr19:17172577-17172953
  hypo

SEQ ID NO: 10413 - DNA, 106 bp, Homo sapiens
  chr19:17392397-17392503
  hyper
cgtagctccacccactcgagccgggtgccttcgcgtttcccgtttttaaatgagatagtggcacacccggtggcatcctcccacccgggctcttatcggcggtccc

SEQ ID NO: 10414 - DNA, 106 bp, Homo sapiens; identical to SEQ ID NO: 10413
  chr19:17392397-17392503
  hypo

SEQ ID NO: 10415 - DNA, 287 bp, Homo sapiens
  chr19:1753216-1753503
  hyper
cgcgaaatcggagactctgggtcgaggcccccagccccacctgggcagagtctgtcctcggacccccgcccgctgtcccccgggtacggcctgccccagcgggcgcgggcgggcgcagtggccagggacgccgaagccccaagtctggccgacttcggcctgcttggtgctcgagtggggccggggcgggcggagagcgaggctgcgggaggcagcggtggcaggagcgggtgggcgggggcgctgacgtcagacccgggcccgggcgccggcggccgctcccctgc

SEQ ID NO: 10416 - DNA, 197 bp, Homo sapiens
  chr19:1754950-1755147
  binary
aagccccgcccgtgcgccccggcagcccgggaccccctatcaggaagctagaccgcgatccgcgccgctgcccgtttgtaccgttgccaaaagggagaaagggattgtgccgcctccccgccccccggtcgccgcttctgcccctttcgggagcgcgtaggggttctctagtccttgttagactgctgggaggctcc

SEQ ID NO: 10417 - DNA, 111 bp, Homo sapiens
  chr19:1757112-1757223
  hyper
cgcaggcgagaagtcccatggggggggggtgggctccccgcagccgggtcagcagcacccagcacccgccctgagtggacaccgcctgcttcgcctgcacctgaccctgca

SEQ ID NO: 10418 - DNA, 166 bp, Homo sapiens
  chr19:1758062-1758228
  hyper
tcctgccgggcgccggggccaggacagagacggggacagggagggagaaagacccgcaggtgcagacggagagggagggggagacggggagatggagagagagggaggggtcgcgagacaaaaccagagagtggggagggagagaccgggagcgggagaaacagac

SEQ ID NO: 10419 - DNA, 354 bp, Homo sapiens; identical to SEQ ID NO: 7086
  chr19:18117804-18118158
  binary

SEQ ID NO: 10420 - DNA, 262 bp, Homo sapiens
  chr19:1969650-1969912
  hypo
cgcccgcccaccggccgcagtgatgttctagccacagaggagccaagacctcaggtttccagagacttgggatttgcacggcagcagagtcaccgtggagaggccagggtatcacaaacttatggattttgacaagaaaggagggaaaggggagacggaggagggccggagaatgtccaaggccggcgggggccggagcagccacggcatccggagctcggggaccagctcgggggtcctgatggtgggccccaacttccgc

SEQ ID NO: 10421 - DNA, 320 bp, Homo sapiens
  chr19:1970106-1970426
  hypo
ccgtcgtggtgcgagtgccacttcccttcgaggaggttctgtggggagagtgggtttctggccctgtcaccttttcgggaaacagttctgttgggaggcaggtggcccagagcaggccaggccacgccgcaaggagcccgatgttaagttgtgaatgactttcatggcccatgtgcacgctgggcgaagccccggctttaacggcaggtgcctgcccggcactcagctcgtgggaggtcttggccagcccggagctggcgtcaggtggctggagtgactgttctgtggtgatgatactgctgtgtgccactcccagcttc

SEQ ID NO: 10422 - DNA, 72 bp, Homo sapiens; identical to SEQ ID NO: 7099
  chr19:3219654-3219726
  hypo

SEQ ID NO: 10423 - DNA, 159 bp, Homo sapiens
  chr19:36822892-36823051
  hyper
ctgccgcgccaaatcaaaatttacaatcacccttggtgctgtttcctgcactttcttggagatttgcaccaggcgctggagaccctcccacctggcccatgcctgccacccggtgaacaccaagacccaaccttctgcaccaccagtcttgttgtcagc

SEQ ID NO: 10424 - DNA, 32 bp, Homo sapiens
  chr19:37095634-37095666
  hyper
cgctgtcacaggatcactgataacagcatgac

SEQ ID NO: 10425 - DNA, 105 bp, Homo sapiens; identical to SEQ ID NO: 6042
  chr19:37096594-37096699
  hyper

SEQ ID NO: 10426 - DNA, 42 bp, Homo sapiens; identical to SEQ ID NO: 6045
  chr19:37463952-37463994
  hyper

SEQ ID NO: 10427 - DNA, 47 bp, Homo sapiens
  chr19:3785511-3785558
  binary
cgaccgctagtggctgggaagtgggcggtgctggggggtgagtctcg

SEQ ID NO: 10428 - DNA, 193 bp, Homo sapiens
  chr19:39151314-39151507
  hypo
cgcgagccaccatgcccgacccatggactcacttgtataatcttgtgaagcaggtgttgttacccttacatgcagaaatggatccatgggcctttaagccacttgcccctgtgacagtgccaggatttgaatgtagaagttgaggctttcaagtttatgctgttatttctacactacactgaagtctagtgat

SEQ ID NO: 10429 - DNA, 244 bp, Homo sapiens
  chr19:39151540-39151784
  hypo
ggagtgtgcagtgcaggtacttcagatggagaggaaggtctcaaagaggtggcatttcagctgttccttaacggatgagaaagagagaaccaagagagcaccagaggaacgcgcttccaacagagaaaaccaagcaagggggcccccgaggagcagaaaggcccgagtggtcagagcggagcccgtggaagagatgggcacagccagattgcttagagctgtgttgttagaagtgctgatgagt

SEQ ID NO: 10430 - DNA, 74 bp, Homo sapiens
  chr19:39305794-39305868
  hypo
cgaacgccaccctcaaccccagggcaggcagggagaccaggaagccttgcaacccagagggaccccagcgactt

SEQ ID NO: 10431 - DNA, 193 bp, Homo sapiens
  chr19:39306241-39306434
  hypo
cgcgagggctctcagagcttggagaaggtgacggttttcagttccttgttctcagtcgtggcctggaccgacttcacgaggtcttgggtctgcagcatgctcatgttccaggacgcctggtaccgagggtgttgagagagaacgaggagagagattagcaggggccaatcaggataaagcatgagagcaccct

SEQ ID NO: 10432 - DNA, 100 bp, Homo sapiens
  chr19:39306545-39306645
  hypo
ttgaccttggtgctctgcaccgccacggggctcttgctggaaatctcggccgccagcgctaaggcagcatccagcatgacctctttgtctgggaacaccc

SEQ ID NO: 10433 - DNA, 418 bp, Homo sapiens
  chr19:3966086-3966504
  hypo
cgcattttaaagaaaccaaggctgagaaaaggaaagcaactagcccaaggtcatgcagtcagtcagtggcgggaggattcaaaccttcaaaccaggtgctgcaggctccagagcccaggtgctctaacaggaagcagacagctgctgctgggtaccgggttcctgcgtgcctacctcccggctccacgctgtctcctgctaacagacccagctgtcccagggcagcctttgccgctcactctcagtctgtgggactcagtggcccaggaaaggggtggaaggggacacgactggacctgggcaagcagaaaaccacgccttccagcccaaagagaccggtccagtccacagggctctgaacgcctgctgggaagagaggatctctctctccctctgctgggcttggatccaggctcgc

SEQ ID NO: 10434 - DNA, 100 bp, Homo sapiens
  chr19:3966587-3966687
  hypo
cgggtggcacataagccccgtcattcactctgccagggcgcctcctccatgctggagtggacttcggccccggggacacagggcaccatatgcaccagca

SEQ ID NO: 10435 - DNA, 183 bp, Homo sapiens
  chr19:3966755-3966938
  hypo
tgctattgccaaccagatttcaggttctgccactgagtcctcctacagcaacagcagaccacagccgcccacctccagacagcccccggtctcactggccacagacttgctccttagaggcaaggccactggcaggctctcagttcctctacggaatgtgaaacgtgcctcatctccccagcc

SEQ ID NO: 10436 - DNA, 53 bp, Homo sapiens
  chr19:407832-407885
  hypo
ccacctgggccagagccccgtgctcactgtggaacagagactccttgcgcctc

SEQ ID NO: 10437 - DNA, 58 bp, Homo sapiens
  chr19:41119120-41119178
  hyper
cgccagagagtctgggagtagggcctgggttccagggcaaagccggctggaaaggtgg

SEQ ID NO: 10438 - DNA, 68 bp, Homo sapiens
  chr19:41119735-41119803
  hyper
agagccgaggggcggtggaggggtgtggcctagaatgttaggcggagcgggaggtgggccgggccttc

SEQ ID NO: 10439 - DNA, 157 bp, Homo sapiens
  chr19:42408960-42409117
  hypo
agcagacagtgagtggtgagttgagccatgggagccctgagagcgccaccactgtgggtgacttctccagcttgtgcttagggaggggcaggcactggggggacctgggctctgagccccatctccccctctccctgcagatcacaaagccttctac

SEQ ID NO: 10440 - DNA, 89 bp, Homo sapiens
  chr19:42460873-42460962
  hypo
cgggatccctccccgggcttgtgatgggacggcgctgtgggcccgagcagcagagccgtgcaggacaggcatgggcaggggtggggcag

SEQ ID NO: 10441 - DNA, 264 bp, Homo sapiens
  chr19:42461113-42461377
  hypo
acactcctgcacctggctcccaccatccaccccagctgctcagaccctgtactcacccagcacccagaagacggccgagcccgcaccagccagccagaagaaggggaaggagatgcctccagccagagcatactgatgcgctgggctcacctctcggcctgggggcagatggcattggggtgctgttccgactctccatgccctctcccagagtaacccctgctgccccccaacaatccgtacaagctccaggttctcgggatc

SEQ ID NO: 10442 - DNA, 118 bp, Homo sapiens
  chr19:45656461-45656579
  hyper
gatcttcttgcgctggcttacgaacaggtgcttgcccaccgagtacacggccatgagcagccccgagcccgacagtgtggtggccgcgccgccaaacaccttgagcaggctgccgctc

SEQ ID NO: 10443 - DNA, 118 bp, Homo sapiens
  chr19:47593053-47593171
  hypo
cgggtgatctctccggtctcctgtgccatgcacatgcagagcctggcccttctttgtacacttatcccaaccctaagtgaccaaacttgaggttctgtgagaccaggccaccggggtt

SEQ ID NO: 10444 - DNA, 113 bp, Homo sapiens
  chr19:47593246-47593359
  hypo
ttggcacgccggtactggttcagctctttggtgaagtcgtcatagtcctccttgcccatgtcctcctcctcgtcgccctcatattccccatactgctcattctcgtagtcctc

SEQ ID NO: 10445 - DNA, 345 bp, Homo sapiens; identical to SEQ ID NO: 7123
  chr19:48150921-48151266
  hypo

SEQ ID NO: 10446 - DNA, 66 bp, Homo sapiens
  chr19:491540-491606
  hypo
gagcctggagatgcccccgggagcaccaaggcgtcagagcagctgaccagggccccaggcctcgcc

SEQ ID NO: 10447 - DNA, 142 bp, Homo sapiens
  chr19:49242393-49242535
  binary
cgcccgccgccgcgggccggcccagagcgtcgcacaaagcgaaggcgtccacgcagctgctctcgccggggccaccgccggggctgcctgctaggccgtagcgctctagcgcctcggccacgagctcgcgcgccgtggagcg

SEQ ID NO: 10448 - DNA, 36 bp, Homo sapiens
  chr19:49242773-49242809
  binary
atgcgcttggcgcggctaccggaggctcccccggcc

SEQ ID NO: 10449 - DNA, 333 bp, Homo sapiens
  chr19:50316721-50317054
  hyper
atcctgtaggctttgatgatttacattctaaacggaaaaaacagctgtgcccggatcaaagattgcgatggtcccaaagcattgcctagcaaccacattccctgtaggtttccagtatatagtagtaaacaatgtgccctactcaaagatggcgaccgtggcggggcgttgccaagcaaccaccattcagcctgatatccattccaaggctgtaaacagctgtgccctgctcaaagatggcggcacgtcgaagtccgagcaccctccttggggcgaaatcgagaaaaacaccatctcccctacaaccttcgagggtggttgagtccagcgatc

SEQ ID NO: 10450 - DNA, 381 bp, Homo sapiens
  chr19:50816051-50816432
  hyper
aagaagttgaaccctttggcaatataatcagtccccaccccgtaccctggtgtctggagcccctagccctttgccccgcccccaccaaaacccgccccacccctcacccctgcttcaccagggtttagggtccgagggaaggatgggggggactcaaaatgccccttgcataggaatcgttgcatcgagaatcgtgctcagtgacgccccccatccaccctcgggtggggggttcctgaggccgtgggagcagagggagggaggtggctaattccgtgggaccccggctccaaaaggggggtccgctaaagagtctgggaccggtgtggtctctgggcttgggggaggtagcgcatccttgagccaggataggaggtggga

SEQ ID NO: 10451 - DNA, 71 bp, Homo sapiens
  chr19:51161615-51161686
  hyper
cggggcgacagtggagtgacagcttgggggggcggggccaggagggactagataagagcgagattggtgca

SEQ ID NO: 10452 - DNA, 302 bp, Homo sapiens
  chr19:5293673-5293975
  hyper
gttcccctcccagtctgggtgggaccggaggcacggtgatgggggcggggggcgtcccctcttccccctcttagaccagagggtaggggagaggtgcgggcgcagaggcttccctcccgctgggggtccaggggaatgaatggggggacaccgtggcagaggcccccaccctcgccacaagcctgaggagggggcggagagcacagggccagattggaaacagatggggccgccgtgccaggcccgcgacaccggagcagagggagaggaggagggagagggaggggcagacctgtccgggc

SEQ ID NO: 10453 - DNA, 42 bp, Homo sapiens
  chr19:56015143-56015185
  hyper
cgctcccgcaggagagtctcgccgcaagcgtcctttcccgcc

SEQ ID NO: 10454 - DNA, 95 bp, Homo sapiens
  chr19:56015237-56015332
  hyper
tggagggacgggatggggcaggcgttcatctgcctcgcacctcgtgacgtcacaggcgcgctgcgcctcctgattggccagccggcgcatcgccc

SEQ ID NO: 10455 - DNA, 412 bp, Homo sapiens
  chr19:56199006-56199418
  hypo
cgctggcctcacctgtgccccacgctgcccttccatctgcccatcccctcagaaggccgcttacccacccaagtccgtcaatccctgctggttctctcgtcctttcctcactcataaccccagatggtcacccttcggccccgctctgccacccacatgctccctggagcatcccatgcacccagccctgctgggcacaccacacgggggccagcctgggggcccctggacccggtgcaggtggggccgccagacagctgcctgctgcggctccgggcaaggggagccagggcctgctcgtcagggagaggcctgggcctggggagtgggttgggtggggacacaagtacaggacacaggtgcaaggcggcgtcttggagctggagcagacagaacttgctgaccagtgcac

SEQ ID NO: 10456 - DNA, 133 bp, Homo sapiens
  chr19:56199619-56199752
  hypo
gatgctgcagtggaggccggggatatctcagcagcctcctggagggtccggccctgccttcctgtgtcctctctctcccttcccctcctgctcttggaaccaagggctcctcgctagcccactccctaacccc

SEQ ID NO: 10457 - DNA, 214 bp, Homo sapiens
  chr19:56200283-56200497
  hypo
cgtggccgcagagcagcggggaggaggagctgcagctccagctggccctggccatgagcaaggaggaggccgaccaggtactgggcgtgcagctggggctgtctgtccgccacccgcctccacgcctcacttcaggctccctcccagccaggcgtgggcctggccctcactgtcgctgctccacatgctgtcactcgtctcctccccagtcctg

SEQ ID NO: 10458 - DNA, 93 bp, Homo sapiens
  chr19:56200596-56200689
  hypo
ctggctctgcctctgactctgcctctggcccctcccgtcatgcccctcacactctctctcccccagcccccgtcctgcggccccgaggacgac

SEQ ID NO: 10459 - DNA, 207 bp, Homo sapiens
  chr19:57683360-57683567
  hyper
cgggggccgcgggccgcgaggggggcgggggccgcgagggggcggggcgtgcgagggggcgggggcgtgcgagggggcgggggcgcgcgagggggcggggcgcgcgagggggcggggcgcgcgagggggcggggcgcgcgagggggcggggcgcgcgagggggcggggcgcgcgagggggcggggcgcgcgagggggcggggcgcgc

SEQ ID NO: 10460 - DNA, 103 bp, Homo sapiens
  chr19:57683899-57684002
  hyper
gctgtaaactaaaaatcaaattctaagctcccagccaactgaatggacccctcctctcagctaagagcatggcaaacttaaccggaaacactagttcggccgc

SEQ ID NO: 10461 - DNA, 57 bp, Homo sapiens; identical to SEQ ID NO: 6068
  chr19:57702696-57702753
  hyper

SEQ ID NO: 10462 - DNA, 39 bp, Homo sapiens; identical to SEQ ID NO: 6069
  chr19:57703385-57703424
  hyper

SEQ ID NO: 10463 - DNA, 86 bp, Homo sapiens; identical to SEQ ID NO: 9427
  chr19:57751590-57751676
  hyper

SEQ ID NO: 10464 - DNA, 373 bp, Homo sapiens; identical to SEQ ID NO: 9428
  chr19:57751755-57752128
  hyper

SEQ ID NO: 10465 - DNA, 71 bp, Homo sapiens; identical to SEQ ID NO: 6070
  chr19:57831543-57831614
  hyper

SEQ ID NO: 10466 - DNA, 461 bp, Homo sapiens; identical to SEQ ID NO: 6071
  chr19:57874412-57874873
  hyper

SEQ ID NO: 10467 - DNA, 218 bp, Homo sapiens; identical to SEQ ID NO: 6072
  chr19:57875005-57875223
  hyper

SEQ ID NO: 10468 - DNA, 43 bp, Homo sapiens; identical to SEQ ID NO: 6073
  chr19:57875252-57875295
  hyper

SEQ ID NO: 10469 - DNA, 38 bp, Homo sapiens; identical to SEQ ID NO: 9438
  chr19:58094924-58094962
  hyper

SEQ ID NO: 10470 - DNA, 31 bp, Homo sapiens; identical to SEQ ID NO: 5786
  chr19:58125385-58125416
  binary

SEQ ID NO: 10471 - DNA, 311 bp, Homo sapiens
  chr19:5938115-5938426
  hypo
cggggccatcaactcaatgctgagagttataagaacccacctcttcccttgacacggacatcacgccagcagctaacttatctcacaatgcttttgaagtcggcaatgaatttatatatggtaggttgggttacagaattcaggttgttaaactcgcttgttaaatcttttatgaggaatttcagccacgtgggagaaactttcaggaaaccttggagttggttctccagtgaaagaccaaaaaggcaggctccatattcttcagaaagggggagcggctttccttaaaattttaaagctgggggccagac

SEQ ID NO: 10472 - DNA, 66 bp, Homo sapiens
  chr19:6590260-6590326
  hyper
cggcgcgcactggtgattttatttcattttatttttttttactcttaagacttcttaaagaggaag

SEQ ID NO: 10473 - DNA, 323 bp, Homo sapiens
  chr19:6590881-6591204
  binary
agcctgtgcgaagcgctggatgcacaccacgaggcagatcaccaagcccgcgaccaatgggaccaaagcagcccgcaggacgcacccatagggcctgcgccgcaccgagcagcccgaaccctcctccggcatcgccgcggcgatcacctccgctagcgcaggaggggcgatgggggcgcggagcgctgccgagaaggaaggaaggaaactgcagccccctcccggggctcctgggcgtctacttgcttcaacctgtcaggggaccagcctgcccctctctggggatgtccggccggtcgaggggagggacttgagcaattggc

SEQ ID NO: 10474 - DNA, 250 bp, Homo sapiens
  chr19:7493749-7493999
  hypo
cgtgccgcaatgggctgagcacgtagatctgatgtgacaccagtgcctggagatgaacagcacctgacccttgctcccagggaggtcaaggtgcagcgaggctgtgcaataaagtcgggagtgtggtgagctgtaaaggaagcccgcaggcctaggccacgggcccgagggcaggggcacgccatgcagaaggactctgacccggccccacagctggccagataagagagacgccttgagtcgaggggcc

SEQ ID NO: 10475 - DNA, 685 bp, Homo sapiens
  chr19:8274278-8274963
  binary
cgggcggcgcgtgtctgcagctgctccgggtagcccgctaggcgcgccgtccccagccccgccgccggccctcggtgcgcccggccgcctgcacccccaggtaagcgagcaccccgcgccgcgaacaccgccccgaacgccaccctcacggcggtccccggccccgcctccgcggccatggcggccccagcccggcccccactcgcagctgggctccagcccccatcaccccgccggggactgtccccctcggggcttcccatcatggccgtctccccgagctatccgcgctcccccacgagggccggggcgcaacgggtgcccgaggacgcggctgtgaaacgggctggagcgagtaggggcgatcctggcctcgtgacgcgggggaatccggatgtgtgagccgggggagcgccccgtttccccgacgtgccagggctggggacgcagctggggccctggcctcggagtccgcagcccggccgcgtagacggcttctgagaaccgcttaaacacgtcattccaagcccgagctaacccatcaggcggccggggtgaggtggaggtgcccaggcggggataatgtcatttggcctggttggaccagccagcgagggctttttaggcccagggcctagccgggagtgtgtgcggagcagaaaagaggccagcctggctgaaacgc

SEQ ID NO: 10476 - DNA, 147 bp, Homo sapiens; identical to SEQ ID NO: 9457
  chr2:101033445-101033592
  binary

SEQ ID NO: 10477 - DNA, 91 bp, Homo sapiens; identical to SEQ ID NO: 7162
  chr2:10152958-10153049
  hypo

SEQ ID NO: 10478 - DNA, 166 bp, Homo sapiens
  chr2:10155780-10155946
  hypo
cgtatgggcgagtcaggtgggcagacgtgcatatgggtgtgcatatgggtgattcaggtggacaggcgtgcgtatgggcggctcacgtggacaggcgtgcgtgtcagcgtgtcacgtggacaggcgtgtgtgtgggcgggtcaggtgggcaggcgtgtgtatgggc

SEQ ID NO: 10479 - DNA, 63 bp, Homo sapiens; identical to SEQ ID NO: 7165
  chr2:10156251-10156314
  hypo

SEQ ID NO: 10480 - DNA, 45 bp, Homo sapiens
  chr2:106959115-106959160
  hypo
cgcttcacgtgctccaggcagagacgagctcaagagcctctggtc

SEQ ID NO: 10481 - DNA, 60 bp, Homo sapiens
  chr2:106959841-106959901
  hypo
cgtggtccccacggaagcggtgagaacgcacctggccggctcagccacacggcacggtgg

SEQ ID NO: 10482 - DNA, 200 bp, Homo sapiens
  chr2:10742503-10742703
  hypo
cgactgtcgaccatttcccatgatccaaacagagcctaagatacggccaaaggtcagtaaggaatagggattagcaaagcccggatactccaaaaatggaaaacccatttaaaaatgctatcaggtttctagtggaggtgacaatatcaatcattctagcattatgtcccacagtacaattaccgcagaggtcataatgc

SEQ ID NO: 10483 - DNA, 66 bp, Homo sapiens
  chr2:109647974-109648040
  binary
cggctctgcccgcctcgccgggctgcaccgagtccgcgggtctctagcgcacggcctggccccacg

SEQ ID NO: 10484 - DNA, 71 bp, Homo sapiens
  chr2:109648464-109648535
  hyper
aagttcttggtgttcaaaccccctacggttacgtaaacagaactctgcagttatcttctttccctttcttc

SEQ ID NO: 10485 - DNA, 225 bp, Homo sapiens
  chr2:120281422-120281647
  hyper
cgggcggctccagaatttccgtgtaggagagtttcagaagccagaccagaggaaggggtcggtggtgggcacagggattcatcttagagccgccttcgtctggcgcgcacgatgtttttctttgggaaagggtccctccggagaagagctgggagagattaatgttgggaggattgggagggaagagtccctattcctcatgggaagatctgctagtccctctcc

SEQ ID NO: 10486 - DNA, 119 bp, Homo sapiens
  chr2:120754234-120754353
  hypo
cggagggacggtccaaaaaggaacacgaggaatcttttggcagtgacactgttctgttttgatcatggtggttttatgggaatataaaactatcaaaagtaactcaattggccgggtgc

SEQ ID NO: 10487 - DNA, 382 bp, Homo sapiens
  chr2:127413347-127413729
  binary
cgcccagctatccagcggccgcgcagccagccaagatttcaacacaggtctgccctatttggtcaccatccccgacagtgctgggccaggccatcatgtcacattggggagttttccctgcactccagggggaattctcaaccacaacctctgtatccggtagtggcagatggaaagagaaacggttagaaaagcgtggttcttgcgcaggaaagttggagcaaagaagagttcagaagtgggcgggtgtgtgtttaaaaaaaaaaaagggggtggaaaccccaccagccaagtctgcagaaaaaaaataaatgaagtctgcctatctccgggccagagcccctcccctcggcccgcgcgggaggagtgtgacccaggtgcc

SEQ ID NO: 10488 - DNA, 255 bp, Homo sapiens
  chr2:127414108-127414363
  binary
gcagcctccacgcgctccgagctggagaagccgccagcccgccctcccagggcgtgtcgcccgctttctgtttctttgtgcggggcatgtgaaatgtgtggggccagaattgtctccctaaagaacagttaggtgagagttcacatcacaagttgcttctgtgctgctccccagccagggtccgaccggccaggctccggtgaactccaggcaactccagccttgcccagggacttgctcgctccgctgggcgcc

SEQ ID NO: 10489 - DNA, 71 bp, Homo sapiens
  chr2:12856411-12856482
  hyper
cgggggcaagcggtgacaccaactaaaaggaagcaatggatttccttttaaatggagaggaggatgtcgga

SEQ ID NO: 10490 - DNA, 849 bp, Homo sapiens
  chr2:12856549-12857398
  hyper
cagagctcctcattcagggccacatctgagcctgggggcccaatgctcagagcgtgcctggctttctggggaaaagcgccaggaacatgaacgagctacgaagagctggagcgggcgctgcgggagcagcgtgtggggaacggctcgggagtcgctgctggtaaccccggcccagccgcccgcagctgggctcgcagccggctcgcagccgacacccagggtgctgcgcccggggccccgggccgcggaaggatatttcactttgtttacctccccggccgggcgagggagctgcgaggccggtgctggcgcccccggcacggagctgcaatggcagcggcgcggggagccgcccgaggactggcagcggcggggctgattgatgggcgcccggcgcaatgaggggggcccgggcgggggcggggcggggccggctctgggctgagccagtcgcgggggcggcggggggggggcggaggctccgtggaaatgtgtcggtgacattgaatggggagaccgagcgcgagcgaggcgcgcgcgcgcacacgcgcactcacggccccgctcgctccgagatccccggccacgtaagtaactattaataccgcctcgccgggggatgcgggcgtgctgagcgcggggattggcctcgggcaccgtcggccgtcccctttaatttttaaatacacggtcccctcttttctctggggggggcaagcaagaaatcaaagaaggaggagacaagccgtcaattttctccaaaacaaaccccaccgggcaatttggtctcggggtagggggagacggggtgattgcaaattattccaggacgagatccagttctccagc

SEQ ID NO: 10491 - DNA, 185 bp, Homo sapiens
  chr2:12857960-12858145
  binary
cgcgttgggactgagtcgccgccgtgagctccccgaagactgcacaaactaccgcgggctcctccgccccgtctgcgattcggaagccggcctgggggtcgcgtcgggagccctggcgctgcagctccgcaccttagcagcccgggtactcatccagatccacgccggggacacacacacagagt

SEQ ID NO: 10492 - DNA, 354 bp, Homo sapiens; identical to SEQ ID NO: 5791
  chr2:135476396-135476750
  binary

SEQ ID NO: 10493 - DNA, 35 bp, Homo sapiens; identical to SEQ ID NO: 6088
  chr2:145275891-145275926
  hyper

SEQ ID NO: 10494 - DNA, 51 bp, Homo sapiens; identical to SEQ ID NO: 6089
  chr2:149632592-149632643
  binary

SEQ ID NO: 10495 - DNA, 238 bp, Homo sapiens
  chr2:149634146-149634384
  hyper
cccctccctctctatctcccttccccaccttttctcccccaccccctccccctacttagctccctctctgcagctggggctgctggtagggggagggaacaccaatggattgtagttcttaaaggaatctgtcagatgaaacaaaccagctcggtcccccgccccttccccgcccgctgtccgtagcgtgtgtggctgatggtgccccctttgtatgcgagccgcgtggggagggacc

SEQ ID NO: 10496 - DNA, 170 bp, Homo sapiens
  chr2:152295736-152295906
  hypo
cgggatggaagaaagtctgaataggagtggactcatgccgtccaaacccgtgtcgttcaagggtcaactgtacttagtattgttgatttagaaaaaataaatttttacagctctctgtatagtcatctctaaaattacatgcttagaaatacacccttctagccgggcgc

SEQ ID NO: 10497 - DNA, 127 bp, Homo sapiens
  chr2:170569589-170569716
  hypo
cgtggtacctgcgatgggggcaccacgtgttctcccattagccagccccacccatcatagacactacgagtcagccagggggcaggcttgccatgggttttgcgacaccccctgtccaaagcctgcc

SEQ ID NO: 10498 - DNA, 76 bp, Homo sapiens
  chr2:175546713-175546789
  hyper
cgactgggtcagctgctttcccttacactcacaacgctaacagttctttctttaaaaagaaaagtatgtatagtag

SEQ ID NO: 10499 - DNA, 34 bp, Homo sapiens; identical to SEQ ID NO: 6099
  chr2:182323095-182323129
  hyper

SEQ ID NO: 10500 - DNA, 132 bp, Homo sapiens
  chr2:201828586-201828718
  hyper
cgtttccggggaagggaaaaggaagtgttgtttggatctgaggaagtttgcacagtagctggctgagtggtagctgtttgtcttgtagcaatctttaaaaagtgttctttggggtcgggcgcagtgtctcac

SEQ ID NO: 10501 - DNA, 237 bp, Homo sapiens
  chr2:225906168-225906405
  binary
gttggtatggataggatcctagcatcagatgctggctgctgccccagggacttcccgcggaaatcacccagcacttagaagccgtttcaataaggaagtaaccagtaaagcattgctggtgggagaaccccgcgaaacatcttagaaaaatatcagaaaccgctggagacctaatgacccacgtctcctccagcctgtgttcctcagccctttctggaggagtattaagtggtttgt

SEQ ID NO: 10502 - DNA, 68 bp, Homo sapiens
  chr2:232283630-232283698
  hypo
cggggccccgggagtcgcaggcaccctgcctggacgctgttgtggggcctgaacgaagttcactgctg

SEQ ID NO: 10503 - DNA, 34 bp, Homo sapiens
  chr2:232283773-232283807
  hypo
ggtggatctgagagagtggagtctgatcccgccc

SEQ ID NO: 10504 - DNA, 624 bp, Homo sapiens; identical to SEQ ID NO: 9509
  chr2:232790030-232790654
  binary

SEQ ID NO: 10505 - DNA, 264 bp, Homo sapiens; identical to SEQ ID NO: 5800
  chr2:232790784-232791048
  binary

SEQ ID NO: 10506 - DNA, 145 bp, Homo sapiens; identical to SEQ ID NO: 6107
  chr2:232791140-232791285
  hyper

SEQ ID NO: 10507 - DNA, 213 bp, Homo sapiens
  chr2:232791318-232791531
  hyper
cgcacaggggaactccatttgcagcgagcgcgcgccctggcctgccgagcatcggtgcgcctggtgccctgtgcacccactaggtcctcatcgcactcactctacctggaagggatacgtagccctctttgcaggtgcaaagacaggctcagaggaatgaagtcacttgcccaaagtcatacaggcataaagttggcgctgcccgaaatccac

SEQ ID NO: 10508 - DNA, 135 bp, Homo sapiens
  chr2:234206672-234206807
  hypo
cgtgacactaaggtgtgccttcaaaagtgaatgggctgtactcctccgcatggctttttctctcgtgtcctgctttaataagtcctgcttacgttagaaattcctatttttcatctaaaaaactttggaaatccc

SEQ ID NO: 10509 - DNA, 108 bp, Homo sapiens
  chr2:239188890-239188998
  hypo
cgagcccattcgccggtgagccactccaggacagcctggtgagaggcggggctcatggagaatccacccacatcagtgtctggagaacagcagggccgactagacctc

SEQ ID NO: 10510 - DNA, 193 bp, Homo sapiens
  chr2:239316302-239316495
  hypo
cggcgcaggcactgccacgcccttggccttggctgttggcttaggcaggtggcctgactccggcctccctctcccacctgcttggttggattcaagagtgctggcctcaccttgtcatcagagcatacgtgcagcattaggtggaaagtgcgaagggcagccctcagcacacagcacacggtgcgctccaggc

SEQ ID NO: 10511 - DNA, 85 bp, Homo sapiens
  chr2:240965878-240965963
  hypo
cgattgtaaaacagtgggaatgcagctgtgtaaactacggccggttctatggatgtttctataattgaagaattgctttttgtca

SEQ ID NO: 10512 - DNA, 209 bp, Homo sapiens
  chr2:241157300-241157509
  hypo
gctgtagtccaaccacacgggcactgggcggtggccttgatctcagtccccgttgctcacggggtctcagatcccacctgtgaggggctgtgctgacccgaggccccttccaggacccgcggggttcacaattcaagtgactcaggccctagaaggcttgtaccatacaagtgcaggttgacgccccatagcagggctcacagctttgc

SEQ ID NO: 10513 - DNA, 360 bp, Homo sapiens; identical to SEQ ID NO: 6538
  chr2:241542357-241542717
  hypo

SEQ ID NO: 10514 - DNA, 241 bp, Homo sapiens
  chr2:242436503-242436744
  hypo
gccgtcctcaggcaggccctgccttcaccacctctcacccacatcctccatcctccctccccaggctccaggtggggctcctggagggcacacctgggcccaagcccgctggccacgccctgggcacacagatcctggctgtatcacatttctgaggacggtgctgactgcccatcagcaggtgacgttgatgcagggtcacgtgactaaccagggcggcacctgcccggggatggacccc

SEQ ID NO: 10515 - DNA, 514 bp, Homo sapiens; identical to SEQ ID NO: 7201
  chr2:24272450-24272964
  hyper

SEQ ID NO: 10516 - DNA, 76 bp, Homo sapiens
  chr2:242735082-242735158
  hypo
cgcagaagtggcccaatggcagagcaggagctccgctctcagtgtggggcctcgtttgggtttgggaaaacatgtc

SEQ ID NO: 10517 - DNA, 268 bp, Homo sapiens
  chr2:242735246-242735514
  hypo
tcctctctgtgcctgggaattctagtgtttactgggccttggccgctgggagcctcttcaaggtggttccattttgacgtaaggactggaggggtgcattgaagaattgtagagtgcaggtgaagggagggcctggaagctcctgtcccgtctcctagaagcgtggctgtggtggcactggcattggagtctgaggtgccgcgtgtgccgtgaggatgaagtgtgagaaattttgggaggtcctagttctaccatccccagtgtcttc

SEQ ID NO: 10518 - DNA, 229 bp, Homo sapiens
  chr2:27668586-27668815
  hypo
cggttttccaaccctgtgcccttaccggtacatgctgcttagctgggagtggcacctcaaagggaatgtctgtatcctgaaaatcagagtggtcaaggccatctagagtcccttcctcgattgcctgcagtagagtgggcaaccatgaactaggcacagctcgcgactggcaaaaacctccaccctcggggcacagcttccctactcacatcggtcaggtccaaaaagc

SEQ ID NO: 10519 - DNA, 207 bp, Homo sapiens
  chr2:30143712-30143919
  hyper
atgaaacagacctggaagctcaggggcgagtccagagacactcaagcacactgggctcactggctgggaccttgagcctcccgctctccgcgccgagtgccgcgcccccgtctgtagctcgctgcgctcggtacagaggaactactatggttgaagggaggtggcagttgggtaccgtcctctcctgccccccgcagtcggagctgg

SEQ ID NO: 10520 - DNA, 157 bp, Homo sapiens
  chr2:30144693-30144850
  hyper
ctgttccctctccagtctcttgttcttcccctcctctagattccctgccctatttctctgcagtgtgaaagggagcaaatgtgagaactggaagaggcctttgcaatcaagcactctccctaattatacatttaagagattaaacgggtccgacttc

SEQ ID NO: 10521 - DNA, 69 bp, Homo sapiens
  chr2:31361021-31361090
  binary
gggcaggagtcctggcgagcgcctcgctctggggagctctagacccaggatccggttggaggggcggca

SEQ ID NO: 10522 - DNA, 179 bp, Homo sapiens
  chr2:31361118-31361297
  binary
gaagagaagcgagcctgggtggggggtgcagggcgacccgaaacgtggcagggaaggaccgagggcagccaagctggacgcccgctccagcgggagaagcgcggtggctgccgagatgttccccacgccgccaccgcggctgccgccgccgccgccgccgccttgcccgctgccgccga

SEQ ID NO: 10523 - DNA, 70 bp, Homo sapiens
  chr2:31361690-31361760
  binary
gcgctgaagccggggtcccacccccaatgtgctcgtcctaccacagccaaggctgggattccagggcgcc

SEQ ID NO: 10524 - DNA, 105 bp, Homo sapiens
  chr2:31457427-31457532
  hyper
tcttcccctgaggaggagtcttcccctggggctgcgtgccgggggcgagcggcggccgcgatgttcagctggctgggtacggacgaccgccggaggaaggacccc

SEQ ID NO: 10525 - DNA, 228 bp, Homo sapiens
  chr2:38762412-38762640
  hypo
agacaggtctggatgaggggtgaggccctgccttggaggggctgccctccctctgtggcacggaagccctgctgcctgtgacaggaggcgactgcacctcacccgcggcctgtatgctgcaggacccagcgaagagcttccttagcttgcagctgtgcagacactaggaaagggagcacctaccagggagatttgccttcttggtccggtagcaaatgcagtcccgcc

SEQ ID NO: 10526 - DNA, 53 bp, Homo sapiens
  chr2:43037884-43037937
  hyper
cgcaagcaggaagcagctcgcagtggactctcaataccccttttccgagctac

SEQ ID NO: 10527 - DNA, 77 bp, Homo sapiens
  chr2:66652787-66652864
  hyper
cgctcttccgaattatttaggaaagccaacacgcaattatgcaaaagtgtagataaggttctccgaagcagaaagca

SEQ ID NO: 10528 - DNA, 60 bp, Homo sapiens
  chr2:66652963-66653023
  hyper
gctctcggtcggttctgccgctctgtccccggttctgcagcgcactctcttactccctct

SEQ ID NO: 10529 - DNA, 79 bp, Homo sapiens
  chr2:68547270-68547349
  hyper
ggatgcaagaggaagaaaataaccatattcaaggagctacatcttcttgtgggtgtacatttccattatacgtatgctc

SEQ ID NO: 10530 - DNA, 251 bp, Homo sapiens
  chr2:96192254-96192505
  hyper
cgccgctccccgagaggccgcaaaagcccgagggctccaagaactgcctgcagaggctcagggactgcgagctgtccgcgctgacgccgcgctccatgcggggcccagaggaccggggcgccctggaccacatggtcaggatgaccacgagcctctaacagccccgccggggccctcgcgtgccagactatgtgccccgagagcaccttgtgctgggggaagaggcggctggcggtgcaggaaatcctggc

SEQ ID NO: 10531 - DNA, 193 bp, Homo sapiens
  chr2:96192624-96192817
  hyper
ggcctccccaagagccggcctcccacctgcccggctgccggggtcctggggctccgccgcccccgccccgcggacggccagcctcctgcccctgcagtgcctgcagcagagcagcttggggcccagcgtggtggtgcccaggtccgcctcagcaaggtgcccgcgcccaccttccaacccaaaaggccggcgc

SEQ ID NO: 10532 - DNA, 77 bp, Homo sapiens; identical to SEQ ID NO: 8361
  chr2:97427378-97427455
  hypo

SEQ ID NO: 10533 - DNA, 185 bp, Homo sapiens; identical to SEQ ID NO: 9536
  chr20:21086682-21086867
  hyper

SEQ ID NO: 10534 - DNA, 107 bp, Homo sapiens
  chr20:21087188-21087295
  hyper
tttgggggctgggggatgtctagccactctagagaaacactgcgagccccacgcgggctggtggagcctcttgcctggaaaaagatgtggaaacgcgcaggctgggc

SEQ ID NO: 10535 - DNA, 151 bp, Homo sapiens
  chr20:25566244-25566395
  hyper
gggggcggggcgagcgaacgggagagggggcgggtcgggtccgggattgcggggcggggtgggggcaaggcggcctccgcaaatctcagggcggctctggccagtttggagcctggggtgacccttggagctgacctcgctggtccctgtc

SEQ ID NO: 10536 - DNA, 59 bp, Homo sapiens
  chr20:25566411-25566470
  hyper
cggagcttggcggttcgcagctctcggggtagcatcttctggaaacaagcccggaggcc

SEQ ID NO: 10537 - DNA, 62 bp, Homo sapiens; identical to SEQ ID NO: 6121
  chr20:30639044-30639106
  hyper

SEQ ID NO: 10538 - DNA, 139 bp, Homo sapiens; identical to SEQ ID NO: 6122
  chr20:30639494-30639633
  hyper

SEQ ID NO: 10539 - DNA, 207 bp, Homo sapiens
  chr20:32332893-32333100
  hypo
cgggtatgaccccagatgacgaggatgtatttctctgcgggaagtgtaagaagcaattcaactcgctgccagcgtttatgacccacaagcgggaacagtgccaggggaatgcccccgccctggccacagtctcactggccaccaacagcatctacccaccttcggcagcacccacagcggtccagcaggccccaactcctgccaatc

SEQ ID NO: 10540 - DNA, 215 bp, Homo sapiens
  chr20:33131642-33131857
  hypo
cgtttcagggaagtggcagcttctcgggaggtgccgcagctgccatctcccgtcagcactcatgcctccgcctcagccctggccacggctccctggaattctgatcctcctctgtgagctggtattgctgtttctccaaaaattaaaaatgctcaaaggattataggttttctcctctttcgtatgtttggctctgagacactgcatgttggcac

SEQ ID NO: 10541 - DNA, 73 bp, Homo sapiens
  chr20:34147099-34147172
  hypo
cgggcacccaccgtgaggatgtacacattgccacccatgtctgtgaactccaggtcttctggccggcccttcc

SEQ ID NO: 10542 - DNA, 131 bp, Homo sapiens
  chr20:34147230-34147361
  hypo
gtcctctgcctccttcagcttcactaccggccaccagcccctcaggcggcggcagcgaaacagattgcacctcggcccggccccattgcgggccagctgcacagagcagagctcggggccccgggccccac

SEQ ID NO: 10543 - DNA, 60 bp, Homo sapiens; identical to SEQ ID NO: 7239
  chr20:34190072-34190132
  hyper

SEQ ID NO: 10544 - DNA, 100 bp, Homo sapiens
  chr20:37303401-37303501
  binary
cctgtttccctgggtgggagtgggaagggagttttaaactgaattgtgctcagactcccagcccagtcttcccggagccatccgttccttcatccaatgc

SEQ ID NO: 10545 - DNA, 37 bp, Homo sapiens
  chr20:37358242-37358279
  hyper
ccaggtcgaggtttgttcgaatctctcccctgggggc

SEQ ID NO: 10546 - DNA, 390 bp, Homo sapiens; identical to SEQ ID NO: 8385
  chr20:37433723-37434113
  binary

SEQ ID NO: 10547 - DNA, 93 bp, Homo sapiens
  chr20:400189-400282
  hypo
ctctgctcccaggtgggctggcagtgccccgggtgcaccttcatcaacaagcccacgcggcctggctgtgagatgtgctgccgggcgcgcccc

SEQ ID NO: 10548 - DNA, 221 bp, Homo sapiens
  chr20:42876305-42876526
  hyper
caggactgctcacctgggaagcgacaggccctgtctgggccccaggagcacagttctcaattttaggagcatccattctgcctctttccctcccagaaacagccggtctgttggggtgcggggcgggttgggggggctgagaaaagagacaaaggcgaggggaagggaatgggcactgctgggaaggcggcttggtggggtgggaggtgctgctgctgcgg

SEQ ID NO: 10549 - DNA, 95 bp, Homo sapiens
  chr20:42931339-42931434
  hypo
gcaactctagccataaaataacccgtatatgacaagttaaattgagaaagaattacctactttcacgaagtgcgctgaggtttattgggctctgc

SEQ ID NO: 10550 - DNA, 52 bp, Homo sapiens
  chr20:43926539-43926591
  hypo
cgagagagatgcgctcacctggacagatgctgcctctgaggttctccagcag

SEQ ID NO: 10551 - DNA, 51 bp, Homo sapiens; identical to SEQ ID NO: 9556
  chr20:47934774-47934825
  binary

SEQ ID NO: 10552 - DNA, 414 bp, Homo sapiens
  chr20:4804008-4804422
  binary
gttggaaagtgggggcgccgcggctggggggctgcttcagctgcgcctcggccagcgatcggcgggccgggctcaaatccagccaggctgggcaggcggtggccgcgcgactggggaccgggcgccccgccctcctcgctcccctcctccttcctctccctccctccagccccttggcctttttcagcccctaccggatctgctcgtccgctgtcctctcttttctctcgctcttcatatcactctccaccccttcgccttgccttcgcctttcttcctccccttgtctcctgccccctcctcttctcccctcccctctaggggcggagcttctcccctccctcccagacaatgctgtggctgcgtccccttccccgccagctcgtccaggctcccgccgccagcgattcttcc

SEQ ID NO: 10553 - DNA, 62 bp, Homo sapiens
  chr20:49218808-49218870
  hypo
agccctgtggcaggctggggctctcccctcctaagttcctccagccaggctgctctgcaaac

SEQ ID NO: 10554 - DNA, 641 bp, Homo sapiens
  chr20:51589126-51589767
  hyper
cgctcctgtcctctcgcatatcactcacagacggggatctgacagcagccacaaacctacagtgagtgatcgctctccccccggcacgaatccgccatagagatcggcgaggaggaggaggaggaggaggaagaaaagaaggaggaggtggaggaggaggtggaggaggaggaggaggagggaaagaggagaaggaagaagaagaaaaagaagaaacccactaccttcccaggattgccttttttttttccttatctttacgcgcgagtgtgcctgtggcgcgtgtgcgcccctcgtcccttccatccgaacccgggcttggatgtttaataaagaaatcaagtgtctcaacagtcaccaaaaaaaaaaaaaaccgcaaaaacaaaaccaaaaaaattccaaaagcaaaaacaaaaaagagagaggaaaaaaaattcaaaataaacaaacaaacaaacaaggcagaaccaacctctacttcaaagcagccggcacaagccacccgtgtctgccacccagagaggggggtctctggcccgtggtggaggagttgcaggggggatcgtcagggggacagaggccgagtgacgtcctaggagccaccgggcaagaggcggaggagacccagagaggccagagag

SEQ ID NO: 10555 - DNA, 56 bp, Homo sapiens
  chr20:51590002-51590058
  hyper
taaccccgtcctctctcgccttctctggtctcccaaatcctccccttccaagctcc

SEQ ID NO: 10556 - DNA, 63 bp, Homo sapiens
  chr20:5297756-5297819
  binary
gaaggtgaccctttcaaggaaagcccggctccgacgagtgcggtgtgggcctttggagatggc

SEQ ID NO: 10557 - DNA, 43 bp, Homo sapiens
  chr20:54919370-54919413
  hyper
ctcagctcccaggccagccgtggctcaggaagcctcccacgtc

SEQ ID NO: 10558 - DNA, 136 bp, Homo sapiens
  chr20:55206463-55206599
  binary
cgccgccatcaaccccctgcaccagccggcgcccacaggcagccagcagcaggcctggcccggccgccagagccaggagggagcggggctgccctcgcaccacgggcgcccggccggcctactgccccacctctcc

SEQ ID NO: 10559 - DNA, 95 bp, Homo sapiens
  chr20:55206774-55206869
  binary
cctgttcaccctacggccttctgcccccaccccgcactcctctaggctcccccgaacttaagggaattttgtcctctctcccccagaatgtcgac

SEQ ID NO: 10560 - DNA, 168 bp, Homo sapiens
  chr20:57009378-57009546
  hypo
cggtaggcttgcagtagtgaaagatccatggactaggaatcagaagactgggtcctcggccttattcccagctctgtcatgcgtgattttgtggctcttaggttggtgacctgcaaaatggagatgttggtcatccttgcttacttcaccaggggcgtccatcctaag

SEQ ID NO: 10561 - DNA, 113 bp, Homo sapiens; identical to SEQ ID NO: 8396
  chr20:57225466-57225579
  binary

SEQ ID NO: 10562 - DNA, 158 bp, Homo sapiens
  chr20:61472199-61472357
  hypo
ctcggccgccgactggacgcgcgggccttgccagcgagcaccctcatcgggctgtcgcctgacagcatacctcaaaaggccctagctaataaacctgtaagcccagcatttgagagaaggtagggtgtgtatatataaaaggttgtgtacaactccac

SEQ ID NO: 10563 - DNA, 193 bp, Homo sapiens
  chr20:61806216-61806409
  binary
cgcggcctttcctctttctggaggaatgacaggcctcccgcagaggaggagcgggtggtgacgagggagaaggagcggaaagggaggggttctccacgggttctgttgatttgtttaatcccacgctattcggaggctttcacggatggcggacaagagggagggggagggggtgggggtctcggcccgtgtt

SEQ ID NO: 10564 - DNA, 248 bp, Homo sapiens
  chr20:61810310-61810558
  binary
gggtgcgtggggcggcgggctagggtgcggcgctgtccgcggtgctggcggcggggcggcccccgcgggacgggagggcggccaagtgcggccctcgcccccacagcgggcgccctggacagttgccacggcaacgtgggaggaggtggggcagggtctgaggtcaccgctaagtctgcccttcctcgggccgctgcgccgcggggcggggcggaggcggcgctcgctgtggccccagagcagccccc

SEQ ID NO: 10565 - DNA, 270 bp, Homo sapiens
  chr20:61810632-61810902
  binary
cgccggaccgcatcccgcccccaaagccggctctgggctgtgcaggaccaggcacgtgagactccgcagcccagggagaaaatgacaaatccctcccccgccgccatctgcagccgcagtgacacccactcgggtttgctgcaggggttttttttctgtccccggaagccagcgccacctgctgacgcccggcaccgcctctgcgccgcctcccccgcgcccatcccaggccccggctgggctgtgatgccccggtaacagtcagaggac

SEQ ID NO: 10566 - DNA, 79 bp, Homo sapiens
  chr20:62103897-62103976
  binary
gccccccggccgggagccgcatggccgaggcggcggttccgcactcctgccgggcttgggccgcgcgcggagacgctgc

SEQ ID NO: 10567 - DNA, 269 bp, Homo sapiens
  chr20:62322022-62322291
  hypo
ccccaatagcagggaggacacccacaggcaggaccccaagtgctgggactctcccccaagaggggctttgccacaggcagggaccccagctggggccccccgtgggcttcactgcgcactcgggtgcccctgcagggtcaccagctgccggggaccccgagagtagcctgtgtgtggagtatgagcaggagccagttcctgcccggcagaggcccagggggctgctggccgccctggagcacagcgaacagcgggcggggagccctggc

SEQ ID NO: 10568 - DNA, 825 bp, Homo sapiens
  chr20:62600809-62601634
  binary
ggcctggcgcgcgggtgagcgcggccagggacgcgcacctggggccagcctcgccacccacctgtcacctggggccgggagcgggcgcggggcgcgggcctcggcctggccgggcagggccgatcgcgggcgcggggtgggggggcgaaggcagtgaaccaaaatggcgactttttctggagaaggaggaggcaggaagacggcgccggcgcggggcgcgggggctcgggcgcggcggggggcgggggggctccgggcccggccccctccttggcctgcgcgcagggtcgagatccggggcgcggtgggcgccggggctgcggccagaatgggtccggggcgcggccgggcgcttacctgcggcgcccagcggggctgcggccgggccgggccgggccggggcggggggcgcggggcgcggggcgctgggtccgggcggcgcaggctgcgcgccgcgctgcgcacatgcgcgctcccgcccctcccacctttgacagttttactgcgggggggagggggcgaactctcgcgttattcccgcggccgctccgcgacggggagggggcggggagggggcgggggcgggggcgggggcccggcgctggcctgtggttcccccgctccgcggttccgcccccgtcggccgggcccgcagtccagagtagccggttctgccgtcctggggcgggggacgttttttggacagtggggtaaactgaggcccgataggggcgctaggcactgcccggagtccggcgcgcacggattgaggcgacctgattccgccgcatcctggcccgcgcggcgagtgtggtctctgggctc

SEQ ID NO: 10569 - DNA, 49 bp, Homo sapiens
  chr20:62662125-62662174
  hypo
cgggcaattaagaataccacaaggcttaaaaaacaatcaggttatcaga

SEQ ID NO: 10570 - DNA, 195 bp, Homo sapiens
  chr20:62662271-62662466
  hypo
cagggggaggtgaccctgaggagagggtggcagcaacgcagagtcccgggcctgccagcatgctcagcagccagcgcccgccatcccttctccagcagcgggtgggggtgccatgcacacccttacctggcctctcatagcatggacctcttcgggcccggtttttcaggtgtgcatgtgtctggcaggcacggc

SEQ ID NO: 10571 - DNA, 215 bp, Homo sapiens
  chr20:62680443-62680658
  binary
ccccgccccaccccggcccgagccccccccgccctctcccccttctctgccgccctcccgccgctcacccagcatcttgctgagcaccgcgttgtgcaggtccgggttctgctgagccagccgcttgcgctcgtcctttgcccacaccatgaaggcgttcatgggccgccggatgcgcgactcgtctgccgcctggcgttccccgcggccggccg

SEQ ID NO: 10572 - DNA, 267 bp, Homo sapiens
  chr20:62680896-62681163
  hyper
ggagcgcgggagcgcggcgggcgggcggcgggcactggggagccgggcgcaagggcaggccaggccgggagggcggatggcggtggggacggcggtggcctcgggccgggcgggcgcccagatatagcggctcagggccaatcggcggcggggcgggcgggcgggggcgggtcggggccgcctcctccccgggggctccctttcttctcaggccgggcgggattccgctgaggcctcccccgcgcacagcccccccacctcccccgc

SEQ ID NO: 10573 - DNA, 59 bp, Homo sapiens
  chr20:62694227-62694286
  hyper
cgcgggacagcaaggcccgaagcaggaggagagaagggagcagattcctgggcctcctg

SEQ ID NO: 10574 - DNA, 252 bp, Homo sapiens
  chr20:62694767-62695019
  binary
aaccccgccccgccgagaccccgtcgagcccgccgacccccgttagggccggaagacgacctgaggggcaggacgagacccctccccggcagagactaaccgggacgcaggggagacccccacccgtggccgagacccctgccccgggccagccctgccgttcactcccgcaaccccggcagaggccgcgatcaggcctggaccttgtcccgggagagccacccgctctggactcagacccctccctcgccc

SEQ ID NO: 10575 - DNA, 197 bp, Homo sapiens
  chr20:62695048-62695245
  binary
cccttaactccagacccccagcctggcccgtcgactccttccttggccctgtcccgcctctcggagcccccggggtgttcgggcctcctctgcgggccgcgccagccccttgccttcctccatcccggcctgggcatcctcacaggccgagccccgccccccaactcagccctctcccacgctccgtctcttacagc

SEQ ID NO: 10576 - DNA, 210 bp, Homo sapiens; identical to SEQ ID NO: 9578
  chr20:657125-657335
  hyper

SEQ ID NO: 10577 - DNA, 123 bp, Homo sapiens; identical to SEQ ID NO: 9583
  chr21:27011487-27011610
  binary

SEQ ID NO: 10578 - DNA, 134 bp, Homo sapiens; identical to SEQ ID NO: 9584
  chr21:27011639-27011773
  binary

SEQ ID NO: 10579 - DNA, 153 bp, Homo sapiens; identical to SEQ ID NO: 9585
  chr21:27012725-27012878
  hyper

SEQ ID NO: 10580 - DNA, 192 bp, Homo sapiens
  chr21:32716044-32716236
  binary
cgagcagcgggacagccccgggcaggacgcatcctgggtgggtgacgtgatcccgcagtctcctccccgaccccatatcccatacaatgatcctcgcttacagaagtcaagggggaaagatgacgctttcaaagcccgaatctctttaccctggagccagaaccagcgtcgccgccgtcccctgcagctcag

SEQ ID NO: 10581 - DNA, 108 bp, Homo sapiens; identical to SEQ ID NO: 7265
  chr21:33954435-33954543
  hypo

SEQ ID NO: 10582 - DNA, 221 bp, Homo sapiens
  chr21:38064746-38064967
  hyper
cgtcctctaaaaaatgaagaggggactggagtcgggaccaaaattattggcagaccgcacggtttgcagtcaccctgaagttaccagcagccgatgctgtgtccagggaaaatattcttgagctggaaaacgtgctaatttaaagtctttcgtttcacacgaaaatgtgctgcactctttgactgctcaggaatttgctctagcacctagaaggaattctg

SEQ ID NO: 10583 - DNA, 211 bp, Homo sapiens; identical to SEQ ID NO: 7268
  chr21:38592864-38593075
  hyper

SEQ ID NO: 10584 - DNA, 259 bp, Homo sapiens; identical to SEQ ID NO: 7269
  chr21:38593104-38593363
  hyper

SEQ ID NO: 10585 - DNA, 38 bp, Homo sapiens; identical to SEQ ID NO: 7270
  chr21:38593729-38593767
  hyper

SEQ ID NO: 10586 - DNA, 91 bp, Homo sapiens
  chr21:40331586-40331677
  hypo
cggcagcacgggaaatgcatacagcctccaaaagagaacgaagcccttctgagagcttgattccagacatgcaagaccctgagcccaccgc

SEQ ID NO: 10587 - DNA, 79 bp, Homo sapiens
  chr21:43248413-43248492
  hypo
cggcaccgaactgctccccaaaggccctgctgactgctccatgccgccctgccccaccccgcaggagctgcctctcccc

SEQ ID NO: 10588 - DNA, 34 bp, Homo sapiens
  chr21:44847478-44847512
  binary
cgcggcctgcgttcgtccagactcagagcctcgg

SEQ ID NO: 10589 - DNA, 56 bp, Homo sapiens
  chr21:44847864-44847920
  hyper
cgggggcgcgggaccacttgcttgcccgtggccgatgcctcatccgaacggaaaac

SEQ ID NO: 10590 - DNA, 41 bp, Homo sapiens
  chr21:45508577-45508618
  hypo
cgcgcagcactggtggcacctgtgctatgtgccgtgttatc

SEQ ID NO: 10591 - DNA, 224 bp, Homo sapiens
  chr21:45508695-45508919
  hypo
tgctgtgtgccatgttatcccactcttccctgacactggcggcacctgtgctatgtgccgtgttatcctctcttccctggcgctggcggcacctgtgctgtgtgccgtgttatcccactcttctctggcgctggcggcacctgtgctgtgtgccgtgttatcctcttttccctggcactggcggcacctgtgctgtgtgccgtgttaccccgctcttccctggc

SEQ ID NO: 10592 - DNA, 162 bp, Homo sapiens
  chr21:45513811-45513973
  hypo
cgtgctgtgaggcggggcctgcccatggtgtctgctcagcacccttcgcatggcgtgtgtttcgctgcagtgtctgtgtcctctttgcggttatggtgctgtgtgagcagtgacccccaactctctttccagcccatctacagcaagcagtcggtgttcttc

SEQ ID NO: 10593 - DNA, 231 bp, Homo sapiens; identical to SEQ ID NO: 7291
  chr21:46894937-46895168
  hypo

SEQ ID NO: 10594 - DNA, 216 bp, Homo sapiens; identical to SEQ ID NO: 7292
  chr21:46895491-46895707
  hypo

SEQ ID NO: 10595 - DNA, 151 bp, Homo sapiens
  chr21:46895736-46895887
  hypo
cttcccttcgccccatccctccgttagctcgtgcgtggccatcagggaatgaacgcgtgtgtgagcctgacgaccaggaggagaaggcggcgcagggagcgcgcggaaggctttccccagctcgggccacctgagaaaacacaggaggggc

SEQ ID NO: 10596 - DNA, 42 bp, Homo sapiens
  chr21:46925925-46925967
  hypo
gccgcctcctggggcttaaggaaggcgagaggctcaggcccc

SEQ ID NO: 10597 - DNA, 210 bp, Homo sapiens
  chr22:20929364-20929574
  hypo
cgatcaccttgtctgttgtccctctgtcctcaaagatgatcacggaagccttggcccaaggtgggatgcacataagagcccggttcccgcctaccaccgctgtgtccgccatcccgtcaagctccatccctttgggcagacagcccatggcacaggtatttacggggcagcgcccagggcacggctgggagctcggggcgtcctctgagc

SEQ ID NO: 10598 - DNA, 174 bp, Homo sapiens; identical to SEQ ID NO: 9600
  chr22:24819901-24820075
  binary

SEQ ID NO: 10599 - DNA, 61 bp, Homo sapiens; identical to SEQ ID NO: 9601
  chr22:24820486-24820547
  binary

SEQ ID NO: 10600 - DNA, 61 bp, Homo sapiens; identical to SEQ ID NO: 5812
  chr22:25678186-25678247
  binary

SEQ ID NO: 10601 - DNA, 292 bp, Homo sapiens
  chr22:38506297-38506589
  hypo
cgctgtatggctgagtgctctcggggatccttacccccgtacccacccctggcccagcctggctccaggcttccctttccaggacatctgtagccccggctggccctccgtcctccagagcgggcctgatttctgtgccctgggaggaggggctcaggcctggcttggccacccatgtgctcaccttgtagatggccatggtggacctgtaaaactggtccatctcgggggccatggaggggctgtcccgggtctgagcaggaggctgggagctggtggcgatggcacagcc

SEQ ID NO: 10602 - DNA, 149 bp, Homo sapiens
  chr22:39852943-39853092
  hyper
cgcccccgcgcaggccgccccgggccgtgggccggcgcacgcacggtcacaggaggggcgcgcgcacactcgcactcacacacactcgctcgcacacgcacacactcgatccagcacgcgcgggcggcgcggggcggcggcggccggag

SEQ ID NO: 10603 - DNA, 226 bp, Homo sapiens
  chr22:39853157-39853383
  hyper
ggttgcggagggggcggggtgggggccggagccgcttgagccggcgggagcgggcacccctgcgcgccgcgctcggcctcgcctccgcgccccccgcgcgcccgccgcggtccctcccccgcgcccgtccgctcgccgggcccccgccgccgccccggggtgcagccgagcggccgcgccgggtccccgggacggggtggaagtgggggtggggggaggggatcgg

SEQ ID NO: 10604 - DNA, 32 bp, Homo sapiens
  chr22:39853626-39853658
  binary
cgcgctgcgcttggcgccccccgcccggctcc

SEQ ID NO: 10605 - DNA, 210 bp, Homo sapiens
  chr22:39853690-39853900
  binary
cgggcgcgggcgcactggggctgggggcccggaggccgcggtgggggcgggatgccggggaagccgctcggcgcgggccccctccccctacccgccgctcctccgagctccccggtccccggagggcagagcctcagcgcccgaccccctcccacggccgggcgggggacgtccccgaggcgcggggctcgagccgtgctttgtgcgcgg

SEQ ID NO: 10606 - DNA, 130 bp, Homo sapiens
  chr22:39853934-39854064
  binary
ctccggcgcggcgcggggctggggtgggaggcctccgcgcccgccttccccacccccgaccccagactgcggcggcggcagccgaggcccaagcgcagtcgggggctgggcgggtgcgggggctgcggcc

SEQ ID NO: 10607 - DNA, 351 bp, Homo sapiens
  chr22:46597084-46597435
  hypo
cgggcctggaccccgcctctcagcttgctctagagggctattctctgcatgctggcatgatcgcgccttgtaaaaggtggcagtgttctcagcttagtcaatcaggaattgcaagaggcaagtgagcccctgaggactctggggggcctttgtgaccgagcagctttgggagtgaccctgacagacctttacaggtggtgcaagttttgactccctttctcctggcgcgttaagcagaggataagcgctgtggaaggagtgaaggtgtagggagatcatggcccccagagcagtggggaaggggacagggaggctggaggagagcaaggaaaaggctccgtgtcaggtggc

SEQ ID NO: 10608 - DNA, 103 bp, Homo sapiens
  chr22:46599521-46599624
  hypo
cgaaaaggaaaaaagaaaaaaactctcagcaaagctagaggggatcctgccaatgagttcccagctcacagactgattagcaggccaccacacatgagctgga

SEQ ID NO: 10609 - DNA, 254 bp, Homo sapiens
  chr3:120169367-120169621
  hyper
cgtaagcagcattactgccccagctccaccccagcacaccccaaggaccgaaactcccagcgccaccccgggagagcatccccaggacgcgcgcccacccgcccagcgcgcagacccaagaggccccggggaccgagttcggactcctcggcccctcgcctacctcggcgcggacccaggcgaccgccaccagcgcgagcgcgagcgcgagccagcgtttccacatctgcggaagagagaagagagcgagtctg

SEQ ID NO: 10610 - DNA, 54 bp, Homo sapiens
  chr3:121902674-121902728
  hyper
cgcgatttgtatttattttactgtgaatctctggccttatatcagaaaaaaaaa

SEQ ID NO: 10611 - DNA, 71 bp, Homo sapiens
  chr3:127534744-127534815
  hypo
cgcccaaggaccatgtagacgtcaataaggaagtatttgctgaatgaatcgctgctttggatcctgggaga

SEQ ID NO: 10612 - DNA, 68 bp, Homo sapiens
  chr3:127534897-127534965
  hypo
agagactgacagagtggggttcaaaatggccacttgaagggacaataagctgtgtgatttagctgacc

SEQ ID NO: 10613 - DNA, 49 bp, Homo sapiens; identical to SEQ ID NO: 6138
  chr3:129694299-129694348
  hyper

SEQ ID NO: 10614 - DNA, 267 bp, Homo sapiens
  chr3:139258672-139258939
  binary
ccctacaaaggaagaggagaccggagacgggacgtttgctttgttggccgaactcttcggctgctggggatttccttcaaacgccattaacttctcacactcagcagccactcgggagttgggaaacaatctcctggggtttgtgctggcgtgattaaggaaagaggccacttacaggcctttgtctaaagcctcgcgccggtggtggctggggtcaggaaagctgggaggttcaactacgggcgagaaaattggggcactttccac

SEQ ID NO: 10615 - DNA, 124 bp, Homo sapiens; identical to SEQ ID NO: 7337
  chr3:141174173-141174297
  hypo

SEQ ID NO: 10616 - DNA, 141 bp, Homo sapiens
  chr3:150237458-150237599
  hypo
cgccactttaggtagctgcagccatgcaaaagtttgatatcaaagtatctgaaaagcatagcattcaccagttgtcgaagcaccgttccgggacttgcagcatcagcttcacttgagaacctgttagagatgcacattctc

SEQ ID NO: 10617 - DNA, 345 bp, Homo sapiens
  chr3:160822422-160822767
  hyper
cgtgggatttccttctctctccgcccgttctccacattccccacttagtttcacattccttcccaatccctccgacatccctgcgccggggcccttccctagcgctccgggaaagcgttcgccgcaggcctgttaggggcccaccaataccgtaacaccgttcccgtcctcttcctcggcaccgctgcaaacgccccgggtcgctacccggatttgacggtggctggagcggcacgggcgacgcaaggcaggtattgcaccctggggcaaggcaaggtggacaaccagcggatgcggcgcggccgcggcctgggcctgggccctccgcgtcgcccactgccccac

SEQ ID NO: 10618 - DNA, 245 bp, Homo sapiens
  chr3:160822962-160823207
  hyper
ccacccagtggcaggactcaaccgcctcggagaccctgcagggccgcccttctcactcacctcctgtgctcggcgcgcacccagctcggaagcgggaaggtggccggcgttctctccctgcgcacacacgcagcctccccgcatccgcacgcacggccgggcgcgcgcagaccacgcgccagggccgcggccggaagcccctggctgcacgcgcgggcccaggcggcccccagccctgtgagctc

SEQ ID NO: 10619 - DNA, 370 bp, Homo sapiens; identical to SEQ ID NO: 8498
  chr3:16553609-16553979
  hyper

SEQ ID NO: 10620 - DNA, 78 bp, Homo sapiens; identical to SEQ ID NO: 9673
  chr3:16555426-16555504
  binary

SEQ ID NO: 10621 - DNA, 54 bp, Homo sapiens; identical to SEQ ID NO: 7349
  chr3:169540679-169540733
  hypo

SEQ ID NO: 10622 - DNA, 138 bp, Homo sapiens
  chr3:179169640-179169778
  hyper
gaagaccccaaaggccccatttaggtttcccattctggaattctaaatgtcagaaagtaaactgaagcccagagttgcacaaccttgcgttgcagtccccgctcttccatcactagttgtaggaccgtgtaccgtctc

SEQ ID NO: 10623 - DNA, 291 bp, Homo sapiens; identical to SEQ ID NO: 5820
  chr3:186079331-186079622
  binary

SEQ ID NO: 10624 - DNA, 56 bp, Homo sapiens; identical to SEQ ID NO: 6150
  chr3:192128140-192128196
  hyper

SEQ ID NO: 10625 - DNA, 147 bp, Homo sapiens
  chr3:194407289-194407436
  hyper
cgcgcgtgtctcccccgcaccaaccttttttgcacactcgaagctgaatattttcttttttagagaatttacccgcacctcctgcggggttcctaagcactctctctgctcccctccccccaactccctaccacagggccgctccca

SEQ ID NO: 10626 - DNA, 154 bp, Homo sapiens
  chr3:194407836-194407990
  hyper
caagatctggagcaagagcgaggcgggccgtcagggcaccaagatgaagctgacggtgagtgcgcagggtatccgcatggtgcacgccgaggagcgcgcgctgcgccgcccgggccacctctacctgctgcaccgcgtcacctactgcgtggcc

SEQ ID NO: 10627 - DNA, 102 bp, Homo sapiens
  chr3:194408028-194408130
  hyper
gcacgagctgaagcacaaggccgtgatgctgcgctgccacgccgtgctggtgtccaagcccgaaaaggcgcaggccatggccctgctgctctaccagacgtc

SEQ ID NO: 10628 - DNA, 222 bp, Homo sapiens
  chr3:25469458-25469680
  hyper
gttggtgctcaacgtgagccaggagcagcgtcccggctcctcccctgctcattttaaaagcacttcttgtattgtttttaaggtgagaaataggaaagaaaacgccggcttgtgcgctcgctgcctgcctctctggctgtctgcttttgcagggctgctgggagtttttaagctctgtgagaatcctgggagttggtgatgtcagactagttgggtcatttg

SEQ ID NO: 10629 - DNA, 130 bp, Homo sapiens
  chr3:25469874-25470004
  hyper
tccgagcagggtttgtctgggcaccgtcggggtaggatccggaacgcattcggaaggctttttgcaagcatttacttggaaggagaacttgggatctttctgggaaccccccgccccggctggattggcc

SEQ ID NO: 10630 - DNA, 123 bp, Homo sapiens
  chr3:31494150-31494273
  hypo
cgttgcgagctgcagcggtgatcgccgcggcaggcccagaagtgtatcctgactcgtaaattgacgaagccactggtgctgcaagtgttcttttggggtagtgtctgggatccggtgcaagtc

SEQ ID NO: 10631 - DNA, 119 bp, Homo sapiens
  chr3:36984260-36984379
  hypo
cggtctcctcatactctgggagagcggcggaaacagaacctgcagttgccccataaagctggtcagtcggtcataaagtgaagttaacaatttatgacccgctttaaaaaaaaaaaaaa

SEQ ID NO: 10632 - DNA, 149 bp, Homo sapiens
  chr3:43655492-43655641
  hypo
agatacacagaaaaccccaaggtttccaatcttggatatgggaagaataactatgcgtgaaaaaaatagcaaagttggaaagaatgtctagtttaagggaacaataaagtgttccgcagagtatctggggacacgcatcaaaggtcaac

SEQ ID NO: 10633 - DNA, 196 bp, Homo sapiens; identical to SEQ ID NO: 6155
  chr3:44038922-44039118
  hyper

SEQ ID NO: 10634 - DNA, 202 bp, Homo sapiens; identical to SEQ ID NO: 9714
  chr3:54156155-54156357
  hyper

SEQ ID NO: 10635 - DNA, 78 bp, Homo sapiens
  chr3:63264062-63264140
  hyper
cgaggccccctgccctcgccgggctgctccagggtgtcgctcctctggctgctcccgaaggggcttctggccctgagg

SEQ ID NO: 10636 - DNA, 86 bp, Homo sapiens; identical to SEQ ID NO: 9720
  chr3:63264169-63264255
  hyper

SEQ ID NO: 10637 - DNA, 261 bp, Homo sapiens
  chr3:69230152-69230413
  hypo
cgggctgtgtccctgatccttctgcccagaggcccgctggtaccagccacgcaagtgctcggcaactaaggccttgtggatgtttttggtgatgtgctccgattttgcagcagccttccttggcagccggagagttgcatatgggttatggggtacccggtcgacctcatcttcgtgaaaggatctgctgtagtccctctggcgctcatatccatagtgggctgaggaccggtaggaagggttgacactatactgtccctc

SEQ ID NO: 10638 - DNA, 178 bp, Homo sapiens
  chr3:72618825-72619003
  hypo
cgcacagcctgccttataagctgctttttaaatttaaaatatcgtgaacatctttccatgtcatagctgtgggatgttgaccaagtcatttcacctctctaaagctccatttcctcctttgcggaatagggggtgtactgtgagaatcaatgaccaggacaagtgttctgtgcttagc

SEQ ID NO: 10639 - DNA, 81 bp, Homo sapiens
  chr3:73045605-73045686
  hypo
ctgaattctcacagcaactgcatagggcatcagtaccagtgcccttactgtacagatggggaaaatgaggctcagacaggc

SEQ ID NO: 10640 - DNA, 221 bp, Homo sapiens
  chr4:1016366-1016587
  hypo
ccccggcagaaagccttccttcggtgccctgccccacctcagctggctgcacctctgccaccatcccccaggtatcctgtcccgttcctgtccccgtcaggctccagcctcggagccttcctcccagcggagggcggagggtggagggcgggagccgaaggcagtggtcccacagaagggctggggcccgaggccttggcagggtgtgccggccgtcggct

SEQ ID NO: 10641 - DNA, 44 bp, Homo sapiens
  chr4:10458329-10458373
  hyper
cgcgtcccgctcgccgcgagggaaggccggggttcttccaaccg

SEQ ID NO: 10642 - DNA, 415 bp, Homo sapiens
  chr4:11429092-11429507
  hyper
cggagcgcagcgcaaagacagtggatttggagtggcctccctagaatccccccaaaagcatcttggcacaagttgtagataaaaatagctcatgataacattgtgggaaagggaggagcgagactcgcgcaaggcgaggcaagggtaccactggatctgcaaaggaggaggaagagggaggatgcaacccttggcccaagagagcgccctgagtgtgcgaggaatcgctggctcccaggggagggaaagagatggaagacctatagcgcctataactgcagagttatagacctataactgcagagcccagcacaccccatcccgcgccggcacccggctttggctccagcttcttcttcccatcatccgcctacgttctgggtctgtcctccgcttcctgggacaggctggggct

SEQ ID NO: 10643 - DNA, 71 bp, Homo sapiens; identical to SEQ ID NO: 9732
  chr4:123747655-123747726
  hyper

SEQ ID NO: 10644 - DNA, 61 bp, Homo sapiens
  chr4:142054594-142054655
  binary
gtaagcggtccgtgtgtgtgtgtctgtatgtttgtgtgtgtgtgtgtgtgtgtgtataatg

SEQ ID NO: 10645 - DNA, 155 bp, Homo sapiens
  chr4:142054757-142054912
  binary
ctcaaattcaacctcaatcggcgacttaatctaggtggaggtaaagaggaagcgacccctcgacctttgagtacgggaataacttcctgagcgttacatttagcaaatgtatgtgcctctcgtaaacgaccctcccgtttgctggaagtactgcc

SEQ ID NO: 10646 - DNA, 271 bp, Homo sapiens
  chr4:147560617-147560888
  hyper
tttgacagccccctttatctgcttgatgtttttttcatgtctgcacagcaaatcaccccacacctccaaccaattttcccctctctctctcttaagtattcagcaggtcttgcctttcatattaatttttatgacctgggatgttgcctgtgcgcgtgttgtgttgtgtttcgttgtgtctacaggctcactttcctcctcctcctgcactctcggcttctttctgtggcttccctctttttctcttcacctctgttttcaggattattat

SEQ ID NO: 10647 - DNA, 46 bp, Homo sapiens
  chr4:154143770-154143816
  hyper
cgcggttgatggaaaacagatgtcttactgctctgggcctgagcac

SEQ ID NO: 10648 - DNA, 214 bp, Homo sapiens
  chr4:154144184-154144398
  hyper
tctcgtagtaagtcgtggctcgggctgtgccctgggaaccctcccgcccgggcaaggtccggtggccggagcgtgcgggaagcctgcccagagtccatttccggacgggcgctgcggggctggcagccggcctggagcgggtgcagtgggtcggcgcggcgcagagctgtcagcaacagggccgctgagcagcagaacctggacgccgcgcggc

SEQ ID NO: 10649 - DNA, 40 bp, Homo sapiens; identical to SEQ ID NO: 5826
  chr4:156298073-156298113
  binary

SEQ ID NO: 10650 - DNA, 43 bp, Homo sapiens; identical to SEQ ID NO: 6174
  chr4:176986744-176986787
  hyper

SEQ ID NO: 10651 - DNA, 164 bp, Homo sapiens
  chr4:183626546-183626710
  hypo
cgtatctgatgtctacactataccgaggattcaagccagtagcccggtgaaaatattatacggtactatttaatatgcctccaccaagcgcattgttgacagcggaaacaatgtgagttgttcatagccatacacatcagcaactgcttatatacagtgaaacc

SEQ ID NO: 10652 - DNA, 133 bp, Homo sapiens
  chr4:48678686-48678819
  hypo
cgtgagccactgcgcctggccaagtttcaatttctttaaagtgacagaagaaactgaaggtatccaagggcaaaatccttccaatcttgtatactttcctggcctatgtgaaattcaaatgcacatttttctc

SEQ ID NO: 10653 - DNA, 172 bp, Homo sapiens
  chr4:48679706-48679878
  hypo
cgtgagccaccgcgtcagcccgaaaaaataactttttaaatattgaattagtaattaaagaagttggaaacaactgattcaagtataaagctttgagattacatgccatttttttctctaaaagaatagctctttctttgcatctttttacatgaagtctctccatatcatc

SEQ ID NO: 10654 - DNA, 88 bp, Homo sapiens
  chr4:5712804-5712892
  hyper
cgggcccccctccggaagggtccggggctgggaggcgcgtctgtctctgggcatgctcagtgcaggggcagggctggggcgggggtgg

SEQ ID NO: 10655 - DNA, 57 bp, Homo sapiens
  chr4:5713393-5713450
  hyper
cgcacgcaaccgcttaggcgtcgggttccccttctgctccaggagggaggtggcggc

SEQ ID NO: 10656 - DNA, 129 bp, Homo sapiens
  chr4:6769454-6769583
  hypo
cgtctttggaatgagtgtttgggggtggcctgtccccctgccgcccgcccgggccagggagatggccaatgcacggcgggcgcacccctattccctcctcactcatgagtctggtgggacaactcatcc

SEQ ID NO: 10657 - DNA, 152 bp, Homo sapiens
  chr4:717901-718053
  hypo
cggcagaaagactcagggcagatggtggttgtcagccgggagggggcacggagccctgggggtggtcaggcccacgtggccttgggacgagagcgaagaggtgggatcggctgcgggagacagggaagtgggtgacaaggaggctcaggggc

SEQ ID NO: 10658 - DNA, 50 bp, Homo sapiens
  chr4:718112-718162
  hypo
ggtcaggggctcagtcctgtgggccaccacagccggccgcacaggcaggg

SEQ ID NO: 10659 - DNA, 189 bp, Homo sapiens
  chr4:905682-905871
  hypo
cgaacccttacaattttagacgtcagagcggaagatgagggagagagcagtggacgaccgagagaaaggcagacagaggcaggaggagctgcaggagagggcggggacaaaggcaggcacaccggccacacacacctgaccacagcgacaccaaagtccatcccgcgcgtggcaggaggaggcagggcc

SEQ ID NO: 10660 - DNA, 250 bp, Homo sapiens
  chr4:957050-957300
  hypo
gacagctgtctgggggcagcttcgcgtgctgacagacagggggctgggttaggatggggacccaaggtggggtgtccccactgctggggttgccaggcagtgcccagcccccaaccctgagcccacctggcttggaccagccccctccccaggaaggcgtggccagcaccctcacatctgaggcctcacacatgagctgcgtggtcaccccatctcgctgctggccagcagggcggcactgaggacagcc

SEQ ID NO: 10661 - DNA, 87 bp, Homo sapiens; identical to SEQ ID NO: 6188
  chr5:100238197-100238284
  hyper

SEQ ID NO: 10662 - DNA, 345 bp, Homo sapiens; identical to SEQ ID NO: 6189
  chr5:100239724-100240069
  hyper

SEQ ID NO: 10663 - DNA, 171 bp, Homo sapiens; identical to SEQ ID NO: 8556
  chr5:10564301-10564472
  binary

SEQ ID NO: 10664 - DNA, 431 bp, Homo sapiens; identical to SEQ ID NO: 6600
  chr5:1074389-1074820
  hypo

SEQ ID NO: 10665 - DNA, 470 bp, Homo sapiens; identical to SEQ ID NO: 9776
  chr5:112629778-112630248
  hyper

SEQ ID NO: 10666 - DNA, 104 bp, Homo sapiens
  chr5:132083964-132084068
  hypo
aggctcctgctgctgggggaccaggagtggccgctagcgaccttcctcgccccacctgctcttcttcctagcaggatgaaatctgcgacgccttcgaggaagtc

SEQ ID NO: 10667 - DNA, 625 bp, Homo sapiens; identical to SEQ ID NO: 8562
  chr5:142781875-142782500
  binary

SEQ ID NO: 10668 - DNA, 125 bp, Homo sapiens
  chr5:142782625-142782750
  binary
cgtcgcccggcccttgccagccccccacccccactccccgaggctaataaaagtttgtaggctcccgcggcggcccccgagttgtctccggtcccagcggcacctcgggggagcgagcgcgcccc

SEQ ID NO: 10669 - DNA, 410 bp, Homo sapiens
  chr5:142782794-142783204
  binary
cgcccgccaccgtccgcagttcccgccgcagccgagataaacaacttagcttgtgaacgcagaaggagcaggagggaaatatattttttttttctaaaaaaaggaagtaaacagccgcccctttctccatgggtggggggagagcccctatttaagaaagtctcccattgcccagctgacaagccagccctccgccccgcgccgggctccgcgggtcgaggttccgggcgcgcgtgccccgtcccggtcccagctgcttcggccgctccggctgcggcgtctccttccacccacagaatccgtccccgacgggcaggcggtgactcgggctcccgtcacagacacgagctcgcaaaatggaggaggcggcggcggagggaagagagcgcggacacgcgaaagggcagccc

SEQ ID NO: 10670 - DNA, 1070 bp, Homo sapiens
  chr5:142783606-142784676
  binary
cgctacctccttcccgcccccgcccagctccgcggctccagacccactcgggagctcgctctgccccttggcggcaagcgccgccagtgcccctgcgggtgacagcgggcgggccacaagagccggggcgcctcccgcggctgagctgcgtgagtggcccgcgccgccgccgccgggccgagttgcgtgaagtgtgtcacttcgaaaggggctacggggttgcacggaaacggtgccgcagcgtctcggccgcgctcggggccgggcggcctgacacgccctctggggaggcttcagggaagggacgggatagcgggggtcggcgcatacgtactttgggcccggggggagtcgcgtgccggcaggtcccccaccaccgcatcatctgggcggccgggtcttcagctgccgccgccgcgctctcgcactgggagagaagttgcaaagcagaacccaccctcccccgcgccccgaccgtcccccaccctcttccccgagtctgcgaggcggcggcggcggcagaaggaggcgccgcctgccaagttcaacccccacccctcccgcccaatgtgctcacactcgaaggaagttgcacgccaaatgcaaaacctccagcgagctggatttctttgcactttttttttattattatgattaaggaaagcagggggcggcaggcttaaaagcaagttgcaggcgaaatagtaagttgctggcgaaatatagccccccttccgaaactcctgacctcttcttccaccccggccagggcccgcgtccaagttcccggtgcaggccccacccccgaatcttgacatttgctgccctcgactctgtgcgttgctcaccctatcacgttcataggacccctgcccctacaaataaaacaaaatacaggcagctttaaaatgccagcgttcaactccctacagatgttcctgttaggagcttccccctcagtccaaggggaagggaactcgtggtccgtcctgagaaaggagagggccgtggggcgaggggtgcccgtgcgggaagcccccgccccagctcccttccccagctcgccgcgt

SEQ ID NO: 10671 - DNA, 32 bp, Homo sapiens; identical to SEQ ID NO: 7421
  chr5:142785272-142785304
  hyper

SEQ ID NO: 10672 - DNA, 398 bp, Homo sapiens
  chr5:159707402-159707800
  hypo
cgctcagtgaaggatgaacatataagacgtgcaaagatcgtcaaaatgtaaagtgatttggaagcagccaggcgcactgagcgggaggagaccgcacaagcgcggaggaagacgtaggttttcgcttacttgcaagcaggaggcaggagacggccacggtgtagagctgcttggaggtggtgacgttgtagcgatccatgaagtggtccagcaggtagacggccaggtgccgggctgcagggcagagctggcagtggctgctcagcagggtcaggatgtccacgaagaaccggcggctcttcaggagtggggagtgggctcggaaggtgggcagcttcagttcctggaggacaggcggggcggaggggtgacggtcagggctgcctcctgagagtctc

SEQ ID NO: 10673 - DNA, 91 bp, Homo sapiens
  chr5:175831167-175831258
  hypo
cgccacatagtagctaatagggcccaaagtcacttctgtgacgcatagtttgtgtgcctgcttgtcttcctctcaagacaagactagagac

SEQ ID NO: 10674 - DNA, 460 bp, Homo sapiens
  chr5:175831326-175831786
  hypo
caccctcagctcgcctaggggctgggtcaggagtttgtgagaagcgtccggggctgcagagcacttttttccacagccctttggggcagcggagcggagcctctaattcgcattttacaaatgagaagccaggctcagagtagttaagtgactagcccacagccagccagctgggaaaaagcagaaagtgaagtccaggtcttctgactccatctaaacctccgctgcagcctgcagtctgggtgtgggaacagccttaaggaaactcagcccccacggtgtcctgccccagtcccaaggtgccaagcctggccaaactgggcccacatctccgccacctgccaccagctgcaaggcccactgatgcactctagtgggggctatgcagggctcacccgaaacctttggcctctcctggcacgtccctttgtgcagcaggtcccgggctccggtgaacccc

SEQ ID NO: 10675 - DNA, 256 bp, Homo sapiens
  chr5:175832697-175832953
  hypo
cgtggagggcacgggacgagcgctggacactccatcagaggggctgggctttacatcccccttctgccactcactggactcgcgacctttgagaagtcccttccctgggcagcttggctttcaaacctgttaaatgagtgacaatatcctactaccggtgggaagtgaggcttacgagatgctatggtaacactctgcagcccatagagggcgtgtgcgtatgagggacagcatggctgctgtggcctgctgttcc

SEQ ID NO: 10676 - DNA, 195 bp, Homo sapiens; identical to SEQ ID NO: 5833
  chr5:176558657-176558852
  hypo

SEQ ID NO: 10677 - DNA, 144 bp, Homo sapiens; identical to SEQ ID NO: 9800
  chr5:176558908-176559052
  hypo

SEQ ID NO: 10678 - DNA, 165 bp, Homo sapiens
  chr5:177654009-177654174
  hypo
cgatggatgccctgggagagcgagccagagggggcatgtttatgggctgagctgcacccccccacccccaatttatgtgttgaacccctaatccccggtagctcgcaatggcccgtatgtgaatggatatggagataagagaggtgattacattaagatgaggcc

SEQ ID NO: 10679 - DNA, 117 bp, Homo sapiens
  chr5:178016455-178016572
  hyper
cgccgtgaccaccgcctctccaggtgtaccagcgttggttaggaacagtaggtgctactggtcacagtcaccagatacttcccacgagcctcatctttatccccgactctggccgcc

SEQ ID NO: 10680 - DNA, 289 bp, Homo sapiens
  chr5:178770455-178770744
  binary
cggacccacccccggatgcaagccagagacctgttcaggcaggcaaaagagagaggcgcacgctcctgcctgctgagccttttggagacccgggcgctccccatgcataaatggccccctgctcagaccagtcaaaacaacctgctttccagccaagcccttcagttggagcacgaggctcactaaagcacgggaagggcgcggaaagtcctcagcgcaggccttgccctcccaagggactcccaggtaacccttttccaaaacccaggcgagagcagcggagagaaag

SEQ ID NO: 10681 - DNA, 418 bp, Homo sapiens
  chr5:180326156-180326574
  hypo
tcagaacagcgcagtttgccctccgctcacgcagagcctctccgtggcttccgcaccttgagcattaggccagttctcctcttctctctaatccatccgtcacctctcctgtcatccgtttccatgccgtgaggtccattcacagaacacatccatggctctcatgctcagtttggttctgagtctcctcaagctgggatcaggtaagactcatctttgtttcctccttactaactaacagtttgagttctttagctacaatggttgcagcataatggaatgaaggcatctttgtcgtttccattcctttggcttctcctagcctcagcctggggaaggatcaggcgctgtggaaacaattatagtagcccccaaataatggaaacacgggtgttgaagacgcaccgtgatcgttgac

SEQ ID NO: 10682 - DNA, 440 bp, Homo sapiens
  chr5:31639164-31639604
  hyper
cgtccctgtcactcggggaagggagttcccgcccctcgaatcaaccagggggagggaatccccgcccatcctggaggctcggcggatcccctgcgcagcgaggcgaggagcggaccccagcgccggtgcgtgccggccccgggcagcgggacgcggcggggcggcggctgcaggcagccgaggagccgcaggccgaacccaaggcaccgggattgcgcctcccgcggctgccggcgaaccgcggctctgcagctcggggcaggcgcggcggcggcaccggtggtggccgcggtggcggcagctgcgcggggacccgccgggcggcgcctgggtctggacgcgcgaggaagccgcgggagcctcggccaagccgcgagcaggtgaagcgaccgtcccgctgcagccgggacgcgcggctccgggtgggcaggggatggggg

SEQ ID NO: 10683 - DNA, 101 bp, Homo sapiens
  chr5:38556107-38556208
  hyper
cgaaatcacctggcaggtcacctctccgaaggaaaaacatttcaagctccctcccatcccccaggtaacctctggcctcagaactcactgccctgcgtggg

SEQ ID NO: 10684 - DNA, 86 bp, Homo sapiens
  chr5:38556985-38557071
  hyper
tctcagaaggtcatggaagcgcaggggagagcgaggcggccgagcccaggcaaatcctcgagaaaggccgagtgcgcgacggctct

SEQ ID NO: 10685 - DNA, 162 bp, Homo sapiens
  chr5:38557400-38557562
  hyper
tctcttaatggggtgagatttttcctccgtacattgttcccatttccgcagtttcacttggcctcggttttctagcagagtaatcaccaaatgaaattagctggagagcgtttgatggcgcagaatcacggtctgaagatgtttacgctgtatgccggacgc

SEQ ID NO: 10686 - DNA, 50 bp, Homo sapiens; identical to SEQ ID NO: 9814
  chr5:49737299-49737349
  binary

SEQ ID NO: 10687 - DNA, 76 bp, Homo sapiens; identical to SEQ ID NO: 7437
  chr5:54518558-54518634
  hyper

SEQ ID NO: 10688 - DNA, 117 bp, Homo sapiens
  chr5:76506029-76506146
  binary
cgctgggggcggcgtcgggatgagtgcagaagagacgaggcctctggacagcggaggaggaggggagggcgccgaggcgcggtgccagctgccgcgcacaggggccccgcggcggag

SEQ ID NO: 10689 - DNA, 96 bp, Homo sapiens
  chr5:76507202-76507298
  binary
ggttgtcactaaggaggagtttacttttcatttgtggagatgatgggagcccaggaaatgtggtcagaaaaaggcccctggaggggtcctggaagc

SEQ ID NO: 10690 - DNA, 192 bp, Homo sapiens; identical to SEQ ID NO: 6216
  chr5:77148195-77148387
  hyper

SEQ ID NO: 10691 - DNA, 38 bp, Homo sapiens; identical to SEQ ID NO: 8593
  chr5:77268330-77268368
  binary

SEQ ID NO: 10692 - DNA, 158 bp, Homo sapiens; identical to SEQ ID NO: 9821
  chr5:82767810-82767968
  hyper

SEQ ID NO: 10693 - DNA, 542 bp, Homo sapiens; identical to SEQ ID NO: 9822
  chr5:82769369-82769911
  hyper

SEQ ID NO: 10694 - DNA, 246 bp, Homo sapiens; identical to SEQ ID NO: 9823
  chr5:82770318-82770564
  hyper

SEQ ID NO: 10695 - DNA, 78 bp, Homo sapiens
  chr6:11043624-11043702
  binary
cggacacgggtgaacacacacacacacacacacacacacacagcttactgtcaggcagttcatcggacacgggtgaac

SEQ ID NO: 10696 - DNA, 135 bp, Homo sapiens
  chr6:111766152-111766287
  hypo
cgaaggagatttatggaaggcaatgattaacccagagaactaacctaggcagtcaagcaaccgatcacctcatcgttttcaagaatcaactacagataataagacggcaacaggagagaaatataagaagctctc

SEQ ID NO: 10697 - DNA, 160 bp, Homo sapiens; identical to SEQ ID NO: 9843
  chr6:134639003-134639163
  hyper

SEQ ID NO: 10698 - DNA, 69 bp, Homo sapiens
  chr6:151562596-151562665
  binary
aagttctcaaaggatggggtcagtgtaacgagcattccgggtactcttccctggacgcagtgctgaaac

SEQ ID NO: 10699 - DNA, 235 bp, Homo sapiens
  chr6:151815611-151815846
  hyper
cgccacccctgggagcaaagaattccttcatttaactttccctgcttagctactgaagtgtgcttcggagcaatttctggaaaatctgatgtggcaggaggagggccagcccggagtagagtcaccggccctttcgttgcgaagtaatccagaaacgttggtaattcagttgttcctgaatgcatctactcatttactcccaggagttacttaggtactggggactttcaggtat

SEQ ID NO: 10700 - DNA, 80 bp, Homo sapiens
  chr6:151815879-151815959
  hyper
gaacatgcgcgcatacacagacgctcgtgcacacacgcgaacaggcacatacgcgaacaaacacgggcgcgcacacacac

SEQ ID NO: 10701 - DNA, 229 bp, Homo sapiens
  chr6:159589682-159589911
  hyper
cggcggcggacagcagcacgcggcgtccaggacccggccttcctagagcttaggtcactgtagcctccaggggcgctccgagtccatctggagggccgcgaggcttccaggctggaaggaggaatagggagaaggaggaatagggagacctggggcagtgttacaattacagaaaagggagaggcgaggtccgctgagtccttggcctgggcaacaaggcacactgaaa

SEQ ID NO: 10702 - DNA, 41 bp, Homo sapiens; identical to SEQ ID NO: 5840
  chr6:159591277-159591318
  binary

SEQ ID NO: 10703 - DNA, 50 bp, Homo sapiens
  chr6:160455514-160455564
  hypo
cggatgagcgtcataaactttgagtgcaataaaaccgcaggtaagtgtgc

SEQ ID NO: 10704 - DNA, 255 bp, Homo sapiens
  chr6:160512209-160512464
  hypo
gctccgtgccctggtgctgagcgcatcgccgagaaggagcaggtgctccgtgccctggtgctgagcgcatcgccgagaaggagcaggtgctccgtgccctggtgctgagcgcatcgccgagaaggagcaggtgctccgtgccctggtgctgagcgcatcgccgagaaggagcaggtgctctgtgccctggtgctgagcgcatcgccgagaaggagcaggtgctccgtgccctggtgctgagtgcatctccacgac

SEQ ID NO: 10705 - DNA, 129 bp, Homo sapiens
  chr6:161188108-161188237
  hyper
cgccctggaacacggagctggcgagaaggagaaaagcccagctggcggcgtaggggcgagggtcctgcctttcccggcggcctcgccctggccatcctggccctgcgggaaggggtcagcccacccgag

SEQ ID NO: 10706 - DNA, 52 bp, Homo sapiens
  chr6:1625068-1625120
  hyper
tttttttttttttttttttttataacatgaagttgtcagggacgctcctatg

SEQ ID NO: 10707 - DNA, 109 bp, Homo sapiens
  chr6:163834157-163834266
  hyper
cgtagatttagggactgccgacttctatagatcaaggacttcattggtgcagctgaggaaattcttccaaacaagtctaaatgttggaaatccaccaaactgcagagaa

SEQ ID NO: 10708 - DNA, 97 bp, Homo sapiens
  chr6:163834987-163835084
  hyper
cggggccctcccctcccccaccgcgcgctcgcggggcccgacgggggcggagcgaccctcggaaggggcgtggcgaccgggctcgacgcgcgcacgc

SEQ ID NO: 10709 - DNA, 667 bp, Homo sapiens
  chr6:163835131-163835798
  hyper
gaaagtcccccgtgaagcaacaggacgttaaaaaaaaatttctcttctgcggggtggataagaggttctgaaaaaactatagtaacgggaggcgaggcggaggcagcgctggcgcgtcccgctggaattcctctcgcctgccgcgccagccccgaccgcgcccgcagccccacccgccccgtgccgtggaaagccccgcgccccccccgcggccgtcggccccgcagcccacacccacccgccccgggcgccccgcacggcggcgacccagtccttgcgcccaggcccgccgagcgccgcagtccgtcacactcccgttgcccccgtcgcccgccccgccggggaggcagggaggagggggcgcggcgccggcggctgccccggtcgcggggcggcgggcagcaggcagcgggagcgcgccggccgggacccgctaacggccgccctgcgcggccccgcccgccgcccgcccccggccctccccgcgccgctgcccctccccccgccgccgccgctgctgccgccgccgctggcagcgccgcctgaactgaggcgaactccgccgccaagtgagtgaggaggaggaggaggagaaggaggaggaggaagaggaggagcgcagtcggagcgcggcggcagcggcagaggcgccgcggcggggaccagc

SEQ ID NO: 10710 - DNA, 292 bp, Homo sapiens
  chr6:163835906-163836198
  hyper
gcgccccgcgcccgcactcggccagccgagacccgcctcccgcccgcccgccggcctcgtgagggacgcgccgagccgggcggccgagagcggcggcggctgggagcgcgtcgggcccgggcggaaagtgcctgcggggggcgggcgagcgcgcggtgccggccgccccggggctcggcgcgggagccagagcgggagccggcgcggagcgggacgccgggtcccgagcggcccgcggccggggctcgcccccgcccctccctcctctccggcggcggcggcggcggcggcg

SEQ ID NO: 10711 - DNA, 239 bp, Homo sapiens
  chr6:163837231-163837470
  binary
aaataaaattgagccaaagtttccaaaaagctgtatggagcgctgtggggagtgaagaatgacaagaagattaatgttgaccaactttggaatttccttaagaagttctcatagcagtacctgaagtattaatttctagtagctgtgggtttctgtggacgcctagagaaaaaaaagaccacaaaaaaagtctgtttcgaaaatcgactggccaggagtttgtttgtttttttttcctg

SEQ ID NO: 10712 - DNA, 106 bp, Homo sapiens
  chr6:167834910-167835016
  hypo
cgtgcctgcacccgccaccgctccaatccccacgcagcccggtcacccggtgcctccactgccttggctggcgctgggccggggcctccaggtttctgtgtccaaa

SEQ ID NO: 10713 - DNA, 36 bp, Homo sapiens
  chr6:168462450-168462486
  hypo
cggctgcggagcccagcatacccagcccagccccac

SEQ ID NO: 10714 - DNA, 186 bp, Homo sapiens
  chr6:168462521-168462707
  hypo
gtgggccgcacgcggaggtggagctggtggctggcgcgcagcaggtgcagcaggtgcctggaccgccaggtgcaccccgtgtagtaaaccagcttctgtgctgcgggcagcccatccagctggatctccagcttctttccctgagcaaacaggagagaagttgccactccacaggtggaaaaccac

SEQ ID NO: 10715 - DNA, 94 bp, Homo sapiens
  chr6:24662806-24662900
  hypo
cgcatccccctcaccgagatggggatagtgatcaataaatactgagggaactcagagaccagtgcccatgcagatcctccgtatgctaagcgcc

SEQ ID NO: 10716 - DNA, 71 bp, Homo sapiens
  chr6:35109297-35109368
  hypo
cgaggccagagcatgcatggggcttttcttcaggctgtttggacagccgagaagccgagccacacccagga

SEQ ID NO: 10717 - DNA, 125 bp, Homo sapiens
  chr6:35109423-35109548
  hypo
tgtgggagaagcggaggagccgccagggctggggccaggctctgcccactggggttccgcccgttgtcgccctccgcctcctgggctctagcccttgcctttcttgactctaagtctactctgtc

SEQ ID NO: 10718 - DNA, 94 bp, Homo sapiens
  chr6:37665241-37665335
  binary
agccgagccgccgataaacccgggggaagaatagcagcccggcgccccgcgggaatctggagagcaattccaggcaagaagggccccagaaaac

SEQ ID NO: 10719 - DNA, 502 bp, Homo sapiens
  chr6:38141432-38141934
  hypo
cgccctcaccctcctttgatcagggttgcaggttggcgccgaagacccaaggactgcagtgctgctcacgtgccatgccgtcctggggagactcccaggctgatgctgatggcgacagaggccggagctctggggacagcggaggggcaggcaatgttgtgcgcagttacccagggcaggcagcactggaatggaaatcactaagtaggagacggagccacatcaagccaccatcgtcaaatgaggtccttttgatgaggattaggagaaaagcttcttggaactgctatttttcagtccccagttgagtactgtggtgtgggggaagcacggagtcccagttctgcgttcctgacgctgatgggcaggtggctgcctctccaatgcttcgataaacacaactggaggggcagctaagccacggcagtccccggcaggtttggccacgccagaactcggtatatgtttatctacatggacttcggaacagtgaattagcagc

SEQ ID NO: 10720 - DNA, 61 bp, Homo sapiens; identical to SEQ ID NO: 6255
  chr6:391113-391174
  hyper

SEQ ID NO: 10721 - DNA, 55 bp, Homo sapiens; identical to SEQ ID NO: 5841
  chr6:393764-393819
  binary

SEQ ID NO: 10722 - DNA, 86 bp, Homo sapiens
  chr6:41605681-41605767
  hyper
cgctgtgggcgggtggcctgggagcccagatccctgtccctggcttaggaccccgggaggagaccgagggggtgggtaaaacgtga

SEQ ID NO: 10723 - DNA, 467 bp, Homo sapiens
  chr6:43969986-43970453
  hyper
cgccttctcccccgccgcccgcgcccacgccctcccccgcggggccgtggcagtgccaccaagggcctctttaagcccctttgaagccgcggagccccgcgccgcaggaggccccgccgctatgccagctatgccagctatgtccctgctgccgccggccgccaccgctcccccattaatgctggctaatctggctaataaataaactcccctcccagccccagccccgcgccgactcctccccgcccccgcagaatcgatgtcagggctcgactagagcaagcgcccgcactccaccccactccctcgagatgtagctgacgttttttcttatggctgccctaggtctgtagcccgtcggggattctcggggagacgtgggatttgggaggtctccgcctagccactgcgtttgccttcctcttttccagtccacctgcgcaccaggggcaggacacgtggctggg

SEQ ID NO: 10724 - DNA, 161 bp, Homo sapiens
  chr6:4932028-4932189
  hypo
cgaggagccaacacagttttaactcaggagtctgaaggccaagttcagtagtcttggtcagcgtgagccaaaatgaatccatttttaaattagcagaaccacggatagttcgtagggactatcgcctcaaagaaaatgctgaagctgtttctgagactcac

SEQ ID NO: 10725 - DNA, 249 bp, Homo sapiens; identical to SEQ ID NO: 8647
  chr6:56818408-56818657
  hyper

SEQ ID NO: 10726 - DNA, 108 bp, Homo sapiens
  chr6:6984882-6984990
  hypo
cgcgcagagaggcttcaagggtacttgtattgggaaacgttgatgcgcccagtacagtcgggaaacaaaaggagatgaagctgagaaggcagaatgtggccagatggc

SEQ ID NO: 10727 - DNA, 55 bp, Homo sapiens; identical to SEQ ID NO: 9882
  chr6:71665452-71665507
  hyper

SEQ ID NO: 10728 - DNA, 223 bp, Homo sapiens; identical to SEQ ID NO: 9883
  chr6:71665723-71665946
  binary

SEQ ID NO: 10729 - DNA, 72 bp, Homo sapiens
  chr6:71955569-71955641
  hypo
cgccaccgatggcctgccgatgtctgctggtgtctgtgtgtttgcttttctgctcctcttgacgaccagcca

SEQ ID NO: 10730 - DNA, 156 bp, Homo sapiens
  chr6:72129577-72129733
  binary
cgcgccggcacccgaagagttcccacggatacggttcccaagtcagtggcatgtcagtgcccttcaagctaccgcaattttatttgttctccccgccagctccataaagtattaaaggctctctccacgacttcttcccaagcccaggtgccctaa

SEQ ID NO: 10731 - DNA, 61 bp, Homo sapiens
  chr6:72130646-72130707
  hyper
cggaaagcccagccagtccccgggagtgtagccaatagaaggcgactccggcaacacaccc

SEQ ID NO: 10732 - DNA, 227 bp, Homo sapiens; identical to SEQ ID NO: 6263
  chr6:72596315-72596542
  hyper

SEQ ID NO: 10733 - DNA, 41 bp, Homo sapiens; identical to SEQ ID NO: 7494
  chr6:74019373-74019414
  binary

SEQ ID NO: 10734 - DNA, 102 bp, Homo sapiens; identical to SEQ ID NO: 7495
  chr6:74020094-74020196
  binary

SEQ ID NO: 10735 - DNA, 131 bp, Homo sapiens
  chr6:74161047-74161178
  hyper
cggttggttgtctgatcgttggatgtgtagatgaataaacgaacggtttgtcgttttacttagactaggctaccgaaaaacatgcaaaagtctaagttacttccgaagggaagtgaggggcgcgacccggg

SEQ ID NO: 10736 - DNA, 179 bp, Homo sapiens
  chr6:74161321-74161500
  binary
gcagcaggtggtccacaacccctttcaccatccccgccgccgtggagatatcatcgcggctgagcttcaacttctccaaaaccgcccggagcttcgaggccccaggcgccgcatccctccgtacgagaatgggggccgagaccggcaggccggggctgggcacgtcccagggcccgggc

SEQ ID NO: 10737 - DNA, 124 bp, Homo sapiens; identical to SEQ ID NO: 6264
  chr6:87646737-87646861
  hyper

SEQ ID NO: 10738 - DNA, 171 bp, Homo sapiens; identical to SEQ ID NO: 6265
  chr6:87646944-87647115
  hyper

SEQ ID NO: 10739 - DNA, 75 bp, Homo sapiens; identical to SEQ ID NO: 6266
  chr6:87647143-87647218
  hyper

SEQ ID NO: 10740 - DNA, 256 bp, Homo sapiens
  chr6:90142647-90142903
  binary
cgcggaaaacctcaccctactataggcccccttcctcccactcttcagaaggcggtggccccacccaggagagggctgcagatcggggccagccccagggcctccgcggtgccacctctctctcgcgagggtccctgccgtgccccggctcgccgctgggaggcgctgcggcaccggcgtaggagccgccggcaggggtggggcggggccggcgggacggggcagagggccctgcggcggcggacgcggcgggctc

SEQ ID NO: 10741 - DNA, 372 bp, Homo sapiens
  chr6:91005702-91006074
  binary
gagggttaaggaggaggccgcccggcctggagctgggatcgcaggctgggggccgggacacccgggcctcgccgggccgggggcagggccgcgggtctgacagctgctgcggctcgcgcggacgcgcgcctcctgcagcccgccctccccatgcctgacttattactctctgctcctcctccctctgctgttccaaaacacccttcgacgccagcaaaatacaatgcgcctcggccgccgtaaacagccgggagggagagcacacattcggcgcggcgcggccgccggctcggctcccacccccttcccgttcctagaaaatgccataaaagcgggcagggcgcggggagggcggctgcgcgcccggcggcc

SEQ ID NO: 10742 - DNA, 42 bp, Homo sapiens
  chr6:91320244-91320286
  hyper
cgtgtttgtgtagtaagccgagttctttcttgactgtctgtt

SEQ ID NO: 10743 - DNA, 58 bp, Homo sapiens
  chr7:100254132-100254190
  hyper
cgagacaatgaccgaccgggggcagctgctttaaaggggaagatacactctattaagc

SEQ ID NO: 10744 - DNA, 243 bp, Homo sapiens
  chr7:100660381-100660624
  hyper
cggagtccagagagtgagtggttctgcgggaccaggaagtaagtgatcgctgtgctccgggaggatgctggaagaagattccagacgcagcttttttgcctgctatggttaccgttgctatgaaggagggcggccctgctgacccagagccagccctgtctcccgctccactctgacctcacccctgagtccagggctgaacgcacgctcctccgtggcccccgcttccaccccgtgcatgtg

SEQ ID NO: 10745 - DNA, 227 bp, Homo sapiens
  chr7:100660682-100660909
  hyper
gctctgcacttacccgcagcccagtgatgcagggtcggaggggtggtcggcagtgggaaagggcgtagggcagatgccgggctgactcttccttttgccagaggaaatcccctctgccccctagtcctccccctaccaaggctcccatcactcatcacggcctctccctacagaccagaatctgagggagagcagattcggccttgagaacgcctacaacaacttcc

SEQ ID NO: 10746 - DNA, 82 bp, Homo sapiens
  chr7:101627660-101627742
  hypo
cgtgggacaatgtagataaaaacctcgatatacagcctagtacacaaaggacggtgtaaatattctcttccgtgcttcgtag

SEQ ID NO: 10747 - DNA, 282 bp, Homo sapiens
  chr7:101627846-101628128
  hypo
aagtcctgcaggactgagctctgaaggccacccacaccctgggttgtgcttggatgatggcatccctcctggcacaagcgcagatgggcagtcgggagggaacatcagcctgggaaaactagatgtcagtgaaaaatgctggaggtggctggcgttcgcaaaactcagtcgtaaaaaacagcacgttctcagtacaaaatgagcactgttaaaaataaaccgcgcaagaagaaatatatgaatacgagggcatggcaaacagttttgcaaggtattaagatc

SEQ ID NO: 10748 - DNA, 115 bp, Homo sapiens
  chr7:102782159-102782274
  hypo
atatgcctgcccttccggcaggccaaggtgtttttccggcatcaagcgggggaatggaccatcacaggcttgcggatgatcagcccatctttgatcagcttccggatctgctgac

SEQ ID NO: 10749 - DNA, 32 bp, Homo sapiens
  chr7:105279344-105279376
  hypo
cgagggaatgctagagttaatccaggtgcagg

SEQ ID NO: 10750 - DNA, 119 bp, Homo sapiens
  chr7:107483576-107483695
  hypo
cgagaaaaagctgaagaccgtgatcagtgaagcacacaaacggggcatggtgatagagaaaaacagtgggcacgcaatctagcttgggaaaatgaggtagcacccctttcaggaggtga

SEQ ID NO: 10751 - DNA, 240 bp, Homo sapiens; identical to SEQ ID NO: 9900
  chr7:112726614-112726854
  hyper

SEQ ID NO: 10752 - DNA, 90 bp, Homo sapiens
  chr7:127679932-127680022
  hypo
cgccccattacctcgctttatggagagctgggtaaatttaaaggcagctataaatatcccactgagtgccagagctatagcacagtcggc

SEQ ID NO: 10753 - DNA, 178 bp, Homo sapiens
  chr7:1333680-1333858
  hypo
cccgaggggctgtgggaccccgggaccgggtgctcgctgagggacggcccttgtctgcggtcatccctcccctcctgagtggaaggtgatgccgtgggcccagggctggctgcgtctgccaggcatgccctgcattcaggcagaactcgagggaggactcatctccaaacagaagagc

SEQ ID NO: 10754 - DNA, 32 bp, Homo sapiens
  chr7:140156493-140156525
  hypo
cgaatgcacttgagacagtaggtgtggttgca

SEQ ID NO: 10755 - DNA, 100 bp, Homo sapiens
  chr7:150069580-150069680
  hypo
cctggtggcgcactcgcgcgtgcactccggcgagcggcccttcgcctgcgaggagtgcggccgccgcttctcccagggcagccatctggcggcgcatcgg

SEQ ID NO: 10756 - DNA, 115 bp, Homo sapiens
  chr7:150069820-150069935
  hypo
ccagaagtccaacctggtgtcgcaccggcgcatccacacgggcgagcggccctacgcctgtcccgactgcgaccgcagcttcagccagaagtccaacctcatcacccaccgcaag

SEQ ID NO: 10757 - DNA, 115 bp, Homo sapiens
  chr7:150079390-150079505
  hypo
aggcttgccgccctgtggtgctcctcccaaactcagggagcaggtatttccgttcacctgcgccttcaagaacctgagctcaaagcgctgcaatgactggccagggactagcagc

SEQ ID NO: 10758 - DNA, 127 bp, Homo sapiens
  chr7:150081308-150081435
  hypo
aggaaaggtggtccggtaggggcccgggggcccttgtgcgatagacaaagcggccttccaagacttggtgtgggcactggtgggagatggcgcatctggcccttgatgcctgtcttccagccggggc

SEQ ID NO: 10759 - DNA, 42 bp, Homo sapiens; identical to SEQ ID NO: 7515
  chr7:157262486-157262528
  hypo

SEQ ID NO: 10760 - DNA, 215 bp, Homo sapiens; identical to SEQ ID NO: 7516
  chr7:157263471-157263686
  hypo

SEQ ID NO: 10761 - DNA, 217 bp, Homo sapiens; identical to SEQ ID NO: 9916
  chr7:157476655-157476872
  hyper

SEQ ID NO: 10762 - DNA, 140 bp, Homo sapiens
  chr7:158556274-158556414
  hypo
cgcacccagccagtaaattcttttaggacacttatttttttattgtcaagtcacacacacctcttgaggacgggaggtcactgaaacacctgccacacagtaacagtctaccgtgcttgtttctagggatcctggattgc

SEQ ID NO: 10763 - DNA, 207 bp, Homo sapiens
  chr7:158570568-158570775
  hypo
cgagaattgccgaaacatgacacagagccatgaagtgagcacatgctgttcgcttcacagcacggacaggcttatttttcacagggctgccataaactttcaactagtaaaaacacagtatctacgaagcgcaataaagcaaagcacaataaagcgaggtgtgcctatgaacactttcatcttaaatgtcgcattcatattttatac

SEQ ID NO: 10764 - DNA, 121 bp, Homo sapiens
  chr7:1705266-1705387
  binary
cgacgtgcgggcagcgaccccgccccccgcccctccggtcgcccccgccgcggcccccgccccctccccatccctccccgcgcgctctcccacatgaaaccttccatcacgctcagaaaga

SEQ ID NO: 10765 - DNA, 503 bp, Homo sapiens
  chr7:1705693-1706196
  binary
aggaggaaggaggggaagccgccgccgccgccgccgcgctcggggaaccggggtgcgcgcgctctgctcgcccgcgacagtgcctccagcccggggcccgcaccccggcccaggtaagaaggggcctgaggggcagggggctgtccggggccgggggacccctctgtcgccgctgcgggatcggagggtccccgcccctaggggaggcagggaagaggatgctctctggggggggcggcggggggcagcgcagggtccccagcggctctcgcagcccgggccaccccatccctggtgccctgacctcggcgtccgcgccagggccgagtctccccgcccgcggggctctggatgcggcgctcggggcccgcggctcccgggcgtccccatccacccacccaggttcggaggcgggcgcacccgaagttagcggccgccgagcctgggccggacaaacttccctccccgacgccgcggctggaagggccaggactccggacccc

SEQ ID NO: 10766 - DNA, 60 bp, Homo sapiens; identical to SEQ ID NO: 7522
  chr7:19156644-19156704
  binary

SEQ ID NO: 10767 - DNA, 50 bp, Homo sapiens
  chr7:21582471-21582521
  hyper
cgcactgggggctcagacccaccccggacacgcggcttctcggccgtgtt

SEQ ID NO: 10768 - DNA, 176 bp, Homo sapiens
  chr7:21583452-21583628
  hyper
gagcctgttcgaccaggataacccaagaacaccagcgctttctttagctgcttgggtgttaggcgccaggtgggctttctgtgccaaaaaacttgcgtttcagttgctcttgggtcactctggagtcacatcctttaaaaaatggggtgtttggcagagcgcatgtaactcgtcac

SEQ ID NO: 10769 - DNA, 210 bp, Homo sapiens; identical to SEQ ID NO: 8693
  chr7:23052818-23053028
  binary

SEQ ID NO: 10770 - DNA, 595 bp, Homo sapiens
  chr7:23053080-23053675
  binary
gagtgggagaggaggcagaggccagagcatccgccgcggcagggaggggacggggggctcccgccccaggcccacccggcagaggggcggccggtggggccgaggcggcggcacccgggtcacagcaggaggctggactgctcctcgccgggaaggaaagacccgagtcgcgcgcacaaagctgccgccctccaggcagcgggcaggctgcgcccaacttcggggcgagcagcgccggccgcagcccacccgcccgccagccgcccccagcgccccgcgccgcctcgcacccacccatggcgcctcgcgcgggagccgttacccccagtggagccgcggccccagggacaaagtcccggtcctgtcctcgccgccgcctcgccccggctcctccctgacaaaaaaaagttatccgttgccggacgccctgggggcccggcgtgggtctctcggctggactcaccagggcggctgccggagctccacctgcaggacctcgactcgtgaggctctcagcgacagcgacggaggctgctctgcttcctcccgagtagcagcaccacctgctccccttcttcctagcagaacgggtccc

SEQ ID NO: 10771 - DNA, 79 bp, Homo sapiens
  chr7:26198616-26198695
  hypo
cgcttcttccccaatttactcccgtccattgtgttgtcaggtgcaggtttccaaagcacaccttggttcgtctctctgc

SEQ ID NO: 10772 - DNA, 43 bp, Homo sapiens
  chr7:2728259-2728302
  binary
ggggacgggtcgggaatccagggccaagcgcccgaaagaaggc

SEQ ID NO: 10773 - DNA, 372 bp, Homo sapiens
  chr7:28450240-28450612
  hyper
cttgctcaaggccggggactggagcgggctacttgtatatttcgttgtcagtctgcagaatgtgtttgatttttatttttccctccttctctgacatgtgtcaaggaataaagactggatacaggtccattacgtcattctgcaggccagtaagtgtttgattaacggcttgagctcctcaagggttcaggagcttagaatgctgacaaagcaactctgctttgcatccccctaccctccccacaacacactcgtgcaatcgccggctccctgggcatctttattgccctctcttcccagcccctccctctccaccactcccccgtctacaccgttatcactctagccccgcccccgcctttttacagcttt

SEQ ID NO: 10774 - DNA, 1047 bp, Homo sapiens
  chr7:299930-300977
  hypo
cgcctcggcgaggtagtgtccgccggccgctgcgctgcccgggacggagacagaggcgccggacctcccagcaagcgcatgcgcccgtcgtgaattcagtgaattcagaggcaggacgggatcatccggagtcgggagctgctgccacaggaggcgaggctccccaggtctcataggacacattttgtcagtgtttgaccagaaaagcttgggaaggaagcgctgtctgtgctcacggacagaggcggccggcgccggaggcattccatcctttctgtagggaaaggagcctttatttactattttgtatttatatttgatgaataagtatataaacagagacgtgtacacagatgccaatcacctaccaaaccaaacacgaggaccgccctccctggttctgggggcccctcaaggccaagctcacccctcaagtgctctcacactcgggacctaattcaagtaaaaaccctttctccttcctggggcctcggctcctggagggctggagggtctcgtctgaggacgggaggaggctctcgctggacgtctggcctgtgcgctggtggacggatgcctacgtggttttggaggacccgatgaccaggcgtcctgcgagtccgcccgctggcctgcagcacccacctcggacttggctgtggacggttggtgcaagtgcatcctgcagggctggctgtgcgcagctgtgggctgacctttgcagagttttgtggaatagtttgcaatgtcataaaagtgcaataaaggtacagcagatgtgtgtcggcctcacggggcgggtccctcacaccctggtgtgtggctgcctgtccaccccctctccaaagaaaaaccagtcctggaaccaggcatggccaggagtcggcattcaaggtggcctggacccgaggcctgctggggtcggagggggctgcctgccaagccctggtgcaaacaggccaggtggggccccacctccaaggcagggcggtccgtcctgggttgctctcagaggctggggccgcgacccaaagctgcggcggcccc

SEQ ID NO: 10775 - DNA, 396 bp, Homo sapiens; identical to SEQ ID NO: 6278
  chr7:3082731-3083127
  hyper

SEQ ID NO: 10776 - DNA, 84 bp, Homo sapiens; identical to SEQ ID NO: 5847
  chr7:3083602-3083686
  binary

SEQ ID NO: 10777 - DNA, 179 bp, Homo sapiens
  chr7:31091717-31091896
  binary
cgcccccgacccccgccgctgggatttcccgccgcagctcctgctccagtctgtgctgcgggtggggtcgggttgagcagcccggcgccccccaccgcgccccccaccgcaccgccctcgatctaaccccgcccccgggcgctcattggcctgcagcaccccctccccagcctgtgaag

SEQ ID NO: 10778 - DNA, 118 bp, Homo sapiens
  chr7:325309-325427
  hypo
cgcccctggggctgtggctgggatttattgtgtttattttccgatgtgtagcttttatgatctggggtccgctgagcggggctcggacagtaccctaagctaggtcgggtcgcactgc

SEQ ID NO: 10779 - DNA, 165 bp, Homo sapiens
  chr7:35839776-35839941
  hyper
cgacattcatcgctacagtagaaactcacacaatcgcagccctttattagtattttgttacccagtagttcctgtgtccattcatttcctcaactggagtgtgagctccaagaggaccgaaccgggcaccgacaaggtgagccaatatgaatgtggcgagtccgc

SEQ ID NO: 10780 - DNA, 58 bp, Homo sapiens
  chr7:35840078-35840136
  hyper
atggggagcacagacacctgcctcgaagtgtctcttcactttcactcacaaagccgtc

SEQ ID NO: 10781 - DNA, 39 bp, Homo sapiens
  chr7:44364447-44364486
  binary
cgcggatggggccacgcgcaggagcaggcgcaagcaggt

SEQ ID NO: 10782 - DNA, 369 bp, Homo sapiens
  chr7:44365258-44365627
  binary
caccgccgccgccgccgcgcccgccccgcccgccgccccctgcacgcgccttccccgcgccctgcacacgctgctcctgcacccgcacccgcagggcaccggcgccctgcatctgcacacgcgccctgcacacacacccttgccccgcacccgcaacgcacctgcacctgcacctgcactcacacgcgcgcccgcccccgcccgcccccgcaccccacacacacacccgcgccctgtactgacgccttcatcctctacccgcaccacgcccgcacctcgcgcacgcaggccacttgctgctgccgacccctcgctctcacataacacagaagagtgcacataatgaacgcagcctcctctctctctctc

SEQ ID NO: 10783 - DNA, 161 bp, Homo sapiens
  chr7:44924093-44924254
  binary
cgttcctggatttctttcatctcatccgcataccggcaaaaggcgcctccgaacttgccccaggctttgaagggtacggtgatggcattgcggtaggacggcttcacctcgctcactcgcagaaacaccccgtatttgttgcagcccacatcgaagaagaa

SEQ ID NO: 10784 - DNA, 309 bp, Homo sapiens
  chr7:44924469-44924778
  binary
ccgcgccgaagccgccaccgccgcggttgaccgtttggcggatgcgcaggaagcggccgcgctggttctccttgaggtccaggtagtacttgcggttctcacgcaccaagaattcgctcttgagcgcgcgccgcggcccgccgccctcctcggcgccagccgccagctgctcggggctgctagggcccagctgcgcgtagtgttctatgaagtcgcccagcgagtcgcggaactcggcggccaccgccatggacagcgtgaggcggctcttggaaccgcccgcgcccacctcggcgatcttgaggaagc

SEQ ID NO: 10785 - DNA, 102 bp, Homo sapiens; identical to SEQ ID NO: 7551
  chr7:50344738-50344840
  binary

SEQ ID NO: 10786 - DNA, 619 bp, Homo sapiens
  chr7:55145980-55146599
  hypo
gggacaccccccaccccaccccaccgccacagcccagagcggtgccaggaagccgcctcgacgcagccgtatcttgaggctccagccccatccccagggtaccacgccacgtagagacactatttttcacttcgtgtttgtcactcctaaagcatgtgtgctagctgcaccaaccctgggatgcctcggtgcatagggtttatgtgcgtcctcctccttccctctgagctggtcccccgtggggaactgctgcccagactgacctgcgtccttccgcacgtgcaggaaaatgtccacgtgcacttgtcagggtgggggccacacgggcaccaccactgatcatctgtgggatcgagttactgcccatgcagatcccacgtgcagggcccagtcgctttggtgagagagtggacgctgtggtgactccacggtctgtggctgtgctcaggaggacagagaggggacatcctgagatggtttgggcagcccgcggatcctgtgcatgtccccagagcgtccactttctccatggagcagtggagtggcgttgctgagacagaaagttcaggttctccactccccatgcagcccccactcccctgtctccggccaggcacgc

SEQ ID NO: 10787 - DNA, 61 bp, Homo sapiens; identical to SEQ ID NO: 9943
  chr7:64974448-64974509
  binary

SEQ ID NO: 10788 - DNA, 422 bp, Homo sapiens
  chr7:69063038-69063460
  binary
cacgcccccgcccccgcccccctcacagctccccaccgcccccagtgcgcaggcccggccgccccagcgcgcatgccctgggctcgcgagcgcggccagcccccagccttttgctttctacacactctacaactggggagggggcgggggaggagggagcccagccgtccacgtgatcccgccggccggggccgcgggggcgggagcgcgcgccgagagaggcgcggggagggcgggtgcgcgggagcgcgcgcactcgagcgagcgagcgaaagcacgaacgagcgagcgagcgagcgagcgagcgggcgggcgcggggttgggctgaggcgggcggcggcggcggcggcggcggtgggctggccgcggagggggaggagcgggagctgcgcgaggcaggcgggcgggcggaggatggggc

SEQ ID NO: 10789 - DNA, 130 bp, Homo sapiens
  chr7:69064053-69064183
  binary
cgaggcgtgtgtgagaggcggcgggggtgttttcctgcgcgaggggcgggtgaagttcattgcccccacttttcccgcgacctttttcggacccgattttggatcgagttgaggggggcgcgggcgtttt

SEQ ID NO: 10790 - DNA, 200 bp, Homo sapiens
  chr7:69065161-69065361
  hyper
ttcctcgctcgcctttcccctgcgccccctccctgcaccccctccacagcagatgggcagaaagaaaggggttcgggcatcacaacaatgcgccccctctccacagagagctctgcccccactccttcctcctctccctccccaatcatggcttcttggctggtggaagtctctttgctgggtttggggcgcctgtggac

SEQ ID NO: 10791 - DNA, 59 bp, Homo sapiens
  chr7:834245-834304
  hypo
cgggtccaggggatgtctctgagcccccaatcctttacggggccttttcctggggtccc

SEQ ID NO: 10792 - DNA, 317 bp, Homo sapiens
  chr7:834873-835190
  hypo
ggaccagagcctgggagggtccacacccgcagaatctaacctggacctgggcagggcagggtccacacccacagagtctgtctaatctgcagaggacaagggtggggtctcccacagagccagcctgaggggtgggtgcacctgaggggtgggcgcacctgaggggtgggctcgtcgccctctgcctcatgctggcaggacccgagaggcctgggagtgctgggaactgagaaacagtcatcaccaattaaaagtcccgctgccttttattaacaccatgcgtcacccttctgtacaatatcagtgagaaaacactc

SEQ ID NO: 10793 - DNA, 296 bp, Homo sapiens
  chr7:90225450-90225746
  binary
cggttccgcgccgcggctccttctgcgctgcgcccgcaactctgggctgagaacttctcccgccggcccactcgccctcgccccgcgcactcggcgccaggcgactcccgcaccttgtacccggcccgccccgcctcctccttcggccgcaccactccccctgccggccgcgcttctctccgttacaaaggagggaaaatgagccgggcggcggcggcgcggcgcggggccaccacggcggcggcgagcgcggccgcccccggcaccacgtaaaccgcccccgcccgcccagctgc

SEQ ID NO: 10794 - DNA, 212 bp, Homo sapiens
  chr7:90226057-90226269
  binary
ccccagcgcccgctcccctcggcctgcgcccccgccgcgttcctggcaccagccatgcagctgccagcggggctggcgtggggtgcgttgtaggcggggatcgagggcacagtgctagggacccgggggagggcaaggacgtaaaggaaagagacccctcttcctcaggatctgggggttcatttgtagattctctcaagcctacaatatgg

SEQ ID NO: 10795 - DNA, 171 bp, Homo sapiens
  chr7:965802-965973
  hypo
cgtccgctcccgccctgaggagccagggcaggccccgaaacaacagccgcccctcccgttcccctcccagaccgccaggagcacctgggagggcccctcagatccacccgagacccccaaggcctcagcgaacctgggtgggctgtagctactgatgcacaatgaccttcc

SEQ ID NO: 10796 - DNA, 501 bp, Homo sapiens
  chr7:966009-966510
  hypo
gcccggtggtggccagcagacacaggcggcacctcggggtctgggggacgcagctgcggctggcttctccccgaccctgtgggcggcacccaactccccaccctgccgggtcctcccggggccatctcggagccacccagcacttgaccatggccctgacaaggcccctttgtactcactggcagtcggagggcgtgggccggtagtagaaggagggtactttggactcaaacctggctctcgcggcgtcgttcccgtgggaggccatgaactgcaagagaggaggggccgggtcagaggcctggggtcccaggggcagcctaggaggtgccagctgcccttggggccgtcaccacagtgacccgcagacccaaggctctgagggctccaccagcaccaggacgggaacgccacctcctcctgccccagggacaccatttctgagtgatcgaccctcccctgggacagggaaggagccagcgtccctaacgacggggtccc

SEQ ID NO: 10797 - DNA, 202 bp, Homo sapiens
  chr7:98639739-98639941
  hypo
cggggttgattgaagaatccggatttatttgcaacatgtaaatattgtccgtagaatactggaagagcccgtaataaggattcagcatttcatggcacagcaagtaaagccactccctgggagcaaacaacaaaaatgcatttgagacgcgctaaaatttctacattttttttttttccctgagatggagtctcactctgtc

SEQ ID NO: 10798 - DNA, 80 bp, Homo sapiens; identical to SEQ ID NO: 8735
  chr7:99155672-99155752
  hyper

SEQ ID NO: 10799 - DNA, 216 bp, Homo sapiens; identical to SEQ ID NO: 8736
  chr7:99156600-99156816
  binary

SEQ ID NO: 10800 - DNA, 77 bp, Homo sapiens; identical to SEQ ID NO: 8737
  chr7:99156982-99157059
  binary

SEQ ID NO: 10801 - DNA, 39 bp, Homo sapiens
  chr8:101717122-101717161
  hypo
agaggcaacttggtaaataaatttaaatcaccttagaac

SEQ ID NO: 10802 - DNA, 89 bp, Homo sapiens
  chr8:103315038-103315127
  hypo
cggcgtggataataagactcctgtgctttcatctgttcaaccggcagccctgagtttgaactggttaagagcactgcagtgaaatcttc

SEQ ID NO: 10803 - DNA, 110 bp, Homo sapiens; identical to SEQ ID NO: 6294
  chr8:11561282-11561392
  hyper

SEQ ID NO: 10804 - DNA, 938 bp, Homo sapiens
  chr8:134582236-134583174
  binary
cgtccgggcccctgccagcaccttccaccttggggccttgtcaatgaacactgcgttagcacctacgacgtgccaggcgccctggcgactattggaaaacccggctcccctctcaccccgttttcctcgttggcgagtcggcctcgcctcctcctcccgtctcttcctctcaccacacacacccagccgcagagcgggggtgggcgctcgctgtctccctggagaaccagctcgtcgcaaacttgcggggcttggggacccgcgagggggagaagtcgggagaggccaggggtgcccggaaacaatcacgagaaagccgggcgaatgcctgatgcagggacgcggcgagccagtcactgccctcagggtcacggctgactccctctgcgggactcgcccagcccgcgagacgcagtgacctgcccaacccccacccccttgcgcgcttctgggtgcgcacgtgtcccctcgcccaacacaccaccgagccccgcgcatggtacggccgccgaggaccctagcgtaggagggaggagcgagtcagggctccagctgacgagcagagccagacgatccccacacgcttcctgggagacccggctgcaaggccaggctaatgcgcgctccgacgtctctgtgccaagccggggcgcaagctcaacccccatctcaagttcagccgcgcttcctcccgcaaggtcacgcttaaacactcgcgcagagaaaggaggagcggaaagttgcgccaccgtcccgattccaaactaactgtaccctcaccagagcgcctcgccccagggtcaccgctgtccgtccccgtgcgctcccagaaggggtggccctgcccccacgcaggtcacacacacgagagacacaggcaagttgctaacttttgtcagattatttcttgggagctgcgacgcctcacggggttgggg

SEQ ID NO: 10805 - DNA, 926 bp, Homo sapiens
  chr8:134583293-134584219
  binary
cccccagatccggagcagcgcgctctgacggcgtccccggggccgatagccacctcccggatctgcgcctgcttgcagcggattgggggactcgatccggatactgtcccacggccgctcgtccagaacactggcggcctccgcggtgtcccagcctgtgaccccaaatccgctcgagagcgcctgagcccggccacccagcgaggtctcctcccacgggcggccccagcggaggagatcccagcccggcgccgggtgcaatgtcactggggctgctttcgggaaccgctgcccgggacttggcgtaggttccccacagagctccaggcagctcctccagtgtcggccgaagacccctaagcccgaacctccaccccgaccttcttcctctcccaaagccctgggtggtcgccgctgccaaggaaggggtctcccttcgaatgtcttccactagaatcccggggtcttcagtcccagctccactgtcacaccctcctagtcccctccccaccccttcagttcccgggtccagacaatcaaccttccactccgagaatccacaggaaactgcccgagccccaactcaggcggacgcagcccccgcgcaccccgagcagggttcgcctccgcgcgcgcactcaccacggctggagacacgctggagtttccgggatttgggcatgaaggggttcggaggagaatacaggggtgtgggtgtcccggacacttgcccccttcccagctcacatcgcctcttccttctctctccgctcttcttcctcctcctcctccctccggtctagggctctttgtctttgcaaagtgtcgaaactgtctggcatagtgggctccgccggcggaggctggagccgaggaagcgaggaggcgggatgagggtgggagagggctcgggaacaccttccccc

SEQ ID NO: 10806 - DNA, 89 bp, Homo sapiens
  chr8:142243860-142243949
  hypo
cggcaggcccctgggaaacggctatggagcgtggcacccgttttgctgtgcttttcccgttttgctggtgcagggccttggctaggcag

SEQ ID NO: 10807 - DNA, 66 bp, Homo sapiens
  chr8:142244214-142244280
  hypo
tcacctgagggagtggggactgttcttctctatgtccactgaggcctaattcacatctcgtccctc

SEQ ID NO: 10808 - DNA, 64 bp, Homo sapiens
  chr8:143531771-143531835
  binary
cacacaccacagcctggcacccctcttcatcacatgcacagggcaggctggggagggcgttccc

SEQ ID NO: 10809 - DNA, 121 bp, Homo sapiens; identical to SEQ ID NO: 9970
  chr8:143531858-143531979
  binary

SEQ ID NO: 10810 - DNA, 85 bp, Homo sapiens; identical to SEQ ID NO: 9974
  chr8:16884239-16884324
  binary

SEQ ID NO: 10811 - DNA, 100 bp, Homo sapiens
  chr8:42316852-42316952
  hypo
cggtatctaaaaaaacaaagcatggcttctagtctctggataaactggtctgatatttccaggggtctgtactctgtgctgtgaacggctttagagctcc

SEQ ID NO: 10812 - DNA, 177 bp, Homo sapiens
  chr8:54795170-54795347
  hyper
tccggcctgggcgacagagcaagactccgtctcaaaaaaaaaaaaaaaaaatggcaaaagcctatcgctctttgtcgaactccccacgttccccagtcacctggctggggttcgttggtgtcaaaaccccagccttggtgccctcggtgccagcaggaccctcgcccactggctagc

SEQ ID NO: 10813 - DNA, 149 bp, Homo sapiens
  chr8:58906804-58906953
  hyper
cgtgcggacataggtgggagtgggggatagggaggaaatggaggcgccgaccgagtggaatggggggtgggtcagggatggggtgggatgggcatcagtagcggggtggagatgttgagagagaggcagggcttggagtggaggtgcga

SEQ ID NO: 10814 - DNA, 119 bp, Homo sapiens
  chr8:67089303-67089422
  hyper
cgccgcgctccgcgagagccgcggggctgtcgagcgagcgccgaggcagcagcagctgctgcagcaacacgcggaaaaagttggcggtcgcctgttccggcgaagggcggctgccgctg

SEQ ID NO: 10815 - DNA, 47 bp, Homo sapiens
  chr8:67090036-67090083
  hyper
attttcccgatcctagagaagagccacagatttaagatcccacccgc

SEQ ID NO: 10816 - DNA, 210 bp, Homo sapiens
  chr8:67344870-67345080
  hyper
gtgacccgctcagatcctgcgcagtcttctccgcttactttcaagaattcggagaatttggataccgccctgggctcccaccgcgcgccaggcggaacagcgaggtcacagagtgcgcgatgcagcctctcagggcgcagtgaggcagcctttactctgcttgtctaccgttaaagaaactgaggcccagagaggacctggtcccacatc

SEQ ID NO: 10817 - DNA, 55 bp, Homo sapiens; identical to SEQ ID NO: 5856
  chr8:72756949-72757004
  binary

SEQ ID NO: 10818 - DNA, 181 bp, Homo sapiens
  chr8:73449197-73449378
  binary
cgcgccccagccgcgccctgggcaccagagcgctgtccccggccgagcgcacagctccggcgccgcgaggcagagccccggcgtccccggcggtgcgctgccggctcgcgcagcccagccatcccgccccgccgcccaccttgacagccgggagcgctgaggaggaagagggggaggggga

SEQ ID NO: 10819 - DNA, 208 bp, Homo sapiens
  chr8:73449432-73449640
  binary
gaggcggagcgggaggctggggtggccgcagccctgtgtgcgcgccgggccggctagctgcggggcgggggagcggcgccccagagcgccccgcctagcctcccgcgcgcagcctctaccctgctccgccacagacacacacccaccaagcacccaccgccctccgccctccgccctccgcccccgcggccgccgccgccgctgcgcc

SEQ ID NO: 10820 - DNA, 77 bp, Homo sapiens; identical to SEQ ID NO: 6309
  chr8:75897394-75897471
  hyper

SEQ ID NO: 10821 - DNA, 209 bp, Homo sapiens
  chr8:80803900-80804109
  binary
actgggcgcccgcgcctcccaactcagcccgccgccgagcagacggcgcgccgcggtaattgggcacaggggcctttttcagagtcgctcagtcgataaatgaaacgtcagctcccctgtgatcccgcgtgtgtggggcggcggtggctgcgagccggggcgcagggccggccggcagccgctgctctttcacagccccagaccctgcg

SEQ ID NO: 10822 - DNA, 273 bp, Homo sapiens
  chr8:85095711-85095984
  hyper
ggcagagactgcgagaaaaaaacgcgcttcattccttcttccaccgccatactgtattttatactaaatctcatttttattccaacattttactcccgctcggtgagtaccttctcagtggcattcttgtcctattcttttttttgtccttttttttggttttttgttttttttgtttttgttttttttctttttttccacttctttgattattgtttatatttgggaaagctggaggagcatggttttgagccttttcctgaatccaagttt

SEQ ID NO: 10823 - DNA, 66 bp, Homo sapiens; identical to SEQ ID NO: 8782
  chr8:91996920-91996986
  hyper

SEQ ID NO: 10824 - DNA, 71 bp, Homo sapiens
  chr8:92120822-92120893
  hypo
cgtgcaactgagttaagatctaaagcaagcttgtctaacccgtggcccgcgggccacatgcggcccaggac

SEQ ID NO: 10825 - DNA, 80 bp, Homo sapiens
  chr8:97507728-97507808
  hyper
tgccctctggggtctcagggagtgcggctgtttctggcccttctggttccccacgtcctctccctttgccatttaataac

SEQ ID NO: 10826 - DNA, 167 bp, Homo sapiens
  chr9:117267296-117267463
  hyper
tggaatccgggggacgcggagacgtcggcgggttcctgagagacacaagagttggctgctggagcccggaggtggcggagactgctgctggagtccggggggcgcggggtcagcagctacattctggagggcacggagacgacgggtggctggagtttgggggcgcc

SEQ ID NO: 10827 - DNA, 1023 bp, Homo sapiens
  chr9:124131788-124132811
  binary
cgaggaacaaaagccgggaaggagagttctccaaaacgcagaggaaagcggagggggaaaaatggggcagaaagtggagctagaaagagaggtaagaagaaagccagagagacttcttccttctgcaaatcggtctaagtttcgggaggtgggattgggggaggagggggttcaccctggggccaggccagggctgggtggaggaggcggccttcgagagagtgagtcgggaaagaaggggagtgggcaaagggtgagatgtggggtcccggtccccgcctcgctggctgccagttccctctgcgtttcctagtccgcgtgcgtgacacgagatagtgcagccctggcatggggcttggcatctggcggccgcgagataaccagggcccgtgcgatgggaaacgtgccgttggcagcccgccacccctccatcgtgacctcagtctgccaaacagggttcgtgatgctcagtttactagggaggagccgcggctttgagatctcgcccagcccgaagcagcggagactggccaggagcccggctgtcagacctcggagcgcacgctgcgggcgggggctcggtccacgggggagggtcaggggacgcgggactcacccttgaaggagtcggggagccgctgggcttcggagtcccgtgtgtgccgcttctcggccatgctgcccgagacgcagtcgcactcccccgtcctcgttgccaaacccggagccgccgggaatgccctgaggagccagaggcacaagacccagattgccgccccgcccccaatcgaggtcccgccctcgtgagagttggccaatcaacgcccaggatcgaggaggacccacctcccaatccccgccctcctgtccctccacggcgcgactgcttcgcagtcacttcccgctagttctgtgggctgaggggcgtggcctgaggggcgtggcctgaggggcgagagcccccaaggctgtgggtatgaggccggggccctgcaccggaagggagggcggaagccacgggac

SEQ ID NO: 10828 - DNA, 147 bp, Homo sapiens
  chr9:126139066-126139213
  hypo
cgtcctccccttctctgcggtcttaggcctcggtgtcgtgtctcttgcagaagggcctgcccctgccgctgccattcccactgctggaggtggccgtacctgcagcctgtgcctgcctcctcctcctcctcctgggcctcctttcag

SEQ ID NO: 10829 - DNA, 57 bp, Homo sapiens
  chr9:128274789-128274846
  hypo
cgtaaacttgtcgtttaatctttatgtttcttttcctctcacgtagtttattggttc

SEQ ID NO: 10830 - DNA, 168 bp, Homo sapiens
  chr9:129485513-129485681
  hyper
cggtgtccatggtgggtctggttcccaccgctccctccctccccgcacagtctgagacccccttccccgggccgccccgtcgatcccaggtgatggatggagccttcagggagcccgcgcgggcgggctaggctcgggcggaaatgaagaggataagatctgcgagca

SEQ ID NO: 10831 - DNA, 456 bp, Homo sapiens
  chr9:130674546-130675002
  binary
cggttcttgcccgtctcgtcctggaagatctggtcgcagtaggccatcatgcgctccgtgaaggtgtacacctgcaggccggggtacatcctggtgagctgcagcagcgtgcggtaggtgcggccgccgagcacccggtccatgtgcctgccctggccccacaccatgtagagcgtgtctcgggccttctggaagtagtgtgaatagttgcgcagcagcagcggcacgcttgtgtgtgagacgacacgcagggtgctgcgctggcccacatccgcctcaaagcccacggtgggcgcctggttcatgcggaacacgcactcggcactgtcgatctcagcacccaggcctgagcccagcatttggccggagctggacaccacggcacagctgcggcagggctcgcggaccagcggctgcagggcaggcagggagaaagagacagagaggcatgaacac

SEQ ID NO: 10832 - DNA, 89 bp, Homo sapiens
  chr9:131842789-131842878
  hyper
cgcctgctctgtgtgacttgccctttcgccggccagtatggggcagagggaaataagccccctctgctctctggtctcagtttactcgt

SEQ ID NO: 10833 - DNA, 704 bp, Homo sapiens
  chr9:131842946-131843650
  binary
ggacgcgcaggtccccaagaccgcggatcggcagggggtaccagggaagccttcattcagggcgcaggtcccagccgaaccaaagctcccaccaaagttcaacacgcccccaaagccagcgcctgattggcccgccctgcccacaagctgaggcagcctcaccttctgattggctgttatgctccctgttcggtgctggaaccctccccttctctgattggccagatgcctacctgcgctcgccccagattgggcgccagctggggcggctcgttggctcccaggggccccgctctctgattcgccgctcgggccagcccccacggcctgcacgctgaatggctgcgccgctacctatattggcctccgattgggtgcacggcgcctccccggcgtgataggtcaggaccaccgcccccctggctccccattggctgctcgaagaagcccggtctccgggtaagatggcagcggacggacagtgctcgctccccgcttcatggcggccggtgaccctcacccacgtcgaatatcctgcaggtaaaaggcggtcccggctccaaggacgccttcccagggacggcctctcagtcccgggcgctccggcctgctcgagcccgcggagggggcgccgggggaccggggtgggaactgtcaaatagtgaaccacggaggggctcggccggcgcgcgcgccgcgcaggc

SEQ ID NO: 10834 - DNA, 131 bp, Homo sapiens
  chr9:133513763-133513894
  hypo
cgccggttcatccctctgcccctgcccgcggccgcccgagagggaaagaggattcctgcgggcctcgcccgtcatcttgcaccgcgtccacccgccttcgttggtgcacagtctagatgtctagctagttc

SEQ ID NO: 10835 - DNA, 53 bp, Homo sapiens; identical to SEQ ID NO: 10011
  chr9:134126741-134126794
  hypo

SEQ ID NO: 10836 - DNA, 123 bp, Homo sapiens
  chr9:135037440-135037563
  binary
ccccgatctgacggcggcggcggcggcggccacagcggcgggagcggcgcggggaaggagcagcggctcgcagccctcggcccgcgcccccacccagcgccagcccgaggggggaggcgcagc

SEQ ID NO: 10837 - DNA, 306 bp, Homo sapiens
  chr9:135286324-135286630
  binary
agcatcacgtcgaatgttcatttccgttcgatcatactaatttcttacccaaattacaaccctaagagaaaaaaagcataatctttggcctaggaggctccgcagacaagaatgagggagctgcggtttcgggctggatcactttcccttccattacacttccctcctccccacctttagcctcgcttcccgctgatgggaaaccaacactgctgtggcggccacaccttcccgggggccactggagaagtcaggctgaggcttgggggtcagggagcaagcctcgaggcgaatttatcttgcgcc

SEQ ID NO: 10838 - DNA, 141 bp, Homo sapiens
  chr9:135523845-135523986
  hypo
cgcagccgactaaaatgaatgttctttgtggattttatatgatccaccaggcgtccaggagttgagataaggatatttattcctttgcggagtctgtttaaaattatatatcataaaagaaagtaaatcaaacagggccac

SEQ ID NO: 10839 - DNA, 258 bp, Homo sapiens
  chr9:135926595-135926853
  hypo
cgtgcgttgttcagatgtgacataaacgtggagctctgggatccactgagctcttattcttccattcactcattgcagccaagccagtggggcacctagtgtgccaggcccagcactttcttaccgttagaactggaaccgtgctgccaggcagccctccttccccgggcttgcgggtgccgtggagtcctgcgtccccactggcatgagcatcaggttcacaggccactgccacctggagcccggcgcttcccttac

SEQ ID NO: 10840 - DNA, 116 bp, Homo sapiens
  chr9:137299004-137299120
  hyper
cgaggtccatgtgaaaggaggctttgcggtggtttctgctttgcttgcattgagcctcaaactcttcctgtcccgtgagaaggggggatgggatttggaggcctgaggaaggaagg

SEQ ID NO: 10841 - DNA, 419 bp, Homo sapiens
  chr9:139421476-139421895
  hypo
cgtgagacgcgctagctggggggaaccgggccgagcctggagaaagttttgagccaggtgtgggggtctgtgtgtggggggcagctttgggcccagtctcccgctgctgctgtgggcagcctccagcctgtgcccgccccagtctgtacctctctcccacatggccacagagctggagcaccctacagacggcgaacacctgccctccgcacagcacccagacgtccctgagaaggtgggagggacctcaggcctgcagcatggccatggccaggaccaccagcctgtgagcaaatccttcacagctttggcgctggccacacccccggtacccgggccactctgtcttcaatgctgtcccggcggccaggtgggtgtgggccgcgaggtgggcgccagggcttggccgagtgaggtgg

SEQ ID NO: 10842 - DNA, 100 bp, Homo sapiens
  chr9:139422123-139422223
  hypo
ccacgccaggtgtgcccccgtggactccccttccgtgcgtccctcttagggtcacccggcacctgcctgtcccatcccccacgctcagtggcctggcggc

SEQ ID NO: 10843 - DNA, 292 bp, Homo sapiens
  chr9:139506149-139506441
  hypo
cgcgtgcccggtccccactcacattgccacctgcctccggtgtggctgcgaagtcggagggaggagagagccagccaggggtgtgggcgccaagatcagagactcgcacgctgctggacggaatgtggaccggcccagctgctgggtcacctgccggcagctcccgaaacaaccagtcaccacgagacccagcaactccacccctaggtgtgcgcccaagataaacggaagctcctgtccgcacaaacacccgtgcggcttccttcactaagggtggaaacggcccgggtgc

SEQ ID NO: 10844 - DNA, 45 bp, Homo sapiens
  chr9:139687851-139687896
  hypo
cgctgaaccccagaattagacgttcgcatcagccccgtaggccac

SEQ ID NO: 10845 - DNA, 712 bp, Homo sapiens
  chr9:140023901-140024613
  binary
cgcaggctgggagggcggcgggcgcagcgaccccgggcctcggtccgcccggcgcggtcctcaccctgcagcacaagagccgccggcagttcttgctgttgccgtagctctcgccaaagctctgcgtcaccgaaatgaagtcctgatgaagcagcggcggcggatgcgtggaagggggcctcgaggaaccaccggcggcatcaggagacccggtcctgtaaaagactgagagctccgcctctccgatactcgcgggcagccattgcggcgcacagaaccgtccgcgtgtgagcagcgcgcacgcgcacgcaatgcgcctcaaccccgcagcctatgcgcctgcactgagagctcacggcttgcggcgcctgcgtctaccccgcgcgcagtcgccacggcaacagggcgggccttggttctgcttcgggcgtggtcggtgcatggtcctccagcactgttcgccccgcgggtctggtcctgggttcctttcgcctcctgtcgtcggacggcaccggctttgcccacggcctcgcggggagacgcagacacccgggacccggggaggcgcccgggcgccgccgccatgttgtcagggagcgcccgctcccagctcttcggttccgggacccgcggcgcggggatggggctgggccgcccttggtagccgtcctgggctgggggccaccctggccgcgtggtcaccggcaagaag

SEQ ID NO: 10846 - DNA, 320 bp, Homo sapiens
  chr9:140382238-140382558
  hypo
cgagaggccgtcccatccagcctccacctgcctgtcaggggcatctcaggagcctgggccaccaccacaacctggcacgccctgcgaggtgtccccagcatcaccttcaccgcacgcacttcagcccctcactgcagctgagccttggccacacgggaggagcgggggactcaggcccagatgatgtgtctccgcctctaggcgctgagtggaaggcaggtggcttctataatcaggaggaaataactcccagatagcaaacaaacaatgcacacacacaccaaagtgctgctgagcacagaaagacggagaaccgcctc

SEQ ID NO: 10847 - DNA, 78 bp, Homo sapiens
  chr9:140382625-140382703
  hypo
gtctgatgtctcgtcccgagcttcggcccgaacgcggctctcgcggtctgatgtctcgtcccgagcttcggcccgaac

SEQ ID NO: 10848 - DNA, 150 bp, Homo sapiens
  chr9:140392858-140393008
  hypo
cctgccccacggcacagcactgcccaccacgtgcccagtggccagcagctgttggggagcccagagagccccctcctggcaggcccgcgagtgccccttggacacgggccctgtgtcaggctgcggtcctggcaggggactgcacatgcc

SEQ ID NO: 10849 - DNA, 69 bp, Homo sapiens
  chr9:140682727-140682796
  hypo
cggtggcagatgaccgagcggctggtaggactggcatgcagcactcagggggcccaggacgttggcgaa

SEQ ID NO: 10850 - DNA, 175 bp, Homo sapiens
  chr9:140682922-140683097
  hypo
tagggagattgcaggtgtagggaagttgcaggtgtaggggtccttgcaggtgcagggatcttgtaggtgaagggaggttgcaggtgtagggggccttgcgggcttagagggcctcacaggtgtaggggattgccgtgctgcaggtgtctcttgtcccctcggggactgggagagc

SEQ ID NO: 10851 - DNA, 203 bp, Homo sapiens
  chr9:21994237-21994440
  hyper
cgtgagccgcgggatgtgaaccacgaaaaccctcactcgcggcgggccgcacgcgcgccgaatccggagggtcaccaagaacctgcgcaccatgttctcgccgcctccagggccgagctcggcagccgctgcgccgccctttggcaccagaggtgagcagcgccactcctgcccccttaactgcagactgggacccacgcacc

SEQ ID NO: 10852 - DNA, 70 bp, Homo sapiens
  chr9:6412900-6412970
  binary
ggcacccgccccctcagctctgaaacgaggcctcaaaacggcaaccgatgtggtagccgcgcaatcttcc

SEQ ID NO: 10853 - DNA, 114 bp, Homo sapiens
  chr9:6644756-6644870
  hyper
cgactacaaagccttgtgggaacctcattgaaatcgcctaattagggttctttttaaaagaaaaggaaaactctgagcaagccagaatgatttggaggaaagaaaatcgtgaag

SEQ ID NO: 10854 - DNA, 381 bp, Homo sapiens; identical to SEQ ID NO: 7620
  chr9:71788570-71788951
  binary

SEQ ID NO: 10855 - DNA, 45 bp, Homo sapiens; identical to SEQ ID NO: 6327
  chr9:71789757-71789802
  hyper

SEQ ID NO: 10856 - DNA, 96 bp, Homo sapiens
  chr9:80007524-80007620
  hypo
cgaatatggcaacaaagcaagtcacacgcatatatttgttctccagtgcatataaaaattatgtttataatgtagactattatgtacaatcacgtc

SEQ ID NO: 10857 - DNA, 432 bp, Homo sapiens
  chr9:89561318-89561750
  binary
ccagggcgggcccgcggcgcgtgtggttgagctgaatgagggccgagatgcagtgactcgggcagcgccagcgcgacgagaaagaggcggccgaggccgggaaagcggcggcggcggccccgggcgcgtcgcccccgccgtgctgcgccagcaccggcgcgcacgcctcggcgtactggttgtaggcgtagctgcactccggctccccctggcactgcagcagcgcctgccagcagatgaggcggcggccgtgcgccagccccgatccccgcggcgccgagcccagcagctgcagcagcgccatcaggcacagccaggcgcccggcactgtccccccgcgggcctcgccgccgccgcccagcagcgcggccaccatcgcgggcagcggcggccgccgggagaggaggggaaaggagacgaggcgcggggagc

SEQ ID NO: 10858 - DNA, 74 bp, Homo sapiens; identical to SEQ ID NO: 7627
  chrY:16635744-16635818
  hyper

SEQ ID NO: 10859 - DNA, 1082 bp, Homo sapiens; identical to SEQ ID NO: 7628
  chrY:16636060-16637142
  binary

SEQ ID NO: 10860 - DNA, 111 bp, Homo sapiens
  JH636052.4:789300-789411
  hyper
cgacggctgccttccgctcgccgccccccggttttcccggctccgaccctatcctctaacccgtttcctgcttcagctgaccacattgttttcctggatgtgtcccgtgcc

SEQ ID NO: 10861 - DNA, 79 bp, Homo sapiens; identical to SEQ ID NO: 6342
  chr1:100928315-100928394
  hypo

SEQ ID NO: 10862 - DNA, 60 bp, Homo sapiens; identical to SEQ ID NO: 6343
  chr1:100928423-100928483
  hypo

SEQ ID NO: 10863 - DNA, 306 bp, Homo sapiens; identical to SEQ ID NO: 5867
  chr1:108506290-108506596
  hyper

SEQ ID NO: 10864 - DNA, 280 bp, Homo sapiens
  chr1:109839458-109839738
  hypo
cgcactggttttcagcaaagacacggaaggcataggagttgccgatgatgaggtcagagacgatgcagctggtgcggtgatagtgctccagcaccgtgaaccacagctgcggggccgaacatgatgccagaaatcagccaccccatgtggagctaccagaggcctgtcccaacatgccctcttccaccctccttccttcccagctggcctcaccccggattttgtgtcagccttctgcaccgtgtatcccagaagtgctgtattccccgtatcttggggc

SEQ ID NO: 10865 - DNA, 360 bp, Homo sapiens
  chr1:1152902-1153262
  hypo
cgtgcacgctgcgcgcgtagtccaccagcttgctgcccgtgaagaactcgctgtacttgagcacctcctcgggctccaggtggtggttctggttctcgtcggcgacggcgatcatctgcttggcctcgttcagcgcgttgtactcgttcatggggtccatgtagctctgcgggcgagcggggcacaggtcagcgtcgcctttccccctccgagctccgcggccagccgcacgaagtggctatttaaggtgcctattggctgcagcgggagtgtgggcacgttctggaaggttcccgaagggaggcggcacaaatgaaaacacagggcagggagaagccgggggccccggaaggcctgccc

SEQ ID NO: 10866 - DNA, 76 bp, Homo sapiens; identical to SEQ ID NO: 6344
  chr1:1168275-1168351
  hypo

SEQ ID NO: 10867 - DNA, 462 bp, Homo sapiens; identical to SEQ ID NO: 6345
  chr1:1168984-1169446
  hypo

SEQ ID NO: 10868 - DNA, 367 bp, Homo sapiens; identical to SEQ ID NO: 6346
  chr1:1194390-1194757
  hypo

SEQ ID NO: 10869 - DNA, 241 bp, Homo sapiens; identical to SEQ ID NO: 6348
  chr1:12304451-12304692
  hypo

SEQ ID NO: 10870 - DNA, 575 bp, Homo sapiens; identical to SEQ ID NO: 6349
  chr1:1562211-1562786
  hypo

SEQ ID NO: 10871 - DNA, 158 bp, Homo sapiens; identical to SEQ ID NO: 6663
  chr1:161367435-161367593
  hypo

SEQ ID NO: 10872 - DNA, 65 bp, Homo sapiens; identical to SEQ ID NO: 5869
  chr1:161368929-161368994
  hyper

SEQ ID NO: 10873 - DNA, 95 bp, Homo sapiens; identical to SEQ ID NO: 5870
  chr1:161369405-161369500
  hyper

SEQ ID NO: 10874 - DNA, 294 bp, Homo sapiens
  chr1:161369566-161369860
  binary
cggtggcaggttttccacaaatgactctgaaaagtcagaggctcaccactgtgtctctgacccacgagaaaagtacccgggcgggccacccacagcttcgggatcggggcgcgcagggaagtagccagcaaagcaggtaagtcccgggctgctcgcggcggggtcatgactgagggcacaggggtgaactccatggtgcttcctcaggaaacttccggcgcagtcagggctgcagccagagcccggagatagttgggcagggctccaggcgtccccgaatgctcgtcgtggagt

SEQ ID NO: 10875 - DNA, 299 bp, Homo sapiens
  chr1:161369945-161370244
  binary
acccccccggaaactggagaaaaacggagtagaagagacctaggggacagacttggccgggtcaagggaaaccagctcatatttggaacaaaatacgccttatgtttgcccagcactgaatttagaagcattttcacattctcgagtttaactagttttgcaacagtgccacgagcaaattattaaacgtgttttaaagatgaagagactgaagctaggtaaattggacttgggtaagatggaagcgctacttaacgttaaggagagtctgcgaccctgatgttctcaggctgtatctc

SEQ ID NO: 10876 - DNA, 32 bp, Homo sapiens; identical to SEQ ID NO: 6353
  chr1:167393552-167393584
  hypo

SEQ ID NO: 10877 - DNA, 187 bp, Homo sapiens; identical to SEQ ID NO: 6354
  chr1:167393613-167393800
  hypo

SEQ ID NO: 10878 - DNA, 70 bp, Homo sapiens; identical to SEQ ID NO: 6355
  chr1:171554936-171555006
  hypo

SEQ ID NO: 10879 - DNA, 122 bp, Homo sapiens; identical to SEQ ID NO: 6356
  chr1:171555061-171555183
  hypo

SEQ ID NO: 10880 - DNA, 98 bp, Homo sapiens
  chr1:177140714-177140812
  hyper
gaaagaaccacaagaaatcatgaagtaaaaactttggaaagctgccactggagatgttgcacaaaaacctggaatcttttaggagtctcctcccagtc

SEQ ID NO: 10881 - DNA, 32 bp, Homo sapiens
  chr1:177150742-177150774
  hyper
cgcagtgaggactgtgggggcagctaatgtct

SEQ ID NO: 10882 - DNA, 114 bp, Homo sapiens; identical to SEQ ID NO: 6673
  chr1:178531640-178531754
  hypo

SEQ ID NO: 10883 - DNA, 51 bp, Homo sapiens; identical to SEQ ID NO: 6674
  chr1:178531798-178531849
  hypo

SEQ ID NO: 10884 - DNA, 43 bp, Homo sapiens
  chr1:181286822-181286865
  hyper
cgctcccttgccgcctcgcgcgtgccgcccgtgtctggacagc

SEQ ID NO: 10885 - DNA, 334 bp, Homo sapiens; identical to SEQ ID NO: 6357
  chr1:19676386-19676720
  hypo

SEQ ID NO: 10886 - DNA, 51 bp, Homo sapiens; identical to SEQ ID NO: 6358
  chr1:19676822-19676873
  hypo

SEQ ID NO: 10887 - DNA, 133 bp, Homo sapiens
  chr1:201851148-201851281
  hypo
cctttagttagcagtcacgggaaaattccccattctcacggggatttagactaggtcttaaccatactttaccaagattccagtagcaaagcacccaaaagtaatcgcaataaaattccaatttttgtaggcc

SEQ ID NO: 10888 - DNA, 225 bp, Homo sapiens; identical to SEQ ID NO: 6679
  chr1:205245793-205246018
  hypo

SEQ ID NO: 10889 - DNA, 63 bp, Homo sapiens
  chr1:205400134-205400197
  hyper
ccctaaaatgcagcaggaggaagagacttgtcctagagagcccagcgagcttgggggtggggc

SEQ ID NO: 10890 - DNA, 102 bp, Homo sapiens; identical to SEQ ID NO: 6681
  chr1:2141684-2141786
  hypo

SEQ ID NO: 10891 - DNA, 221 bp, Homo sapiens
  chr1:2142332-2142553
  hypo
cgcaagctggcgattgctgcgggggacctgggcctgggcttagcgactgctgcccctatccagatgcctgattgggaccagggtgtggggccgggccctgcagcgcctgtcttgcccgggctggagccctagagctgtgcgacctggggccagggtgttctgacagactcactctcaggggctggatgcccttgggcaccacggcgggtgcctagcagacc

SEQ ID NO: 10892 - DNA, 70 bp, Homo sapiens; identical to SEQ ID NO: 5874
  chr1:214387777-214387847
  hyper

SEQ ID NO: 10893 - DNA, 198 bp, Homo sapiens; identical to SEQ ID NO: 7686
  chr1:220700617-220700815
  hyper

SEQ ID NO: 10894 - DNA, 38 bp, Homo sapiens; identical to SEQ ID NO: 5876
  chr1:223936543-223936581
  hyper

SEQ ID NO: 10895 - DNA, 64 bp, Homo sapiens; identical to SEQ ID NO: 8881
  chr1:224368640-224368704
  hypo

SEQ ID NO: 10896 - DNA, 157 bp, Homo sapiens
  chr1:2265957-2266114
  hypo
cggggctcccttgggggagcaggcctggttttgggctgcctgtcccaacacgacgagagggccctggctgtgtggccgtggagccggcaggaggcaggggaagtggccgctggtcacagatgtgtgccccgaagagacgacatcatttgaacactga

SEQ ID NO: 10897 - DNA, 168 bp, Homo sapiens
  chr1:2266194-2266362
  hypo
ccctttggctgggaggcccaggctgggagcagacgccgacccctccgttctctcaggtggaaaagaacgaaagccttctttctgctgaaataagacgttccaacatcaccctcagcgcggaggttgccacggttctggagcgaagtggaggtgccgccctgggcgttc

SEQ ID NO: 10898 - DNA, 255 bp, Homo sapiens
  chr1:2275835-2276090
  hypo
cacattctcactattggggtggcaggaaggcccagcgaccaggagcatgtgtggggtctgggaaaggcctgggggacggggtgtggggtgcaggagccccaaggccgatgctgctgaggaggccaggagcggggaccgcacagacggcagttcctctggaggggggtcccgtgtgggccgggctgtgcaaaggacacactggtccctgctggcctctcagggcaagcgtgaggaccctggcctgctccggcctcc

SEQ ID NO: 10899 - DNA, 386 bp, Homo sapiens
  chr1:2276200-2276586
  hypo
gcctgcagagcctgggggcagggctgaagctggccatggaggaccttgggggccacctccaccttccagcagcaaatgccaagtccccgaatgcagaattctgccagagggagcatgaccgtctctctgttggcacaaagcgagagcatcaaagacagcgtcagcccccgcgagggtccacgcatgctcacactctgcgctcatggatggccacacacaccctgaaaacggcgtcagcctccgggagggtccacgcgtgctcacagcactcatagatgaccatatgtgccccgaagacagtgtcagcctccaggagggtccacgcgtgctcacgctctacgctcatggatggccacatgtgccccgaagacaacgtcagcccccgc

SEQ ID NO: 10900 - DNA, 331 bp, Homo sapiens; identical to SEQ ID NO: 6688
  chr1:228280981-228281312
  hypo

SEQ ID NO: 10901 - DNA, 203 bp, Homo sapiens; identical to SEQ ID NO: 7694
  chr1:228361379-228361582
  hypo

SEQ ID NO: 10902 - DNA, 359 bp, Homo sapiens; identical to SEQ ID NO: 6691
  chr1:228528433-228528792
  hypo

SEQ ID NO: 10903 - DNA, 50 bp, Homo sapiens; identical to SEQ ID NO: 6692
  chr1:228529382-228529432
  hypo

SEQ ID NO: 10904 - DNA, 48 bp, Homo sapiens
  chr1:2331316-2331364
  hypo
cgaggttaccttttcccgtagccagagggttccacaggcagctcactg

SEQ ID NO: 10905 - DNA, 183 bp, Homo sapiens
  chr1:2331437-2331620
  hypo
tctgaggagctgtgagctgaagtgttcctggtgcttcgtgctccactattggaagacttacgcagctcctgggcctgcctgggccaggtaggggccctgagttcatgcctgactggccagccccaggcgaggaacaaacaactgcattccaggacgtggtggccattgagggaaaacccacac

SEQ ID NO: 10906 - DNA, 35 bp, Homo sapiens
  chr1:2331916-2331951
  hypo
cgcccgggttccacggtcagcgcatcctcggcccc

SEQ ID NO: 10907 - DNA, 216 bp, Homo sapiens; identical to SEQ ID NO: 6360
  chr1:234724591-234724807
  hypo

SEQ ID NO: 10908 - DNA, 209 bp, Homo sapiens; identical to SEQ ID NO: 6361
  chr1:234724836-234725045
  hypo

SEQ ID NO: 10909 - DNA, 162 bp, Homo sapiens; identical to SEQ ID NO: 5877
  chr1:234812061-234812223
  hyper

SEQ ID NO: 10910 - DNA, 79 bp, Homo sapiens
  chr1:2359894-2359973
  hypo
cgtggactgcatctgtcctgcatggggtcctgcgtctggctcgcccggtgccgtgctgtggggcccacgccaacggctg

SEQ ID NO: 10911 - DNA, 44 bp, Homo sapiens
  chr1:2360320-2360364
  hypo
gcaccaccaggcttgggtgaggagggaggcctctggtcgagagc

SEQ ID NO: 10912 - DNA, 158 bp, Homo sapiens; identical to SEQ ID NO: 6362
  chr1:23693515-23693673
  hypo

SEQ ID NO: 10913 - DNA, 207 bp, Homo sapiens
  chr1:239549378-239549585
  hyper
cgtcctctattacactgctctgcagaaacagactcactaaatgtcaaaaagtagatgcatcagactgttccttagagaaaggtttgccatggagtcgtatattgtaactgagctgaagttcactcatcgataagttgtgcccaaggaatcgaattccttccagtccttctaagcagtccagggaaaccaatttaaaagcgaacacaa

SEQ ID NO: 10914 - DNA, 220 bp, Homo sapiens
  chr1:239549815-239550035
  hyper
gcatgctcagaagccgggcaggttttggtctcaagcacgcagcctgtgcattacaccagctctctcagtccggggaggaggaggagcaggaggaacgcgaggaggaaggagaggaggagcggccagcagtagccacgaccgccaccaccaggcagaggaagagttcgtggggaggaaaagacctctcctcccccttggagcgccttctctctgcttttgg

SEQ ID NO: 10915 - DNA, 97 bp, Homo sapiens; identical to SEQ ID NO: 6365
  chr1:246330213-246330310
  hypo

SEQ ID NO: 10916 - DNA, 234 bp, Homo sapiens
  chr1:27189675-27189909
  hypo
cgccgcccgcctgtgtgtccccagagccatggagagagccagtctgatccagaaggccaagctggcagagcaggccgaacgctatgaggacatggcagccttcatgaaaggcgccgtggagaagggcgaggagctctcctgcgaagagcgaaacctgctctcagtagcctataagaacgtggtgggcggccagagggctgcctggagggtgctgtccagtattgagcagaaaag

SEQ ID NO: 10917 - DNA, 262 bp, Homo sapiens; identical to SEQ ID NO: 5880
  chr1:32180427-32180689
  hyper

SEQ ID NO: 10918 - DNA, 130 bp, Homo sapiens; identical to SEQ ID NO: 6707
  chr1:32410105-32410235
  hyper

SEQ ID NO: 10919 - DNA, 317 bp, Homo sapiens; identical to SEQ ID NO: 6367
  chr1:32826720-32827037
  hypo

SEQ ID NO: 10920 - DNA, 489 bp, Homo sapiens; identical to SEQ ID NO: 6708
  chr1:3321510-3321999
  hypo

SEQ ID NO: 10921 - DNA, 121 bp, Homo sapiens; identical to SEQ ID NO: 6709
  chr1:3322260-3322381
  hypo

SEQ ID NO: 10922 - DNA, 289 bp, Homo sapiens
  chr1:33441642-33441931
  hypo
tagatccttcataactaagactcaccttcaccctcaccagtcccaccgcctccttgcacgggagaccccatccctctggacccggggcccttccagggatagccatcacttgcatacttgcgactgctcttgctgtagggtcccctttccccctttgtgaacctagcgaattcctagaccctacttaattataataaagcaacagagggtagaaactggcactaaaatgccgcttagcaaaggtcacaaaggtgaaagcctgcagaagtcaagcaggagagagaaatac

SEQ ID NO: 10923 - DNA, 390 bp, Homo sapiens
  chr1:3389586-3389976
  hypo
cgtggggcccgaccaccaggcccgtggcaccctcctcacccctccttgccttcaggttcttcgaggacctggagcagcggcacaaggcccaggtgctggtcgaggacatcagtgacatcctggaggagcacgctgagaagcacttccacccctacatcgcctactgctccaacgaggtctaccaacagcgcacgctgcagaagctgatgtgagtgggcggccccgaggcccgcagggtggctcaggagcatcctgcaccctggtctcccaaagcacattcctgctcccagcccagcttctgcaggtcctgcctgattttggtacaggctggccatgcagagcctggaaggacagccttgtcctcttgcagaagcagcaacgccgccttcc

SEQ ID NO: 10924 - DNA, 68 bp, Homo sapiens; identical to SEQ ID NO: 6713
  chr1:3408704-3408772
  hypo

SEQ ID NO: 10925 - DNA, 39 bp, Homo sapiens; identical to SEQ ID NO: 6714
  chr1:3659512-3659551
  hypo

SEQ ID NO: 10926 - DNA, 334 bp, Homo sapiens; identical to SEQ ID NO: 6718
  chr1:41281568-41281902
  hypo

SEQ ID NO: 10927 - DNA, 148 bp, Homo sapiens; identical to SEQ ID NO: 6368
  chr1:44132677-44132825
  hypo

SEQ ID NO: 10928 - DNA, 60 bp, Homo sapiens; identical to SEQ ID NO: 6369
  chr1:44351032-44351092
  hypo

SEQ ID NO: 10929 - DNA, 114 bp, Homo sapiens; identical to SEQ ID NO: 5882
  chr1:50893877-50893991
  hyper

SEQ ID NO: 10930 - DNA, 103 bp, Homo sapiens
  chr1:63791875-63791978
  hyper
cggctcggccctgcgcgcgtccttttggttaatcccggccagtccccggtgttgtcgtccactttgcctccctggtggtggagatgcctccccgtctcggatc

SEQ ID NO: 10931 - DNA, 164 bp, Homo sapiens
  chr1:63792016-63792180
  hyper
gctttgaaagacacttccttgcaaatacccaatctgttttcctggtaaacggtaaacattattgtgtcttgagtaaacattccttcgggatcagggtcctaaaataaaacaagctgccgggggtgagatagtttaacttgataaacaagaacctgataaccacc

SEQ ID NO: 10932 - DNA, 50 bp, Homo sapiens
  chr1:63792231-63792281
  hyper
cggtctccgggcgggtcccttctaatctccttttacaaggaaaactaaac

SEQ ID NO: 10933 - DNA, 260 bp, Homo sapiens; identical to SEQ ID NO: 5884
  chr1:63793072-63793332
  hyper

SEQ ID NO: 10934 - DNA, 109 bp, Homo sapiens
  chr1:6545271-6545380
  hyper
cgcggggcccatagtcacgggcaccccctccctggcctcccgcacaggactgggcggctgcaggcgagaactgggcacccagccccgttcccgccccgtcccggccccg

SEQ ID NO: 10935 - DNA, 247 bp, Homo sapiens
  chr1:6545639-6545886
  hyper
ccccccaggaaggcggacacctccctcccgcccgggccctcgccacccagccccggggatccccgcctccccgcccgggaacccctacacccccgcctccgcctgcccgggcgaccccccgcctccccgcctctgcccagacccggggactccacacccctacctctgcccggccgggggacccccacagccccgcctccgcccagtccccgggacccccaccttcccacctctgcctggcccgggg

SEQ ID NO: 10936 - DNA, 222 bp, Homo sapiens
  chr1:6545931-6546153
  hyper
tctgactccctcctcaacaccaatgccgggctcagagggctcctcagaacttgctctttctcctggggagctccttgaatgctggaggcagggggcgctggtgacacccccccccaccttggagactgtggagcccctcccctgggtgactcgatccccgcccagccctgggggtgcccactctgctgtggtccccacctcaccctcagcgccaacacgcac

SEQ ID NO: 10937 - DNA, 344 bp, Homo sapiens
  chr1:6546495-6546839
  hyper
cgactgctcactgcccaggtacggcagaggccgagagccaaaggccggtggcctctggaaagggccgtgggcagaaggcgggctgctctgagaggctatccttggcagcccccaggagctgggtgaggtggaggcatcaggaaaccctggcgacccacatggcacagcagcccaggtccctgcagttctaggccaggtccccaccgccagggggcactcagcaaagcctgagaggacgcaaacgcccagactctggtgctggagtcaccactacacggctgtcaaagcgcttttacactgattcccaggaaggcagggcaggcaccattagccccattcacggc

SEQ ID NO: 10938 - DNA, 61 bp, Homo sapiens; identical to SEQ ID NO: 7738
  chr1:66999412-66999473
  hyper

SEQ ID NO: 10939 - DNA, 36 bp, Homo sapiens; identical to SEQ ID NO: 7739
  chr1:66999673-66999709
  hyper

SEQ ID NO: 10940 - DNA, 120 bp, Homo sapiens; identical to SEQ ID NO: 5889
  chr1:77333644-77333764
  hyper

SEQ ID NO: 10941 - DNA, 224 bp, Homo sapiens; identical to SEQ ID NO: 5890
  chr1:78956569-78956793
  hyper

SEQ ID NO: 10942 - DNA, 50 bp, Homo sapiens
  chr1:84326267-84326317
  hyper
cggccactcgccgtctcagcgccccctcgcggcccttctctacccacctc

SEQ ID NO: 10943 - DNA, 385 bp, Homo sapiens
  chr1:84326357-84326742
  hyper
cgtcccagatcccgccagggcccactcgggctccagccgctgcctgggacagccaaaggccggcccgggcggttcttccccaggtggtccggggcgtcccgggccgcactggcctggcccatgggccccgaagaaggcgctcacccaaggaccactgtccgagcggcttcccccggcccggcctggtgccgcgtccccaccagcccggggtggcaggttctactcgggaagcctgttttatgtcttctttcacgcccatatcacaccgacaagggtgaagctgtggaacttatacctcggctgggccccgccgccaactcctagggcacgggaactgcgcacaggccggggttccgcgaggggcggagcttcccgctctgccctc

SEQ ID NO: 10944 - DNA, 410 bp, Homo sapiens; identical to SEQ ID NO: 6372
  chr1:898245-898655
  hypo

SEQ ID NO: 10945 - DNA, 39 bp, Homo sapiens; identical to SEQ ID NO: 6373
  chr1:898690-898729
  hypo

SEQ ID NO: 10946 - DNA, 88 bp, Homo sapiens; identical to SEQ ID NO: 6374
  chr1:898776-898864
  hypo

SEQ ID NO: 10947 - DNA, 154 bp, Homo sapiens; identical to SEQ ID NO: 8926
  chr1:91183993-91184147
  binary

SEQ ID NO: 10948 - DNA, 89 bp, Homo sapiens; identical to SEQ ID NO: 6728
  chr1:9725455-9725544
  hypo

SEQ ID NO: 10949 - DNA, 34 bp, Homo sapiens; identical to SEQ ID NO: 7753
  chr10:102995986-102996020
  hyper

SEQ ID NO: 10950 - DNA, 38 bp, Homo sapiens; identical to SEQ ID NO: 5726
  chr10:112431835-112431873
  binary

SEQ ID NO: 10951 - DNA, 236 bp, Homo sapiens; identical to SEQ ID NO: 5727
  chr10:112432125-112432361
  binary

SEQ ID NO: 10952 - DNA, 240 bp, Homo sapiens; identical to SEQ ID NO: 6731
  chr10:118891774-118892014
  hyper

SEQ ID NO: 10953 - DNA, 296 bp, Homo sapiens; identical to SEQ ID NO: 5895
  chr10:118927594-118927890
  hyper

SEQ ID NO: 10954 - DNA, 138 bp, Homo sapiens; identical to SEQ ID NO: 7761
  chr10:122708760-122708898
  hyper

SEQ ID NO: 10955 - DNA, 50 bp, Homo sapiens
  chr10:126136723-126136773
  hyper
agaaggggtcggtgaacagaagcctctccaggtccccaaacctcgtcctc

SEQ ID NO: 10956 - DNA, 70 bp, Homo sapiens
  chr10:126314669-126314739
  hypo
cgcccgaacgcgtgccagcgttttctgcgagctgtcatgtgaggggcctggggcgtggcctgctgcgagt

SEQ ID NO: 10957 - DNA, 67 bp, Homo sapiens
  chr10:134676272-134676339
  hyper
cgccggcctcggggagcaggttcaggagaggctggagggggacggggcggccgggctgcactggctg

SEQ ID NO: 10958 - DNA, 41 bp, Homo sapiens
  chr10:134676653-134676694
  hyper
ttcactccccaagtcccagagctcaggaccacggaggcccc

SEQ ID NO: 10959 - DNA, 31 bp, Homo sapiens
  chr10:134913663-134913694
  hypo
cgtgcccccggcctgggcctgggcctgggcc

SEQ ID NO: 10960 - DNA, 174 bp, Homo sapiens
  chr10:15762154-15762328
  binary
aagctatttattgctttagaagcaatgccccaggtggagcgagagcttgctccagttgtgtcaaaggcgcagcttggatggagaatgtgaaaaccaaccccaccaccaggaggggcaaagcaattatctcttcatcacctctgcagcctgacctcagcgttcacggctttgcac

SEQ ID NO: 10961 - DNA, 215 bp, Homo sapiens; identical to SEQ ID NO: 10172
  chr10:23001984-23002199
  binary

SEQ ID NO: 10962 - DNA, 286 bp, Homo sapiens; identical to SEQ ID NO: 10173
  chr10:23002228-23002514
  binary

SEQ ID NO: 10963 - DNA, 91 bp, Homo sapiens; identical to SEQ ID NO: 10174
  chr10:26726986-26727077
  hyper

SEQ ID NO: 10964 - DNA, 65 bp, Homo sapiens; identical to SEQ ID NO: 10175
  chr10:26728108-26728173
  hyper

SEQ ID NO: 10965 - DNA, 136 bp, Homo sapiens; identical to SEQ ID NO: 7773
  chr10:43697752-43697888
  hyper

SEQ ID NO: 10966 - DNA, 125 bp, Homo sapiens; identical to SEQ ID NO: 7774
  chr10:43698155-43698280
  hyper

SEQ ID NO: 10967 - DNA, 217 bp, Homo sapiens; identical to SEQ ID NO: 5899
  chr10:44185124-44185341
  hyper

SEQ ID NO: 10968 - DNA, 78 bp, Homo sapiens; identical to SEQ ID NO: 5900
  chr10:44186043-44186121
  hyper

SEQ ID NO: 10969 - DNA, 102 bp, Homo sapiens; identical to SEQ ID NO: 6378
  chr10:524407-524509
  hypo

SEQ ID NO: 10970 - DNA, 84 bp, Homo sapiens; identical to SEQ ID NO: 6379
  chr10:524671-524755
  hypo

SEQ ID NO: 10971 - DNA, 122 bp, Homo sapiens
  chr10:54073737-54073859
  hyper
ttactgccaggcaagggcacccaagttcccagagttcctgctgccgcctgcatttattaaagtcgtctgctataacgctcgctggtagccttcaccccgaaggtgagccgggccagccgagc

SEQ ID NO: 10972 - DNA, 55 bp, Homo sapiens; identical to SEQ ID NO: 6380
  chr10:5523206-5523261
  hypo

SEQ ID NO: 10973 - DNA, 381 bp, Homo sapiens; identical to SEQ ID NO: 6383
  chr10:5540271-5540652
  hypo

SEQ ID NO: 10974 - DNA, 198 bp, Homo sapiens; identical to SEQ ID NO: 6384
  chr10:5541528-5541726
  hypo

SEQ ID NO: 10975 - DNA, 146 bp, Homo sapiens
  chr10:5576085-5576231
  hypo
cgctccctcgcaggcgcacaggccctttctcaggaaagccccacacttggcttaaggctctgctgttgctgccttgaactcttaatgagttttgaacaaggcgccccgcattttcattttgcattaagccccccaaattatgtgcc

SEQ ID NO: 10976 - DNA, 421 bp, Homo sapiens
  chr10:5960358-5960779
  hypo
cgcaccagcagatctataccttccggggtgcggtcaacgccctgttcacagtgccccacacccacgtcttctatctcacgcaggtaagtgcgcactctgcatgggaggcattgcatctctctcccaatgtcttacgtgccaggccctgtgaaaggtggtatgccaggctcaccagatctagcaaatccttgcttctaagccatggttctcaaagtgtggttctcaggggtctgccaagtcacactgttttcataagaggtgtgtgcacagcggtcgtctgaggaagagctgctgcggctgaactgtgaaccgatggctgctgccgccttgtacatttgtgcttagaacagttgttagaccagcgctggttgttcagacttgtgtatttggcactttttcaaagacaagtgaaacaagctgc

SEQ ID NO: 10977 - DNA, 127 bp, Homo sapiens; identical to SEQ ID NO: 8954
  chr10:63213212-63213339
  hyper

SEQ ID NO: 10978 - DNA, 195 bp, Homo sapiens
  chr10:63656701-63656896
  hyper
cgagttccctgtgtctctcttggctccggctccaagttcatgagaaatctgtccccatacccatccttctgaagcttccagcctttaccacctggacctgggctggagtcccacccccaccacagctcttgagacaggcgacgaatagacccaaatttgagatgtagctcaacctttgaccactagaggtctcct

SEQ ID NO: 10979 - DNA, 634 bp, Homo sapiens; identical to SEQ ID NO: 6385
  chr10:71133924-71134558
  hypo

SEQ ID NO: 10980 - DNA, 86 bp, Homo sapiens
  chr10:72015065-72015151
  hyper
cgaaggggaaggcgtagacggtgaccaggtgcagctgcggcgcgctgagctgcccgtagtcgatgagcagcagcagcgcccagagc

SEQ ID NO: 10981 - DNA, 57 bp, Homo sapiens; identical to SEQ ID NO: 10187
  chr10:7449898-7449955
  hyper

SEQ ID NO: 10982 - DNA, 61 bp, Homo sapiens; identical to SEQ ID NO: 10188
  chr10:7453036-7453097
  binary

SEQ ID NO: 10983 - DNA, 116 bp, Homo sapiens
  chr10:75574077-75574193
  hypo
cggtacagcagagacagacacgaagggcgggcgggagggctgcatgcaggggcgtgcattggctgctgccgcttttgtaattgaattgttttaaacctcaaacaaacaggactgcc

SEQ ID NO: 10984 - DNA, 42 bp, Homo sapiens
  chr10:7729428-7729470
  hyper
cgagcacctcacgccatctagcggagacacactttgaagacc

SEQ ID NO: 10985 - DNA, 79 bp, Homo sapiens
  chr10:8095120-8095199
  hyper
cgcatgaaaggaatccttcagaacttactttcagggacggcttcttctatctcgaatttttgcatttgtagggaatttt

SEQ ID NO: 10986 - DNA, 100 bp, Homo sapiens
  chr10:8095845-8095945
  hyper
agccagtctcttcctcccctccccccttctcatccctcactgttgccactcaagtcaaaagcacacattgattacaaatattaggtctggaaagggcagc

SEQ ID NO: 10987 - DNA, 142 bp, Homo sapiens; identical to SEQ ID NO: 6386
  chr10:851108-851250
  hypo

SEQ ID NO: 10988 - DNA, 175 bp, Homo sapiens; identical to SEQ ID NO: 6387
  chr10:851504-851679
  hypo

SEQ ID NO: 10989 - DNA, 761 bp, Homo sapiens; identical to SEQ ID NO: 8961
  chr10:98479725-98480486
  hyper

SEQ ID NO: 10990 - DNA, 91 bp, Homo sapiens
  chr11:119612432-119612523
  hyper
agtccctccgccacaaagagaccattgattgggaagagcggccgggttgtggtaggaaggctggtggggacacgcacgcacacacacgcgc

SEQ ID NO: 10991 - DNA, 48 bp, Homo sapiens; identical to SEQ ID NO: 6768
  chr11:120008024-120008072
  hypo

SEQ ID NO: 10992 - DNA, 49 bp, Homo sapiens
  chr11:126272994-126273043
  hypo
cggaagccctggaatgcctggggccactgagcaatcctcaccctcagcc

SEQ ID NO: 10993 - DNA, 115 bp, Homo sapiens
  chr11:126273273-126273388
  hypo
cctggaaggcagccctggaggatacctgtgtatctgtctttcacaaaaggtgaaatgagctctttgtagtgtttcccgcccaggctgcattttagaatcacagaggaggtacggc

SEQ ID NO: 10994 - DNA, 238 bp, Homo sapiens; identical to SEQ ID NO: 8970
  chr11:131781335-131781573
  hyper

SEQ ID NO: 10995 - DNA, 161 bp, Homo sapiens; identical to SEQ ID NO: 5733
  chr11:133939437-133939598
  binary

SEQ ID NO: 10996 - DNA, 104 bp, Homo sapiens
  chr11:1471460-1471564
  hypo
agcttgtcctgcccccaccgccccccgagccgcccttcgtggcccgccccctggccacctccacggagcccgaagcttgtgggagcgcctcgaggcctggacac

SEQ ID NO: 10997 - DNA, 227 bp, Homo sapiens; identical to SEQ ID NO: 6389
  chr11:1521171-1521398
  hypo

SEQ ID NO: 10998 - DNA, 79 bp, Homo sapiens; identical to SEQ ID NO: 8977
  chr11:16634452-16634531
  hyper

SEQ ID NO: 10999 - DNA, 61 bp, Homo sapiens
  chr11:308266-308327
  hyper
gcaggaagtggctatgctgggggtgccccacaaccctgctcccccgatgtccaccgtgatc

SEQ ID NO: 11000 - DNA, 93 bp, Homo sapiens
  chr11:308362-308455
  hyper
ggtctggtccctgttcaacaccctcttcatgaacacctgctgcctgggcttcatagcattcgcgtactccgtgaaggtgcgtatggccctggc

SEQ ID NO: 11001 - DNA, 115 bp, Homo sapiens
  chr11:34897239-34897354
  hypo
cgctactggggctggagcccaaaagcactcgccccgccccagctcttgcccccgcccatccgtgtgctcgccctcccgaaaggagttcgagcctgtagtggctgagcacatgagc

SEQ ID NO: 11002 - DNA, 808 bp, Homo sapiens
  chr11:376596-377404
  hypo
cgggccctgagctgggccgccagggccgcccgccctttgccgctcttcttgggccgagctccgcccccgcgccctgcagtggagcagccgcccccaaaggtgtacgtgaccagggtgcggccgggacagcgggcatccccccgggccccagcgccgcgtgcgccctggccgcccttccctggcgtcttcctgcaccccaggcctctgcccagagtgcagctgcgggcgcccccacgcccaccccggccccacggccgcaggaccggcggcccccaggccacacagccgaggcccccagcccgggcgcaggccacccaagggggccgggagggccaggcgcgcacgctgggacctgcggcgcccacagtggactcaaacttgtcctccgaagcgcggcccgtgacctccttcctgagcttgtcccaggtgtccgggccgcagctgcccggggagggcgaagaggaggaggaaggggaggacgatggggccccgggcgacgaggccgcgtcggaggacagcgaggaggccgcgggcccggcgctcggacgctggcgtgaggacgccatcgactggcagcgcacgttcagcgtgggcgccgtggacttcgagctgctgcgctcggactggaacgacctgcgatgcaacgtttcggggaacctgcagctgccggaggcggaggccgtggacgtgaccgctcagtacatggagcggctgaacgcgcgccacggcgggtatgggggcggccgaacgcgcgccagggcggttttggaggcggggacagccggggagaggaggtcctggccttggc

SEQ ID NO: 11003 - DNA, 56 bp, Homo sapiens; identical to SEQ ID NO: 5916
  chr11:43599961-43600017
  hyper

SEQ ID NO: 11004 - DNA, 239 bp, Homo sapiens; identical to SEQ ID NO: 5917
  chr11:43600215-43600454
  hyper

SEQ ID NO: 11005 - DNA, 106 bp, Homo sapiens; identical to SEQ ID NO: 6390
  chr11:47359237-47359343
  hypo

SEQ ID NO: 11006 - DNA, 190 bp, Homo sapiens; identical to SEQ ID NO: 5918
  chr11:59333673-59333863
  hyper

SEQ ID NO: 11007 - DNA, 101 bp, Homo sapiens
  chr11:61036547-61036648
  hypo
cgccctgcaaaagaaacagcaacgctgcaaactggccaaggcttgccctgaaaggcaacatgacgcggctggaagatggcaggtctcccctaaagaggatc

SEQ ID NO: 11008 - DNA, 306 bp, Homo sapiens
  chr11:64129097-64129403
  hypo
cggctccacccggcaggctgtggactggtggagcctgggcatcttgctcttcgagctgctgacgggggcctcgcccttcaccctggagggcgagaggaacacgcaggctgaggtgtctcggtgagtagggctggacgtggagggcggccagagggctgcagggcctgcctgggcagggctgtgggtggggggcttgctgcccctgacacccccccaatcctcccagacggatcctgaagtgctcccctcccttcccccctcggatcgggcccgtggcgcaggacctgctgcagcggctgctttgta

SEQ ID NO: 11009 - DNA, 227 bp, Homo sapiens
  chr11:66454454-66454681
  hypo
ctgttcctaccccagcttgaagacatgtttgcgctttcggtaatcaaaggcgacgctgccctgggccctggccaggctgacaggcacttctccgtggtatggcactcccgcgctggctgccttggcatccttgtaaaagccgaggctcccacgccgcaggacacagtacacgttctgccaggacctgcgagggacgcggtgctgactggccggcctcagtggcgccc

SEQ ID NO: 11010 - DNA, 98 bp, Homo sapiens
  chr11:70022862-70022960
  hypo
cgagacgatgaaccccattcaaatggttcgggggacccttagaattttatttttggtttacagagatccttagagcagtgagtgtcaccctggaatgt

SEQ ID NO: 11011 - DNA, 268 bp, Homo sapiens
  chr11:70022989-70023257
  hypo
caccccaggagaggcggatcccgtgggctggggctggggtgccggttcagcatttctctaacacaccccgcggatgtgcagggccacacggagagccatccgcctggacgtagatatcctgcagacctgtcaggacaggctccatcggggcccggaagcgaggaagaccccgctcccggctccatctcatccccgcctcatccctcccatttcctgttgtctctctgggccggttgggcgatcacctgggcggacccccttgcctgcc

SEQ ID NO: 11012 - DNA, 121 bp, Homo sapiens
  chr11:70023286-70023407
  hypo
caggagccacgtccctcgggagccccaaagacttcaacctccaccccaggcccaccgcacctcagcaccccacttcggaggtctcaaactcagcgccccaagggccaggtgggccacacgc

SEQ ID NO: 11013 - DNA, 522 bp, Homo sapiens; identical to SEQ ID NO: 6786
  chr11:71192127-71192649
  hypo

SEQ ID NO: 11014 - DNA, 169 bp, Homo sapiens; identical to SEQ ID NO: 6787
  chr11:71192889-71193058
  hypo

SEQ ID NO: 11015 - DNA, 192 bp, Homo sapiens; identical to SEQ ID NO: 6393
  chr11:71507748-71507940
  hypo

SEQ ID NO: 11016 - DNA, 218 bp, Homo sapiens; identical to SEQ ID NO: 6791
  chr11:75152263-75152481
  hypo

SEQ ID NO: 11017 - DNA, 359 bp, Homo sapiens; identical to SEQ ID NO: 6792
  chr11:75152536-75152895
  hypo

SEQ ID NO: 11018 - DNA, 510 bp, Homo sapiens; identical to SEQ ID NO: 5735
  chr11:76381512-76382022
  binary

SEQ ID NO: 11019 - DNA, 258 bp, Homo sapiens
  chr11:859386-859644
  hypo
ggctcacatgcaccccggctcacacgcaccccctctcacacgcaccccggctcacacgcacccccctcacacgcaccccgggctcacacgcaccccgggctcacacgcaccccgggctcacacgcaccccctcttacacgcaccccgggcccacatgcactccggctcacacacaccctcactcatgcaccccgggcccacacgcaccccagctcccatgtacccctgctcacatgcaccccagctcccatgcatccc

SEQ ID NO: 11020 - DNA, 240 bp, Homo sapiens
  chr11:86382607-86382847
  hyper
cgcctctctccacgcataaaagggagaggagggacaagaaagccaaaccaagtcacaacaagcccctgcaaggcaaaaacagaaaaaccgctggaagggcgcccgggaggatcctttctgggtccagggggcggggcgcaattttccggcagccacgggatcgcaacgcgggccgtcctgccctctggcccattaccttgttgagatgagggttcctggtgacatcgtatccgcgcttct

SEQ ID NO: 11021 - DNA, 63 bp, Homo sapiens
  chr11:86383105-86383168
  hyper
ggcaggtgctcccaaagggttaaatgttccagcccccgccactcctcggctgccacctgctcg

SEQ ID NO: 11022 - DNA, 311 bp, Homo sapiens; identical to SEQ ID NO: 6799
  chr11:9554670-9554981
  hypo

SEQ ID NO: 11023 - DNA, 513 bp, Homo sapiens; identical to SEQ ID NO: 6394
  chr11:993208-993721
  hypo

SEQ ID NO: 11024 - DNA, 268 bp, Homo sapiens; identical to SEQ ID NO: 5923
  chr12:103351149-103351417
  hyper

SEQ ID NO: 11025 - DNA, 114 bp, Homo sapiens
  chr12:110783979-110784093
  hypo
cgtgacacgtcttccctgtgtgtcagctcatcttccagatcacaccgctgaacgtgacccagtggctgatggtgctgaaaatctccttgcccgtgattctcatggatgagacgc

SEQ ID NO: 11026 - DNA, 113 bp, Homo sapiens
  chr12:110784858-110784971
  hypo
cgccccgcttggcttcttctttaggattgtgatggttcgttctgtttacatcagttttaacgagaggtatgcctgtactcgcttgtgcagaaaacattgttccagattcaatc

SEQ ID NO: 11027 - DNA, 61 bp, Homo sapiens; identical to SEQ ID NO: 6396
  chr12:110983646-110983707
  hypo

SEQ ID NO: 11028 - DNA, 136 bp, Homo sapiens; identical to SEQ ID NO: 6397
  chr12:110983736-110983872
  hypo

SEQ ID NO: 11029 - DNA, 292 bp, Homo sapiens; identical to SEQ ID NO: 6398
  chr12:113725566-113725858
  hypo

SEQ ID NO: 11030 - DNA, 146 bp, Homo sapiens; identical to SEQ ID NO: 7861
  chr12:114334084-114334230
  hypo

SEQ ID NO: 11031 - DNA, 285 bp, Homo sapiens
  chr12:114337479-114337764
  hypo
cgacaagttatttcttaactaaaaagcagtgtttgagacctcccttttccgtggaaaactctgcgatgcgtgaggggagagaagctgttcctaaagaggaatcccccaagctgtctggggctccctgctgcctttcaccacccagaatgctggaagacatggcgcgcaattatcagctccaacaatgagccaacggcggccctccgagcaagcccagacaaagcacagagaccttgcagctgaaaaggctctgaatgcagacaggggaggtgtgaaagcaaggtt

SEQ ID NO: 11032 - DNA, 147 bp, Homo sapiens
  chr12:114337793-114337940
  hypo
ggaggggaggaatgagggcgcacaatgccacccttcccccggtacaggcacgctctccctggggcaccctgttccactgtctgagcttttgtcgcccactctggaaccagtctaggcgtgcagtgagggaaaacgccagctgcagcg

SEQ ID NO: 11033 - DNA, 58 bp, Homo sapiens; identical to SEQ ID NO: 7864
  chr12:116946548-116946606
  hyper

SEQ ID NO: 11034 - DNA, 704 bp, Homo sapiens; identical to SEQ ID NO: 6401
  chr12:121687598-121688302
  hypo

SEQ ID NO: 11035 - DNA, 239 bp, Homo sapiens; identical to SEQ ID NO: 6402
  chr12:121688331-121688570
  hypo

SEQ ID NO: 11036 - DNA, 276 bp, Homo sapiens; identical to SEQ ID NO: 9012
  chr12:122439511-122439787
  hypo

SEQ ID NO: 11037 - DNA, 210 bp, Homo sapiens; identical to SEQ ID NO: 6403
  chr12:122622385-122622595
  hypo

SEQ ID NO: 11038 - DNA, 261 bp, Homo sapiens; identical to SEQ ID NO: 6404
  chr12:122622642-122622903
  hypo

SEQ ID NO: 11039 - DNA, 152 bp, Homo sapiens
  chr12:124788624-124788776
  hypo
cgcgagaggcacttcccttgcccactccccaggctggctggagtccacagggcgccacgaccgtttcgatgttcgaatagccctgcagccagaaagacgaagctgcgagcctcaggatgaactggtggctgccaccatcttcccttggtgtc

SEQ ID NO: 11040 - DNA, 406 bp, Homo sapiens
  chr12:128750713-128751119
  binary
cgcgtggcagaaagagcagagcatgagcatcaggaaccgcacagggaagccgctgagatcacctgggatcaccaccatgagggaggccagccctggagaaatcagagggaaaagatagagagaacgaagtcgggggggggggggggagggcggatcttccttgtctgagtctgcagagaaattgcctattgcaggagcaagtctagagaggggctattctccacccactgaaaagataataaaacacatgctatgggcggcggggagatgattggggagtggaagccccacagacatgcagtgaaaaatgatcctttcttcccctctgcgttctcgtccccttcccagagacaccgctgtgatctcgtgcctcgccccctccgcacacgcacaggtgcacacccgc

SEQ ID NO: 11041 - DNA, 198 bp, Homo sapiens
  chr12:131268482-131268680
  hypo
tttcacaggttgagcctgggcaagttaccaacgaagaaaggaattaaaaatgaacaatcaaaaacgcagcaacaacaatcatcttcgcggatccaattccaaaattactacattactaaaaacatccagctttaaacaaatgatacatgcaaagaaacatgaaagtggaactcatccatgaaagcataaaaaagcagc

SEQ ID NO: 11042 - DNA, 237 bp, Homo sapiens; identical to SEQ ID NO: 6818
  chr12:131271740-131271977
  hypo

SEQ ID NO: 11043 - DNA, 299 bp, Homo sapiens; identical to SEQ ID NO: 6819
  chr12:131272032-131272331
  hypo

SEQ ID NO: 11044 - DNA, 714 bp, Homo sapiens
  chr12:131272367-131273081
  hypo
tctactcacagggcaacctgctttagcaaactcaacgacacattaaaaagtacaatttgcaaaggagagctaccacctggctgggtgttctgcgcctagagactgggccccgggagagcgctccacagtgaacttgcgaaggatggaatttacataaagaaggcaccgtctttagtcctggaaaggcaccctgggattctctacctccgtccgtctttttcacaggcagggaactgaggtcccaggaggcccaggtcaccccacccaaggaggcagggcctcccctgcactctctggaacctctccctgccaagaagccagaggccctgttttctcaggcttaggaatctgcactctcttgttcaaagactgtgagtcagaagaggagggccaagtgccgccttgaatttctcttactgctcaaatggaaaacaatgaaacagggctgtccacatcacagcctgccacctgccagtcatttagagcctggcgcgcatttccatagctcctctgacgccaggacaatcagacccgtctccggagggctcctgcctctggatgtctaaatgttcttgccttaaacccggtgtgacgctccacccctcccacaccgcacacatacgaattttaacaaaatcttcaaagcagaacttaacaaaaggttgcgtggtaccaggtccatttggttccatgtgaaaccaactaggaagatcc

SEQ ID NO: 11045 - DNA, 623 bp, Homo sapiens; identical to SEQ ID NO: 6405
  chr12:132218722-132219345
  hypo

SEQ ID NO: 11046 - DNA, 99 bp, Homo sapiens
  chr12:132411621-132411720
  hypo
cgtggggagagcgagagcgagagggggagggggagggagagcgagagcgagagcgagagcgagagggagagggagagagatttttgtatttttagagac

SEQ ID NO: 11047 - DNA, 160 bp, Homo sapiens; identical to SEQ ID NO: 9018
  chr12:132643296-132643456
  hypo

SEQ ID NO: 11048 - DNA, 321 bp, Homo sapiens; identical to SEQ ID NO: 9019
  chr12:132643525-132643846
  hypo

SEQ ID NO: 11049 - DNA, 92 bp, Homo sapiens; identical to SEQ ID NO: 9020
  chr12:132644008-132644100
  hypo

SEQ ID NO: 11050 - DNA, 425 bp, Homo sapiens; identical to SEQ ID NO: 6824
  chr12:132665953-132666378
  hypo

SEQ ID NO: 11051 - DNA, 86 bp, Homo sapiens; identical to SEQ ID NO: 6825
  chr12:132666502-132666588
  hypo

SEQ ID NO: 11052 - DNA, 126 bp, Homo sapiens
  chr12:132675105-132675231
  hypo
cggccgccgtggctttcctctgcagcccccggtgcctgctggcgtcgtgcctttccgtgtgctcgttggccacgcacatgtcgaggggccgttctgacgatggactgaggggctcggggatagcac

SEQ ID NO: 11053 - DNA, 94 bp, Homo sapiens; identical to SEQ ID NO: 10248
  chr12:15374050-15374144
  hyper

SEQ ID NO: 11054 - DNA, 82 bp, Homo sapiens
  chr12:16500402-16500484
  hyper
cgccaaatagaagggctcaaagggaatcagcaggcgatggttactgtgggcgggtaaatcaggtgatttagaggaggggttt

SEQ ID NO: 11055 - DNA, 393 bp, Homo sapiens
  chr12:16500621-16501014
  hyper
gcttcctcctcctcggcctcaccgtgcgtactgggaggggagaaggggaccgcatgcaaagggtggcaggcagggagggccagggtgggtggcagatggaagacttgggggggtctctgccagctggaagtgcttggctccacttagcagctaaacttagcttttcaatcgatcgcttttgaaagggaattgtatttctgtccccgtgcgggtaagttttcccatttctcaaactccaggaatgaaacgagagagtcttttcatgcttgagtgatgatttccaaacttagccttttcaagtcaaagtaacctcctgtttgaaagggtcccttgaactctggggaaggaggaaaaggcacgtgtagtaatggaggaaatgcctgtagtttgaac

SEQ ID NO: 11056 - DNA, 869 bp, Homo sapiens
  chr12:16758732-16759601
  hyper
tccttccatcaacatcttccgcctgcatctatttcatgtctcatcataaaaataatgaagcctcacatgatttaaacaaaaccgtctcagtagagctgcagcccgagtgaaagttgcagtgcggagctgggttgcagctccagtttatgcctcattagcagaggttggggaagaaaaaaatacccacatccgcacacgcacgcgcgcacccgcagacacacacaccacaaataagccgacgcgtgtgtacacagttgctgcacttaccttctcaattaagcgatacagggggaggccgttcagtaagcacagtggctgctttgtagcgcttctccttgggaaaggtcaaaaagaagcattgtttgaaaaaaaaaaaaaagacgggggagggaatgtctatttttttttaagtttaaaataatgaggtcctcaaggatacgccaagcaatggtgttgaccgcatctgagccacaggtgtcctccttttaggcaactgcagtccgaggctgtctctctccgtcctggttcaagacaacttaccccagcagcgtgcgaggagccgagctgaaggaagctccggctctcagctgcaaaatgcaatcccttcccagccagacataatacagccaaagaaaaggtcactcagttattagtgagccggcggagcccaggcagcgcttgtcaagaccacagagaagcagctcccttccgatttaagactatttacctctcgcccccacccctcccctcttctttccttctctccctccctctctcgctggctccctcgctcgctctcgtgtgcctgttctgcagctcagtcaagtacagccgccctcggaaagtgcaaagcagccacgagacagatc

SEQ ID NO: 11057 - DNA, 65 bp, Homo sapiens
  chr12:1762097-1762162
  hyper
cggccttaggtcggagcaaatgatcagcctggaacccactccagactggtctgcagttctgcatg

SEQ ID NO: 11058 - DNA, 155 bp, Homo sapiens
  chr12:1992067-1992222
  hypo
cgtggtcgtggttgatgaccatggggcggctgagcacgtgcaggtattccatcacgttctcctgggtgtccgccagcgttgagatctgcgtgtagtagcctgcggtggggaaggccgcgtgggtgtggaaggcagggcttccctgggaacccctc

SEQ ID NO: 11059 - DNA, 70 bp, Homo sapiens
  chr12:43944719-43944789
  hyper
cgcataagctgacgacggccttgtaatcctcctgtgagttgacctggccgcggtagaagcagtggcgcag

SEQ ID NO: 11060 - DNA, 939 bp, Homo sapiens
  chr12:48591606-48592545
  hyper
cggagtggatacctggaaaggggaggtaaggcagctcaaaggacactgttgttcaacggagggaagcggattcaacaattatacaattcgctgagtcggggctttcactgcgaaagaacttggcttcggatccgtgatcaaggctgggagctatggaggtggatgtgattggcaaagacctctgctcaggtctgcgtcaaaccttgcttcgctcccatcccattctgcgccaatagggcgcagtatcccaaccattccactcggctaggaggggatcctaagcctcaaggtccgcatctcccgctggagggactgagcagccgcactggtgtcccagaatagatcgtgttccccagaggttgtcaggttcccgcaattcggcgcgggcgaggcggccaaagagagggcgctcattggctgccacagccccggtccgagaggccgaagaaggctgattcgtcacaggccgtcagcgcgggccacgcctatttcctctccaggttctaattaggtcaggggccctacagcctcttgggtagtttgcaagtgcgtcgcggagccggcctcggaaatatggcgacagcttcagctttcagtgtgagggagccgagggcccagccaaaccctgcgggaggcaattcctgggtacccttcccatattttcggtctttgggctgcgccgtggtaacctcagagcctggttgcgtgctcaccagcgacaagtgtctttcattgggacatgaaaggggactgggaagtgccgtgcagtttcagggtggtttctggttaattacattttcatgggttttcgcagagtctgggggcaatttgtgtcctccagagaccagggaccagggccgaagctacggcaggggagacgcggccagggccgtggcttctagtgcgagctcggttcgcgtccgttcccgtctggcgccc

SEQ ID NO: 11061 - DNA, 97 bp, Homo sapiens; identical to SEQ ID NO: 6406
  chr12:49065604-49065701
  hypo

SEQ ID NO: 11062 - DNA, 40 bp, Homo sapiens
  chr12:52387815-52387855
  hypo
cggcgcagcccgcctgacggccctgcgcatcaagaagacc

SEQ ID NO: 11063 - DNA, 71 bp, Homo sapiens; identical to SEQ ID NO: 10261
  chr12:52627438-52627509
  hyper

SEQ ID NO: 11064 - DNA, 156 bp, Homo sapiens; identical to SEQ ID NO: 9042
  chr12:53272458-53272614
  binary

SEQ ID NO: 11065 - DNA, 44 bp, Homo sapiens
  chr12:54348695-54348739
  hyper
cggtcgggccccgcggaaatgggcgagcataatctcctgaatcc

SEQ ID NO: 11066 - DNA, 226 bp, Homo sapiens
  chr12:54349391-54349617
  hyper
tgagctagggacgcccagggtgacagaatgtgtggcgaggaagagcttcttataaaatgaagtgcgggtggggggagcctataaacatgtaaacatccccacaaaagaaatggagagtgttcctttttcgtctgcctgcggctggaggcggcagggattccggagttgggggatcctgacggggactccccaggcctgggggtgaggaggtggggacagaaagccc

SEQ ID NO: 11067 - DNA, 104 bp, Homo sapiens
  chr12:54811879-54811983
  hyper
cgaccccagccccagaagtcccggtctcagcacagctccagccgaccagctacaggaaaccagcttttctcttcctcccaagagccagaggaagagggaaaccg

SEQ ID NO: 11068 - DNA, 184 bp, Homo sapiens; identical to SEQ ID NO: 5933
  chr12:63026256-63026440
  hyper

SEQ ID NO: 11069 - DNA, 119 bp, Homo sapiens; identical to SEQ ID NO: 9054
  chr12:77719613-77719732
  hyper

SEQ ID NO: 11070 - DNA, 215 bp, Homo sapiens
  chr12:9108820-9109035
  hypo
cggccaccccacgttatgggaagtggtggtggcgccaggccagcccaggagccgtgggctggtgggactgaacaagttgggacatgcccccgttcggcaaagcttgtggacagcaggaatgaatgaactgtaacacaaacgagctgagactcttcggggtgcagacctcgggattccccaagccagagctgtaacatgctgtaacaccccccacc

SEQ ID NO: 11071 - DNA, 118 bp, Homo sapiens
  chr12:91502991-91503109
  hyper
cgtacacgtgcgcccccttctgggcgagcccagcctaattgttccagtcaatctccaggctcttccttaatgaaatgccttcctgtaagaggtttctgggtggtgttcattgaccacc

SEQ ID NO: 11072 - DNA, 117 bp, Homo sapiens
  chr12:94145777-94145894
  hypo
cgggccggcaagtaactacctgcagtgtacttgagaacctttgaaagcatctgtacttgccaagggtggggcatgtatgcttgagagccctttaaagcgtctttacttgctaagggc

SEQ ID NO: 11073 - DNA, 31 bp, Homo sapiens; identical to SEQ ID NO: 5744
  chr12:94543992-94544023
  binary

SEQ ID NO: 11074 - DNA, 86 bp, Homo sapiens; identical to SEQ ID NO: 5745
  chr12:94544052-94544138
  binary

SEQ ID NO: 11075 - DNA, 140 bp, Homo sapiens
  chr13:111289028-111289168
  hypo
cggtggaggcctcgctcggtgttgccctgtatggttgagctgtggtttaaggtgaactctggagtgtgggctgcaggtgagggctccgtccctgggagctggtgggaggagctggaggctggcgccgccctgctcagagc

SEQ ID NO: 11076 - DNA, 352 bp, Homo sapiens; identical to SEQ ID NO: 9070
  chr13:112760444-112760796
  hyper

SEQ ID NO: 11077 - DNA, 288 bp, Homo sapiens; identical to SEQ ID NO: 7925
  chr13:113667314-113667602
  hypo

SEQ ID NO: 11078 - DNA, 45 bp, Homo sapiens; identical to SEQ ID NO: 6858
  chr13:113985425-113985470
  hypo

SEQ ID NO: 11079 - DNA, 169 bp, Homo sapiens
  chr13:114305760-114305929
  hypo
tctggaagccaaacaataagaaaaagccccattgtttcccttgctgggttttacccgccatggtggagctcgctgtggtgatggttcggtgtttacgtctggtttactgggccgacggctgacattcctggagagaaccaggtgggccgtgcccagcatgaaccagcac

SEQ ID NO: 11080 - DNA, 139 bp, Homo sapiens; identical to SEQ ID NO: 6861
  chr13:114748186-114748325
  hypo

SEQ ID NO: 11081 - DNA, 92 bp, Homo sapiens; identical to SEQ ID NO: 6407
  chr13:114807847-114807939
  hypo

SEQ ID NO: 11082 - DNA, 506 bp, Homo sapiens; identical to SEQ ID NO: 6408
  chr13:20979799-20980305
  hypo

SEQ ID NO: 11083 - DNA, 306 bp, Homo sapiens; identical to SEQ ID NO: 5936
  chr13:28491488-28491794
  hyper

SEQ ID NO: 11084 - DNA, 38 bp, Homo sapiens; identical to SEQ ID NO: 6869
  chr13:28527202-28527240
  hyper

SEQ ID NO: 11085 - DNA, 462 bp, Homo sapiens; identical to SEQ ID NO: 6870
  chr13:28527384-28527846
  hyper

SEQ ID NO: 11086 - DNA, 201 bp, Homo sapiens; identical to SEQ ID NO: 5748
  chr13:29292491-29292692
  binary

SEQ ID NO: 11087 - DNA, 242 bp, Homo sapiens; identical to SEQ ID NO: 5749
  chr13:29293342-29293584
  binary

SEQ ID NO: 11088 - DNA, 199 bp, Homo sapiens
  chr13:30079657-30079856
  hypo
cgctcccgaaacacatggggcggcagctgctgtgcctccttctcaattcttccacccccccacaccatcagaattcggatttctctccacgtggcgtctgcctctgtccccttccaggctggagcgacgtttccacgttcggatgctgcagcctctgcacctgcctcagacagacccaccagataccacctgtctcttc

SEQ ID NO: 11089 - DNA, 34 bp, Homo sapiens; identical to SEQ ID NO: 9096
  chr13:79160914-79160948
  hyper

SEQ ID NO: 11090 - DNA, 65 bp, Homo sapiens; identical to SEQ ID NO: 9097
  chr13:79161096-79161161
  hyper

SEQ ID NO: 11091 - DNA, 599 bp, Homo sapiens; identical to SEQ ID NO: 6409
  chr14:104048314-104048913
  hypo

SEQ ID NO: 11092 - DNA, 127 bp, Homo sapiens; identical to SEQ ID NO: 6410
  chr14:104048982-104049109
  hypo

SEQ ID NO: 11093 - DNA, 247 bp, Homo sapiens; identical to SEQ ID NO: 5947
  chr14:21098618-21098865
  hyper

SEQ ID NO: 11094 - DNA, 196 bp, Homo sapiens; identical to SEQ ID NO: 5948
  chr14:21099147-21099343
  hyper

SEQ ID NO: 11095 - DNA, 686 bp, Homo sapiens; identical to SEQ ID NO: 5949
  chr14:21099793-21100479
  hyper

SEQ ID NO: 11096 - DNA, 113 bp, Homo sapiens; identical to SEQ ID NO: 5950
  chr14:21101056-21101169
  hyper

SEQ ID NO: 11097 - DNA, 377 bp, Homo sapiens
  chr14:23291965-23292342
  hyper
acgggaagccccttgttgggggggcgggggcgggaggcggggcgaggaatgtgcctcctcggagccggaggaggggtctcccgaaggccgtctcttccaccccgggttcccgactccccgccccctcggggtagctgttgcatcagcttccagattccaaaccaaagaaagtgggctccactaagctgggaaggcgtcgggcagcaaagccgccgccaggaggcagcgcttaatcaaaaatgtccgggccgagggggcccaggataccggagtccccggagcgtctttcatctgaagtcttagcagcagcgcggacctaacaaaaaagggagttgctgaattagttcaagaaaaggcaactggaaatgcttcatcac

SEQ ID NO: 11098 - DNA, 39 bp, Homo sapiens; identical to SEQ ID NO: 5750
  chr14:23355352-23355391
  binary

SEQ ID NO: 11099 - DNA, 53 bp, Homo sapiens; identical to SEQ ID NO: 5751
  chr14:23355484-23355537
  binary

SEQ ID NO: 11100 - DNA, 270 bp, Homo sapiens
  chr14:25601990-25602260
  hyper
cggcatccctcgggggtgggcagcatttggggaagctggcgtatgcggcacgagagtgcaaggaaggaagagctgcaaccacgtggctgagctcagccctgggagatggggccgtccttcctctgggagccacggaaatttctacctgggtctaggcgggcagaggctctgcagcagcggacacgcatgactgggtagagccagtcttcaacagtgccaccgtgtggcagagaggagcagtgacagttataactccgtagaattatatgc

SEQ ID NO: 11101 - DNA, 207 bp, Homo sapiens
  chr14:29243307-29243514
  hyper
cgttctgggcttgactttgtccctgctgggaatatcccagttcctggctttggaaatctcaggcaaataattgattcttaatgcacacttaggagacgtcggtagtacgctcgagagcctctctgtcccagagtggctgagagcacgcgccagacacaggttggctcggcccgaagcgaatttgggactctcgtcgcggtgtcctat

SEQ ID NO: 11102 - DNA, 77 bp, Homo sapiens
  chr14:50511831-50511908
  hyper
cgtccaccacatggctcagcttcctgttcctcccctctgctcggagtcacagtcccgaggccagcggggtgtttacc

SEQ ID NO: 11103 - DNA, 173 bp, Homo sapiens; identical to SEQ ID NO: 9125
  chr14:60043607-60043780
  hyper

SEQ ID NO: 11104 - DNA, 80 bp, Homo sapiens; identical to SEQ ID NO: 5752
  chr14:60097114-60097194
  binary

SEQ ID NO: 11105 - DNA, 277 bp, Homo sapiens
  chr14:60974092-60974369
  binary
aaagttgtccttccggctgattcggaagtcgctccaagggaaagaaggtttatgctttgtcattatcttcatcgccctctttattttgcccctgccttgtcgtatttcaagaaaatgaactcttagaaaagaaagcctctccgttgaggcggttggcaatctcacagaaatgatgtaaatggtttcagggcttttttcttcccctctgctatttttttcgagtgaactgtgaagatctgtgaaaataatatcagggttttccgtcagaacgagcttt

SEQ ID NO: 11106 - DNA, 110 bp, Homo sapiens
  chr14:60974415-60974525
  hyper
tctgtgctatctatctgccttctgatttaccagatctgtacaagccgcatacaaattgtacttgatactaaagaaaagacagtcgggtccagtccagttcggctgtgaac

SEQ ID NO: 11107 - DNA, 167 bp, Homo sapiens; identical to SEQ ID NO: 6904
  chr14:61104864-61105031
  hyper

SEQ ID NO: 11108 - DNA, 133 bp, Homo sapiens
  chr14:61116736-61116869
  hyper
cgcgcatgcagcctctggaagagtggcttcgggttggcttcagctcgaggagtccaaccctatttcctcctccctccccccaccaactaccactgtcctccccccactgctgcacaccaccctccaaagggca

SEQ ID NO: 11109 - DNA, 186 bp, Homo sapiens
  chr14:61117028-61117214
  hyper
ggttcctgaagcttctggactcaatttccccatctgtgcggttgtgttttgcagtgccacctctgctactgaggaatgccgagaggctttacttgctattagcaaaaatgctttgggaacctcgtacgaaaggcgctggatgtggtgtaaattaaataaaactgtgcccggctccaataaccgtcc

SEQ ID NO: 11110 - DNA, 619 bp, Homo sapiens
  chr14:61123686-61124305
  binary
cgcagccaagtatccgcgcgcggacgccggggaggcttcaccgcccggtgtgctggcggccccgcccgctggctcgcagagcggggtctcgcagagctgggcctcacccgtcgccccgccgcctgcaccagaaactccctccccgggctgtgcgggagctcttgggcgccgcgtctgcgccggggccgactccgcccaggcttgtagccagaggtcgcgctatctcgccgggctggcccggcgctctctggggttgttccctcgggcggtgcatggggcccacaggcgtcggggcttgagggaagaggggccggggcctgaagggcggggaccacaacgaggcgcggggaggtcagtggagcggagagccggcgcaggccggcggcggcgcggccggaggagaaagagggcgctgtcttcctggcaaaggagttttcgcctggccggcaggaaccgaaacaacaacaacaacaaaaaaaaaagaaagaaagaaaatctgctccgccgagtccccggagtgaagagcgcgcggcgggaagggtctggggtagcggagcggattctcggcccaaagcctggggaccgctcagcccaccttggcttcgccagcgccacgtag

SEQ ID NO: 11111 - DNA, 114 bp, Homo sapiens; identical to SEQ ID NO: 9129
  chr14:62584399-62584513
  hyper

SEQ ID NO: 11112 - DNA, 48 bp, Homo sapiens
  chr14:85996094-85996142
  hyper
cgggggcggagagcagagaagtaaaggaataaaaccaacttcgctggc

SEQ ID NO: 11113 - DNA, 67 bp, Homo sapiens; identical to SEQ ID NO: 5963
  chr14:89818034-89818101
  hyper

SEQ ID NO: 11114 - DNA, 111 bp, Homo sapiens; identical to SEQ ID NO: 6413
  chr14:89875711-89875822
  hypo

SEQ ID NO: 11115 - DNA, 160 bp, Homo sapiens; identical to SEQ ID NO: 6920
  chr14:93154728-93154888
  hypo

SEQ ID NO: 11116 - DNA, 100 bp, Homo sapiens
  chr14:94404099-94404199
  hypo
cgcgagcagagctgcacgttgcccacgtagtccaggaggacatcgatgatgggccccgcccagcggctcacctctggggcagatacgaactcacagaact

SEQ ID NO: 11117 - DNA, 42 bp, Homo sapiens
  chr14:94404228-94404270
  hypo
agttcatcccacctgcaagagcctgcggccagggacggcagc

SEQ ID NO: 11118 - DNA, 102 bp, Homo sapiens; identical to SEQ ID NO: 5964
  chr14:94889915-94890017
  hyper

SEQ ID NO: 11119 - DNA, 145 bp, Homo sapiens; identical to SEQ ID NO: 5967
  chr15:29432142-29432287
  hyper

SEQ ID NO: 11120 - DNA, 61 bp, Homo sapiens; identical to SEQ ID NO: 5968
  chr15:29561185-29561246
  hyper

SEQ ID NO: 11121 - DNA, 700 bp, Homo sapiens; identical to SEQ ID NO: 5969
  chr15:29561316-29562016
  hyper

SEQ ID NO: 11122 - DNA, 507 bp, Homo sapiens; identical to SEQ ID NO: 5754
  chr15:31774606-31775113
  binary

SEQ ID NO: 11123 - DNA, 90 bp, Homo sapiens; identical to SEQ ID NO: 6414
  chr15:40532821-40532911
  hypo

SEQ ID NO: 11124 - DNA, 385 bp, Homo sapiens
  chr15:41786420-41786805
  hyper
cggagcgggagagggactgcctcccggcagcgggctcttcgcacctgcagcagccgcgccgcctttccacctcgtcggtctcctccactggctcctcgtcgctgctcgaggactcggaggacgacctgctgagcgacagtgagagccggagccgcggcaacgtgcagctggaagcgggcgaggacgtgggtcaggtacgggccgcgggggcggggccagcgccgggcgcgggggctgcacgggggacctggctgggtgctcccggaggacccgctcctgtccatgctccctccagcggaaggtcctgttctcgcggtttaggaggaatctgggggtcagagggaggcgcctggccgacctctcgcctgggcaactttcacctcgg

SEQ ID NO: 11125 - DNA, 119 bp, Homo sapiens; identical to SEQ ID NO: 5970
  chr15:48469946-48470065
  hyper

SEQ ID NO: 11126 - DNA, 53 bp, Homo sapiens; identical to SEQ ID NO: 5971
  chr15:48470094-48470147
  hyper

SEQ ID NO: 11127 - DNA, 159 bp, Homo sapiens; identical to SEQ ID NO: 5972
  chr15:48470215-48470374
  hyper

SEQ ID NO: 11128 - DNA, 344 bp, Homo sapiens
  chr15:51386268-51386612
  hyper
gacccctgccccaaccactcgcgaggccttttctgttcagagcccccagtcacgttcttggacccagtcacctgcgccgcagcgcagtcccggcgccccaggttcgaggacccggcccgcgctcggaaagttatttcaaaaggcagatgtgttgcaaccctctctgcagcaaactacagtacgcggattcccgaacccttccccgcccccacccagcccgggcgaccagagcccgccgcgggagactggcagcaaggagagccacccctaaatgcaccttccctccctcccgcgcgcccaagtgcaatggggttgggggaagccccaaagcaaactcacgacgc

SEQ ID NO: 11129 - DNA, 72 bp, Homo sapiens; identical to SEQ ID NO: 5974
  chr15:63795400-63795472
  hyper

SEQ ID NO: 11130 - DNA, 351 bp, Homo sapiens; identical to SEQ ID NO: 5757
  chr15:63795501-63795852
  binary

SEQ ID NO: 11131 - DNA, 338 bp, Homo sapiens; identical to SEQ ID NO: 5758
  chr15:63795894-63796232
  binary

SEQ ID NO: 11132 - DNA, 61 bp, Homo sapiens; identical to SEQ ID NO: 9167
  chr15:79383268-79383329
  hyper

SEQ ID NO: 11133 - DNA, 62 bp, Homo sapiens; identical to SEQ ID NO: 9168
  chr15:79384146-79384208
  hyper

SEQ ID NO: 11134 - DNA, 114 bp, Homo sapiens
  chr15:83572357-83572471
  hypo
cgaaactcctctaaacacacacacacacacggcaacaagagcgaaactcctctaaacacacacacacacacacgccacaccccacatcaagtaaaaagctgaacaagactgggc

SEQ ID NO: 11135 - DNA, 68 bp, Homo sapiens
  chr15:89913879-89913947
  hyper
ggccagaggccaacccatccgatttcggcctcctggtacgaatgcctgcccctactagagcaatgttc

SEQ ID NO: 11136 - DNA, 77 bp, Homo sapiens
  chr15:89956224-89956301
  hyper
cgcccccgacctactgacccctcttcccccctgacatgaatagtgggactcacagcctccccagcctctccaactag

SEQ ID NO: 11137 - DNA, 40 bp, Homo sapiens; identical to SEQ ID NO: 5978
  chr15:90016187-90016227
  hyper

SEQ ID NO: 11138 - DNA, 107 bp, Homo sapiens; identical to SEQ ID NO: 6415
  chr15:90378787-90378894
  hypo

SEQ ID NO: 11139 - DNA, 106 bp, Homo sapiens; identical to SEQ ID NO: 6938
  chr15:90501638-90501744
  hypo

SEQ ID NO: 11140 - DNA, 184 bp, Homo sapiens; identical to SEQ ID NO: 6416
  chr15:90755573-90755757
  hypo

SEQ ID NO: 11141 - DNA, 42 bp, Homo sapiens; identical to SEQ ID NO: 6417
  chr15:90756079-90756121
  hypo

SEQ ID NO: 11142 - DNA, 82 bp, Homo sapiens
  chr16:1154990-1155072
  hypo
cgtctccacgtagtcgcccacgaggtaagggtgccagcattgctcgtggtactgcaggttgttggtggcgatggagaagggc

SEQ ID NO: 11143 - DNA, 145 bp, Homo sapiens; identical to SEQ ID NO: 6420
  chr16:11770890-11771035
  hypo

SEQ ID NO: 11144 - DNA, 151 bp, Homo sapiens
  chr16:12210622-12210773
  hypo
cgtggaaacaggcttagtcaatacctgcttcaacgcggacgaaccgtggaaacaggcttagtcaatacgtgcttcaacgaggacgaaccatggaaacaggcttagtcaatacctgcttcaacgcggacgaaccgtggaaacaggcacggtc

SEQ ID NO: 11145 - DNA, 91 bp, Homo sapiens
  chr16:12210896-12210987
  hypo
ggcgtgttcaatacgtgcttcaatgcggacgaaccatggaaacaggcgtggtcaatacgtgcttcagtgcggacgaaccatggaaacaggc

SEQ ID NO: 11146 - DNA, 91 bp, Homo sapiens
  chr16:12211189-12211280
  binary
cgaaccgtggaaacaggcgtggtcaatacgtgcttcagtgcggacgaaccgtggaaacaggcgtggtcaatacgtgcttcaatgcggacga

SEQ ID NO: 11147 - DNA, 385 bp, Homo sapiens
  chr16:1397859-1398244
  hypo
tgggggcaggggggctcacgactgtgctcctgcaggcttaagtgacccctttgtgatcgtggagctgggcccaccgcatctctttccactggtccgcagccagaggacccaggtgaagacccggacgctgcaccctgtatacgacgaactcttctacttgtgagtgtcctaagccccagccccagccccaggctccaggctgccggagcgagactcccgactggcctctgtccgcagttccgtgcctgccgaggcgtgccgccgccgcgcggcctgtgtgttgttcaccgtcatggaccacgactggctgtccaccaacgacttcgctggggaggcggccctcggcctaggtggcgtcactggtgtcgcccggccccaggtgggc

SEQ ID NO: 11148 - DNA, 133 bp, Homo sapiens; identical to SEQ ID NO: 6422
  chr16:1424307-1424440
  hypo

SEQ ID NO: 11149 - DNA, 177 bp, Homo sapiens; identical to SEQ ID NO: 6423
  chr16:1424469-1424646
  hypo

SEQ ID NO: 11150 - DNA, 473 bp, Homo sapiens; identical to SEQ ID NO: 6424
  chr16:1424928-1425401
  hypo

SEQ ID NO: 11151 - DNA, 407 bp, Homo sapiens; identical to SEQ ID NO: 6425
  chr16:1425684-1426091
  hypo

SEQ ID NO: 11152 - DNA, 212 bp, Homo sapiens
  chr16:1580458-1580670
  hypo
cgattgtgcacaccctctcccgaggcccaggtgtggggctggacagggctgggacctgcctctacctgccccgcgtggctcctttcctctcccttgtcctgaaaacaactggttccttccgtccacatccaattgcggtggaaaatcacaaacaagcacaggaatgtggcagctgacttgggtcccagacgggctcccctgtgctctgaacg

SEQ ID NO: 11153 - DNA, 124 bp, Homo sapiens
  chr16:1580699-1580823
  hypo
tggggagcgggagagagcccgcccgtggggagcgggagagagcccgcaggccggccctggttttgctctggttcctggggcccatgtgtgaccgaggacccagccagcacaccgtcagatgccc

SEQ ID NO: 11154 - DNA, 184 bp, Homo sapiens; identical to SEQ ID NO: 9179
  chr16:1813299-1813483
  hypo

SEQ ID NO: 11155 - DNA, 217 bp, Homo sapiens; identical to SEQ ID NO: 9180
  chr16:1814037-1814254
  hypo

SEQ ID NO: 11156 - DNA, 112 bp, Homo sapiens; identical to SEQ ID NO: 9181
  chr16:1814369-1814481
  hypo

SEQ ID NO: 11157 - DNA, 86 bp, Homo sapiens; identical to SEQ ID NO: 8004
  chr16:2040762-2040848
  hyper

SEQ ID NO: 11158 - DNA, 228 bp, Homo sapiens; identical to SEQ ID NO: 6427
  chr16:2042997-2043225
  hypo

SEQ ID NO: 11159 - DNA, 183 bp, Homo sapiens; identical to SEQ ID NO: 6428
  chr16:2129581-2129764
  hypo

SEQ ID NO: 11160 - DNA, 170 bp, Homo sapiens; identical to SEQ ID NO: 6949
  chr16:21569179-21569349
  hypo

SEQ ID NO: 11161 - DNA, 370 bp, Homo sapiens; identical to SEQ ID NO: 6950
  chr16:21569399-21569769
  hypo

SEQ ID NO: 11162 - DNA, 303 bp, Homo sapiens; identical to SEQ ID NO: 6429
  chr16:2213343-2213646
  hypo

SEQ ID NO: 11163 - DNA, 267 bp, Homo sapiens; identical to SEQ ID NO: 6430
  chr16:2213723-2213990
  hypo

SEQ ID NO: 11164 - DNA, 76 bp, Homo sapiens
  chr16:2229615-2229691
  hypo
cggcaccttcttggaggtgggtgtgggcgagccctggagcttgggcacaggctgcgtcaggacgggcttgggagag

SEQ ID NO: 11165 - DNA, 266 bp, Homo sapiens; identical to SEQ ID NO: 6431
  chr16:2230223-2230489
  hypo

SEQ ID NO: 11166 - DNA, 182 bp, Homo sapiens; identical to SEQ ID NO: 6432
  chr16:2231183-2231365
  hypo

SEQ ID NO: 11167 - DNA, 389 bp, Homo sapiens; identical to SEQ ID NO: 6435
  chr16:2280815-2281204
  hypo

SEQ ID NO: 11168 - DNA, 238 bp, Homo sapiens; identical to SEQ ID NO: 6436
  chr16:2281402-2281640
  hypo

SEQ ID NO: 11169 - DNA, 61 bp, Homo sapiens; identical to SEQ ID NO: 6437
  chr16:2281702-2281763
  hypo

SEQ ID NO: 11170 - DNA, 713 bp, Homo sapiens; identical to SEQ ID NO: 6438
  chr16:24837143-24837856
  hypo

SEQ ID NO: 11171 - DNA, 173 bp, Homo sapiens
  chr16:2974650-2974823
  hypo
gtgggtcacgcaacccccccaggctagtcaaggttcaggcaggtggagacaaagcccggttgctgaggggcctgtggactttaacgggcggagtggcggtgggtcagcatctaccatccaagagcctgaacgggcaagagtgggaacgggtcctcagccttccacaagccggc

SEQ ID NO: 11172 - DNA, 136 bp, Homo sapiens
  chr16:30169940-30170076
  hypo
cgtgaaacttctgtgattcaaagaacaccgtcaagaaagtgaaaaaacgcctgcctgcccgcctttctttctctctctctctctctttctttctttcaacagtctccctctgttgccgaggctggactatactgcc

SEQ ID NO: 11173 - DNA, 61 bp, Homo sapiens
  chr16:31447348-31447409
  hypo
gctcgcacagcttctgggccccatcgccccctcctgctgagctgccggctgggtggctggc

SEQ ID NO: 11174 - DNA, 267 bp, Homo sapiens; identical to SEQ ID NO: 6440
  chr16:31500256-31500523
  hypo

SEQ ID NO: 11175 - DNA, 78 bp, Homo sapiens; identical to SEQ ID NO: 6441
  chr16:31500673-31500751
  hypo

SEQ ID NO: 11176 - DNA, 212 bp, Homo sapiens; identical to SEQ ID NO: 5982
  chr16:3222239-3222451
  hyper

SEQ ID NO: 11177 - DNA, 50 bp, Homo sapiens; identical to SEQ ID NO: 5983
  chr16:3238043-3238093
  hyper

SEQ ID NO: 11178 - DNA, 145 bp, Homo sapiens
  chr16:3241328-3241473
  hyper
cgcagagcggtgagcaaagtcttgcaccagcggggatgtcggggtggaactgaacctgttgtaggggacccccagtgtgccctggtttctggggctgattcattacgtcacttagtttctactattctcatgccaccccgccaat

SEQ ID NO: 11179 - DNA, 164 bp, Homo sapiens; identical to SEQ ID NO: 6443
  chr16:3772855-3773019
  hypo

SEQ ID NO: 11180 - DNA, 196 bp, Homo sapiens; identical to SEQ ID NO: 9197
  chr16:410000-410196
  hypo

SEQ ID NO: 11181 - DNA, 282 bp, Homo sapiens; identical to SEQ ID NO: 6961
  chr16:410714-410996
  hypo

SEQ ID NO: 11182 - DNA, 111 bp, Homo sapiens; identical to SEQ ID NO: 6962
  chr16:411606-411717
  hypo

SEQ ID NO: 11183 - DNA, 49 bp, Homo sapiens; identical to SEQ ID NO: 5984
  chr16:4363872-4363921
  hyper

SEQ ID NO: 11184 - DNA, 158 bp, Homo sapiens; identical to SEQ ID NO: 5985
  chr16:4364080-4364238
  hyper

SEQ ID NO: 11185 - DNA, 342 bp, Homo sapiens; identical to SEQ ID NO: 9201
  chr16:4377552-4377894
  hyper

SEQ ID NO: 11186 - DNA, 72 bp, Homo sapiens
  chr16:440413-440485
  hypo
cgggagttcaggcgcgcaccactacacccacctaatttttaaaatttttttgggccgggcgcggtggctctc

SEQ ID NO: 11187 - DNA, 107 bp, Homo sapiens; identical to SEQ ID NO: 6964
  chr16:54966659-54966766
  hyper

SEQ ID NO: 11188 - DNA, 85 bp, Homo sapiens
  chr16:55690809-55690894
  hyper
cgtagtcggcttcgcagtggacctggccaacgtgtggcgcttcccctacctctgctacaagaacggcggcggtgagcgtggggtc

SEQ ID NO: 11189 - DNA, 44 bp, Homo sapiens
  chr16:56659821-56659865
  hyper
atttcccagccctattacagagggtctctgggtttcaggaagtc

SEQ ID NO: 11190 - DNA, 576 bp, Homo sapiens
  chr16:594129-594705
  hypo
cggcgccgggctgtggccagaccaggagactgcagcccagctcgagggaggcaccacgcctgcccctcagagcactgagcagagccccccatggtatcccccgccctgggcacagcaggaggagctgccgaccaagtctggcaccccggtgtgccccgagagctgtctgggcacaggttgcggggctgccccggccggacggggcatctgtgtttctcggtgtggcctcagggctctggtggctttgaccgaggccccgggggacagaatgcagcttcctgctcctcacttttcctaagaaaggggccgcctcccaggactggggctgcgccagtcacaggcccgcggcctccacgctccgggtgctgctgtcccggctgcttcagggcgggctctgtcttgcacgcagcgagcggcttcatcacctcccttttgaattggagctgagtgtcggcaacgcccagataactggggcgcgcgggtcttttgtgctggatttttctgtacagttgcctcgatcttccatccagcttggcctctgtgcagtaaggagcggcccgtcgcctcccccacgtc

SEQ ID NO: 11191 - DNA, 151 bp, Homo sapiens; identical to SEQ ID NO: 6965
  chr16:611800-611951
  hypo

SEQ ID NO: 11192 - DNA, 83 bp, Homo sapiens; identical to SEQ ID NO: 6966
  chr16:612320-612403
  hypo

SEQ ID NO: 11193 - DNA, 94 bp, Homo sapiens; identical to SEQ ID NO: 6449
  chr16:67313759-67313853
  hypo

SEQ ID NO: 11194 - DNA, 115 bp, Homo sapiens; identical to SEQ ID NO: 6450
  chr16:67313958-67314073
  hypo

SEQ ID NO: 11195 - DNA, 81 bp, Homo sapiens
  chr16:67433472-67433553
  hyper
agccccgagcgaggcgacgaggagcgcgcgcgccctctgcaggcgctgcggggtgggtcccctggaggaggcagcgctccc

SEQ ID NO: 11196 - DNA, 512 bp, Homo sapiens; identical to SEQ ID NO: 9206
  chr16:717202-717714
  hypo

SEQ ID NO: 11197 - DNA, 61 bp, Homo sapiens; identical to SEQ ID NO: 6452
  chr16:75148493-75148554
  hypo

SEQ ID NO: 11198 - DNA, 136 bp, Homo sapiens; identical to SEQ ID NO: 6453
  chr16:75149151-75149287
  hypo

SEQ ID NO: 11199 - DNA, 49 bp, Homo sapiens; identical to SEQ ID NO: 5986
  chr16:77822069-77822118
  binary

SEQ ID NO: 11200 - DNA, 261 bp, Homo sapiens; identical to SEQ ID NO: 6455
  chr16:81563939-81564200
  hypo

SEQ ID NO: 11201 - DNA, 163 bp, Homo sapiens; identical to SEQ ID NO: 6456
  chr16:81564229-81564392
  hypo

SEQ ID NO: 11202 - DNA, 240 bp, Homo sapiens; identical to SEQ ID NO: 6457
  chr16:81564541-81564781
  hypo

SEQ ID NO: 11203 - DNA, 272 bp, Homo sapiens
  chr16:81626951-81627223
  hypo
cgagaggtggtgttgtgcctagcctggggggttggagggcggggggagtttctgctctgcagccctgtgatgcgcaggtgccatcgggtctctgaccccaggccatcaagagctgtgcgacctgcttgccatccatcatgtggagctggtcggtcaccccatgcaccaggccgactccaagccggagctttcctctccgctcttttcggagtaatccgtggatgatggaggagcttggcaagcatttcagcaaagctcttttttcttgttga

SEQ ID NO: 11204 - DNA, 130 bp, Homo sapiens
  chr16:81694554-81694684
  hypo
cgggattgctgagctggggctgtggctgcaggaagtaacctccctctgtgcgcataccagggattgggtttgcacagaaaggccaaaaacctgggccccaccgtcttgggtcacggtcccagacacaggc

SEQ ID NO: 11205 - DNA, 346 bp, Homo sapiens
  chr16:81694713-81695059
  hypo
gggctacacccacgtctctgccagacaggtgacaaagagtcacaaggggaacatcttgcttttccttggaatcacttcccggctgtcttaggagacaggttgctgcagatttcctgggctcatgacgtcagagctgggttattattagccaaggttcctctgcgcagtggctggcccacggtggggtgcggctgtggggctttccctgaacacgggaggcagcacggtgctccaggttagcttagaggagctgtggagcagggcatccgctgccgggcacccggcgccagccttgcagtgggattcacataggacatgtccagggcacatctttgtggctcaggcc

SEQ ID NO: 11206 - DNA, 92 bp, Homo sapiens; identical to SEQ ID NO: 6977
  chr16:85033902-85033994
  hypo

SEQ ID NO: 11207 - DNA, 357 bp, Homo sapiens; identical to SEQ ID NO: 6978
  chr16:85673482-85673839
  hypo

SEQ ID NO: 11208 - DNA, 238 bp, Homo sapiens; identical to SEQ ID NO: 6979
  chr16:85673886-85674124
  hypo

SEQ ID NO: 11209 - DNA, 140 bp, Homo sapiens; identical to SEQ ID NO: 6980
  chr16:85674334-85674474
  hypo

SEQ ID NO: 11210 - DNA, 178 bp, Homo sapiens; identical to SEQ ID NO: 5759
  chr16:85932121-85932299
  binary

SEQ ID NO: 11211 - DNA, 184 bp, Homo sapiens; identical to SEQ ID NO: 6984
  chr16:88512691-88512875
  hypo

SEQ ID NO: 11212 - DNA, 32 bp, Homo sapiens; identical to SEQ ID NO: 9224
  chr16:88757496-88757528
  hypo

SEQ ID NO: 11213 - DNA, 31 bp, Homo sapiens; identical to SEQ ID NO: 9225
  chr16:88757686-88757717
  hypo

SEQ ID NO: 11214 - DNA, 279 bp, Homo sapiens; identical to SEQ ID NO: 6987
  chr16:88946079-88946358
  hypo

SEQ ID NO: 11215 - DNA, 79 bp, Homo sapiens; identical to SEQ ID NO: 6989
  chr16:89254530-89254609
  hypo

SEQ ID NO: 11216 - DNA, 144 bp, Homo sapiens; identical to SEQ ID NO: 6990
  chr16:89254764-89254908
  hypo

SEQ ID NO: 11217 - DNA, 731 bp, Homo sapiens
  chr16:89900822-89901553
  hypo
cgcactcgcggttggccatcgtagaagcctggataagcatagcccgtgtgaatctgtgaacctgcccgcactcgcggttggccatcgtagaagtgtggataagcatagcccatgtgaatctgtgaacctgcccgcattcgcggttggccgtcgtagaaggccccataagcatagcccgtgtgaatctgtgaacctgcccgcactcgcggttggccgttgtagaagcctggataagcatagcccgtgtgaatctgtgaacctgcccgcactcgcggttggccgtcgtagaagcctggataagcatagcccgtgtgaatctgtgaacctgcccgcactcgcggttggccatcgtagaagtgtggataagcatagcccatgtgaatctgtgaacctgcccgcattcgcggttggccgtcgtagaaggccccataagcatagcccgtgtgaatctgtgaacctgcccgcactcgcagctggccgtcgtagaaggccccacaagcatagcccgtgtgaatctgtgaacctgcccgcactcgcggctggccgtcgtagaaggccccataagcatagcccgggtgaatctgtgaacctgcccgcactcgcggttggccgtcgtagaagcgtggataagcatagcccgtgtgaatctgtgaacctgcccgcactcgcagttggccgtcgtagaagcctagataagcatagcccgtgtgaatctgtgaacctgcccgcac

SEQ ID NO: 11218 - DNA, 81 bp, Homo sapiens; identical to SEQ ID NO: 6994
  chr16:89901590-89901671
  hypo

SEQ ID NO: 11219 - DNA, 179 bp, Homo sapiens; identical to SEQ ID NO: 6461
  chr16:89947451-89947630
  hypo

SEQ ID NO: 11220 - DNA, 239 bp, Homo sapiens
  chr17:12890262-12890501
  hypo
cgttcaggtctctgagccagtgtagaatccatcatggtttgatgtggcccgtctgggactgtgatattggcatagctttttttttttttttttgtgacgttcatgttttgtcgtgttgattcctttctccgaatcctatcattgtgttcttgcagctgtgtgacatgagtggcgcagttttggatacgtgtgagggggattttcagggtaagctggccccggcctcgcccctccacccc

SEQ ID NO: 11221 - DNA, 299 bp, Homo sapiens; identical to SEQ ID NO: 6464
  chr17:1454071-1454370
  hypo

SEQ ID NO: 11222 - DNA, 104 bp, Homo sapiens; identical to SEQ ID NO: 6998
  chr17:16282523-16282627
  hypo

SEQ ID NO: 11223 - DNA, 430 bp, Homo sapiens
  chr17:17045715-17046145
  hypo
cgcgggggcagagggtaggggcaagcgcaggcctgatgggagggagggccgtggaggggtgcaggcagagctcgggtcagctgagcacgtgtctagacaacctcggtgctgtgcaagcctgaggggaatcaggcccgggccaggccgggcatgggaggagtcggctcactgccacctcacagctcacctcactgccacctcagggcctcgtgtcctctcttgcaggaggtcccaggtgattgaaaagtttgaggccttggacattgagaaggcagagcacatggagaccaatgcagtggggccctcaccatccagcgacacacgccagggccgcagcgagaagagggcgttccctaggaagcgggtgagctcctggggctgggcagcacctcaggggtggctcgggggcgggtcagcatgcaccccatgc

SEQ ID NO: 11224 - DNA, 301 bp, Homo sapiens
  chr17:17062274-17062575
  hypo
cggctctccacacacgagctgacctctctgctcgagaaggaggtaatagcctgggaccagatccccaccctgctcccagcagcctttccagagcatcagctgtgcccagctgtggcctgaggggttcatctagacagtcctacccgcgagggacttgcagacccctaggggagacagacgcatagatgagtcctcatagttgaggcagacctgagagctgtgggagcgtgccagtgcatgcagggcagggaaaggggccttccaggcacagaggaattcttccgatggtgggggcccctgc

SEQ ID NO: 11225 - DNA, 282 bp, Homo sapiens
  chr17:17062763-17063045
  hypo
ccaggggcatccagcaggagatgacagctgggtcctaggtcatgaggatatgaagcagaagacagtggtgaggcagggtaggctgtggatgaaggctgccctgtgactgtcactcctccacgaggccttcagtgcacctaggtacatagatgaacaagctggcccccgaactataaaataagatgttctttcatggaaatgtatgcagaaatccagtctgcagaacttcagtggtagattgacatgtctgggcagggagtctcgtagctggggaggtgtagc

SEQ ID NO: 11226 - DNA, 246 bp, Homo sapiens
  chr17:18024621-18024867
  hypo
cggctcgccgctgccgggctcacccaggccgccctcgccgcccctggggctctgccacagcccgcggcgcagctccctgaatctgccctcgcgcctcccgcacacgtggcggcgcctcagcgagccacccactcgggctgtgaagccgcaagtgcgcctgcccttccaccgaccgcccagggccggggcctggcgggcgcccctggaacaccgggagagcccgcgagaacccgaggactcagagac

SEQ ID NO: 11227 - DNA, 245 bp, Homo sapiens
  chr17:1881128-1881373
  hyper
cggccgcgggccgcccgggtgggagccggggtcgggggcgcatcctgcatcctgcaccccgcatcccgcacctgcatcggagccccgcgtcccgcaccccgcaccctgcaccctggatcctgcatcctgcaccccgcacccctcatcccgcatcttgcaccccggatcccgcaccccgcatcctgcaccccgcatctctcactccgcatccggcaccccgcagctgcacgcaccgcaaccctccc

SEQ ID NO: 11228 - DNA, 159 bp, Homo sapiens
  chr17:1901335-1901494
  hyper
cgcctccgccccaggccgcgatcgatcccggcctctcccggcctcattaccgagggagagctgccggggctggcaggggagccagacggcggcggagggggcggggaggcctccttggctccctggcccggattaaatatttactatgttttgtttggc

SEQ ID NO: 11229 - DNA, 100 bp, Homo sapiens
  chr17:1901970-1902070
  hyper
ctgcccaagctggcgctgccggagcgcccgggccccgctcccctcacgggcctcgcagcacagacggggacaggggcggcctcgcgcgcacggggacccc

SEQ ID NO: 11230 - DNA, 115 bp, Homo sapiens; identical to SEQ ID NO: 6466
  chr17:2326357-2326472
  hypo

SEQ ID NO: 11231 - DNA, 125 bp, Homo sapiens
  chr17:25842444-25842569
  hypo
cgtatttctgtcgttacacgccgcatgactgtagtttgagaagacacattttcttctaaacaacttaatgactttttcggtgtggctgggagtctcagtaggctctactgaggtgtggtttgaac

SEQ ID NO: 11232 - DNA, 169 bp, Homo sapiens
  chr17:27085337-27085506
  hypo
cgggggctcggttgccaggggctcggtgggccttgctcagcatggccaggctctgttctcggaagcaggcctgttggaaatccccacttaggtaatccactgtttgcatcaagctgttctggcttgccactggaccgcccccggtccctgctcggtagtgggccccggg

SEQ ID NO: 11233 - DNA, 52 bp, Homo sapiens
  chr17:27085535-27085587
  hypo
tgggctgcccaccgtggaacggcatggcaaggtcctgagaccccgagctgtc

SEQ ID NO: 11234 - DNA, 126 bp, Homo sapiens; identical to SEQ ID NO: 6467
  chr17:27909050-27909176
  hypo

SEQ ID NO: 11235 - DNA, 157 bp, Homo sapiens; identical to SEQ ID NO: 6468
  chr17:27909205-27909362
  hypo

SEQ ID NO: 11236 - DNA, 37 bp, Homo sapiens
  chr17:36875885-36875922
  hypo
cgagggaggagggacggagagaccggcgtgggctgga

SEQ ID NO: 11237 - DNA, 406 bp, Homo sapiens
  chr17:36876379-36876785
  hypo
gcaacttccgcccttctctcctgacccgtgtggcctcgaccccagcctcaggctccgccccaggtcttcacacctgtggctccccaagtcccgcctctcttctcagagctcacctgtgtccctccttaggatggcgccgccttttcaagggctgagcactggctcccctccaggccccgcccccggtcccctggccccgcctccgccccctcgcccctccctcaggttcctcgctctctccgcagtcgtggagatgctgaaggcgctgcacgcgctgcagaaggagaaccagcggctgcaagagcagatcctgagcctgacggccaaaaaggagcggctgcagattctcaacgtgcagctctctgtgcccttccctgccctgcctgctgccctgcctgccgccaac

SEQ ID NO: 11238 - DNA, 111 bp, Homo sapiens; identical to SEQ ID NO: 7015
  chr17:43121686-43121797
  hypo

SEQ ID NO: 11239 - DNA, 74 bp, Homo sapiens
  chr17:4436345-4436419
  hypo
cgctctacctgcaccgcgcccaagttgtgcagaagacagcagagacgtgcaacagcccgccctgtggggccaag

SEQ ID NO: 11240 - DNA, 164 bp, Homo sapiens
  chr17:4436450-4436614
  hypo
gctggtgagggacctcggacaggagagcccctcagccttagccctgagccgcctcaactcgtgcgccaccatcctctgtccccacagcctcatctttggggccatcacctgctttacgggatttctgggcgtggtcacgggggcaggagccacgcgctggtgcc

SEQ ID NO: 11241 - DNA, 54 bp, Homo sapiens; identical to SEQ ID NO: 10370
  chr17:46620299-46620353
  hyper

SEQ ID NO: 11242 - DNA, 322 bp, Homo sapiens; identical to SEQ ID NO: 10371
  chr17:46621458-46621780
  hyper

SEQ ID NO: 11243 - DNA, 182 bp, Homo sapiens; identical to SEQ ID NO: 8110
  chr17:46659093-46659275
  binary

SEQ ID NO: 11244 - DNA, 46 bp, Homo sapiens; identical to SEQ ID NO: 8111
  chr17:46659384-46659430
  binary

SEQ ID NO: 11245 - DNA, 64 bp, Homo sapiens
  chr17:46687527-46687591
  binary
cggccttcctccgcaagacaaacggcctcgtctccagcccgtgccggcgctgctgataaatatt

SEQ ID NO: 11246 - DNA, 321 bp, Homo sapiens
  chr17:46688806-46689127
  hyper
gggaagttggtccggttctcccaagacgaggaatgaggcgagcctggctcacgactctgtctctcttggtgccccagatatgcgggcggagatggagcaagtcttcctaggtgctcctagggcacaggatccagcccacgggccttggacgctgccgtttctggtggcaaaaaaaaaaagaaagaaagaaagaaaaagaaaaaaaaaggtttgaaagtaaaagaaaaagggggttgggagggtggggagagaaaggaagggtggaggttggcccgggcgcgctgctctcccggttcccggaggcggatgcctcagtggagc

SEQ ID NO: 11247 - DNA, 149 bp, Homo sapiens
  chr17:46690905-46691054
  hyper
gggagggtgggggagggggcagggacggagaaggttggaagattcgtgaacgagcctgggagaccattataataagggcaggggaccttctaccccgtgcgggggcggggggggcgcaagaaggccgcggtcggcggaggaggaggggc

SEQ ID NO: 11248 - DNA, 172 bp, Homo sapiens; identical to SEQ ID NO: 9248
  chr17:46801836-46802008
  hyper

SEQ ID NO: 11249 - DNA, 82 bp, Homo sapiens; identical to SEQ ID NO: 8114
  chr17:46826849-46826931
  hyper

SEQ ID NO: 11250 - DNA, 528 bp, Homo sapiens; identical to SEQ ID NO: 5996
  chr17:49021815-49022343
  hyper

SEQ ID NO: 11251 - DNA, 216 bp, Homo sapiens
  chr17:50235416-50235632
  binary
cgcgtgtctcttctcttcgcaccagcggcggaaaccgcactagcagcggcggcggcggcggcggcggcagcagccacctgaagccaccaacactgggctcttccagcaaaaacgagaccccgattcgtctggcgccccaagaagacatagacgatagccccccgccgggctgcgccgtgcaattccgggctcccgggagcgcgtagctcgctggct

SEQ ID NO: 11252 - DNA, 213 bp, Homo sapiens; identical to SEQ ID NO: 6474
  chr17:5269074-5269287
  hypo

SEQ ID NO: 11253 - DNA, 170 bp, Homo sapiens
  chr17:53341536-53341706
  hyper
ggatactttacaaaattattttaatcaccgtgcaaacctaataacttgacccaagcgcaatcacctgtattcacccagagtaaatattcctaaaatcccgttcagtgtgtctgtgtctctcccgcctctttccgtttcaggcaaatgtctaccccccctctccccccacc

SEQ ID NO: 11254 - DNA, 132 bp, Homo sapiens; identical to SEQ ID NO: 8122
  chr17:59532387-59532519
  hyper

SEQ ID NO: 11255 - DNA, 425 bp, Homo sapiens; identical to SEQ ID NO: 6477
  chr17:66440125-66440550
  hypo

SEQ ID NO: 11256 - DNA, 65 bp, Homo sapiens; identical to SEQ ID NO: 6478
  chr17:692558-692623
  hypo

SEQ ID NO: 11257 - DNA, 306 bp, Homo sapiens; identical to SEQ ID NO: 6479
  chr17:692652-692958
  hypo

SEQ ID NO: 11258 - DNA, 127 bp, Homo sapiens
  chr17:70657377-70657504
  hypo
cgccccctggagttgtgcagtgggacactcctgcttgagcgcagattgctgctcagcctggggtgtagttctggggttcgaggtgcacgctctcaggagaggtagtggagagagtcatgggtttctc

SEQ ID NO: 11259 - DNA, 382 bp, Homo sapiens
  chr17:70657541-70657923
  hypo
ttgctctccaggctatattccctggccggttgattatgaaaggagaatggcatatccctgacaagccctgcttcaccccggctttcagatcctcccatgtgcgatgagcgtgtgtgttcttgtgtggcaggcccttacatactgttttgattgttatcatcttgccgtgaaaggcctgattgttcaggcctggagatgacatcaccggcttcccactagggcagcctgtcgaggtgtttgatgagcctgcaggtgggaaggggctgggtactccccgcagggctgcccggccctacctgctcagaggagctggcttagcacgcaagggatcttcccccaccctcttggtgcagttctcggaaacttcttggtgcaggctggc

SEQ ID NO: 11260 - DNA, 65 bp, Homo sapiens; identical to SEQ ID NO: 8130
  chr17:73073967-73074032
  binary

SEQ ID NO: 11261 - DNA, 230 bp, Homo sapiens
  chr17:7348518-7348748
  hyper
cgaaggggcagtgacggggccagcggtcgtggccaggcaccagggctgcacttattctctcctcccccaggcgtccgcggctcggaggcggagggtcgactccgggagaaacttttctctggctatgatagctccgtgcggccagcgcgggaggtgggagaccgtgtcagggtcagcgttggtctcatcctggcgcaactcatcagcctggtgagggcgcgcggggggtg

SEQ ID NO: 11262 - DNA, 230 bp, Homo sapiens
  chr17:7348997-7349227
  hyper
gggacggacctcgacgtagggccacatgagtcctgagtgcccagggtggggcggagcttggtgctcaggggtcaataaatggcagcgggtggaggttcggggctgggtggattatgagctgaaggcagggccggggacagagctaggcggagggctaggcaggggcgggtctggtaggttgataggctgggagtgtagacggcaggaagaggtgtttctgagatagaggc

SEQ ID NO: 11263 - DNA, 42 bp, Homo sapiens
  chr17:7349259-7349301
  hyper
gacttggacccgagaggatggggctcagaaaaagggggcggc

SEQ ID NO: 11264 - DNA, 386 bp, Homo sapiens
  chr17:74086716-74087102
  hypo
cgagcctggaggcccagggaaagcggagaaggaccaaggaggggctgaagagctgatgcttggccccaggggggttccccacctcgctgtatttggggaaagccccagtttgcctgtcctctgctgcacacactcccctttctaaagatgggaaggccgggaggcctcggccagctggggcctgccactgctggtctgagcgtgaaagggctgccccaagacaaataactttttctgagttcacacaggagacaaggacagagacagggaagggaggagggaagcctcagggagggcagagctgccatcagccagagaggaccaggccgagggctgcgaaactgtccctgtgcccgctgaagcccgagtggcatcggggacctgcc

SEQ ID NO: 11265 - DNA, 73 bp, Homo sapiens; identical to SEQ ID NO: 6484
  chr17:7493149-7493222
  hypo

SEQ ID NO: 11266 - DNA, 148 bp, Homo sapiens; identical to SEQ ID NO: 5760
  chr17:76034983-76035131
  hypo

SEQ ID NO: 11267 - DNA, 478 bp, Homo sapiens
  chr17:76215753-76216231
  hypo
cgtgccatagaccatctcttagccctcgtgggtcagagtctctgttgcatattgtcttttgttgtttttcacaaccttttagaaacataaaaagcattcttagcccgtgggctggacaaaaaaaggccatgacgggctgtatggatttggcccagcaggcccttgcttgccaagccctgttttagacaaggagcagcttgtgtgcctggaaccatcatgggcacaggggaggagcagagtggatgtggaggtgtgagctggaaaccaggtcccagagcgctgagaaagacagagggtttttgcccttgcaaatagagcaactgaaatctgacaccatccagttccagaaagccctgaagtgctggtggacgctgcggggtgctccgctctagggttacagggatgaagatgcagtctggtagggggagtccactcacctgttggaagatgtgattaagaaaagtagactttcagggcc

SEQ ID NO: 11268 - DNA, 196 bp, Homo sapiens
  chr17:79060680-79060876
  hypo
cgggagtccggtcccagtttgttcctctaagcggtcgtggcctccgcctgcagggctggccactcgagggaaggtggtacttcaggttcctcgagggagcggcttcggtgttgtttctctcaccgtcccgccggcgtcaccggtgctgcgtgctgagtgggctgggacgtaggaaggcctggccgatgacaggcac

SEQ ID NO: 11269 - DNA, 256 bp, Homo sapiens
  chr17:79099929-79100185
  hypo
gtgtggggttggcgcggggctgcagggtgctggctgactgcctcggggacagagaacaggccagcttgacagtacgcatctcttcgtctaaacctgcaaagtgggtgtcaaaccattgtcttcccaatttttcaaaaacgtcataaaatccctctgcatagtggttgtctgatgctgcatgagatgaacctggccggtcctcgcaagccccctgaggcaggacccgccctatgcccttccttcaggggaggggcct

SEQ ID NO: 11270 - DNA, 79 bp, Homo sapiens
  chr17:79100259-79100338
  hypo
acgccacaggccacctcacaggccatgcgctgcagggtccgggggtcgggagccatggactccgccacccggcagctcc

SEQ ID NO: 11271 - DNA, 1194 bp, Homo sapiens
  chr17:79655135-79656329
  hypo
cggagcctgcttgcagcagcctctgatcgcacgccgtcctgcacgtcacaccgggacggcgtccccgagagggccgtagacgcgaggccaggctgcgctctaaccgggggagaggatggctgcagggggtctggagcccgctctgaatttggaggcatttctggagcggctgccccccgcgtctccccggctgtgactggaaggaggggcgtggccagagccccgcagtacccctgtgttctcagccccaacaccacgctgccaccgtcaggcctgccgggtcctgcctgttggaggctgacgggaaccggggatcctggggtgggcaggtcccgtggggaaagggagagacagatggtcaggggcacagagacgcggcgttgtttggctccagcaagtagaggcaggcgtgaggtttgaactcagggtctgggaacaggttggtgcatggcccccacgccccactcggggggccctccctggcctctgtgtcagccccatctgctcagaggctgaggtctgccagctgcttcctcacaccgaggcctctggcgcctggagtgtcctgcgaccctcacccccttctccctgcctgcagagacaagtggaggtaaacgtccgtaacaagatcctgtacctgatccaggcctgggcgcatgccttccggaacgagcccaagtacaaggtggtccaggacacctaccagatcatgaaggtggagggtgagtcaggactgaggttgggaccaggttgaggcttggaactgctgggcagtcaggctcaacgggcacagtggcgaggggcctgggaagatgggttgttccctgtgttgggagggaggagggcggtggcctggagccagggaagaccgtgcatgtgagggcgggttcagaccggctcctgcctttctggacccacggcccacgggcaggggcaggcagtgatggcagacaacacacaggtgaaaaggcagcagacagcctgtttcagagtggcaggactcctgggggccgggttgggctgtgcagtcagggaaggcctctgaaggagctgtcccaagtgtcgagactggaacagaagccagagccggcgtgagcaggcaggcagcacccgtgggcagacactcagggttgaggccccagggcagaaaggtggccagcgtgccagaggagagtgcagccgggcctgtgcgcc

SEQ ID NO: 11272 - DNA, 279 bp, Homo sapiens; identical to SEQ ID NO: 7040
  chr17:79913166-79913445
  hypo

SEQ ID NO: 11273 - DNA, 520 bp, Homo sapiens; identical to SEQ ID NO: 9269
  chr17:80294473-80294993
  hypo

SEQ ID NO: 11274 - DNA, 365 bp, Homo sapiens
  chr17:80452529-80452894
  hyper
cgttattggggcctggagaagaattatgggccacaggctgcccagtcaggaaagaaaagggagtctatagcagaggatggtttcgatccatcgacctctgggttatgggcccagcacgcttccgctgcgccactctgctggctataaggggggagcctgagtcagatcatgaccacaggagtcatctccctgcaggcggcgacccctactggccaagaggggccaacagaggactggctgggcaaggcacatgctcaattataagcctactcctcctctctcaacttcttgtagataaaactctctgaattcatgtccttttctgctgttaaaacattggctggaggccgggcacagtggctcac

SEQ ID NO: 11275 - DNA, 69 bp, Homo sapiens; identical to SEQ ID NO: 7045
  chr17:8055823-8055892
  hyper

SEQ ID NO: 11276 - DNA, 244 bp, Homo sapiens
  chr17:80571137-80571381
  hypo
cgcccccgactacagtggtgggagcgggaggtggccaggggttcacacaggcatcaacgccaaacacagggtgggtatgggtcagggctgcgttccacagggcacaagccgcctgtccccgcaagacatcccagggccacaggggagggaggacagaccagaaacgcagccggagtcatccatgcccacgcacctgtacgatcagacaggaaagctgctgagtaggcaccgtctgaggcagtca

SEQ ID NO: 11277 - DNA, 271 bp, Homo sapiens
  chr17:80571776-80572047
  hypo
acccagagtcagatctcaagtgttagacaagccagggtgacgccggctcacttgaagctgccacttcaacatgcagggacattgctgctgccagccaccctccacctccacaggccagcaggagcctcagacctcccagagccacacaggcctcctacagatgcatttcctccctccctcctccagaggtgcccttggggcacagggagagaggagggcaggccgccccgtcccgacacagggagagaggagggcaggccgtcccatcccc

SEQ ID NO: 11278 - DNA, 58 bp, Homo sapiens; identical to SEQ ID NO: 6488
  chr17:80747254-80747312
  hypo

SEQ ID NO: 11279 - DNA, 52 bp, Homo sapiens; identical to SEQ ID NO: 7047
  chr17:80794418-80794470
  hypo

SEQ ID NO: 11280 - DNA, 33 bp, Homo sapiens; identical to SEQ ID NO: 6493
  chr17:80797632-80797665
  hypo

SEQ ID NO: 11281 - DNA, 177 bp, Homo sapiens
  chr17:80859381-80859558
  hypo
cggcccggctgcctactgtggtcctgctgcctactattggtcctgcttcctggggagcggcccggctacctgcggtggtcctgctgcctggggagcggcccagctgcctactgtggtcctgcttcctggggagcggcccggctacctgccgtggtcctgctgcctggggagcggccc

SEQ ID NO: 11282 - DNA, 178 bp, Homo sapiens
  chr17:80860241-80860419
  hypo
cgtccttacgcgaagaggcctcgggctgggcttgcggctgcagactgcattgcctccgcttctcaggtgctttgtcttttctgttccctcagagttgcaggcgatggtcttctagacagcatgcagttgggtgtcgctcagggtgtggagtcctggcacatgagacgccacctgcctc

SEQ ID NO: 11283 - DNA, 498 bp, Homo sapiens; identical to SEQ ID NO: 6494
  chr18:10725385-10725883
  hypo

SEQ ID NO: 11284 - DNA, 33 bp, Homo sapiens
  chr18:13036746-13036779
  hypo
cggcagcagccttgagggcagacattaggggac

SEQ ID NO: 11285 - DNA, 94 bp, Homo sapiens; identical to SEQ ID NO: 5761
  chr18:13823932-13824026
  binary

SEQ ID NO: 11286 - DNA, 113 bp, Homo sapiens; identical to SEQ ID NO: 5762
  chr18:13824102-13824215
  binary

SEQ ID NO: 11287 - DNA, 49 bp, Homo sapiens
  chr18:14450819-14450868
  hyper
cgattggcttcccgcagcagcagcccgtcactggggcggcggcgggacc

SEQ ID NO: 11288 - DNA, 1208 bp, Homo sapiens; identical to SEQ ID NO: 5765
  chr18:32556625-32557833
  binary

SEQ ID NO: 11289 - DNA, 65 bp, Homo sapiens; identical to SEQ ID NO: 5766
  chr18:32557864-32557929
  binary

SEQ ID NO: 11290 - DNA, 445 bp, Homo sapiens; identical to SEQ ID NO: 6006
  chr18:32558003-32558448
  hyper

SEQ ID NO: 11291 - DNA, 80 bp, Homo sapiens; identical to SEQ ID NO: 6007
  chr18:44335955-44336035
  hyper

SEQ ID NO: 11292 - DNA, 196 bp, Homo sapiens; identical to SEQ ID NO: 7061
  chr18:47339411-47339607
  hyper

SEQ ID NO: 11293 - DNA, 401 bp, Homo sapiens; identical to SEQ ID NO: 6009
  chr18:47339758-47340159
  hyper

SEQ ID NO: 11294 - DNA, 50 bp, Homo sapiens; identical to SEQ ID NO: 6010
  chr18:55104759-55104809
  hyper

SEQ ID NO: 11295 - DNA, 280 bp, Homo sapiens; identical to SEQ ID NO: 6011
  chr18:55105185-55105465
  hyper

SEQ ID NO: 11296 - DNA, 57 bp, Homo sapiens; identical to SEQ ID NO: 6012
  chr18:55106090-55106147
  hyper

SEQ ID NO: 11297 - DNA, 115 bp, Homo sapiens; identical to SEQ ID NO: 8162
  chr18:55850987-55851102
  hypo

SEQ ID NO: 11298 - DNA, 146 bp, Homo sapiens
  chr18:57069721-57069867
  hyper
cggttcggtgttgaagccaaatctcagtctgtgttgtgacactgccattgctgccgcctgcagtaccactgccgcatctgactcacattctagaaggaaggtaggtttgtcccaatgaatgcagcttggggcagctgccttgtgga

SEQ ID NO: 11299 - DNA, 168 bp, Homo sapiens
  chr18:57069918-57070086
  hyper
atctgccgtgtcagcttggaactgcaggagacgctagaggggaagacggagaaaggaagggaaacaaagattgatatgaccatatggtctgcatattgagcttgctgtcttttacatttgtgacttagaggaacctgtatcaagaaaatgtcattattcttattccac

SEQ ID NO: 11300 - DNA, 34 bp, Homo sapiens
  chr18:57365422-57365456
  hyper
cgccgcgcacatcagagctggaaacgcccccccc

SEQ ID NO: 11301 - DNA, 68 bp, Homo sapiens
  chr18:60430701-60430769
  hypo
cgtgcagcaagtcatgcgaacacctcattcagccttttgcagcctgtactgaactgctgtcgctcatc

SEQ ID NO: 11302 - DNA, 62 bp, Homo sapiens
  chr18:67069292-67069354
  hyper
acgggaggcagcgggacaggaggggctgtcacctgggcgggagcagcctagacttgggacgc

SEQ ID NO: 11303 - DNA, 236 bp, Homo sapiens
  chr18:75999434-75999670
  hypo
gtcagaaccacgggacagccacgggcattcttaaggctgccagcctgtgggtgtcacctggttcagccactttcggaggaagtcggtgggggacaagacccacttttgcagatttagaaaaggaaggcagaagtgtctgggcacgcggggaaacgcaaagacctgctgaaccagttcatttctaatcaaaaggagcgctggtgtggggtatgaagggcacgtcttcatgccgtgtc

SEQ ID NO: 11304 - DNA, 203 bp, Homo sapiens
  chr18:77336028-77336231
  hypo
cgggggaagcgctttcagatgaactgcagggaacaggtgaagagtgtggacaccggagcatggggcggtgagaagacacaatacgaggcctgccgtccgaacgcggaccctgcagcccctgcggcgggaagccgtgaacacaaggctgagtttgcgcctctgatttgcgccacgtgatgggacttgccggggcctccctgccc

SEQ ID NO: 11305 - DNA, 190 bp, Homo sapiens
  chr18:77512029-77512219
  hypo
cgcagtgggacgtcccagcacggcaccaggagggagggtgtctggcaggacatcaggtggttggaatttcagggctctggggatctcctgggtgtgccccgatcaagtcggctcacgtcacagaaaccaggtgcacctgcagcggctcctaaggaaaacctagtggcactggctggttatgcagaggctc

SEQ ID NO: 11306 - DNA, 190 bp, Homo sapiens
  chr18:77635961-77636151
  hypo
cgatgtccggcacgcagtccccaggcgggcacactgcccagcagcccagtggcaggagctcagagctgacttgcttcttgcccaggtctggggttggtgcagcgcccgcagctcacgggccacagcagcggaaggtctgcggcattttggaccttgctgttgccggggcagtgggtgttggcgccacatc

SEQ ID NO: 11307 - DNA, 345 bp, Homo sapiens
  chr18:77636190-77636535
  hypo
gaagctggactgaaacccacagacaggtccagccctgccgggcaggcgtgatcaggctgacactgcggaaaagccccactaggcaggtatgattgagctggcgtctccgaagggccccagccaggcagggatgatcgggctggcgctgtggaaagttgcaagcacactgtgtgggcacttggtggggctgggctgggtgcagagcacctaatggagaggagtcacctgcggcgtggccactgctgtgggctgcagttcccgggaaacagcagtggaaaccagcggcccagggacaggacaggggctgcaggtgctgagccgttgttcgacccagttgaattctaa

SEQ ID NO: 11308 - DNA, 145 bp, Homo sapiens
  chr18:77644520-77644665
  hypo
cgatgcagtggaggagcagggctgggtctgggcctgggcctgggcgtggcagctccccaggcccacggggcaggaattctagattctgggattcctttcatcgttgctttttgtgttttctacctagagcggagaaatgtttgtg

SEQ ID NO: 11309 - DNA, 39 bp, Homo sapiens
  chr18:77644881-77644920
  hypo
cagccaagacaccatccctgaaactgtgataatgagagc

SEQ ID NO: 11310 - DNA, 278 bp, Homo sapiens
  chr18:77808879-77809157
  hypo
cgtcggctcagtgcctcctagaaagtggagtgtgggcacgtttgcaggggatccaaccaggcgtctgctcagtgcctcctagaaagtggagtgtgggcacgtttgtaggggatcccaccaggcatcagctcagtgcctcctagaaagaggagtgtgggcacgtttcagagaaaactggcttaggcctccctgtttctggcgtggccttccctgggagcgagttagggacacggaagctcacccgcttctgaatgggtccactcctggggatttccgcg

SEQ ID NO: 11311 - DNA, 368 bp, Homo sapiens
  chr18:77809186-77809554
  hypo
gaagctcacccccttctgaatgggtccactcctggggatttccgcggccttccctgggagcgggttagggacatggaagctcaccctcttctgaatgggtccactcctggggatttccacggcctttcctgggagcaggttagggacatggaagctcacgcccttctgaatgggtccactcccggggatttccatggccttccctggatgatccactcctggggattttccgcagctctccagatgacgtgcacgcacactaaacacccagaagttagggaggcactgatccagtgaagtcctcagatcaaccttgtgagctttttacaagtacctgtcactgttaaactgctgatgaaatgtgaaac

SEQ ID NO: 11312 - DNA, 229 bp, Homo sapiens; identical to SEQ ID NO: 8179
  chr19:1004547-1004776
  hypo

SEQ ID NO: 11313 - DNA, 279 bp, Homo sapiens; identical to SEQ ID NO: 7074
  chr19:1005441-1005720
  hypo

SEQ ID NO: 11314 - DNA, 61 bp, Homo sapiens
  chr19:10370250-10370311
  hypo
cggcctgaccggccccccgccccgcccccaccccgcccccaggcctaaatgtgcacagcat

SEQ ID NO: 11315 - DNA, 88 bp, Homo sapiens
  chr19:10370575-10370663
  hypo
ctggaccccttcattccacggaggaagctgaggccacagggagcggccatcgccattgggaaggggcgactccacggaaagcccagac

SEQ ID NO: 11316 - DNA, 479 bp, Homo sapiens
  chr19:10395600-10396079
  hypo
cggggaatcagtgactgtcactcgagatcttgagggcacctacctctgtcgggccaggagcactcaaggggaggtcacccgcaaggtgaccgtgaatgtgctctgtgagtgagccggcgggcagagctgggtgggggcaggggccatggacctaatgcaatcctcaccgcctgttgtatcctccccacagccccccggtatgagattgtcatcatcactgtggtagcagccgcagtcataatgggcactgcaggcctcagcacgtacctctataaccgccagcggaagatcaagaaatacagactacaacaggcccaaaaagggacccccatgaaaccgaacacacaagccacgcctccctgaacctatcccgggacagggcctcttcctcggccttcccatattggtggcagtggtgccacactgaacagagtggaagacatatgccatgcagctacacctaccggccctgggacgcc

SEQ ID NO: 11317 - DNA, 144 bp, Homo sapiens; identical to SEQ ID NO: 6501
  chr19:10665634-10665778
  hypo

SEQ ID NO: 11318 - DNA, 143 bp, Homo sapiens; identical to SEQ ID NO: 6502
  chr19:10665807-10665950
  hypo

SEQ ID NO: 11319 - DNA, 69 bp, Homo sapiens
  chr19:10817637-10817706
  hypo
cgtagtcactgcgcccagtcagcagagccctgctgatggacgtttggtttcccggtcttgctgtggcac

SEQ ID NO: 11320 - DNA, 985 bp, Homo sapiens
  chr19:1108654-1109639
  hypo
cgcagctcctgcagcacccggcgcacgcagccctcggggatcttgatgcctgcgggcagagcgtcggggtcagggccggcgctgggggctcgggccttcccggggcgcccgccgcccactcacccacttgcttcttcctgtccttggtcttcagccgcacgatctgcaggtagctgctgctgctgacgtcggccatgacggcggcgatgcggccccacacgcgcagcagcgcgccgcacagcatgtagtggtgccgcagccgcagcccctgcaggcagtccttaccctcctgcgccagccggcagtgccggttcctgcggacgagacgggtcgtctcggctcaggcgggtcccaggggcccgcaggctccccaggtgccctgagatctcccgcctcctctcagggtctcgggagcccccgatccccgcctgggtcgccgccatctgccggtttccccctggtccccggcccgccctcaccaggcgctgtggctgcagtgcgtcagcgacaaagcgtagccactctcccagggctccttggcctcctccgcggtgacctagggacacagggccgcatgagcctgggcggggtcagggccggcaacccgagcgaaagctgcgcccggcggccgcctacccggtggaacttgcggcggaggctgtccagggcctccagctggctctgccggccgatgttgggcttgtacaccgtgaagaactggccgcggttctgctccgccagcaggcagctgggcttgttaccgcggacctgcggaggggggcgttgaggccgcgccccggtccgccccccgcgggccctcctctgggggggtaaccccgcccgaccccaccttgtaggagaggtagaagccgtcataggggcccgtcagcgccagcgacttggcaaaggcgtcctcccacttcaggccgcggtccacgctgatctgccacggcacggggtgggggggtgtgagtgtggtgggggc

SEQ ID NO: 11321 - DNA, 84 bp, Homo sapiens
  chr19:1170985-1171069
  hypo
cgaggacaggcacacaggcacgggcaacacacaaaatacagacacacataaccgactcatgaacatgggtacacacaggcacac

SEQ ID NO: 11322 - DNA, 428 bp, Homo sapiens
  chr19:1171422-1171850
  hypo
gcagagtccccagggcagcgctggcgtcatggggggctgcctccacaccgcctccaggagtgtttacagctgtggattacatgataccgcccccttcccagagctgatcccaccccccagcatgggggccccctgggagggggcctctgggagccggactggttctgtcgacacagtcgcctctttgttcggggcagagctcactctggcggtgttggcgtttccgcatgggccctgccggaggggcatccgtgactccgctggagccgggttgggccaagcccaagctggtcacacccctcacacccctggggttgggggaggccttaggcagcaagtgggtggggggtctaggggtggctggcgcaacctctctccacctcggtttccccgccaggtgagagggcagtgactgcccatggtcacgc

SEQ ID NO: 11323 - DNA, 166 bp, Homo sapiens; identical to SEQ ID NO: 6017
  chr19:11805261-11805427
  hyper

SEQ ID NO: 11324 - DNA, 369 bp, Homo sapiens; identical to SEQ ID NO: 6018
  chr19:11805597-11805966
  hyper

SEQ ID NO: 11325 - DNA, 161 bp, Homo sapiens; identical to SEQ ID NO: 6019
  chr19:11909173-11909334
  hyper

SEQ ID NO: 11326 - DNA, 61 bp, Homo sapiens; identical to SEQ ID NO: 6020
  chr19:11909732-11909793
  hyper

SEQ ID NO: 11327 - DNA, 50 bp, Homo sapiens; identical to SEQ ID NO: 6021
  chr19:11959378-11959428
  hyper

SEQ ID NO: 11328 - DNA, 172 bp, Homo sapiens; identical to SEQ ID NO: 9311
  chr19:11999219-11999391
  hyper

SEQ ID NO: 11329 - DNA, 255 bp, Homo sapiens; identical to SEQ ID NO: 6022
  chr19:12075818-12076073
  hyper

SEQ ID NO: 11330 - DNA, 333 bp, Homo sapiens; identical to SEQ ID NO: 9313
  chr19:12098300-12098633
  hyper

SEQ ID NO: 11331 - DNA, 31 bp, Homo sapiens; identical to SEQ ID NO: 6023
  chr19:12163025-12163056
  hyper

SEQ ID NO: 11332 - DNA, 118 bp, Homo sapiens; identical to SEQ ID NO: 6024
  chr19:12163331-12163449
  hyper

SEQ ID NO: 11333 - DNA, 198 bp, Homo sapiens; identical to SEQ ID NO: 6504
  chr19:1226490-1226688
  hypo

SEQ ID NO: 11334 - DNA, 317 bp, Homo sapiens; identical to SEQ ID NO: 6505
  chr19:1226828-1227145
  hypo

SEQ ID NO: 11335 - DNA, 585 bp, Homo sapiens
  chr19:12444060-12444645
  hyper
cgaggccgggaccgcagttgccgcgcagggaccggataggacgcccggggtcccggctgccagctcagcctcactctgtggctgaggggaccgagggtcgagctgcgccagggggactcgggtcccagaccccggagctgacggcgggggaggcccacgttcgccgcggccggttctggacggttccaaccagctctttcccacttttgggacgcctgaccctgcacacgcaccatttcccggcttccgggatgttccagggtcctccctctgcctcccgctgccagtgcgggtcccactgtgacagaggctgccacagacgttccagggcgtctctcagcgactgaggctacacagacgttccagggcgtctctcagcgagcgactgagtctagagctgagcgcaggggcgtgaagacgccgcgggctctttgaacctggcaccctactgccagccgtgcgcctgattgacagttctcacgaccccgccccatagctctgattggatagggctccaggtcccgccccctgggcactgagtgacagaagaagcgatcacacagtgctgagtcgagcgggatgaac

SEQ ID NO: 11336 - DNA, 287 bp, Homo sapiens
  chr19:1288529-1288816
  hypo
cggggacagccgcgatggggggcagacagcagcgtgggcaccaggggaccgtgtgctcgatggggcctgcaggcccgggcagtgccgcagcgtcgccggccgccccttccgcccattggcctggcacctgtgcccaggcgatgactgtgtggtctgtctccacatcacaccctctctgctgtgagaggcgatgcctgcacccaggggaccccgcacccacctccttgggccgctataaggtggggccccgttgggtggtctggctggccggccccgccactcccacc

SEQ ID NO: 11337 - DNA, 197 bp, Homo sapiens
  chr19:1297611-1297808
  hypo
cgattgtccacacgtgtgcacaccccagcggccccggcttcaggcgtccttttcctcctctcttgatccttgcagacgcccccactgcactccaggatgcttctgggggcccgaaagcaggggcggtgatgctggaattttgggcgtaagaaccagttggaaataatctttcccagccaggcgtggcggtggctcac

SEQ ID NO: 11338 - DNA, 207 bp, Homo sapiens; identical to SEQ ID NO: 6506
  chr19:12977267-12977474
  hypo

SEQ ID NO: 11339 - DNA, 55 bp, Homo sapiens
  chr19:1482826-1482881
  hypo
gctccagagcccctggggggaggttggagagccaagccccgcccaccacagcccc

SEQ ID NO: 11340 - DNA, 846 bp, Homo sapiens; identical to SEQ ID NO: 6509
  chr19:16232495-16233341
  hypo

SEQ ID NO: 11341 - DNA, 181 bp, Homo sapiens
  chr19:16766722-16766903
  hypo
cgacaggattagtcacgtgcagcacaacctgtatacagggctgatccagcacagactagaaacattaaatgcttggtctgtttccaggaagttttgagaggcgctgctcagcaagacccttcccctagcgaaggatcgtgaaaacaggacctcccaccatcaacagatgccaatcaaacgt

SEQ ID NO: 11342 - DNA, 109 bp, Homo sapiens; identical to SEQ ID NO: 7091
  chr19:1857456-1857565
  hyper

SEQ ID NO: 11343 - DNA, 160 bp, Homo sapiens; identical to SEQ ID NO: 8219
  chr19:18808024-18808184
  hypo

SEQ ID NO: 11344 - DNA, 165 bp, Homo sapiens; identical to SEQ ID NO: 6511
  chr19:18963604-18963769
  hypo

SEQ ID NO: 11345 - DNA, 714 bp, Homo sapiens
  chr19:19616896-19617610
  hypo
cggctcatggtgccacagcccctggcagggacggccggcccgcccccgtgactgactgacagatgcagggatggccgaggcagccctcgctccagctgaacgcctccattgctgcttgttctggagacccccgcccccgcaccttccagacttagcagaagaacaaactgaagaacagacccagccagagaagcagggattccagaagctgcccattaagggagaaggagaggatccggtcggcagcagccctgagcagaaagctggaggggggactgtcgcggggtttttctgttgtggtttattttattaaattttttccttttttctattcatttcgatggacgcaatcttaagccaccctggccttgctcctgggaggtgagcgtgcacaggtgtgtgcaggtcaggaggtgccgtccaggtgtgcggcgagccgctgcgcacagatgtcaggatttccgtttgggtctagtttagaacctgtccttaaacctaggggttgctgtcaggatttgctttcagactttttttttttttgtaattccctttagagtctacaaaaatgtttttaaaaggatcaggtctgcttttagtttcatttttgtttctttcccgtcccactctttaaaaactggttccgtgaggaaaggcagaagccgttccgtgtctcttgcaggctgggccggcttcatgccagtgcgagggcgtccc

SEQ ID NO: 11346 - DNA, 150 bp, Homo sapiens
  chr19:19769454-19769604
  hypo
cggctcccagccacgtgtcagcatttgcagttttggtgaagatgaagggagagggtgtgcaccgcacattggccattgtactcagtacaaaagggcagacatggtcacggtcttccatcaccattctgaagcgctgagatgcgtagactc

SEQ ID NO: 11347 - DNA, 306 bp, Homo sapiens; identical to SEQ ID NO: 6515
  chr19:1977026-1977332
  hypo

SEQ ID NO: 11348 - DNA, 233 bp, Homo sapiens; identical to SEQ ID NO: 6516
  chr19:1978023-1978256
  hypo

SEQ ID NO: 11349 - DNA, 116 bp, Homo sapiens; identical to SEQ ID NO: 5770
  chr19:1979018-1979134
  binary

SEQ ID NO: 11350 - DNA, 262 bp, Homo sapiens; identical to SEQ ID NO: 5771
  chr19:19843330-19843592
  binary

SEQ ID NO: 11351 - DNA, 47 bp, Homo sapiens; identical to SEQ ID NO: 5772
  chr19:19844044-19844091
  binary

SEQ ID NO: 11352 - DNA, 694 bp, Homo sapiens; identical to SEQ ID NO: 6027
  chr19:19976556-19977250
  hyper

SEQ ID NO: 11353 - DNA, 35 bp, Homo sapiens; identical to SEQ ID NO: 6028
  chr19:19977294-19977329
  hyper

SEQ ID NO: 11354 - DNA, 118 bp, Homo sapiens; identical to SEQ ID NO: 6029
  chr19:20011652-20011770
  hyper

SEQ ID NO: 11355 - DNA, 54 bp, Homo sapiens; identical to SEQ ID NO: 9338
  chr19:20162601-20162655
  binary

SEQ ID NO: 11356 - DNA, 76 bp, Homo sapiens; identical to SEQ ID NO: 9339
  chr19:21512126-21512202
  hyper

SEQ ID NO: 11357 - DNA, 120 bp, Homo sapiens; identical to SEQ ID NO: 9340
  chr19:21541712-21541832
  hyper

SEQ ID NO: 11358 - DNA, 173 bp, Homo sapiens; identical to SEQ ID NO: 9341
  chr19:21542078-21542251
  hyper

SEQ ID NO: 11359 - DNA, 309 bp, Homo sapiens; identical to SEQ ID NO: 9342
  chr19:21579832-21580141
  hyper

SEQ ID NO: 11360 - DNA, 104 bp, Homo sapiens; identical to SEQ ID NO: 9343
  chr19:21580233-21580337
  hyper

SEQ ID NO: 11361 - DNA, 159 bp, Homo sapiens; identical to SEQ ID NO: 9344
  chr19:21688303-21688462
  hyper

SEQ ID NO: 11362 - DNA, 77 bp, Homo sapiens; identical to SEQ ID NO: 9345
  chr19:21688738-21688815
  hyper

SEQ ID NO: 11363 - DNA, 61 bp, Homo sapiens; identical to SEQ ID NO: 6030
  chr19:22019028-22019089
  hyper

SEQ ID NO: 11364 - DNA, 89 bp, Homo sapiens; identical to SEQ ID NO: 6517
  chr19:2204172-2204261
  hypo

SEQ ID NO: 11365 - DNA, 95 bp, Homo sapiens; identical to SEQ ID NO: 6518
  chr19:2224728-2224823
  hypo

SEQ ID NO: 11366 - DNA, 219 bp, Homo sapiens; identical to SEQ ID NO: 9348
  chr19:2273763-2273982
  binary

SEQ ID NO: 11367 - DNA, 39 bp, Homo sapiens; identical to SEQ ID NO: 6036
  chr19:23577711-23577750
  hyper

SEQ ID NO: 11368 - DNA, 68 bp, Homo sapiens; identical to SEQ ID NO: 6037
  chr19:23578240-23578308
  hyper

SEQ ID NO: 11369 - DNA, 702 bp, Homo sapiens; identical to SEQ ID NO: 6038
  chr19:24216103-24216805
  hyper

SEQ ID NO: 11370 - DNA, 601 bp, Homo sapiens; identical to SEQ ID NO: 6039
  chr19:2461998-2462599
  hyper

SEQ ID NO: 11371 - DNA, 92 bp, Homo sapiens; identical to SEQ ID NO: 7098
  chr19:2524648-2524740
  hypo

SEQ ID NO: 11372 - DNA, 73 bp, Homo sapiens; identical to SEQ ID NO: 6040
  chr19:2702445-2702518
  binary

SEQ ID NO: 11373 - DNA, 453 bp, Homo sapiens; identical to SEQ ID NO: 5773
  chr19:2702553-2703006
  binary

SEQ ID NO: 11374 - DNA, 61 bp, Homo sapiens; identical to SEQ ID NO: 8229
  chr19:30718934-30718995
  binary

SEQ ID NO: 11375 - DNA, 72 bp, Homo sapiens; identical to SEQ ID NO: 7099
  chr19:3219654-3219726
  hypo

SEQ ID NO: 11376 - DNA, 267 bp, Homo sapiens; identical to SEQ ID NO: 7100
  chr19:32845502-32845769
  hypo

SEQ ID NO: 11377 - DNA, 1016 bp, Homo sapiens; identical to SEQ ID NO: 9365
  chr19:3490855-3491871
  hypo

SEQ ID NO: 11378 - DNA, 52 bp, Homo sapiens; identical to SEQ ID NO: 9366
  chr19:34963061-34963113
  hypo

SEQ ID NO: 11379 - DNA, 74 bp, Homo sapiens
  chr19:35613702-35613776
  hypo
cgctggggttctgtgcgccatgggcatcatcatcgtcatgagtgagtggaggagctcgggggagcaggcgggcc

SEQ ID NO: 11380 - DNA, 134 bp, Homo sapiens; identical to SEQ ID NO: 9367
  chr19:3571360-3571494
  hypo

SEQ ID NO: 11381 - DNA, 314 bp, Homo sapiens
  chr19:3577811-3578125
  hypo
cctgccccggcttaccttagcccaccctgcgccgctcctgcgctggcggtgtccggacctctgagcgcccgcgcgacccgccctgagtcaccccctaccgctgcccctggagcccccgccccgcgactccccggcaccctcgcctgaccttcccgcctgtcccccaggcacgggcgaaacgcccacgctgggcactctggacttctacatggcccggcttcacggagccatcgagcgcgaccccgcccagcacgagaagctcatcgtccgcatcaaggaaatcctggcccaggtcgccaggtgtgtgccgggcg

SEQ ID NO: 11382 - DNA, 276 bp, Homo sapiens
  chr19:3578223-3578499
  hypo
atcacctcccggaggggcctacctgcggtcgcccctgatgcaccagtgctaggatggccatggagaaccccgggccggcgggacccactcgggggcaccagaacttccctaaagcttctcagggtggatcccagcgcccgggttagataggttcaacgcctgtcccccaaccctggcatctgttggagcagctgatgggccatggtctctggggttccccagggccggggtgggggccagagatgatgagggcctcatcccgggccctcctctctc

SEQ ID NO: 11383 - DNA, 58 bp, Homo sapiens; identical to SEQ ID NO: 8232
  chr19:36222534-36222592
  hypo

SEQ ID NO: 11384 - DNA, 32 bp, Homo sapiens; identical to SEQ ID NO: 10424
  chr19:37095634-37095666
  hyper

SEQ ID NO: 11385 - DNA, 105 bp, Homo sapiens; identical to SEQ ID NO: 6042
  chr19:37096594-37096699
  hyper

SEQ ID NO: 11386 - DNA, 42 bp, Homo sapiens; identical to SEQ ID NO: 6045
  chr19:37463952-37463994
  hyper

SEQ ID NO: 11387 - DNA, 38 bp, Homo sapiens; identical to SEQ ID NO: 6048
  chr19:38182720-38182758
  hyper

SEQ ID NO: 11388 - DNA, 101 bp, Homo sapiens
  chr19:39027005-39027106
  hypo
acgccctggttgctgttctcttattaatgtccctaatccgggttaatcgcgtctcctctttgccgtgttgtgacgtgtctaacctttctacccggatcctc

SEQ ID NO: 11389 - DNA, 86 bp, Homo sapiens; identical to SEQ ID NO: 7107
  chr19:39289891-39289977
  hypo

SEQ ID NO: 11390 - DNA, 57 bp, Homo sapiens; identical to SEQ ID NO: 6521
  chr19:39329516-39329573
  hypo

SEQ ID NO: 11391 - DNA, 53 bp, Homo sapiens; identical to SEQ ID NO: 10436
  chr19:407832-407885
  hypo

SEQ ID NO: 11392 - DNA, 805 bp, Homo sapiens
  chr19:418255-419060
  hypo
ctcctctgggaaggaggcctggacacccagcacgccgcaggggtccacaaagaccaggtgacgcccaccacagccgaccgcagtgtcacggtcatggctgcacgctgccaccctcgggcacatatccacccacgggcagtgacgcgtgtccacacacaacctgcacacaaaggctcacggcggccaaaaggcggaagcagccccagcgtccatcagcggatgaacacacaaaacgtggtcccctcacacagcgggacattatccagccgagaacaggagccaggctctggcccgggccacggcgcaatgcccctggaggacgtcacgctcagtgagagacgccagacacagaaggacacacagcgtggaatcccattgctatgaaatgtccaggacaggcccatccacagagacaggaggcggatgtgtggggttggagctggggaggggacagggagtgacggctggtggggacagggcttctttcggggctgacagaatgttctggaattcgacagagatggttgcacggctcggatgctgaacacccctgagtcgtgccctctagagggaaaggcacggcacgtgaaccgggtctcaattttcaaatcagaaaagaatctggcaaaggaggcaaggccagcgacccacggcggcagccacacacctggctcagggctcccgtgagaccacgccacgcaggtgcagctcactctcggcggccacgatgggctgcccgttctgcaggtggtggtcgatcaggtggctgatgctctcaaacagcacgtccttcgtccgtacctgc

SEQ ID NO: 11393 - DNA, 74 bp, Homo sapiens
  chr19:4290473-4290547
  hypo
cgcgcggacccgtgagaaccaggtggtgctgggccaacacagcgggcccttccccagcgtgcccgagctcgtcc

SEQ ID NO: 11394 - DNA, 68 bp, Homo sapiens; identical to SEQ ID NO: 6053
  chr19:44711963-44712031
  hyper

SEQ ID NO: 11395 - DNA, 57 bp, Homo sapiens; identical to SEQ ID NO: 6054
  chr19:46929939-46929996
  hyper

SEQ ID NO: 11396 - DNA, 32 bp, Homo sapiens; identical to SEQ ID NO: 7120
  chr19:47116867-47116899
  hypo

SEQ ID NO: 11397 - DNA, 168 bp, Homo sapiens; identical to SEQ ID NO: 6522
  chr19:47482472-47482640
  hypo

SEQ ID NO: 11398 - DNA, 62 bp, Homo sapiens
  chr19:4795062-4795124
  hypo
cgataaatccactagctaagacgtcgagtgccaagaccagccttccagccgaggtttggaca

SEQ ID NO: 11399 - DNA, 199 bp, Homo sapiens
  chr19:4795324-4795523
  hypo
gaggagcagtgaccgggggtgtccagaaatatcctgtccctggatggaaactaggtctcgtttggatttttttttttttttgccgtgttaggaaattatttattaatttacaagacaggttttaactcagccgaggtgggaaatggtgtccctgtccctcccaaagcacagagcacagaaatgaggccgtttacatggc

SEQ ID NO: 11400 - DNA, 457 bp, Homo sapiens; identical to SEQ ID NO: 6524
  chr19:49971410-49971867
  hypo

SEQ ID NO: 11401 - DNA, 219 bp, Homo sapiens; identical to SEQ ID NO: 5779
  chr19:50553779-50553998
  binary

SEQ ID NO: 11402 - DNA, 77 bp, Homo sapiens
  chr19:51111319-51111396
  binary
cgcgcggtggcctgcgggctcgcgggagctcacgcgaactcacgcgcgagctcacaagctgcggcggccggctaggc

SEQ ID NO: 11403 - DNA, 71 bp, Homo sapiens; identical to SEQ ID NO: 10451
  chr19:51161615-51161686
  hyper

SEQ ID NO: 11404 - DNA, 88 bp, Homo sapiens; identical to SEQ ID NO: 9402
  chr19:51925272-51925360
  hyper

SEQ ID NO: 11405 - DNA, 78 bp, Homo sapiens; identical to SEQ ID NO: 6055
  chr19:52531282-52531360
  binary

SEQ ID NO: 11406 - DNA, 208 bp, Homo sapiens; identical to SEQ ID NO: 5780
  chr19:52531884-52532092
  binary

SEQ ID NO: 11407 - DNA, 70 bp, Homo sapiens
  chr19:530480-530550
  hypo
tcaagactcaggtgggctgggcgcggtggctcatgcctataatcccagcatttgggaggccgacgcagac

SEQ ID NO: 11408 - DNA, 61 bp, Homo sapiens; identical to SEQ ID NO: 6060
  chr19:53141353-53141414
  hyper

SEQ ID NO: 11409 - DNA, 819 bp, Homo sapiens; identical to SEQ ID NO: 5781
  chr19:53237625-53238444
  binary

SEQ ID NO: 11410 - DNA, 352 bp, Homo sapiens; identical to SEQ ID NO: 5782
  chr19:53445359-53445711
  binary

SEQ ID NO: 11411 - DNA, 231 bp, Homo sapiens; identical to SEQ ID NO: 5783
  chr19:53445822-53446053
  binary

SEQ ID NO: 11412 - DNA, 149 bp, Homo sapiens; identical to SEQ ID NO: 6062
  chr19:53465713-53465862
  hyper

SEQ ID NO: 11413 - DNA, 105 bp, Homo sapiens
  chr19:53496055-53496160
  hyper
cgagcagcagggcccggcacgaggagggagttagggggcgacggctccttaagacaagggtggggtctgcaggatcccaggaccaggcagaggatgcggcctcct

SEQ ID NO: 11414 - DNA, 35 bp, Homo sapiens
  chr19:53496405-53496440
  hyper
caccgggacgtcaaattttgctctggggattagcc

SEQ ID NO: 11415 - DNA, 181 bp, Homo sapiens
  chr19:53497109-53497290
  hyper
gcaaaccagaatgtgaaatgcaaagccctgcctgggcggaacgtattatttcatgctgacgaccacagaacagaatagaaatcctctccctttctattctccactcactcaagagggagagtccaccctgtgtcagcttcagagacttccctagagccaccgcctgggatgcgggatggag

SEQ ID NO: 11416 - DNA, 161 bp, Homo sapiens
  chr19:53635604-53635765
  hyper
aggccctgagcacctccccagcgcgggctcaggggaggcctggggagcagcggggcccggcacgaggaggagggaggtggggcgcgacagcgccttcagacaggggtggggtctgcaggatcccaggaccaggcagaggacgcaaggctccccgggactgc

SEQ ID NO: 11417 - DNA, 102 bp, Homo sapiens
  chr19:53635784-53635886
  hyper
cgctccaggggccgacgagggcaaggctgggaggcacccaggacgggaatacacctcttgggtgaagactttaaaaagcccggggatgggggagggggtcag

SEQ ID NO: 11418 - DNA, 138 bp, Homo sapiens
  chr19:53636091-53636229
  hyper
cacagagggtcactcacgctcgacgccgtcaccttcacccaacgcgatccgtttccgggcctgtaggaaactgcgcatgcgcggagagaagagcccgggcagcctgaaggaatggctggagtgggcggggtctgcgcc

SEQ ID NO: 11419 - DNA, 84 bp, Homo sapiens; identical to SEQ ID NO: 9416
  chr19:53696029-53696113
  hyper

SEQ ID NO: 11420 - DNA, 198 bp, Homo sapiens; identical to SEQ ID NO: 9417
  chr19:53700110-53700308
  hyper

SEQ ID NO: 11421 - DNA, 85 bp, Homo sapiens; identical to SEQ ID NO: 9420
  chr19:54412564-54412649
  binary

SEQ ID NO: 11422 - DNA, 34 bp, Homo sapiens
  chr19:54485370-54485404
  hyper
cgccaacgcgggcgagccgggcccgaagcgggac

SEQ ID NO: 11423 - DNA, 124 bp, Homo sapiens
  chr19:54486197-54486321
  hyper
ccgtgagcgcgctggagactgctgggcccgccccacgcccaccctccccgcccccctccccctccgaagcagggaccccgagggagggggcaggggagggagggggccgctgtgagggagcgtc

SEQ ID NO: 11424 - DNA, 546 bp, Homo sapiens
  chr19:55677520-55678066
  hyper
cgcagtccgcagacaggacctcggggctgcccctgggagcgcgccctctgccgctggagcgttggagaacgttagcgccccccttgccaccgacgctgggactacgagctctaaaaggccgtctgctcaggctgggaaggcagacggtgtatcagaccttgcgtgctgggactcactttcagcctgcaggtccagcgccggggacaggccccaccaggacacggagccgaagccgctgccggagccggcaggtgtggtcatcaccctgcggaaaagacattctgggaatcgcacacattgcccgccccgctcccctctcaccgcccctcacttctcgcccctttgcctccacatgataccttgcccacacctttatcctccaaatatcccgggacgccccttcctctctgctcagtgcagcactgtggacccgcggcactccacaaccgctgcccagagtccccgcccttttcgaggaatcaagcaatggaagcatgtgggatgggaccacagcgagcaactgaccaatgagagtgagcgaggccc

SEQ ID NO: 11425 - DNA, 182 bp, Homo sapiens; identical to SEQ ID NO: 7132
  chr19:55691158-55691340
  hyper

SEQ ID NO: 11426 - DNA, 134 bp, Homo sapiens; identical to SEQ ID NO: 6067
  chr19:56112791-56112925
  binary

SEQ ID NO: 11427 - DNA, 171 bp, Homo sapiens; identical to SEQ ID NO: 6525
  chr19:56807013-56807184
  hypo

SEQ ID NO: 11428 - DNA, 61 bp, Homo sapiens; identical to SEQ ID NO: 9426
  chr19:57276931-57276992
  hyper

SEQ ID NO: 11429 - DNA, 442 bp, Homo sapiens
  chr19:5789249-5789691
  hypo
cgtcctcatccgtcaggggcccgcaggtccgcacggggctgctgggaggggtgctagtgcccggccctgcggggacctgctgggcaccacagttttcctgcctgggagcgccctcggctgccgtgccctcggggacagcggcagcgggtgtggggccctggctgaaccggcgcagggcctgctcagctcgctcgaagcggacctcgcgcttccgcagctgctgctgcagggctttgtccaggccgttgcggatggacgggggctgggtcccgcgggccgccaactcctcctgcaccaggttctgtccctcgggcctcaggtgggccccagcgaagcggcaggtcacgccgtaggggcaccggccgaaggtctcgaagagcacgcagcgggggcccaggtcggccggcttggtctccaggtagcgccccacgtcgtgcagaaa

SEQ ID NO: 11430 - DNA, 242 bp, Homo sapiens; identical to SEQ ID NO: 9433
  chr19:5789927-5790169
  hypo

SEQ ID NO: 11431 - DNA, 138 bp, Homo sapiens; identical to SEQ ID NO: 9434
  chr19:5790213-5790351
  hypo

SEQ ID NO: 11432 - DNA, 124 bp, Homo sapiens
  chr19:5797848-5797972
  hypo
cgcgcgtggcctgggctctgcagctttctgaatggccccccatcagggccccggcaggactggggatgcctggccacatgcccgtctttcccactggacgatgagcccagagagggtgggaaac

SEQ ID NO: 11433 - DNA, 31 bp, Homo sapiens; identical to SEQ ID NO: 5786
  chr19:58125385-58125416
  binary

SEQ ID NO: 11434 - DNA, 170 bp, Homo sapiens; identical to SEQ ID NO: 6075
  chr19:58144201-58144371
  hyper

SEQ ID NO: 11435 - DNA, 210 bp, Homo sapiens; identical to SEQ ID NO: 6076
  chr19:58144745-58144955
  hyper

SEQ ID NO: 11436 - DNA, 627 bp, Homo sapiens; identical to SEQ ID NO: 6077
  chr19:58258088-58258715
  hyper

SEQ ID NO: 11437 - DNA, 39 bp, Homo sapiens
  chr19:58446258-58446297
  hyper
cgcctcacacgttgttccctacaggcgcctgtggacccc

SEQ ID NO: 11438 - DNA, 788 bp, Homo sapiens
  chr19:58830548-58831336
  hypo
cgctggggagggtgtactgccatgtagtgggtgggaagatacctttggcaagaacacgtgccttgtgagctatcagcagattcccaacaaaaggagaccctgtacgtgcgaagagtgtggcaaggcctttggacagagaagtcaccttgttcagcacaccagtgagaagctgtatgcatgccaggaatgtgggtgtaccttcagcaacaattcatctctagtcaagcactggcacgtccacacaggcgagaagccctacatgtgtggccactgtggcaagtgcttccgagagagctcatcccttgccaagcaccagcgtgtgcacacaggtgagaagccatacgtgtgtggtgagtgtggacgcaccttcagcgagagcacacaccttgtacagcactggtgattccacaccggggaaaagccatttgcctgccaagagcagcaaagcctttgctgacttctcggccctccttgcatgccacggaacctacacgggtgagaggccctacgagtgccgggtatgctgcaaggcattcagccccagcttgtccctggctgagcacatacgctgccacacgggagagaagctgtatgcgtgtcaggaatgtgggaaagctttcagccacagctcatccctcagcaagcaccagcaggtacacacaggtgagtggccctatgtgtgtgcagaatgtggaaaggccttcagccaggggtcctacctgacccagcacctcaagatccacagcggtgagaagccgtacatacgtggtgagtaaaggaagccattc

SEQ ID NO: 11439 - DNA, 125 bp, Homo sapiens; identical to SEQ ID NO: 6526
  chr19:6425753-6425878
  hypo

SEQ ID NO: 11440 - DNA, 739 bp, Homo sapiens
  chr19:736036-736775
  hypo
cgcccctgaggacggttgacggctcccccatgatgaaggcaggtgggttggcccccaggctctgggccccagatccagccgctgtcagggaccaagtctcggtccggggggccgggtggggcgggggcgacaccgacctgctctccgcagcgtctgacggggccgtggttatgggggtggcagctggaccgaggccgaggctccgagcctggggtgggggccccctctgctttgttgccctggtcccacgccggcccacgcttccccgagaagacgggccccacgcatggcggctctaaccgacgcgacctcacggctttcattccaccctaatctcacggctccctcctggggcccgctgggggtggcgctcacgcctgaacatgctcgctgcaaatcttacctgctccagtcctcgggcagtaggactggctgccccgggagaaagtgggtgccccgtccctggaggcaaccaagccaggtccccagcaccgctgcgcttccgagaagcaggggaaggtgggggttgacgctgagtgccacacggtgctcaagtcaggctcgaacccctggtctgccgccttgaatttctccgcctgccagaggggtgggacctcagtacgccatcctggggcccggcacaggacaggagcccaataatgagaaatcgtcgcagtgggcaaaaccactgctatgtgagtgagctggaacagcacagaaagaaggcagagggccgggc

SEQ ID NO: 11441 - DNA, 337 bp, Homo sapiens; identical to SEQ ID NO: 7146
  chr19:7972050-7972387
  hypo

SEQ ID NO: 11442 - DNA, 348 bp, Homo sapiens
  chr19:804907-805255
  hypo
cggaccccgtgagcgcccagcacgccaagctggtgagtggggctcccgggacggcgcccgccctggccctggcccggcgacgtctcacggtccctctcccctcagtcgctggacgggcagaacatctacaacgcctgctgcacgctgcgcatcgacttttccaagctcaccagcctcaacgtcaagtacaacaatgacaagagccgtgactacacacgcccagacctgccttccggggacagccagccctcgctggaccagaccatggccgcggccttcggtaagaggctgcccgacgcggcgccagtgtgcagagtggtctattagggccgctcagtccggagcccc

SEQ ID NO: 11443 - DNA, 102 bp, Homo sapiens; identical to SEQ ID NO: 7151
  chr19:814741-814843
  hypo

SEQ ID NO: 11444 - DNA, 77 bp, Homo sapiens
  chr19:8546631-8546708
  hypo
cgtgttggacaagcttggtctaggtgctggaaagccagcctcggctcaggcatgccgggcaggatcgcaggcgtccc

SEQ ID NO: 11445 - DNA, 252 bp, Homo sapiens; identical to SEQ ID NO: 6527
  chr19:8554998-8555250
  hypo

SEQ ID NO: 11446 - DNA, 764 bp, Homo sapiens
  chr19:8576026-8576790
  hypo
cgggcgcctagttcagtttctcccgggtctgtctgcccctagagttgggggcacccaacttggcttctccgcgtcccctactatcatccccagattcactgttggggagaagcccgctccgaggtgaacggtgaaaggggcgcaaggtttatacgggaacgccggcgcagatgaaggcgcaggtgccagtcatttttaaggcaaaaatcctgtatttcgggacggtggcatttgtgccccctgggaaggggatgagcactgctgcctcctggtatccaccagaccccgcagggcgcaggaaagaaagcccctccacccctccctggtggtcacctgcacgcacctgagggcgcgtcggagccgccctggggtcttcgggggctgctgccagcacctgcggtaaaggggcgggtcaagttcagagtcagggcgagcccagccagccctcctggaggcccccgaccccacactcaccttggctctttttccagacggcggcgctggaagccggcggcccgggtgcagcggccaggaaggggcgcaggcgcggggggcttaggccaaagggcgcagggttcaagtagggcaggaacggtccggtgggggcaggggcgggggtcgtgaagggttccagcagcgggaacggcaggcccggcgctgatgcggggtcaacctccggggggcgctccggcgcgggcggctctcggtccagggccgggggtggcggcggggctgggctctgcgcatgctccgcgcaaacatgc

SEQ ID NO: 11447 - DNA, 166 bp, Homo sapiens; identical to SEQ ID NO: 7161
  chr2:10152421-10152587
  binary

SEQ ID NO: 11448 - DNA, 91 bp, Homo sapiens; identical to SEQ ID NO: 7162
  chr2:10152958-10153049
  hypo

SEQ ID NO: 11449 - DNA, 327 bp, Homo sapiens; identical to SEQ ID NO: 7163
  chr2:10153562-10153889
  hypo

SEQ ID NO: 11450 - DNA, 144 bp, Homo sapiens; identical to SEQ ID NO: 5790
  chr2:105471069-105471213
  binary

SEQ ID NO: 11451 - DNA, 338 bp, Homo sapiens; identical to SEQ ID NO: 6080
  chr2:105489278-105489616
  hyper

SEQ ID NO: 11452 - DNA, 112 bp, Homo sapiens; identical to SEQ ID NO: 6081
  chr2:105490035-105490147
  hyper

SEQ ID NO: 11453 - DNA, 34 bp, Homo sapiens
  chr2:114035443-114035477
  hyper
ggctcccgggcccgggaccaccggctccattgcc

SEQ ID NO: 11454 - DNA, 31 bp, Homo sapiens; identical to SEQ ID NO: 6084
  chr2:118981062-118981093
  hyper

SEQ ID NO: 11455 - DNA, 144 bp, Homo sapiens; identical to SEQ ID NO: 6531
  chr2:120005222-120005366
  hypo

SEQ ID NO: 11456 - DNA, 49 bp, Homo sapiens; identical to SEQ ID NO: 6085
  chr2:127782995-127783044
  hyper

SEQ ID NO: 11457 - DNA, 136 bp, Homo sapiens; identical to SEQ ID NO: 9474
  chr2:131792037-131792173
  hyper

SEQ ID NO: 11458 - DNA, 95 bp, Homo sapiens; identical to SEQ ID NO: 9484
  chr2:162930102-162930197
  hyper

SEQ ID NO: 11459 - DNA, 263 bp, Homo sapiens; identical to SEQ ID NO: 9485
  chr2:162930659-162930922
  binary

SEQ ID NO: 11460 - DNA, 178 bp, Homo sapiens
  chr2:171671978-171672156
  hyper
cccttatggaactctcggtaatttataatatttttgtgtgtgtttccattgtgttgtggtgaaaggcgataaggcattcaaagaaaacggacgggcctccgctgaaccagtgaggccccagacgtgcgcataaataacccctgcgtgctgcaccacctggggagagggggaggaccac

SEQ ID NO: 11461 - DNA, 86 bp, Homo sapiens; identical to SEQ ID NO: 6097
  chr2:173099596-173099682
  hyper

SEQ ID NO: 11462 - DNA, 85 bp, Homo sapiens; identical to SEQ ID NO: 6098
  chr2:176975945-176976030
  hyper

SEQ ID NO: 11463 - DNA, 40 bp, Homo sapiens
  chr2:177005679-177005719
  hyper
caacttgaatcctgtgtggggcaagctgggcccaatccgc

SEQ ID NO: 11464 - DNA, 34 bp, Homo sapiens; identical to SEQ ID NO: 6099
  chr2:182323095-182323129
  hyper

SEQ ID NO: 11465 - DNA, 72 bp, Homo sapiens; identical to SEQ ID NO: 6100
  chr2:182818959-182819031
  hyper

SEQ ID NO: 11466 - DNA, 197 bp, Homo sapiens
  chr2:200329745-200329942
  hyper
cttttagtatcaataaagcctagtaattgggtttgttggttacctaagctcgagttcgactttctcagtctctctctctctctctctttctcattcagaggcaacgttttcaaaaaccggcaattgcgtgtgcgtttggggtgtgcaagtgtgagtgtagatgtgtgaaagttatttgtttcagcagtccttgtctc

SEQ ID NO: 11467 - DNA, 66 bp, Homo sapiens
  chr2:206830660-206830726
  hypo
ggtgagatggcaaacagatgcgcgcttccactgagagcgtgcatgtgtgtgcgtgtatgtgagtgc

SEQ ID NO: 11468 - DNA, 129 bp, Homo sapiens; identical to SEQ ID NO: 8316
  chr2:219735657-219735786
  hyper

SEQ ID NO: 11469 - DNA, 178 bp, Homo sapiens; identical to SEQ ID NO: 6536
  chr2:220150664-220150842
  hypo

SEQ ID NO: 11470 - DNA, 336 bp, Homo sapiens; identical to SEQ ID NO: 6537
  chr2:220150871-220151207
  hypo

SEQ ID NO: 11471 - DNA, 139 bp, Homo sapiens
  chr2:222435635-222435774
  hyper
cggatggacggacggatagatagatggatgccggaaaggagaagaatgagagacggatgtgagactagatgcacgcaggccagagcaccagcatacgctggaacagagcacgagcatacactcgaacacacgcgcacac

SEQ ID NO: 11472 - DNA, 99 bp, Homo sapiens; identical to SEQ ID NO: 7196
  chr2:233198455-233198554
  hypo

SEQ ID NO: 11473 - DNA, 129 bp, Homo sapiens; identical to SEQ ID NO: 7197
  chr2:233198583-233198712
  hypo

SEQ ID NO: 11474 - DNA, 360 bp, Homo sapiens; identical to SEQ ID NO: 6108
  chr2:234474820-234475180
  hyper

SEQ ID NO: 11475 - DNA, 102 bp, Homo sapiens; identical to SEQ ID NO: 6109
  chr2:234475503-234475605
  hyper

SEQ ID NO: 11476 - DNA, 902 bp, Homo sapiens
  chr2:239969842-239970744
  hypo
cgcacgggcagaaaccagagctgggagggcaagtaacgcagtctttatttacaccacaagataacacgttgcgtgatgtggtacagaatactggactccagtgaagtggaaagaaggtgaccgtcagaagaggatatcattggtcggtgaaaatccacccacacaaaacaagacaagaatgagaaaaccaaacacaaaacctccaactccactgagcaaaagaaagaaccatcgggcacgtccagacaatccaagagaaacggattaaattacagaggtgaatggtggccacggccagtgcgcagctcacggcgggcgcgaacaggcatcaggtaggttacagtgtcgttacaacttggttttctaccacattccgtaagaagctcttgggtgagtaaggttcaagccccctgtatagatagatagatagatagatagatagatagattatatatgtttgtcattctcatcaattggaaaatagcgcctccactatggagcacacacggcaaaaaaaacaaacaaaaactgttcgctttctttttctttcaatagcagacttttaatcaatgccagagacaaagtgaggccgagctaagaacacgctcagcttcgttacaatgaagaaatggtttcctttcgatgcaaagtataattgtaaaccacagtgctcgcacagttcacgactgcttaaagtgaaatcttagccatacatcacctaaaagtaattaaaaagtcaacacagctgtgcggaaaaggggactctttcgagtccgcccagttctcaatcagaataaaccgtcacaaggccagtgagggcgggcggcgctcgcctggcccgtggaaggagataaaaggaaacaaacaaaacaaaacaaaacaaaattcctccaaatcaactc

SEQ ID NO: 11477 - DNA, 131 bp, Homo sapiens; identical to SEQ ID NO: 6539
  chr2:242277184-242277315
  hypo

SEQ ID NO: 11478 - DNA, 47 bp, Homo sapiens
  chr2:242554503-242554550
  hypo
cgcgaaaagaaagaagccagacaaaaacgtatatattctatgattcc

SEQ ID NO: 11479 - DNA, 54 bp, Homo sapiens
  chr2:242554624-242554678
  hypo
aggggagtgcaaaggagaacctggaccgctggacgtgggtgtggctgcacaagc

SEQ ID NO: 11480 - DNA, 131 bp, Homo sapiens; identical to SEQ ID NO: 8332
  chr2:242617764-242617895
  hypo

SEQ ID NO: 11481 - DNA, 531 bp, Homo sapiens; identical to SEQ ID NO: 8333
  chr2:242617924-242618455
  hypo

SEQ ID NO: 11482 - DNA, 114 bp, Homo sapiens
  chr2:242815156-242815270
  hypo
cgcaagggcggtggccacgttgcctacggcccccagggcaatggctgcttctcccaaggctattaccagaagaggcagctgaggtccaggttccacaaggcccgctgtgggtgc

SEQ ID NO: 11483 - DNA, 50 bp, Homo sapiens
  chr2:27165764-27165814
  hyper
cggcagcgccagggaacgctagagtcagaaaatgctgatttctgttcccc

SEQ ID NO: 11484 - DNA, 97 bp, Homo sapiens
  chr2:272137-272234
  hypo
cgttgcccggcaggtaccgtccttggacttgaagttgtgtgttttgtgtttcagtgggtcattgacagcggtgctgtttctgactggaacgtgggcc

SEQ ID NO: 11485 - DNA, 314 bp, Homo sapiens; identical to SEQ ID NO: 9517
  chr2:3582036-3582350
  hypo

SEQ ID NO: 11486 - DNA, 703 bp, Homo sapiens
  chr2:37899247-37899950
  binary
cggtgacccgcagggaagcgaggccacctgagtgcgccgccccggccaggccgcagctccccaggtccctctcagcccgggctccggtgggcgcggagggggagggtcgcgttctgtcagtttctagctcgctcccctcagagctgcagccaaaacccggagagtggaataagcgccctgaagatgccggagctcccggctgagcaactggacacgcgacgaacagcagacgctacaggttctcctacccagagggaggcgtttcttctccctcagggtctttcaaaaggatttgcctaaagctggggcaagccggtggcggctgccccagacgcgcgacgaggcgcaagtggcgcagctgccggcccgagagagtaaaattcaggccgcggtggcacctgcgcccgccggtcacccggccaccgccagcgccgccgcccggcgcgcccctcccctccgccggggccggagcgtgaaccgggttaatgaatgctaattttcttaatcggcctccgtctcttcctcctccgcgagtcgtcggcctggggaaggagtaggcgacaggaaagggcggtgttttccggctgggaggtcccagcccgcatggtcagccaggggagggggctgggacccctgggagtcggacgctgggggcctggcctctgccctgagactctcgggttggatggaaatcctggcacaa

SEQ ID NO: 11487 - DNA, 60 bp, Homo sapiens
  chr2:37899997-37900057
  hyper
tcaggtcatcaccgcggtgccctgggtctgtctgaaaccttagagggtgcgccttaagcc

SEQ ID NO: 11488 - DNA, 226 bp, Homo sapiens; identical to SEQ ID NO: 9518
  chr2:39186687-39186913
  hypo

SEQ ID NO: 11489 - DNA, 125 bp, Homo sapiens; identical to SEQ ID NO: 9520
  chr2:60706396-60706521
  hypo

SEQ ID NO: 11490 - DNA, 208 bp, Homo sapiens; identical to SEQ ID NO: 9521
  chr2:60706550-60706758
  hypo

SEQ ID NO: 11491 - DNA, 542 bp, Homo sapiens; identical to SEQ ID NO: 6111
  chr2:60783811-60784353
  hyper

SEQ ID NO: 11492 - DNA, 373 bp, Homo sapiens; identical to SEQ ID NO: 5802
  chr2:60784505-60784878
  binary

SEQ ID NO: 11493 - DNA, 128 bp, Homo sapiens
  chr2:61074853-61074981
  hypo
cgaacacactcgcacacacgtgtgcacacacgcttgctgttattattaatcttgtttattgcttgttttcctcaatagaacgtacatggcatgagcgctgcagggtttttgtgatttcagttcactcc

SEQ ID NO: 11494 - DNA, 92 bp, Homo sapiens; identical to SEQ ID NO: 9525
  chr2:64538788-64538880
  hypo

SEQ ID NO: 11495 - DNA, 99 bp, Homo sapiens; identical to SEQ ID NO: 6540
  chr2:65251127-65251226
  hypo

SEQ ID NO: 11496 - DNA, 123 bp, Homo sapiens; identical to SEQ ID NO: 7218
  chr2:69928507-69928630
  hypo

SEQ ID NO: 11497 - DNA, 318 bp, Homo sapiens; identical to SEQ ID NO: 7219
  chr2:70351179-70351497
  binary

SEQ ID NO: 11498 - DNA, 236 bp, Homo sapiens; identical to SEQ ID NO: 7220
  chr2:70351563-70351799
  hyper

SEQ ID NO: 11499 - DNA, 192 bp, Homo sapiens
  chr2:74740324-74740516
  hyper
cgttggtgcccacccgccaccgccaccgcaggatggtagaagcgcccccctctctgagcccagtctcaccggctcagaggcgccagggcccccccgggggccggggcgggccggggaaggtaatgtaattccggcccagctaacccgattaccgcggcctgcaccgggcagggcggcggcgggggcgggtct

SEQ ID NO: 11500 - DNA, 236 bp, Homo sapiens; identical to SEQ ID NO: 5803
  chr2:74781700-74781936
  binary

SEQ ID NO: 11501 - DNA, 123 bp, Homo sapiens; identical to SEQ ID NO: 6112
  chr2:74782349-74782472
  hyper

SEQ ID NO: 11502 - DNA, 265 bp, Homo sapiens
  chr2:79739586-79739851
  hyper
cgcggcagtcactacctttgcagcactctggccctgccctcctcctgccacgtgtcggacccctgctgggctggccctcctttcctactctgcgacacccctatcccccccgcccctatcctgcccgctcccgcacccggtccctctccccgggcctcgcgactccggcgattcagctccgggtccccgcccgcagggtaacgcggttgtcatggacacggcacctgcgccctacggcggtgccccttcgccgccgtcccctccc

SEQ ID NO: 11503 - DNA, 490 bp, Homo sapiens
  chr2:80530839-80531329
  hyper
ggcggcgggcagcatctgaaagcaggcccccagcagacacaagaccacccccgagggcctcctcagcagccagtatagacagagaccgagcagcaggaaatccattagcgagaatctttccagagagactggagaatgtccattggaagcgctcggtcagaaatctacatcatattttattccgagggaggggaagcgggggagggggagaaaagggcaaaaaatcaaataaatacatagaaataaagaaggacccccctccccaaaaaccacacgttcacctctaagcatgcagaaagctgggcagcatagaaagttcacagccacggaaagatcaaagagatggtgatttggtccatgttagatgctgcagcaaagaaaagggaggaaaaaaaaaatcttcgggaaagaatttaattaaaaagtgtcttacccacccttttccagagagtgacaacctccattcagctgctccctttgtgtgcaggct

SEQ ID NO: 11504 - DNA, 78 bp, Homo sapiens
  chr2:85360795-85360873
  hyper
cgcggccccaccatgccccagctcggcggcgggggcggcggcggcggcggcggcagcgggggaggcggcggctccagc

SEQ ID NO: 11505 - DNA, 46 bp, Homo sapiens; identical to SEQ ID NO: 6541
  chr2:8868792-8868838
  hypo

SEQ ID NO: 11506 - DNA, 148 bp, Homo sapiens
  chr20:20343543-20343691
  hyper
cgaaagtcgctgagcgccgagtgcgaggagctgttgattgttttctggttgaaagaagaagtgatgataaggctgggataaagtgagcgccggcaggggcgcagagcccgcagctgtatgctaatgctcacagaaaccaagcctccgc

SEQ ID NO: 11507 - DNA, 226 bp, Homo sapiens; identical to SEQ ID NO: 6543
  chr20:20376606-20376832
  hypo

SEQ ID NO: 11508 - DNA, 219 bp, Homo sapiens; identical to SEQ ID NO: 6544
  chr20:20376973-20377192
  hypo

SEQ ID NO: 11509 - DNA, 259 bp, Homo sapiens; identical to SEQ ID NO: 6115
  chr20:22558283-22558542
  hyper

SEQ ID NO: 11510 - DNA, 227 bp, Homo sapiens; identical to SEQ ID NO: 6116
  chr20:22558696-22558923
  hyper

SEQ ID NO: 11511 - DNA, 201 bp, Homo sapiens
  chr20:22563363-22563564
  binary
cgagatgtacgagtagggcggctttgcgtgcgtgtagctgcgcctgtaggtcttggggtcgcgggcgcggctcaggcccgcctgcccgtacatggggctcatggagttcatgttggcgtagggggccaggccgcccatggccccggccgcctgccccccgagcgggctcaggctgggactcaagtgcggccccatgcccgc

SEQ ID NO: 11512 - DNA, 35 bp, Homo sapiens
  chr20:22563602-22563637
  binary
tggcgcccgcgccgggggacatccccgccagggac

SEQ ID NO: 11513 - DNA, 102 bp, Homo sapiens
  chr20:22563663-22563765
  binary
cgacatgttcatggagcccgcgctcatgttgcccgagccgctgcccatggcggccgccgacatgctcatgtacgtgttcatgccgttcatccccaggccggc

SEQ ID NO: 11514 - DNA, 361 bp, Homo sapiens
  chr20:22563794-22564155
  binary
gcggacagagccccgggagggaggcgacagcgttagcaccgcggctggagggtgcccagacctcccacccaccgcccaggcctccgcgtccggggaggcctccggggagccctttcgtccccgatggcccagtctccggactccgagtctgtttcattcagggagagtcatgatcgatcgcccttgggaaggtggcgagcggattgctgcttgggcatgtggcccgttcctagcccttctccacctcgcccagattctagaacaggggtcccatggagtactcccaagccagcaccccaaatacattcccctaccccagagtctccccaaactctcccaccagcatactgagctggcgccg

SEQ ID NO: 11515 - DNA, 48 bp, Homo sapiens
  chr20:22564188-22564236
  hyper
cagcaagcaacctgcgggacaacgcgcggggcgcctcgggctgcctcc

SEQ ID NO: 11516 - DNA, 67 bp, Homo sapiens; identical to SEQ ID NO: 6117
  chr20:22567768-22567835
  hyper

SEQ ID NO: 11517 - DNA, 140 bp, Homo sapiens; identical to SEQ ID NO: 6545
  chr20:2820587-2820727
  hypo

SEQ ID NO: 11518 - DNA, 143 bp, Homo sapiens; identical to SEQ ID NO: 5805
  chr20:2820861-2821004
  binary

SEQ ID NO: 11519 - DNA, 62 bp, Homo sapiens; identical to SEQ ID NO: 6121
  chr20:30639044-30639106
  hyper

SEQ ID NO: 11520 - DNA, 139 bp, Homo sapiens; identical to SEQ ID NO: 6122
  chr20:30639494-30639633
  hyper

SEQ ID NO: 11521 - DNA, 165 bp, Homo sapiens; identical to SEQ ID NO: 7237
  chr20:33879796-33879961
  hypo

SEQ ID NO: 11522 - DNA, 131 bp, Homo sapiens; identical to SEQ ID NO: 7238
  chr20:33880280-33880411
  hypo

SEQ ID NO: 11523 - DNA, 33 bp, Homo sapiens
  chr20:36793833-36793866
  hyper
cggcggccggacgagggcgccccctgggggagc

SEQ ID NO: 11524 - DNA, 93 bp, Homo sapiens; identical to SEQ ID NO: 10547
  chr20:400189-400282
  hypo

SEQ ID NO: 11525 - DNA, 234 bp, Homo sapiens
  chr20:40020340-40020574
  hypo
cggggcagagagagagagcgcgcctcaatggctttcaatagttcaagtgcattcacaccaggcgcattcctgcgcttgagattcctagcatcagccaggagcggcttagtgggagaaagagctgcgacggtgatgatagtgacattccaaagttttgtggcaacatgaaggaggaggtgtgtctgcgcttgcacagtgactgcagcccttgggcagatgtggagaatgtgtgag

SEQ ID NO: 11526 - DNA, 173 bp, Homo sapiens; identical to SEQ ID NO: 7244
  chr20:42088459-42088632
  hypo

SEQ ID NO: 11527 - DNA, 55 bp, Homo sapiens; identical to SEQ ID NO: 7245
  chr20:42833281-42833336
  hypo

SEQ ID NO: 11528 - DNA, 48 bp, Homo sapiens
  chr20:43729515-43729563
  hyper
cgggaccgtcccggagccacgtccctccccaaaggaggccccttacct

SEQ ID NO: 11529 - DNA, 33 bp, Homo sapiens
  chr20:44879699-44879732
  hyper
cgtgcccgtgtactcctctaccacgaagaactg

SEQ ID NO: 11530 - DNA, 180 bp, Homo sapiens
  chr20:45825086-45825266
  hyper
cgcgttaaaaacgatggaccatttttccctaatattttgagccccatgatgcaagctcagcgcccgagaagctgtgctcatctgcaaccaccagggggcagtgcggccccacagctgacccagccgcccgcaggtgccacttgaagtgggacccggaaagagcaataacgcaagccttcc

SEQ ID NO: 11531 - DNA, 174 bp, Homo sapiens; identical to SEQ ID NO: 7251
  chr20:52374073-52374247
  hypo

SEQ ID NO: 11532 - DNA, 91 bp, Homo sapiens; identical to SEQ ID NO: 9560
  chr20:56772299-56772390
  hypo

SEQ ID NO: 11533 - DNA, 164 bp, Homo sapiens; identical to SEQ ID NO: 6548
  chr20:57268976-57269140
  hypo

SEQ ID NO: 11534 - DNA, 260 bp, Homo sapiens; identical to SEQ ID NO: 9569
  chr20:58508063-58508323
  hypo

SEQ ID NO: 11535 - DNA, 57 bp, Homo sapiens; identical to SEQ ID NO: 6549
  chr20:58514041-58514098
  hypo

SEQ ID NO: 11536 - DNA, 115 bp, Homo sapiens; identical to SEQ ID NO: 5807
  chr20:58514400-58514515
  binary

SEQ ID NO: 11537 - DNA, 409 bp, Homo sapiens; identical to SEQ ID NO: 6550
  chr20:60725146-60725555
  hypo

SEQ ID NO: 11538 - DNA, 83 bp, Homo sapiens
  chr20:60953036-60953119
  hypo
cgcagtggccggcccgggggtgcaaccccatcccctctctggggtccctttgcagggcagccttaggatccattcactgtggc

SEQ ID NO: 11539 - DNA, 71 bp, Homo sapiens
  chr20:60953645-60953716
  hypo
tccagggaagcgactccgtcccgcttggcctcagtcactgctctgtcaatgggatgataactgcccttccc

SEQ ID NO: 11540 - DNA, 237 bp, Homo sapiens; identical to SEQ ID NO: 7260
  chr20:61287746-61287983
  hypo

SEQ ID NO: 11541 - DNA, 60 bp, Homo sapiens; identical to SEQ ID NO: 7261
  chr20:61288557-61288617
  hypo

SEQ ID NO: 11542 - DNA, 166 bp, Homo sapiens
  chr20:61591490-61591656
  hypo
cggtgaacacgtgcgtgtgcaggcgcatgtgtgtgtgttggtgcgaggactctagagcacagctggaggccggtggtgagagtgtgcacatgtgcatgtgcgtgttcgcggggtgggagggctagcttggaagcaggggtgtttccctcagccgtgcgggtggcac

SEQ ID NO: 11543 - DNA, 79 bp, Homo sapiens
  chr20:61974565-61974644
  hypo
cggcacacgtggtgacggtgcgttttattcattgaagtctgtgcacacactgggagcacattccagggcttggcagaca

SEQ ID NO: 11544 - DNA, 47 bp, Homo sapiens; identical to SEQ ID NO: 9579
  chr20:708554-708601
  binary

SEQ ID NO: 11545 - DNA, 52 bp, Homo sapiens; identical to SEQ ID NO: 9580
  chr20:708851-708903
  binary

SEQ ID NO: 11546 - DNA, 460 bp, Homo sapiens; identical to SEQ ID NO: 9581
  chr20:708944-709404
  binary

SEQ ID NO: 11547 - DNA, 127 bp, Homo sapiens
  chr20:9048369-9048496
  binary
cggaccggctcaggcggctgagcatgcctagtgcagctgcgagcatggccccagtccccaatgcgcaggtgccacgtctccgggttttggtggccgccggccgggagaaggaggaggcggagtgggg

SEQ ID NO: 11548 - DNA, 632 bp, Homo sapiens
  chr20:9048532-9049164
  binary
gtgagggtccacacaagggtgatgccagaccgaacaccattagggcctgggtgtgagtgtgactcggaggcacctgggggccgttgtagggccgggaaaagccaggaactggctggagcagcaccccagcatcccagggaccaaagtctgggggatttgcatgtctgaggttgcacttgtgggaagactttttggaaccacttaatctctgtggctctgtgtaagacccgcgaaataaaaagaggcagtagtactctttggaagattgttttagggattaaatgaataaaaagcgtttagaacactgcaggacgcattgtaggcgctgtatgggtttatgaaaccgaatataaacaaataagcacgtcccccacccagccaacggctttgggggccccgttctggccagtcctgagcccctccacacggcccacggcgggctgcgggtctcccatccgaggagggtgccgcttttctgcccccgctccctgggttctgcgcccagcgccatcccgtgcgcccccgacccttgggcatggggcacatgccgcggggagccgccagggagaccccagaggagcgcgccgcgggccggcttccccggatgccccacccacctcctcttggcgctg

SEQ ID NO: 11549 - DNA, 230 bp, Homo sapiens
  chr20:9049238-9049468
  binary
gccctgcgggctcgcggcaactgggcggccggcccggcccctgcccacccccagcccagcccggcgcgccgcactgggcatgctccgtagcctgggcaggttggggctgcgaggcgacagctcgggctctggagccgggaggcgagaacgaggagggaggctcgggggcaggggaggaggaagcggctggccgctgaggggcggcggggcccggagcgggggacgcgcag

SEQ ID NO: 11550 - DNA, 111 bp, Homo sapiens
  chr20:9049670-9049781
  hyper
aggagggggtggtggcgccgcgccgggagcagtaagtgagctgcaccgccaacaagatctctcacacacagacacacacacgcacacgcacacacgggcgcgcacacacac

SEQ ID NO: 11551 - DNA, 31 bp, Homo sapiens
  chr21:38119724-38119755
  hyper
cgtgtattacttaacaggcattccacctgtt

SEQ ID NO: 11552 - DNA, 45 bp, Homo sapiens
  chr21:39047626-39047671
  hyper
cggggatttttccgcgagtggctgcattggctttaagaaactgcg

SEQ ID NO: 11553 - DNA, 320 bp, Homo sapiens; identical to SEQ ID NO: 7274
  chr21:44840079-44840399
  hypo

SEQ ID NO: 11554 - DNA, 932 bp, Homo sapiens
  chr21:45175388-45176320
  hypo
cgggctctccgtggtgggcagtccgcagcctgtcctccagggttcagcacgtgcattggcggagccggctccccggtggctcggagagcaggacggcccttgtgttccctggaaatcccctcctggcagcagtgggcacgtcgggtgttgtgagtgggccaggggcacagcaagtctgtcctccctgcaggtggcctgtgagaagaccgtgtctaccttgcaccacgttctgcagaggaccatccagtgtgcaaaaggtacggcggccgggctgcatgggctgcgtgggctcctggctcccgaagtgggtgggagagaagagctggcacgtgctggttttgaaggtgtgatcggtgtctcctgctgacctcacctctgggagtgggggcaacagcgggagcccctctgagatgggaactcagtgctctctgcctgccccgcagcccaggccggggaaggagtgaggcccagccccatgcagctggagctgcggatggtgcagagcaaaagggacatcgaggacccagagatcgtcgtccaggccacggtgctgtgagggccccgccgcttgcccgtgacacgcagcgcgttggtgtctccgtgtttgtccctgtgaaaacatgtaacgtctgccttagagccatgaccgaaacttgatatttttttctttcatgagtgtccggcatctgctggtcttcattgtgaaacgtgccagtcgtgctttgtgaaaaataacaaagtggtcacagaaatttgtgatctgaaaacccggctcccttccccacaaggctcctgggcctccgggaagacgggcccctgtttgccatctcgggggtgttccctgtgggagggtgagtgggtgaggccgagcctgctgcgtgtggagcctcgagtgggccctggctgccactaccgtacagaggccgtgtcgc

SEQ ID NO: 11555 - DNA, 82 bp, Homo sapiens; identical to SEQ ID NO: 7285
  chr21:46812995-46813077
  hypo

SEQ ID NO: 11556 - DNA, 192 bp, Homo sapiens; identical to SEQ ID NO: 7286
  chr21:46813106-46813298
  hypo

SEQ ID NO: 11557 - DNA, 294 bp, Homo sapiens; identical to SEQ ID NO: 6555
  chr21:46912528-46912822
  hypo

SEQ ID NO: 11558 - DNA, 132 bp, Homo sapiens
  chr21:46958789-46958921
  hypo
cgccagcacccccgccccacacggccagggcacgtggtggagcagcagcagcacgaagcacactcgagggcgtgtctctttcagtcctgattctgcccaggagaaaggctcctccggtgcgggcaagggcac

SEQ ID NO: 11559 - DNA, 387 bp, Homo sapiens
  chr21:47285233-47285620
  hypo
cgtagcccacccccagtcgcctttaggggagaatgcgtaccgctatctccaggaacaaagcatgccctgcgcggccggtgctactggatggatattccttcgcttctatcagtggaagatatcgctgttcctgcagaaataacgaaatggaacaatgcagaagcaacaaggtgatgtcccctttgtacttctcagaagaacctccgtgcctcccgccccatccgccactgagtatctcatgcagcggcgtgtcctctggcaccaggcagggactgatgttctccctcacattggcctcattcctctgggtcctgactcatttgggaactgaaagggctgctcggtggagctgggtttgaggatggtcttccacaaggccctgcagac

SEQ ID NO: 11560 - DNA, 100 bp, Homo sapiens
  chr21:47797837-47797937
  hypo
cgtctgcttgccgtacctgtgggcgtcctacgtacatagactcagcgtgtgccctcggtgtccgcggctttcactttgtgtgtttcccaggttggcgcac

SEQ ID NO: 11561 - DNA, 731 bp, Homo sapiens; identical to SEQ ID NO: 6556
  chr21:47832850-47833581
  hypo

SEQ ID NO: 11562 - DNA, 45 bp, Homo sapiens
  chr22:18328049-18328094
  hypo
cgaaacttgggaaggaaaacatccaagaggcgtctgtttgacgtg

SEQ ID NO: 11563 - DNA, 176 bp, Homo sapiens
  chr22:19771495-19771671
  hypo
cgaggagaggcaggcctgggggaccgtgcagcagctgtgcccacctaggaccacagggctggtggggctggcagcttggtagagggcaggtgcacagcaaagttttcaccggtgccggcttgttgtcttccacgctgggatttcacatgaagttctagctaattgagtataagcat

SEQ ID NO: 11564 - DNA, 218 bp, Homo sapiens
  chr22:19771889-19772107
  hypo
gcatcggctgacccctcggtgtctacgtgccaagcccaatctgcctgcagggacacccactgccagaggcggaggcaggttctcctggtcccagacccagggccgtctgttggcctgcaggtaacacgcagggaggaaggaaaaggctctaggcacagctgcttgtctaagagggaccctgttggcggcgcaacgctgggtgagtgctgcccgcccgc

SEQ ID NO: 11565 - DNA, 382 bp, Homo sapiens
  chr22:19839604-19839986
  hypo
cgttcgcacacacacggtgtccccacagcagggccgctcaatccagggatccacaaggggggtgtatgccaccccaggagacgccttgtccatctgctgccatggatgtgcgttggcataattggcggctgcccagatgggaatgcgagggccctgctgacggcaccggccacgaggcatgctgggagcacaggggagaagagaggagagccagcactggtgggtggtgggggtgtggacagatgtggcttgcacgacacaacaggacagggatggctgaacagggcgtggcagacccgcactggtccaggcaagtgctgaggatcagggagctgacagctgcagcctcaggagagctgagaagagctgagagactgtcagt

SEQ ID NO: 11566 - DNA, 353 bp, Homo sapiens
  chr22:19899693-19900046
  hypo
cgtccccttagcggccatgagaacaagatgtgctggtggaggaagcggatctcaaacagtttatgcttccaactggcaaaaaaaaataaagtcaggaatttctcaggtttactcaaggaaaaccgaaaggtctggcaatcaaagggactaaaacgcaagcaagccttggcagacaccctgggagggcgtggcagggagagcgaagcagccctgagctgcctgcctcctaaggaccaggagcgcctgctggatcccctgtgagcccaaagagccgtcagcagctgcccgtgaggtgcagagcagggccgggccaggccagggcccctgtgcagtgctccctggtgcggatgcac

SEQ ID NO: 11567 - DNA, 46 bp, Homo sapiens; identical to SEQ ID NO: 9596
  chr22:21983041-21983087
  hypo

SEQ ID NO: 11568 - DNA, 192 bp, Homo sapiens; identical to SEQ ID NO: 6559
  chr22:22324565-22324757
  hypo

SEQ ID NO: 11569 - DNA, 137 bp, Homo sapiens; identical to SEQ ID NO: 5811
  chr22:22862472-22862609
  binary

SEQ ID NO: 11570 - DNA, 171 bp, Homo sapiens; identical to SEQ ID NO: 6134
  chr22:29550509-29550680
  hyper

SEQ ID NO: 11571 - DNA, 86 bp, Homo sapiens; identical to SEQ ID NO: 6560
  chr22:29587127-29587213
  hypo

SEQ ID NO: 11572 - DNA, 82 bp, Homo sapiens
  chr22:32571858-32571940
  binary
cgacttggggagggcggacggcaggaaacgcgggaggcgaaggcgaggctgctcagcggcggctcgggatgcctccagcaac

SEQ ID NO: 11573 - DNA, 96 bp, Homo sapiens; identical to SEQ ID NO: 6561
  chr22:36902565-36902661
  hypo

SEQ ID NO: 11574 - DNA, 112 bp, Homo sapiens; identical to SEQ ID NO: 6562
  chr22:36907702-36907814
  hypo

SEQ ID NO: 11575 - DNA, 55 bp, Homo sapiens
  chr22:38516974-38517029
  hypo
gaacagcctgcagagcgcctgaacgcaggaggtggcaggaggaagcgggtttacc

SEQ ID NO: 11576 - DNA, 60 bp, Homo sapiens
  chr22:38874156-38874216
  hypo
cgaggaaataactccaaataggagtacaaataggagtgctctaggccagtgtggtcctgc

SEQ ID NO: 11577 - DNA, 106 bp, Homo sapiens; identical to SEQ ID NO: 7311
  chr22:41634855-41634961
  hypo

SEQ ID NO: 11578 - DNA, 143 bp, Homo sapiens; identical to SEQ ID NO: 9615
  chr22:41669366-41669509
  hypo

SEQ ID NO: 11579 - DNA, 208 bp, Homo sapiens; identical to SEQ ID NO: 6564
  chr22:42095795-42096003
  hypo

SEQ ID NO: 11580 - DNA, 70 bp, Homo sapiens; identical to SEQ ID NO: 6565
  chr22:42096253-42096323
  hypo

SEQ ID NO: 11581 - DNA, 33 bp, Homo sapiens; identical to SEQ ID NO: 6567
  chr22:42667137-42667170
  hypo

SEQ ID NO: 11582 - DNA, 78 bp, Homo sapiens; identical to SEQ ID NO: 8460
  chr22:42995235-42995313
  hypo

SEQ ID NO: 11583 - DNA, 107 bp, Homo sapiens; identical to SEQ ID NO: 9619
  chr22:42995599-42995706
  hypo

SEQ ID NO: 11584 - DNA, 39 bp, Homo sapiens; identical to SEQ ID NO: 7313
  chr22:43434578-43434617
  hypo

SEQ ID NO: 11585 - DNA, 404 bp, Homo sapiens; identical to SEQ ID NO: 6570
  chr22:45593240-45593644
  hypo

SEQ ID NO: 11586 - DNA, 258 bp, Homo sapiens; identical to SEQ ID NO: 6571
  chr22:45593715-45593973
  hypo

SEQ ID NO: 11587 - DNA, 239 bp, Homo sapiens; identical to SEQ ID NO: 8466
  chr22:45603946-45604185
  hypo

SEQ ID NO: 11588 - DNA, 55 bp, Homo sapiens; identical to SEQ ID NO: 8467
  chr22:45604387-45604442
  hypo

SEQ ID NO: 11589 - DNA, 567 bp, Homo sapiens; identical to SEQ ID NO: 6572
  chr22:45808579-45809146
  hypo

SEQ ID NO: 11590 - DNA, 127 bp, Homo sapiens
  chr22:46339131-46339258
  hypo
cgggctgagtcagcgtctccacactaagctcttccctgccgttgtcataaacagatcattggaaaaagtcatgccaggtccaaacacgccggcgcccgtgcgcccgaggcctttgttccgacccagc

SEQ ID NO: 11591 - DNA, 359 bp, Homo sapiens; identical to SEQ ID NO: 6573
  chr22:46979972-46980331
  hypo

SEQ ID NO: 11592 - DNA, 135 bp, Homo sapiens; identical to SEQ ID NO: 6574
  chr22:47022417-47022552
  hypo

SEQ ID NO: 11593 - DNA, 413 bp, Homo sapiens; identical to SEQ ID NO: 6575
  chr22:47022632-47023045
  hypo

SEQ ID NO: 11594 - DNA, 58 bp, Homo sapiens; identical to SEQ ID NO: 5813
  chr22:47023191-47023249
  hypo

SEQ ID NO: 11595 - DNA, 263 bp, Homo sapiens; identical to SEQ ID NO: 9636
  chr22:47054031-47054294
  hypo

SEQ ID NO: 11596 - DNA, 350 bp, Homo sapiens; identical to SEQ ID NO: 9638
  chr22:47436589-47436939
  hypo

SEQ ID NO: 11597 - DNA, 59 bp, Homo sapiens; identical to SEQ ID NO: 5814
  chr22:50170525-50170584
  binary

SEQ ID NO: 11598 - DNA, 160 bp, Homo sapiens; identical to SEQ ID NO: 6576
  chr22:50170790-50170950
  hypo

SEQ ID NO: 11599 - DNA, 110 bp, Homo sapiens; identical to SEQ ID NO: 6577
  chr22:50177139-50177249
  hypo

SEQ ID NO: 11600 - DNA, 50 bp, Homo sapiens; identical to SEQ ID NO: 6578
  chr22:50177299-50177349
  hypo

SEQ ID NO: 11601 - DNA, 249 bp, Homo sapiens
  chr22:50316625-50316874
  hypo
cgccatcctcatggggcgcctgccccggttggcactgagtgtctaaggacagggcctggccatcgcctcatcccctcccctgccgcgtggggcctccgaggatggcatttgagatgattcctcctcaggggctgccctcctccctgcccttccccagccggccctggccacgggctgtgtcaggccatgatcggtccttccccgctccctggccgggctgtcctgggccgctcacagctgtgccgctct

SEQ ID NO: 11602 - DNA, 72 bp, Homo sapiens
  chr22:50316938-50317010
  hypo
acgccaacggctcctacacgtgcgaaggtgggccaggcgggcgggtctgcactccggggcctgccgggtttc

SEQ ID NO: 11603 - DNA, 153 bp, Homo sapiens; identical to SEQ ID NO: 7319
  chr22:50899708-50899861
  hypo

SEQ ID NO: 11604 - DNA, 379 bp, Homo sapiens; identical to SEQ ID NO: 6581
  chr22:50942715-50943094
  hypo

SEQ ID NO: 11605 - DNA, 308 bp, Homo sapiens; identical to SEQ ID NO: 6582
  chr22:50943412-50943720
  hypo

SEQ ID NO: 11606 - DNA, 155 bp, Homo sapiens
  chr22:50954823-50954978
  hypo
cgagtgcagactgggccttggattccccctgtctttgtgttgtttcttgcagctggatcagatctgcatttcttttgacgaaggcaagaccacaatgaacttcattgaggcagcgttgttgatccagggctctgcctgcgtctacagtaagaagg

SEQ ID NO: 11607 - DNA, 302 bp, Homo sapiens; identical to SEQ ID NO: 6137
  chr3:116163989-116164291
  hyper

SEQ ID NO: 11608 - DNA, 60 bp, Homo sapiens; identical to SEQ ID NO: 9653
  chr3:120627258-120627318
  binary

SEQ ID NO: 11609 - DNA, 185 bp, Homo sapiens; identical to SEQ ID NO: 7332
  chr3:128737561-128737746
  hypo

SEQ ID NO: 11610 - DNA, 36 bp, Homo sapiens; identical to SEQ ID NO: 6140
  chr3:136751341-136751377
  hyper

SEQ ID NO: 11611 - DNA, 357 bp, Homo sapiens
  chr3:137480764-137481121
  hyper
gtcggggggtcagctggcgccctgcccaccatcgaacgcccttcgtatcactccgctcctcattgcgaattggactgcgcattggctgcgacccaaggctgaacacaagaagcttggagaggagctcgggcgtttgaggagaaggaaatatgaggaattgcaggaaggcgctcgcctgcccgaactgcctccgggcaactggaaaggattgtcctggaaactgagaggagagaaaggacgtaggaccttgtgccagatccccttgctgagtaatttccaagagcttggtttgcattaacccagaactttgggtgtgcgtttggtgtcccctggggggttctagagtgagagattggc

SEQ ID NO: 11612 - DNA, 147 bp, Homo sapiens; identical to SEQ ID NO: 9663
  chr3:141622422-141622569
  hypo

SEQ ID NO: 11613 - DNA, 204 bp, Homo sapiens
  chr3:141656829-141657033
  hypo
cggtgcgggcccagcaggcaggtgacagccgcccttgcgggagtcatccttaaccaagcagtttcagaaatgtttcttgagaaactgtttccggaagtcccggagcctgtgttgcccattgacaagccttgtcggtctcagaagacagactccgggggtctacatccagagacccggctgaggactgaagcccggggtttccaa

SEQ ID NO: 11614 - DNA, 106 bp, Homo sapiens
  chr3:141657079-141657185
  hypo
ggctaagggagcaaggaacccccgccatgctgtgtcccctccccccattccccgaatgcccgtctgttcaaagagggtgagaggaggggggaataccaactgctcc

SEQ ID NO: 11615 - DNA, 308 bp, Homo sapiens; identical to SEQ ID NO: 7338
  chr3:142895557-142895865
  hypo

SEQ ID NO: 11616 - DNA, 269 bp, Homo sapiens; identical to SEQ ID NO: 6141
  chr3:150481645-150481914
  hyper

SEQ ID NO: 11617 - DNA, 64 bp, Homo sapiens; identical to SEQ ID NO: 6142
  chr3:154797121-154797185
  hyper

SEQ ID NO: 11618 - DNA, 121 bp, Homo sapiens; identical to SEQ ID NO: 6143
  chr3:154797214-154797335
  hyper

SEQ ID NO: 11619 - DNA, 194 bp, Homo sapiens
  chr3:157821711-157821905
  hyper
gtccttctcctccctttaaaaacaggagctcttctagtgtgagcatatacagccaccatatatatatccccctggaacctttatcctctgcgcccgaatcagagactccgggttttaagaagtcaaagctgagtttagatagtcgaggctgtttgcagttcttcccagcgcaggatccaggccagcatgggtgt

SEQ ID NO: 11620 - DNA, 140 bp, Homo sapiens; identical to SEQ ID NO: 6145
  chr3:157825408-157825548
  hyper

SEQ ID NO: 11621 - DNA, 271 bp, Homo sapiens; identical to SEQ ID NO: 9675
  chr3:169379645-169379916
  hyper

SEQ ID NO: 11622 - DNA, 54 bp, Homo sapiens; identical to SEQ ID NO: 7349
  chr3:169540679-169540733
  hypo

SEQ ID NO: 11623 - DNA, 87 bp, Homo sapiens; identical to SEQ ID NO: 6148
  chr3:179754092-179754179
  hyper

SEQ ID NO: 11624 - DNA, 207 bp, Homo sapiens; identical to SEQ ID NO: 5818
  chr3:180397104-180397311
  binary

SEQ ID NO: 11625 - DNA, 98 bp, Homo sapiens; identical to SEQ ID NO: 6149
  chr3:181421152-181421250
  hyper

SEQ ID NO: 11626 - DNA, 48 bp, Homo sapiens; identical to SEQ ID NO: 7353
  chr3:181444767-181444815
  hyper

SEQ ID NO: 11627 - DNA, 809 bp, Homo sapiens; identical to SEQ ID NO: 5819
  chr3:183165024-183165833
  binary

SEQ ID NO: 11628 - DNA, 140 bp, Homo sapiens; identical to SEQ ID NO: 9688
  chr3:183419820-183419960
  hypo

SEQ ID NO: 11629 - DNA, 253 bp, Homo sapiens; identical to SEQ ID NO: 9691
  chr3:184322331-184322584
  hyper

SEQ ID NO: 11630 - DNA, 186 bp, Homo sapiens; identical to SEQ ID NO: 8504
  chr3:184784962-184785148
  hypo

SEQ ID NO: 11631 - DNA, 393 bp, Homo sapiens
  chr3:185360808-185361201
  hypo
cgagactctgtgtcaaaaaaaaaaaaacaaaaaaaacccactgttttagacataatgctattgtacacttaatacagtgtaaacataactcacatgcagtgagacactaaaacgtgtatgactcattttattgcaaagttcgctttactgtggtggtctggaactgaacctgcgacgttcctgaggtatgcctgcacttactagtgagcttcccgtggaggcgtgaagtgcctcttcccggaactgccgggcatattatcctccccctttcctccacttaaaaagcagctttgcctggccaggcttgcagttccttaaggatagactggtcttctctagcttgacatgcagtcgatccatccctctagctccgaggttcggaaacttcagtgc

SEQ ID NO: 11632 - DNA, 73 bp, Homo sapiens
  chr3:185643252-185643325
  hypo
cgattcccaacatgacgcctgcgagtagacatgggagaatggctgtggctgtgccgtctacgataatctcgac

SEQ ID NO: 11633 - DNA, 291 bp, Homo sapiens; identical to SEQ ID NO: 5820
  chr3:186079331-186079622
  binary

SEQ ID NO: 11634 - DNA, 334 bp, Homo sapiens; identical to SEQ ID NO: 6585
  chr3:187443068-187443402
  hypo

SEQ ID NO: 11635 - DNA, 447 bp, Homo sapiens; identical to SEQ ID NO: 7357
  chr3:187456666-187457113
  binary

SEQ ID NO: 11636 - DNA, 509 bp, Homo sapiens; identical to SEQ ID NO: 7358
  chr3:187457654-187458163
  hyper

SEQ ID NO: 11637 - DNA, 40 bp, Homo sapiens
  chr3:190529763-190529803
  hyper
attatcaccaggagatggcgctgtgcattagtaaacatcc

SEQ ID NO: 11638 - DNA, 154 bp, Homo sapiens; identical to SEQ ID NO: 7360
  chr3:193922622-193922776
  hypo

SEQ ID NO: 11639 - DNA, 147 bp, Homo sapiens; identical to SEQ ID NO: 10625
  chr3:194407289-194407436
  hyper

SEQ ID NO: 11640 - DNA, 154 bp, Homo sapiens; identical to SEQ ID NO: 10626
  chr3:194407836-194407990
  hyper

SEQ ID NO: 11641 - DNA, 102 bp, Homo sapiens; identical to SEQ ID NO: 10627
  chr3:194408028-194408130
  hyper

SEQ ID NO: 11642 - DNA, 63 bp, Homo sapiens; identical to SEQ ID NO: 9698
  chr3:195093160-195093223
  hypo

SEQ ID NO: 11643 - DNA, 97 bp, Homo sapiens
  chr3:195172966-195173063
  hypo
cggggggcaggctgcaccttgtgagaaccttcttgctggtggggactccgtggcgtccccaaggtagggcaagggatcacgtggtgagaggctgagc

SEQ ID NO: 11644 - DNA, 340 bp, Homo sapiens
  chr3:195603923-195604263
  hypo
gccaggtacttccaggggacccccccacccttaatcttcctatttccagaatgctccccggagcgccacgcttgcaatcccatccctggcccctcagctccaaacctgcagactgtttgcctcctgtccccaggcctctctttctagaaccttctgcattcttccccagcataacacccctaaccacaggccctgcagtctcagtatgtcattcctattcccagaccctgggcccaagggtgagggagccgggcctgggaaggctcggggtgtcggggccacagcggtgcaggtcacactccacacagccccccaggtctcctccacccacccccaagag

SEQ ID NO: 11645 - DNA, 159 bp, Homo sapiens
  chr3:195604388-195604547
  hypo
tcctccacttcactcttcttcctggtcctcaatactgcccctgcctcaaaggtacctgaaacctgccctgccccagccagttgctcagacaccctggggatcagccagcacaaggcagggccagcagtggtggggcctcagggcaggcgctagaactgc

SEQ ID NO: 11646 - DNA, 106 bp, Homo sapiens
  chr3:196263362-196263468
  hypo
cggggttccccttttacctcgttgcactcctgagagcaagatgggtcaccagcagctgtactggagccacgcgcgaaaattcggccagggttctcgctcttgtcgc

SEQ ID NO: 11647 - DNA, 78 bp, Homo sapiens
  chr3:196387781-196387859
  hypo
ccaatgctaggaacatcactacacttgacatgagccacaatcagatctcactttgtcccctgccagctgcctcggacc

SEQ ID NO: 11648 - DNA, 284 bp, Homo sapiens; identical to SEQ ID NO: 6587
  chr3:196728448-196728732
  hypo

SEQ ID NO: 11649 - DNA, 80 bp, Homo sapiens; identical to SEQ ID NO: 9702
  chr3:197330147-197330227
  hypo

SEQ ID NO: 11650 - DNA, 307 bp, Homo sapiens
  chr3:197582093-197582400
  hypo
cgtggtctgttcgcattgctgtgtattccacaaccttcatttcctttgagatggataaagcaccttttaactgggcggtcttataggtgaatacaatcatcacactctagagttttagtttaagtgaattggcctaagaagcgaataataagttaaaaatgtagacaaatattgagagcctccgacgatccaaacacttaccaaaattatctcatttactcctcgcagcaaccttaagagtgaaggttaaacttatcacctttttacaaatgattactgaggcccagaatgtgacttgtccaatgtc

SEQ ID NO: 11651 - DNA, 559 bp, Homo sapiens; identical to SEQ ID NO: 5821
  chr3:32433054-32433613
  binary

SEQ ID NO: 11652 - DNA, 201 bp, Homo sapiens; identical to SEQ ID NO: 5822
  chr3:32433665-32433866
  binary

SEQ ID NO: 11653 - DNA, 81 bp, Homo sapiens; identical to SEQ ID NO: 5823
  chr3:32434068-32434149
  binary

SEQ ID NO: 11654 - DNA, 64 bp, Homo sapiens; identical to SEQ ID NO: 6153
  chr3:35681641-35681705
  hyper

SEQ ID NO: 11655 - DNA, 50 bp, Homo sapiens; identical to SEQ ID NO: 6154
  chr3:39250115-39250165
  hyper

SEQ ID NO: 11656 - DNA, 38 bp, Homo sapiens; identical to SEQ ID NO: 6588
  chr3:49755498-49755536
  hypo

SEQ ID NO: 11657 - DNA, 233 bp, Homo sapiens; identical to SEQ ID NO: 6589
  chr3:49755593-49755826
  hypo

SEQ ID NO: 11658 - DNA, 59 bp, Homo sapiens; identical to SEQ ID NO: 7371
  chr3:5165842-5165901
  hypo

SEQ ID NO: 11659 - DNA, 232 bp, Homo sapiens
  chr3:52440854-52441086
  hypo
cgaggccgatacgctccatgatgacccgccgggccttgtctgtccactcctcgtcctccccccagggccctagtggagaccaagacaaggaatcagcgagaaggaaaccctgagtttgggcaggccaggagtgggaaggaagacagagaagagcagttgagccagggaatcaggagctggtcgggcaatatggtgtagggtgaaaccccagccagagccgggtgtcggtacc

SEQ ID NO: 11660 - DNA, 225 bp, Homo sapiens
  chr3:62861325-62861550
  hyper
tgggggagggagaaatccagaaaccagccgagcgggctgtttggagacgctaaatcgagaggtcttacttaggaggaggaagtccgtgagatcttatacgggaaagaaagggtccatctcctttccccaggcttctttacacctggggcgtggggggcgtgggggctgggcagcgtgtttgtcccacctgtgtaaactctgattccagcaacttattccgcatgc

SEQ ID NO: 11661 - DNA, 207 bp, Homo sapiens; identical to SEQ ID NO: 7379
  chr4:10090148-10090355
  binary

SEQ ID NO: 11662 - DNA, 233 bp, Homo sapiens
  chr4:111543735-111543968
  binary
caggggacgcaacccccgccgagttctcaagccaagctgcccccgtctcctccggaaggctcaagcgaaaaagtccggagacggaaagtcagcgggcaaacgaagacatgggatgtgggcagaagggcaccactcagagcgtctttagggagcaggcttccaagctccaaagcgaaacaagagtgggcaaagacccccttcttctctccctccctcccccaagaacccctcca

SEQ ID NO: 11663 - DNA, 157 bp, Homo sapiens; identical to SEQ ID NO: 6161
  chr4:113442552-113442709
  hyper

SEQ ID NO: 11664 - DNA, 464 bp, Homo sapiens; identical to SEQ ID NO: 6590
  chr4:1225310-1225774
  hypo

SEQ ID NO: 11665 - DNA, 373 bp, Homo sapiens; identical to SEQ ID NO: 6591
  chr4:1331896-1332269
  hypo

SEQ ID NO: 11666 - DNA, 193 bp, Homo sapiens
  chr4:143767433-143767626
  hyper
cgagcgtgtgagcgtgtgcgcgcccaggaggagctgtaacctgctatttatagaccgaagcctcagtacccggggctgagaacccggaggaaactagcaggcggcggcgacggcgcagggcgccggccgcggcttcgcgaggctccagcagctcccccagcctctggcttcggccgcgctccctgctcgctcc

SEQ ID NO: 11667 - DNA, 82 bp, Homo sapiens
  chr4:144622231-144622313
  hyper
atactctcttccccaggtgccacaaagggattgtccctcagggttgggagagagacggtgactgtactcgggtcagtcctgc

SEQ ID NO: 11668 - DNA, 271 bp, Homo sapiens; identical to SEQ ID NO: 10646
  chr4:147560617-147560888
  hyper

SEQ ID NO: 11669 - DNA, 127 bp, Homo sapiens
  chr4:174443425-174443552
  hyper
cgccgattacacccaactcggctgggatggctccgagccgtctgccctgacgtcagcgaggctccggccccgccgcggcaagataggcgagcgcggccgggcgcgggtgcggcactaatcactccca

SEQ ID NO: 11670 - DNA, 71 bp, Homo sapiens; identical to SEQ ID NO: 9746
  chr4:175750738-175750809
  hyper

SEQ ID NO: 11671 - DNA, 69 bp, Homo sapiens; identical to SEQ ID NO: 6173
  chr4:176922585-176922654
  hyper

SEQ ID NO: 11672 - DNA, 43 bp, Homo sapiens; identical to SEQ ID NO: 6174
  chr4:176986744-176986787
  hyper

SEQ ID NO: 11673 - DNA, 41 bp, Homo sapiens; identical to SEQ ID NO: 6593
  chr4:1791229-1791270
  hypo

SEQ ID NO: 11674 - DNA, 107 bp, Homo sapiens; identical to SEQ ID NO: 6594
  chr4:1791344-1791451
  hypo

SEQ ID NO: 11675 - DNA, 125 bp, Homo sapiens; identical to SEQ ID NO: 8533
  chr4:184667665-184667790
  hypo

SEQ ID NO: 11676 - DNA, 390 bp, Homo sapiens
  chr4:1986329-1986719
  hypo
cgggcagggtggggcaaagcagctggtttatgtcttggagctcaagctgaacagcggggcatctgcccccagcagattctggctgaggcagaagggggacaacagagatgcaggagtgagaaccgcagccctggcagcgcccgtgggcaaggtcatgtcctggcaggcagcttggctggttccaggctggggccagcagactcacctgggggcgtctcggagctggggatgtaggaggaggcgggaaccacgctgggcgtggagggaaggtagctcgtggagggcagcgcaggctcattgttcagggacccaagtttctggaacacagagtttaaggttccttccagaagaggccatgcttccggcatgtgctaacacatggcccgaccc

SEQ ID NO: 11677 - DNA, 50 bp, Homo sapiens; identical to SEQ ID NO: 6595
  chr4:2622600-2622650
  hypo

SEQ ID NO: 11678 - DNA, 202 bp, Homo sapiens; identical to SEQ ID NO: 8542
  chr4:30723862-30724064
  hyper

SEQ ID NO: 11679 - DNA, 91 bp, Homo sapiens; identical to SEQ ID NO: 8543
  chr4:30724126-30724217
  hyper

SEQ ID NO: 11680 - DNA, 148 bp, Homo sapiens
  chr4:3439566-3439714
  hypo
cgggctgggcacgctcaagaggggagtcacaccttccgcccgcagcccggacttgttcacagatgcctcatggaggctgcttccggaagcttggactgagggtgaggaggggcacgctgggattggggaccttggtggccacggagcc

SEQ ID NO: 11681 - DNA, 222 bp, Homo sapiens; identical to SEQ ID NO: 7397
  chr4:3446222-3446444
  hypo

SEQ ID NO: 11682 - DNA, 68 bp, Homo sapiens; identical to SEQ ID NO: 7398
  chr4:3447170-3447238
  hypo

SEQ ID NO: 11683 - DNA, 66 bp, Homo sapiens
  chr4:41752247-41752313
  hyper
cgttcagtgtttgccaaactaagtggtttaattcgatgctagtgccggggagtggatgggctcccg

SEQ ID NO: 11684 - DNA, 35 bp, Homo sapiens
  chr4:44449403-44449438
  hyper
gtgaaatgtaaatcgtgtctactgcataagggaat

SEQ ID NO: 11685 - DNA, 105 bp, Homo sapiens
  chr4:47033907-47034012
  hyper
cggtccctacttcttccccttagcaccaatgaacccagcaacatgtcatacgtgaaagagacagtggacagattgctcaaaggatatgacattcgcttgcggccg

SEQ ID NO: 11686 - DNA, 58 bp, Homo sapiens
  chr4:5052378-5052436
  binary
cggagagctgggcccgcaggactgcaaggcagggggacctgcctgtccctcagggagc

SEQ ID NO: 11687 - DNA, 290 bp, Homo sapiens
  chr4:5052556-5052846
  binary
accctcatgctagcctcgcccctaaatcggacgccgatgccgcccaattttgggggaatcccgagactcatgcccagccattcccagggagaatggtttggggcaaactatggctgtctggggcctcagtttccccatgtacaatgaaggggtcagattagtatctaatcttaaggggtcagaaagtaaacagatactttcattcattaaacactgagaaaaaccttaagaggaacagcgtcggttggagagccagcagacactccactgcccatcccaatatgaatggg

SEQ ID NO: 11688 - DNA, 410 bp, Homo sapiens
  chr4:512569-512979
  hypo
cggcccattgtctacaccgtcggggatcctttttcctaaaacaaaatggggtatgtgttctgacactgaaatacgttttagaacccacagccaggcccgtgcagtccctcggtggcgtccagtctgttggaggctttgtgcccacccggctctctcagtgtagtgggaccggctttttctcacctctggacttttgcacatgctgttcccatcagcttgatgctcttcctgcagttttttgcctggcgaattcctgggtaccgtttacatttcagcgtaaacatcagaccttcctggtccagcgcccactcccaatccaaaatcagttcctccccattaccaaaaatccctcattgataccctctacttttccttcctgggaaacttgtaattacagctgtaatgcagtc

SEQ ID NO: 11689 - DNA, 697 bp, Homo sapiens
  chr4:513008-513705
  hypo
gtgcgtgtctgtgagccctactggatccaagccccagcaggcaaggattgcacctgcttgctcgccatgctgtgtctcccctggcacagcgcctggcacagtgcctggcacgtcgtccacgctccatggatatttgtttcgatgcatgcacaggtgcacccccatagctttgtgactctctgataggcggtggggtgtggacacaggcgtccccccatccagggtggtaggtgtagcaatgaaggatgccagccctggaaccagactgcctgagtttcatttgcagcttttacccactggcactgtggcccaggtgcgtgactcaccctctgtgtctcagttgcctcctctggataacagttctgatgctcatccctgcctcatagggtcattagggaggtgaaacgagcgagccgcctagtgttgctggctactggcacttagtgcagagcacctggtgccggcagcagtggggtgggcctgcaggcgtgtgggttcatgcttagggacttggtgcctgcagcagtggggtgggcctgcaggcgtgtgggttcacgctcagggacctggtgccggcagcagtggggtgggcctgcaggcgtgtgggttcatgcttagggacttggtgcctgcagcagtggggtgggcctgcaggcgtgtgggttcacgctcagggacctggtgccggcagcagtgg

SEQ ID NO: 11690 - DNA, 221 bp, Homo sapiens; identical to SEQ ID NO: 6597
  chr4:513734-513955
  hypo

SEQ ID NO: 11691 - DNA, 80 bp, Homo sapiens; identical to SEQ ID NO: 6182
  chr4:6201800-6201880
  hyper

SEQ ID NO: 11692 - DNA, 65 bp, Homo sapiens; identical to SEQ ID NO: 6183
  chr4:6202658-6202723
  hyper

SEQ ID NO: 11693 - DNA, 149 bp, Homo sapiens
  chr4:7004195-7004344
  hypo
cgtattgttttggattgggctaaaccgctgacgagtcagttacatgtttagacatgagtcttagacatttatccaaaccttggtattggctcgatttgtgtacattgtgtctgtcttgtattgtgaaccgcgcagtgtcagtggccccc

SEQ ID NO: 11694 - DNA, 108 bp, Homo sapiens
  chr4:71857989-71858097
  hypo
cgtgttgaacaaagaattgaacaaaacgtagaaacaaagcaacaaaagaagcaacgaaagacaaaacaacaaaagaacgaagtaacaaaagcacaaatttattgaagc

SEQ ID NO: 11695 - DNA, 308 bp, Homo sapiens; identical to SEQ ID NO: 6598
  chr4:955544-955852
  hypo

SEQ ID NO: 11696 - DNA, 315 bp, Homo sapiens
  chr4:968846-969161
  hypo
cggtgcaaactgcagctggcttctgaggaaaaactgtttaaggacatacctttctccatttaggagacagtggagagcatcaaaaacatcttaaaaaggaaaaccctcatctaccatttctgccagaactttctgctttctgacgcacacgttaattaaaatggcgggcaaagcatccttccagcaaacactccacggacttcctagaacgtcctccaaagccaccagcagcttctcgctgaaggggccttaaaactttgaatccgctctccctctccctctccctctccctctccctccacggtctccttccac

SEQ ID NO: 11697 - DNA, 115 bp, Homo sapiens; identical to SEQ ID NO: 6187
  chr5:100236036-100236151
  hyper

SEQ ID NO: 11698 - DNA, 87 bp, Homo sapiens; identical to SEQ ID NO: 6188
  chr5:100238197-100238284
  hyper

SEQ ID NO: 11699 - DNA, 345 bp, Homo sapiens; identical to SEQ ID NO: 6189
  chr5:100239724-100240069
  hyper

SEQ ID NO: 11700 - DNA, 400 bp, Homo sapiens; identical to SEQ ID NO: 9772
  chr5:101631635-101632035
  hyper

SEQ ID NO: 11701 - DNA, 222 bp, Homo sapiens; identical to SEQ ID NO: 6191
  chr5:101632074-101632296
  hyper

SEQ ID NO: 11702 - DNA, 319 bp, Homo sapiens; identical to SEQ ID NO: 9774
  chr5:1039295-1039614
  hypo

SEQ ID NO: 11703 - DNA, 132 bp, Homo sapiens; identical to SEQ ID NO: 9775
  chr5:1039683-1039815
  hypo

SEQ ID NO: 11704 - DNA, 431 bp, Homo sapiens; identical to SEQ ID NO: 6600
  chr5:1074389-1074820
  hypo

SEQ ID NO: 11705 - DNA, 219 bp, Homo sapiens; identical to SEQ ID NO: 6192
  chr5:113696733-113696952
  hyper

SEQ ID NO: 11706 - DNA, 98 bp, Homo sapiens
  chr5:113698167-113698265
  hyper
cctgctgctgctgctgctgctcgtcgcgccggggcagccagctcaatgtgagcgagctgacgccgtccagccatgccagtgcgctccggcagcagtac

SEQ ID NO: 11707 - DNA, 58 bp, Homo sapiens; identical to SEQ ID NO: 6193
  chr5:114515671-114515729
  hyper

SEQ ID NO: 11708 - DNA, 132 bp, Homo sapiens; identical to SEQ ID NO: 6194
  chr5:114515769-114515901
  hyper

SEQ ID NO: 11709 - DNA, 44 bp, Homo sapiens; identical to SEQ ID NO: 6195
  chr5:114516274-114516318
  hyper

SEQ ID NO: 11710 - DNA, 51 bp, Homo sapiens; identical to SEQ ID NO: 6196
  chr5:115911175-115911226
  hyper

SEQ ID NO: 11711 - DNA, 105 bp, Homo sapiens; identical to SEQ ID NO: 6197
  chr5:115911590-115911695
  hyper

SEQ ID NO: 11712 - DNA, 74 bp, Homo sapiens; identical to SEQ ID NO: 9780
  chr5:11903295-11903369
  hyper

SEQ ID NO: 11713 - DNA, 95 bp, Homo sapiens; identical to SEQ ID NO: 6199
  chr5:124082318-124082413
  hyper

SEQ ID NO: 11714 - DNA, 925 bp, Homo sapiens; identical to SEQ ID NO: 6200
  chr5:124082442-124083367
  hyper

SEQ ID NO: 11715 - DNA, 38 bp, Homo sapiens; identical to SEQ ID NO: 5828
  chr5:124084158-124084196
  binary

SEQ ID NO: 11716 - DNA, 60 bp, Homo sapiens; identical to SEQ ID NO: 5829
  chr5:124084302-124084362
  binary

SEQ ID NO: 11717 - DNA, 112 bp, Homo sapiens; identical to SEQ ID NO: 5830
  chr5:124084660-124084772
  binary

SEQ ID NO: 11718 - DNA, 64 bp, Homo sapiens; identical to SEQ ID NO: 5831
  chr5:124084977-124085041
  binary

SEQ ID NO: 11719 - DNA, 95 bp, Homo sapiens; identical to SEQ ID NO: 6201
  chr5:125930492-125930587
  hyper

SEQ ID NO: 11720 - DNA, 170 bp, Homo sapiens; identical to SEQ ID NO: 6202
  chr5:125931062-125931232
  hyper

SEQ ID NO: 11721 - DNA, 259 bp, Homo sapiens
  chr5:1331488-1331747
  hypo
cgcccaggcctgcgctggtcggggaaggaacaccggcgggaggacggggcgagggaaccaagacaggggatgtgaggccccagccctgctcagcgcccatgagcagccgggaaggctcgagaggtccatgcatctcactctccacagcccagacccagaccccatgcacgccagagtccgcagccaggccctgagctgtgcagccgctggaggccctgagccgtgcagcctctgatggtcccaccacaattgccgcaac

SEQ ID NO: 11722 - DNA, 46 bp, Homo sapiens
  chr5:134827217-134827263
  hyper
cgagcttctttcttctccaaccccacccccacccgcagctctggag

SEQ ID NO: 11723 - DNA, 73 bp, Homo sapiens; identical to SEQ ID NO: 7415
  chr5:134880614-134880687
  hyper

SEQ ID NO: 11724 - DNA, 324 bp, Homo sapiens
  chr5:140419818-140420142
  hyper
cgcgctgctcgccttccacaacaccttcctcagcttcgtctgtatttgaagagcttagtaaattaatttcccaggggcagagaagggaggaagagggagtgtctgagggctgaaaaatgcagtcgactcgccctctgctggttaaagatccgaatttgtcgccgccaaaacaacggggaatgagaaagcaatccatatggtacggaaaaattacaacaaaaactcggcttaatttaacccacctgtgaaccttaactgcctactgttcctctttagcgctgcttacttccccagcactgagatttaattagattgattctaaac

SEQ ID NO: 11725 - DNA, 65 bp, Homo sapiens; identical to SEQ ID NO: 6601
  chr5:141355864-141355929
  hypo

SEQ ID NO: 11726 - DNA, 156 bp, Homo sapiens; identical to SEQ ID NO: 7419
  chr5:141931151-141931307
  hyper

SEQ ID NO: 11727 - DNA, 453 bp, Homo sapiens
  chr5:14328256-14328709
  hypo
cgcccaatacgctagttaaaacaaagcactcaatacaccagttaaaacaacgcgctcaatacatgagttaaagtaatgtgcactcaatacgttaaaacaatgtgcaagttaaaacaatgcactacttaaaacaatgagctcaatacgctagttaaaacaatgtgctcaatacactagttaaaacaatgcactgaatacgcttgttaaaacaatgcactcgttaaagtaatgtgcactcaatgcactagttaaaacaatgcgcccaatatgctatttaaaacaatgtgctcaatacactagttagtgtgctcaatacgtgagttaaaacaatgcgctcaatacacgagttaaaataatgcgctcaatacgccagttaaaacaatggactcaatactctagttaaaataatgtaccgaatacattagttaaaatggaatatgtacagcctgtgcc

SEQ ID NO: 11728 - DNA, 131 bp, Homo sapiens
  chr5:1641261-1641392
  hypo
cggctgtggggctgcccgccgccctcctcctcccacgctaggctgcccgccgccctcctcctcccaccctaggctacctgacccatggagaccggcctgagacagacgcatccccgaacaccaggtgcccc

SEQ ID NO: 11729 - DNA, 305 bp, Homo sapiens
  chr5:174148214-174148519
  hyper
cgaagcccaggcccgtctacagcccccttcgctgcccctcccccgcccccttctagccgctggggttacaaactagccttcggccctcggggttacaaacgctgcgttctgcgcgcagtgctccacagtttgcaaggagtgttttctccttgggactcgcagcgcgcgtacgcggttgcttcaagaaggggcctggcgggtgtaacgcgccccggggagcgcgggaaggtgcagggttgaggatctacgctcagaggcctcagccgcgcgggagggattcctgtgtctcccacttctacctgcgc

SEQ ID NO: 11730 - DNA, 415 bp, Homo sapiens
  chr5:174150711-174151126
  hyper
cgaggcaaacactggcattcaaacacgcacgacaaacacaggctcaaacaaactcatgaatgcacacttgcactgtcttgagaaaaaggtcggatccggatcgcgctcagaaaggaggttcaggagacaagtacagagatttcaactttctaaaagtgcgctggatttgctttctagtgagagagatggggacaactgatttaaattcttcactccgaaccatttgggagagaggcactcctgaccacttctcgggctccttccggcccctcttttccaggggaaagagttgtaataataacagtgggcgcttttgagcgctggctagtggcgagttactcttctaagtgcatacatttctttcacagggatactggcctgtgagtttcagcaccgactttctggaactgtaaag

SEQ ID NO: 11731 - DNA, 247 bp, Homo sapiens
  chr5:174151197-174151444
  hyper
ttctggcggtagagggagagtgggatgggcgcagggtcccttttaaagaagggtcaaaagagagaagaaatgggactcggcgaacttccgctttaaataatcgctcttaattaggtctcgggcttttcagtttcggcgtgattataacccttcagggatcgcctaataacaactctgctgactgctcctgtaattaactcctaatttatttcaaacaggaaaaaaaaaaaaaaaaaaaaaaaggagg

SEQ ID NO: 11732 - DNA, 210 bp, Homo sapiens
  chr5:174151769-174151979
  hyper
ggagcgccgcgtcaaggtctccagcctgcccttcagcgtggaggcgctcatgtccgacaagaagccgcccaaggaggcgtccccgctgccggccgaaagcgcctcggccggggccaccctgcggccactgctgctgtcggggcacggcgctcgggaagcgcacagccccgggccgctggtgaagcccttcgagaccgcctcggtcaagtc

SEQ ID NO: 11733 - DNA, 769 bp, Homo sapiens
  chr5:174151999-174152768
  hyper
cggcgtggatgcaggaacccggccgatattcgccgccgccaagtgagtgcgcgccggggcaggagtaggaggtagcgcggggtactggagggagcggggggcgggtgttccagggctgagggtaccgagacccttctgcgtgcgctacactcccgggaaagcaagcccagggcctctggactcctgggtgcccggggcgttcggcgcgcccagtgcgccgtccgcatccaagacaccctctgggtaataaccgcgctgtgtgtgtctgagactccctcgacatacagattgttttttcaagagcgaaccccagctgggtttacggggtcgctcggtggtccgtttctacagccctcggccctgcgctctggccacttggcttgtttttgtttcactgttccccggagtctctgcctggggagtgaaggagttggatccatgttcagtgagcacttggatgtaccaggaacgagacaggttcaaaactcaaccctgagagttgtgcccccattttaaagatgagctaactgggcttagccagacattgaggagaaaccattttctttcgtgagtcccgcgggtgtcgaagccggatcccacgaagggatggtggcaccagggatggtggcatcagagtctggtgcggggaggaaatgtctctctgtggtctccgcagccagcacctccccggcaaggttctgagcttcgccgggagcgggctggggccagaagcgcacgggctcttcttggctcacagtaataattaacc

SEQ ID NO: 11734 - DNA, 93 bp, Homo sapiens
  chr5:174162402-174162495
  hyper
cgccaggagcggtgcgcccagcgcagggggctcctagtcacctcgacccttccggcgcccttccctccttagctgcacctggcaagccagcaa

SEQ ID NO: 11735 - DNA, 87 bp, Homo sapiens
  chr5:174162904-174162991
  hyper
gccgagcagataataacagccccctgtaactgagcgcttcccaagtgccagacactgttgctcggcgatttacaccaatcaactcac

SEQ ID NO: 11736 - DNA, 79 bp, Homo sapiens
  chr5:174220739-174220818
  binary
cggcggctcctcctcgcagaaaccctccgcagtcccctaccccagaaaggtttcccttccctccccttcccgcaggccc

SEQ ID NO: 11737 - DNA, 46 bp, Homo sapiens
  chr5:174221001-174221047
  hyper
ctataaaagagaagtttgaggctcgtggggtgggggacgggggcac

SEQ ID NO: 11738 - DNA, 90 bp, Homo sapiens
  chr5:176698046-176698136
  hypo
cggagtataaggaataccgcaggtctgagcctgcctaagctctgagattctgccttaatcagggggtttctaggtgcctctgacttcttc

SEQ ID NO: 11739 - DNA, 77 bp, Homo sapiens; identical to SEQ ID NO: 6602
  chr5:176795049-176795126
  hypo

SEQ ID NO: 11740 - DNA, 238 bp, Homo sapiens; identical to SEQ ID NO: 6603
  chr5:176795288-176795526
  hypo

SEQ ID NO: 11741 - DNA, 365 bp, Homo sapiens
  chr5:180046947-180047312
  binary
aggtgtgacagatacaccctgctcagggtggcagcaggtgacctcagggagcctgggaactggggaccctggctgaggttctaggtacccacgcccacagggacaggtcaggccaggcggaacttcctggtgcaagttttgaaaatggagggattcaggcactccggcctgcagcaggtgggtcgggcaggaggtgtgggttgggcaggctggtgctggcctcacccaggtgcagccgctctcgggggaattcccactggctggcatcgtaggacaggtattcgcattgctcctccagaggcacctccccggggtccatgatgatggacaggtagcccgtcttgatgtctgcgtgggccggctgc

SEQ ID NO: 11742 - DNA, 87 bp, Homo sapiens; identical to SEQ ID NO: 8582
  chr5:1879747-1879834
  hyper

SEQ ID NO: 11743 - DNA, 343 bp, Homo sapiens; identical to SEQ ID NO: 7434
  chr5:192307-192650
  hypo

SEQ ID NO: 11744 - DNA, 97 bp, Homo sapiens
  chr5:3121996-3122093
  hyper
cgaggatggccaggaaacagttaatttgatttgcgaggcgaaaaggtcgcatgttttgttcagccctttctcagccccttcctccctcgctcggccc

SEQ ID NO: 11745 - DNA, 83 bp, Homo sapiens
  chr5:3122204-3122287
  hyper
ccagctcagggggttcctttgccggcgtcccttccccttggaatgcgctttcttgcacctcctgtttacaaacaaaataaaac

SEQ ID NO: 11746 - DNA, 99 bp, Homo sapiens; identical to SEQ ID NO: 6210
  chr5:42950747-42950846
  hyper

SEQ ID NO: 11747 - DNA, 175 bp, Homo sapiens; identical to SEQ ID NO: 7436
  chr5:42995428-42995603
  hyper

SEQ ID NO: 11748 - DNA, 331 bp, Homo sapiens; identical to SEQ ID NO: 6604
  chr5:453948-454279
  hypo

SEQ ID NO: 11749 - DNA, 368 bp, Homo sapiens; identical to SEQ ID NO: 9813
  chr5:476496-476864
  hypo

SEQ ID NO: 11750 - DNA, 355 bp, Homo sapiens
  chr5:50677760-50678115
  hyper
aatgcggccggccaggatttacagctcttatcaagggttagattttgcgaaagatataaagaaaggagtttcctaacacaccgggtcttctcacagcaacaagacaccgaaattaagccttctatggtttgtgtctgtaggactttttagataaaactggcagccccattagataagaaatggctttttagaagctttgggggaagcgcgggggttcttcgtggccttcctgtgactgtctttgggagaccgtaacagatgatgggaacatgtaagaatgattgaagaaggttaccggcgagttgcacctaacagtcttctctctccaagtagtttctcgagagaaaattatata

SEQ ID NO: 11751 - DNA, 76 bp, Homo sapiens; identical to SEQ ID NO: 7437
  chr5:54518558-54518634
  hyper

SEQ ID NO: 11752 - DNA, 210 bp, Homo sapiens
  chr5:54526958-54527168
  hyper
cgcagacagacacttgcaggatttagacaaaccacaactgtttattggtgaaagactcagcttcctcatgtgctcgctgcaaaataaataaaataccagatgctagtatcgtacactatttacaacctgcagctgaccaagcaggtcctgaagccttctctgtggaccagtactgcactcttctgaggctacgggagaggtccagcagcc

SEQ ID NO: 11753 - DNA, 38 bp, Homo sapiens; identical to SEQ ID NO: 6211
  chr5:57878673-57878711
  hyper

SEQ ID NO: 11754 - DNA, 159 bp, Homo sapiens; identical to SEQ ID NO: 6212
  chr5:57878752-57878911
  hyper

SEQ ID NO: 11755 - DNA, 227 bp, Homo sapiens; identical to SEQ ID NO: 6213
  chr5:57879190-57879417
  hyper

SEQ ID NO: 11756 - DNA, 133 bp, Homo sapiens
  chr5:61681266-61681399
  hypo
cgtgtaatacaatacttattccctctttcttttctttttccaagataaagtgaaatctttccgtgcagctctacaagaggaggaacaagccagcaagcaaatcaacccgaagagaccccgtgccctttaaacc

SEQ ID NO: 11757 - DNA, 62 bp, Homo sapiens; identical to SEQ ID NO: 7438
  chr5:74753672-74753734
  hypo

SEQ ID NO: 11758 - DNA, 292 bp, Homo sapiens; identical to SEQ ID NO: 6214
  chr5:75378714-75379006
  hyper

SEQ ID NO: 11759 - DNA, 53 bp, Homo sapiens; identical to SEQ ID NO: 5835
  chr5:75698192-75698245
  binary

SEQ ID NO: 11760 - DNA, 1186 bp, Homo sapiens; identical to SEQ ID NO: 5836
  chr5:75698274-75699460
  binary

SEQ ID NO: 11761 - DNA, 111 bp, Homo sapiens
  chr5:76011064-76011175
  hyper
cgttcaagaacgtgtgaaggacacttggaaagttaccaggccatttctctcctgggcgcccgcggccctagaacgccggcctcaccggcagacgcgcgccctcctcccaga

SEQ ID NO: 11762 - DNA, 411 bp, Homo sapiens
  chr5:76011754-76012165
  hyper
gccagggccccccagtagggcagggcggggcggggcggggcgcacagagccagaggggcttgcgagcggcggctgagggaccgcggggagggggcgccgagcggctccagcgcagagactctcactgcacgccggagggcgcccttcctcgctcgcgcccgcgcgaccgcgcgccccagtcccgccccgccccgctaaccgccccagacacagcgctcgccgagggtcgcttggaccctgatcttacccgtgggcaccctgcgctctgcctgccgcgaagaccggctccccgacccgcagaagtcaggagagagggtgaagcggagcagcccgaggcggggcagcctcccggagcagcgccgcgcagagcccgggacaatggggccgcggcggctgctgctggtggccgcc

SEQ ID NO: 11763 - DNA, 378 bp, Homo sapiens
  chr5:76012199-76012577
  hyper
gcacccgggcccgcaggccaggtgagagatgcacgggaatggggtgcgcgggcggagggacgccgaggggagactgcgggggtcactgttgcgccttctcctcacccctgcctcagtttcctccgaaagccaaactggcatttgggctgagatctggagttttttccagtcacgtttaggtggggcgtgccacccccttcgcgggcccagccgatgcccctttggactcgatcttggagggtgcagcccgcctgccacggggtgttggatatggaggaggatggagcggaagccccctgggggagcctgcagtcctgcgttgcacttgtcattgtgtttctcccaggaccacccccaaaaagaaaagctctcacgttg

SEQ ID NO: 11764 - DNA, 184 bp, Homo sapiens
  chr5:76012643-76012827
  hyper
ttgttggaagtttttttcttgcacattttacaggcgagaaaagtgatgtagagaaaagcccaggcagtcccttggcatgtttagcagagaatcagtaccagcagcccccggcccggccttgtgtccaggaggtgcgcagggtgcgagatatatggtgacaatagcagaggctccgcgtggtggc

SEQ ID NO: 11765 - DNA, 268 bp, Homo sapiens
  chr5:851421-851689
  hypo
cgctgcggctgctcctggccagtcaggtggggagggcggcaggggtgggagggacgtggtgtcacagagcggcagtgaaagacactcaacggccgctacggggtggggggttgatcttgaggggctgggcggtctctacagaggagggttaggaagcttcgccacgttatgcctcgctcaaagtccttgttgtctctttgggaaaaaaccttcagaaaatgaagttgatattaaatgtatttctttgagaagagagacattgagaaat

SEQ ID NO: 11766 - DNA, 46 bp, Homo sapiens; identical to SEQ ID NO: 6217
  chr5:87436549-87436595
  hyper

SEQ ID NO: 11767 - DNA, 735 bp, Homo sapiens; identical to SEQ ID NO: 5837
  chr5:87436769-87437504
  binary

SEQ ID NO: 11768 - DNA, 80 bp, Homo sapiens; identical to SEQ ID NO: 6218
  chr5:87957200-87957280
  hyper

SEQ ID NO: 11769 - DNA, 157 bp, Homo sapiens; identical to SEQ ID NO: 6219
  chr5:87969885-87970042
  hyper

SEQ ID NO: 11770 - DNA, 600 bp, Homo sapiens; identical to SEQ ID NO: 6220
  chr5:87970918-87971518
  hyper

SEQ ID NO: 11771 - DNA, 38 bp, Homo sapiens; identical to SEQ ID NO: 6221
  chr5:87975991-87976029
  hyper

SEQ ID NO: 11772 - DNA, 243 bp, Homo sapiens; identical to SEQ ID NO: 6222
  chr5:87976663-87976906
  hyper

SEQ ID NO: 11773 - DNA, 263 bp, Homo sapiens; identical to SEQ ID NO: 6223
  chr5:87986873-87987136
  hyper

SEQ ID NO: 11774 - DNA, 139 bp, Homo sapiens; identical to SEQ ID NO: 6224
  chr5:87987165-87987304
  hyper

SEQ ID NO: 11775 - DNA, 423 bp, Homo sapiens; identical to SEQ ID NO: 6225
  chr5:88179429-88179852
  hyper

SEQ ID NO: 11776 - DNA, 42 bp, Homo sapiens; identical to SEQ ID NO: 6226
  chr5:88180346-88180388
  hyper

SEQ ID NO: 11777 - DNA, 432 bp, Homo sapiens; identical to SEQ ID NO: 6605
  chr5:883821-884253
  hypo

SEQ ID NO: 11778 - DNA, 187 bp, Homo sapiens; identical to SEQ ID NO: 6606
  chr5:913200-913387
  hypo

SEQ ID NO: 11779 - DNA, 138 bp, Homo sapiens
  chr6:10418940-10419078
  hyper
cgttggttttggcaaattcaccacccccctgcctcctcacccaccattctcacactccctcatccgtagcccaggcggcaaaaacccatttcaggaagtggagtgagttgctagctaaacttcgggcaaactttgtat

SEQ ID NO: 11780 - DNA, 69 bp, Homo sapiens
  chr6:119030678-119030747
  hyper
cagtaacaacaattggcgtgtgtgtgtgtgtgtgtgtgtgtgagagagagagagagagagagagagagc

SEQ ID NO: 11781 - DNA, 74 bp, Homo sapiens
  chr6:119510833-119510907
  hypo
cgattatatgattcatgacaagtacgggcaatttcagccccgagttcaaggtagtgttgggccatgccttcggg

SEQ ID NO: 11782 - DNA, 70 bp, Homo sapiens
  chr6:119510942-119511012
  hypo
cgaagcaggtcaggtggcccatcttgtgctccaggaggccccctttccactctgcgatataagttagtcc

SEQ ID NO: 11783 - DNA, 97 bp, Homo sapiens; identical to SEQ ID NO: 9842
  chr6:134499457-134499554
  hyper

SEQ ID NO: 11784 - DNA, 369 bp, Homo sapiens; identical to SEQ ID NO: 6230
  chr6:143247975-143248344
  hyper

SEQ ID NO: 11785 - DNA, 139 bp, Homo sapiens; identical to SEQ ID NO: 7455
  chr6:158093637-158093776
  hypo

SEQ ID NO: 11786 - DNA, 172 bp, Homo sapiens; identical to SEQ ID NO: 7456
  chr6:158094082-158094254
  hypo

SEQ ID NO: 11787 - DNA, 84 bp, Homo sapiens
  chr6:159205631-159205715
  hypo
cgcacggagatggcaagatcccaacagcagggcacagcactcacttgagcatcccacggtgttccgcatgccacacctggatcc

SEQ ID NO: 11788 - DNA, 341 bp, Homo sapiens
  chr6:167764611-167764952
  hyper
cggagccccgcaggcccgtggccccctgcctggttctcccgcctctgcaagcctagccttcaggactccgcctcgcccccctcttttctgttcggagactcacggggccgtctgtctggaccacgtgtgcacatttctgaccacgattcctccgcacaccagctacaggcaccgcagcgctggggacggcacagctgaactgtgctggcagcgaaggggcctcacggggacggctcagctccctgagggcgcaacccacctggtccgggggcgggggggggggtgaggaataaacttccgcggttttcagtgacccagtttgttgcatggcacatgttgga

SEQ ID NO: 11789 - DNA, 365 bp, Homo sapiens; identical to SEQ ID NO: 7459
  chr6:168672446-168672811
  hypo

SEQ ID NO: 11790 - DNA, 353 bp, Homo sapiens; identical to SEQ ID NO: 6235
  chr6:26313163-26313516
  hyper

SEQ ID NO: 11791 - DNA, 345 bp, Homo sapiens; identical to SEQ ID NO: 6236
  chr6:26313545-26313890
  hyper

SEQ ID NO: 11792 - DNA, 124 bp, Homo sapiens
  chr6:26330521-26330645
  hyper
cgctccctagcagaggatggtttcgatccatcgacctctgggttatgggcccagcacgcttccgctgcgccactctgctacgcgagtcacaggtcccagagttaatagtcaccttttttctagc

SEQ ID NO: 11793 - DNA, 71 bp, Homo sapiens; identical to SEQ ID NO: 6238
  chr6:26331633-26331704
  hyper

SEQ ID NO: 11794 - DNA, 324 bp, Homo sapiens; identical to SEQ ID NO: 6239
  chr6:26331811-26332135
  hyper

SEQ ID NO: 11795 - DNA, 243 bp, Homo sapiens; identical to SEQ ID NO: 6240
  chr6:26332283-26332526
  hyper

SEQ ID NO: 11796 - DNA, 67 bp, Homo sapiens
  chr6:26555496-26555563
  hyper
cggctcgttggtctaggggtatgattctcgcttagggtgcgagaggtcccgggttcaaatcccggac

SEQ ID NO: 11797 - DNA, 248 bp, Homo sapiens; identical to SEQ ID NO: 6241
  chr6:26577475-26577723
  hyper

SEQ ID NO: 11798 - DNA, 205 bp, Homo sapiens; identical to SEQ ID NO: 6247
  chr6:27560506-27560711
  hyper

SEQ ID NO: 11799 - DNA, 93 bp, Homo sapiens; identical to SEQ ID NO: 6248
  chr6:27636531-27636624
  hyper

SEQ ID NO: 11800 - DNA, 87 bp, Homo sapiens; identical to SEQ ID NO: 6249
  chr6:27640312-27640399
  hyper

SEQ ID NO: 11801 - DNA, 1073 bp, Homo sapiens; identical to SEQ ID NO: 7465
  chr6:27655169-27656242
  hyper

SEQ ID NO: 11802 - DNA, 136 bp, Homo sapiens
  chr6:27662125-27662261
  hyper
tcggcgcttcgcctcgggactccagtgcaacctatggggcttttggaaatgaggaagtcgatgactctgcagggactcctctgacccaggagcagatggcgctcgtctgggcactccccaggagaaaaggtgcatc

SEQ ID NO: 11803 - DNA, 191 bp, Homo sapiens
  chr6:28303261-28303452
  hyper
cggcaggcgctctactttcctttattaggactataagcccagcttctgtgaatcatcacctcagcccctgattggtccggggccaaactttcacttcggcttctgataggtcctgggccaagctaagcagcagctatgaatcatcatttcagctcctgattggtcccggaccaagctgagtcaagcgttcg

SEQ ID NO: 11804 - DNA, 74 bp, Homo sapiens
  chr6:28303489-28303563
  hyper
ttccagtccataaaaaccccagaacgggccccataatgggtactcccggtcgggaccccttctctgctggcaga

SEQ ID NO: 11805 - DNA, 209 bp, Homo sapiens
  chr6:28303607-28303816
  hyper
tttgtgtctgcgctcctttatcgtcttggaggcaggacaaagaactccgggcgttatctcagacaaagaaaggctgtttaatcttcaggataaggggcgggacctccacctactccacgggggcttcaggccagtgaatgtgtaggggcgggggtcacgcctgcgcagacgttccctccccgcctactccaaggcacagacctgaaatc

SEQ ID NO: 11806 - DNA, 182 bp, Homo sapiens
  chr6:3333155-3333337
  hypo
atgttccttcatgccctggtttaatctctaaactggaagctccacctaatgtctggtgagacccaggttcaggtttttggaagagcgtatcgcagctggtgcctgtgcgtcacggtgctgccccgcaggaggtcacctactgggaatgacgctaccactgacccatggagcaaagcggcggc

SEQ ID NO: 11807 - DNA, 223 bp, Homo sapiens; identical to SEQ ID NO: 6607
  chr6:36198250-36198473
  hypo

SEQ ID NO: 11808 - DNA, 314 bp, Homo sapiens; identical to SEQ ID NO: 7482
  chr6:37023826-37024140
  hypo

SEQ ID NO: 11809 - DNA, 61 bp, Homo sapiens; identical to SEQ ID NO: 6255
  chr6:391113-391174
  hyper

SEQ ID NO: 11810 - DNA, 55 bp, Homo sapiens; identical to SEQ ID NO: 5841
  chr6:393764-393819
  binary

SEQ ID NO: 11811 - DNA, 86 bp, Homo sapiens; identical to SEQ ID NO: 10722
  chr6:41605681-41605767
  hyper

SEQ ID NO: 11812 - DNA, 97 bp, Homo sapiens; identical to SEQ ID NO: 7486
  chr6:42762779-42762876
  hypo

SEQ ID NO: 11813 - DNA, 373 bp, Homo sapiens; identical to SEQ ID NO: 5842
  chr6:46097250-46097623
  binary

SEQ ID NO: 11814 - DNA, 521 bp, Homo sapiens; identical to SEQ ID NO: 5843
  chr6:46097694-46098215
  binary

SEQ ID NO: 11815 - DNA, 97 bp, Homo sapiens
  chr6:4874031-4874128
  hypo
cgagagcctggtttgaaaccgccaagtaggaacatcgcacaggggacaccttcacatgcgccgcagctgtgcagatttcacctcctgccactgcttg

SEQ ID NO: 11816 - DNA, 465 bp, Homo sapiens; identical to SEQ ID NO: 5844
  chr6:4948996-4949461
  binary

SEQ ID NO: 11817 - DNA, 53 bp, Homo sapiens
  chr6:50692556-50692609
  hyper
tttaaaaaaaagtggcggggttgggtggcctataatcaggttgccgagcgtgc

SEQ ID NO: 11818 - DNA, 44 bp, Homo sapiens; identical to SEQ ID NO: 8640
  chr6:50805695-50805739
  hyper

SEQ ID NO: 11819 - DNA, 43 bp, Homo sapiens
  chr6:50810509-50810552
  hyper
cgaatgtcccaaagcgagtccaggcggtcctggaatggagggg

SEQ ID NO: 11820 - DNA, 189 bp, Homo sapiens
  chr6:56716695-56716884
  hyper
aaatgactggcccaacaatgaagccagaatcaacagccttcctgttacaaacctatagtatttggctcccccaccaggacagtagaaatattttccattactagcctgctgcttaattcatcaatgcaactaactcgaagtttcgaaaacaaagcacaaatgcaggatgttgagtcccaactcctttcc

SEQ ID NO: 11821 - DNA, 71 bp, Homo sapiens
  chr6:56820686-56820757
  hyper
cgtttcttcataaccagcaaaaagtatatggcagttggtggccaggggatttaacactgatgcaatgccag

SEQ ID NO: 11822 - DNA, 184 bp, Homo sapiens
  chr6:7237796-7237980
  hypo
aatgctgtaggtcctgagtgcgcaggtaactcactgtggttacaggtgcttttacaaatccccttctaaagcagttattcgtggcagctaccaaataaatagaatcatttgctactttctatatagatggctggccaacaagtgtttttgaaacctgcgttattataaaatactaaacgggccc

SEQ ID NO: 11823 - DNA, 164 bp, Homo sapiens; identical to SEQ ID NO: 8652
  chr6:73329621-73329785
  hyper

SEQ ID NO: 11824 - DNA, 82 bp, Homo sapiens; identical to SEQ ID NO: 8653
  chr6:73330126-73330208
  hyper

SEQ ID NO: 11825 - DNA, 354 bp, Homo sapiens; identical to SEQ ID NO: 9888
  chr6:86159095-86159449
  hyper

SEQ ID NO: 11826 - DNA, 270 bp, Homo sapiens; identical to SEQ ID NO: 9889
  chr6:86159509-86159779
  hyper

SEQ ID NO: 11827 - DNA, 244 bp, Homo sapiens
  chr6:86159903-86160147
  hyper
tgggcgcggtgctgtggcctgcggctggcgcctgggagcttacgattttgcacaccaacgacgtgcacagccggctggagcagaccagcgaggactccagcaagtgcgtcaacgccagccgctgcatgggtggcgtggctcggctcttcaccaaggttcagcagatccgccgcgccgaacccaacgtgctgctgctggacgccggcgaccagtaccagggcactatctggttcaccgtgtacaa

SEQ ID NO: 11828 - DNA, 124 bp, Homo sapiens; identical to SEQ ID NO: 6264
  chr6:87646737-87646861
  hyper

SEQ ID NO: 11829 - DNA, 171 bp, Homo sapiens; identical to SEQ ID NO: 6265
  chr6:87646944-87647115
  hyper

SEQ ID NO: 11830 - DNA, 75 bp, Homo sapiens; identical to SEQ ID NO: 6266
  chr6:87647143-87647218
  hyper

SEQ ID NO: 11831 - DNA, 117 bp, Homo sapiens; identical to SEQ ID NO: 6609
  chr7:101475674-101475791
  hypo

SEQ ID NO: 11832 - DNA, 236 bp, Homo sapiens; identical to SEQ ID NO: 6610
  chr7:101475858-101476094
  hypo

SEQ ID NO: 11833 - DNA, 197 bp, Homo sapiens
  chr7:101603073-101603270
  hypo
cggaggatttcaccgcgtacatattctctgtttggacatggtacaacctgtggacccttttaaacatagttacatgtttgactctttatagggtaataactcgattaattttgcaaggctttttagaataccattgttctcttgaaaagaacaggtttgctgttttaacaagactttaatgccatcgagatgcctca

SEQ ID NO: 11834 - DNA, 242 bp, Homo sapiens
  chr7:101603308-101603550
  hypo
aatgaaattgagagagctttttccggcgcctggttggttggggcggcctccgttcggtgcttttttcatcctcgacccagtgaccaactgtgtttgccctgatgtttctttcaattccaccattccgaaatgtctccggaatctgtcgttttagcttttgcagcaaggttcgttgtgtttgtcttgcccgcttcaggtttctctaatgagattcacgtgtaaaggaggattggcaattaatc

SEQ ID NO: 11835 - DNA, 312 bp, Homo sapiens; identical to SEQ ID NO: 8663
  chr7:101652279-101652591
  hypo

SEQ ID NO: 11836 - DNA, 92 bp, Homo sapiens
  chr7:1029909-1030001
  hypo
cggcagtgtgacagtggcgcgtgtgctgggggtggtgtggtcggcagtgtgacagtggcgcgtgtgctgggggcggtgtggtcggcagtgtg

SEQ ID NO: 11837 - DNA, 227 bp, Homo sapiens
  chr7:121946146-121946373
  hyper
gaaccccgcagctaggcgcgcaggaagggctgcacagagtttgaagacacggcagctgtaagctggcgtgaggaggccaaaggagcgcgcagagctgcaagcaaagggcggtggggcctggaccctgaagtgagtggccgaccgcagcagctcaaggtgccatctgcctggtgagttaaccccacgtggctgtgagacaggtggtggcgggtgtcaggtattgggcc

SEQ ID NO: 11838 - DNA, 177 bp, Homo sapiens; identical to SEQ ID NO: 6611
  chr7:129483449-129483626
  hypo

SEQ ID NO: 11839 - DNA, 151 bp, Homo sapiens
  chr7:137564632-137564783
  hypo
cggcctgagaatatgaacgagagccctcgcctgccagtgctgctgcaggagacgagacgatccagcgagggctcccagggggcagagtgggcggagggctgctgtcgggggtgttcacaccagagaccccagtgcgagcaacggaggacac

SEQ ID NO: 11840 - DNA, 125 bp, Homo sapiens
  chr7:1451120-1451245
  hypo
cgtatccggggtgttcgaacaattgtgcggcgccgacgatgcaagctgttgacctgcacagataaaccgtgcgtgcggaggaatcgggggcggcggacggggtggggggagtgtacatggctgtt

SEQ ID NO: 11841 - DNA, 503 bp, Homo sapiens; identical to SEQ ID NO: 6612
  chr7:148480954-148481457
  hypo

SEQ ID NO: 11842 - DNA, 254 bp, Homo sapiens
  chr7:150863966-150864220
  hyper
cgcgcgatctaaaggtctgggacttcaaggctccaggcaggtgccgaggtgccgaggttccgagcaggttcctgtctggaatttccaggtgaaccggcctcccgccagccctggtcggccctagcacttaccgggcagacttggaaaagtctctgagaagtgcggaggcggaggtggtgggggctctgccactttctcccgggccggcagcagctcatcagcttccagcccaccctctgggcgtcggccgcctg

SEQ ID NO: 11843 - DNA, 154 bp, Homo sapiens; identical to SEQ ID NO: 6269
  chr7:152591569-152591723
  hyper

SEQ ID NO: 11844 - DNA, 83 bp, Homo sapiens
  chr7:155257774-155257857
  hyper
cggtgctattccagtgactacatttttttaaattttgcgaagttcaacaggtctccctccggctgggtgctcactggccctgc

SEQ ID NO: 11845 - DNA, 239 bp, Homo sapiens; identical to SEQ ID NO: 7509
  chr7:155581980-155582219
  hypo

SEQ ID NO: 11846 - DNA, 650 bp, Homo sapiens; identical to SEQ ID NO: 9915
  chr7:157202474-157203124
  hypo

SEQ ID NO: 11847 - DNA, 788 bp, Homo sapiens
  chr7:158066162-158066950
  hypo
cgcaggcacagggggagccgcaggcacagggggagccgcagacagacatgggaggagccgcagacacggggagccgcagacacagggggagccgcaggcacagggggagccgcagacagacatgggaggagccgcagacacggggagccgcaggcatgggggagccgcagacagacatgggaggagccgcagacacgggaggagccgcagacacagggagccgcagacacagggggagctgcagacacaggaggagacacacaaggagccgcagacacagggggagccacagacagacatgggaggagccgcagacacggggagccgcagacacagggggagccgcaggcatgggggagccgcagacacagggggagccgcagacacaggaggagacacacgaggagccgcagacgcaggaggagccgcagacagacgcgggaggagccgcagacacagggggagccgcagacacagggggagctgcagacagacatgggaggagccgcagacacagggagccgcagacacagggagccgcagacacagggggagccgcagacacaggaggagacacacgaggagccgcaggcacagggggagccgcagacacagggggagctgcagacagacatgggaggagccgcagacacggggagccgcagacacagggagccgcagacacagggggagccgcagacacaggaggagacacacgaggagccgcagacacagggggagccgcagacagacatgggaggagccacagacacgggagccgcagacac

SEQ ID NO: 11848 - DNA, 219 bp, Homo sapiens
  chr7:158067069-158067288
  hypo
ggggagccgcaggcacagggggagccacaggcacagggggagccgcagacagacatgggaggagccgcagacacggggagccgcagacacaggaggagacacacgaggagccgcaggcacagggggagccacaggcacgggggagccgcaggcacagggggagccacagacaccctcacactccgggatctagcgtgtgtggacgagcccgaggcgctc

SEQ ID NO: 11849 - DNA, 336 bp, Homo sapiens
  chr7:1584054-1584390
  hypo
cgggtgcgctgggcccagatacgcggctcctgcctgcctcatggcctgctcctctgtcggggcctgtcaccgggaaaccccttttttagcagcgatgacgacactggaaccacgctagtctccgtccctcccgctcacatgcgcccacgctccccctcgaggcaggttgagccccggcctggaccgccccacgctgccttccgtccacgcagagcgggctcggccctcagggctttccttcgagtcgtgttggaaagaagcagaagcagcctcacccgtggggcggaggcgtctgagggtcaggaggcagggaggagagagggcctctgtggagcc

SEQ ID NO: 11850 - DNA, 421 bp, Homo sapiens; identical to SEQ ID NO: 7520
  chr7:1641978-1642399
  hypo

SEQ ID NO: 11851 - DNA, 327 bp, Homo sapiens; identical to SEQ ID NO: 6617
  chr7:2208344-2208671
  hypo

SEQ ID NO: 11852 - DNA, 91 bp, Homo sapiens; identical to SEQ ID NO: 6618
  chr7:2208844-2208935
  hypo

SEQ ID NO: 11853 - DNA, 242 bp, Homo sapiens
  chr7:2448743-2448985
  hypo
cgcagctgtggatagcctcgccgcaatgatagtaatttatgtaaacactgactgctgctctaattgaaattatgatgcacctgggcagagaaggtgtggggaggagagcgctgcattttcgcctgtcgccttgggaagtcagtcgctaatgccccaagctgaacaaccaaggttcactctgaaggcagacattaaaagaattagctaaaaagaattatggagcgggtagggcgtggtggttc

SEQ ID NO: 11854 - DNA, 189 bp, Homo sapiens
  chr7:25892243-25892432
  binary
ccgggagtggagaaaggctgatttacagccggccggccgcactcttgcaaaatcactgcggccggggaaacccactcccaggactcagcccggaagaggccctgaaggggagcggagactgggcgctggggtgggggcgggggcgccgagcctcaacttcccgcgtctgctggaagcttgctctgagcg

SEQ ID NO: 11855 - DNA, 67 bp, Homo sapiens
  chr7:27203938-27204005
  hyper
cgccctaaggccgctgatcacgtctgtggcttatttgaataatctgtcatggggacccttgtggccc

SEQ ID NO: 11856 - DNA, 244 bp, Homo sapiens
  chr7:27204141-27204385
  hyper
tacaaaaggctctctgggctgcactgctttcgaagaacggcccaaagtatctcggtcctgggcctgggcagccaaggagaggggcggccagtcttggctcgtcccgaagtgcccgccccgccccctctcgctgcagcagccgcctcctctcccgtagccctgcgggccgctcttcactgctctccagacttggggccctatctgaggcgtcccaaacaccaacttctggctcctggccccaact

SEQ ID NO: 11857 - DNA, 396 bp, Homo sapiens; identical to SEQ ID NO: 6278
  chr7:3082731-3083127
  hyper

SEQ ID NO: 11858 - DNA, 84 bp, Homo sapiens; identical to SEQ ID NO: 5847
  chr7:3083602-3083686
  binary

SEQ ID NO: 11859 - DNA, 41 bp, Homo sapiens
  chr7:37955597-37955638
  hyper
cgcccctggcagccttaggtgtggccgcccagttctcgatt

SEQ ID NO: 11860 - DNA, 205 bp, Homo sapiens
  chr7:37956056-37956261
  hyper
cgcaccgcctcgcagggcgcgccgcgcacgcccagcgccaggtgcagccacaggcacagcgccactaggatggagaggaacatggcactgccctctcgcgctgcgaccccggcagacagaaagcgcccttctcttcctgccaccctcatctttcgctgtcccttcgccgaggaagaaatcctctggggcgcaggagagtttcttc

SEQ ID NO: 11861 - DNA, 136 bp, Homo sapiens
  chr7:37956568-37956704
  hyper
ctctgggccgcagcccagggctggaagcctgctttccccctaaagtccctcctttttagtctggccagtcttttttcttcggaccaagaaaaagaacctctggcagttgttttcgacaccggatacaagagggtgc

SEQ ID NO: 11862 - DNA, 168 bp, Homo sapiens; identical to SEQ ID NO: 5848
  chr7:37960958-37961126
  binary

SEQ ID NO: 11863 - DNA, 52 bp, Homo sapiens; identical to SEQ ID NO: 6279
  chr7:42927739-42927791
  hyper

SEQ ID NO: 11864 - DNA, 412 bp, Homo sapiens; identical to SEQ ID NO: 6280
  chr7:42928175-42928587
  hyper

SEQ ID NO: 11865 - DNA, 37 bp, Homo sapiens
  chr7:44349523-44349560
  hyper
cgcctgagcagccagaaccaggccgaggccgcgcggc

SEQ ID NO: 11866 - DNA, 903 bp, Homo sapiens; identical to SEQ ID NO: 9935
  chr7:4801650-4802553
  hypo

SEQ ID NO: 11867 - DNA, 430 bp, Homo sapiens; identical to SEQ ID NO: 6620
  chr7:4802589-4803019
  hypo

SEQ ID NO: 11868 - DNA, 95 bp, Homo sapiens
  chr7:50251628-50251723
  hypo
agcatgctggcattgggaagaggcaccctcacactggcatcgggaggaggtgtccatatgttggcatcaggaggaggtgtccacacgctggtatc

SEQ ID NO: 11869 - DNA, 521 bp, Homo sapiens
  chr7:6207763-6208284
  hypo
cgttagcaggcaggcgcgtacgtgcacacacaggtccacatgcacacactttctgtatggcagctcggattgggccacctcctaggattttttttttttttttttttctggtgattgattcaagactcgaagtcttaagttaccaacaatcgtaagccacgcctgtgtacacagcagggctcctacgctctggcaaagcatccaggcctttttaagaccacctgttctaaaagcaaatctacaataagaatgcaaccaagccaggccgcactccccgctgagcacacgcctggaagcacgttctagatcctgcacccatctcgtctgcctccagccagggccctggctcgccagcctttggtctcgaactttgtttctgagaacacagcagacatacagggtgctgggagaggacaaggaagccagcccctagagcagcaggtgctcaccgggccgcccaccacactgaggccacgccagctggaccagcccctccagggcccctgcgcttggcacccggc

SEQ ID NO: 11870 - DNA, 193 bp, Homo sapiens
  chr7:64349139-64349332
  hyper
aaacgctgccactgccgactccatgctgccgggaagtgcactgtggaggccactttctggaaagaagaaaccgtctgaacacaaagttgctcaagccatgttcatctatctgccagggaaacggaggccctgagtgccagagtccaagtcaccctgcaagagaaaactctggtggagcccagggtgtccagcc

SEQ ID NO: 11871 - DNA, 413 bp, Homo sapiens
  chr7:64349470-64349883
  binary
acagtccgggctccgggagccaagcagggatccgggcctcgttgcggaggggacgcccgggctgagctgagctcacttgctggcggcggcagcccctgcagtcatggggtcaccggcttgtggagaggggctggcgctgttccttggccccgctccccgcccgcaaagggccgggaggtcgggctcccggcagtgtccaggctctcgcccgccggtgcctgagccgtacccaccgcgtcccctccgccccaacagctggtgctgagggtccggcccggggtcatctggcagggccgtgcggctcctgcgggtgaccaggagcgcggagccccttcccactcgggctcgggtggcctcacctttcctggggctgcgtccccgcgggacgccaggttcccggtttcttctaggtc

SEQ ID NO: 11872 - DNA, 48 bp, Homo sapiens
  chr7:64350036-64350084
  binary
tggaaccgtcgccctggggcccctccgccccgcaaacgctcgggatgc

SEQ ID NO: 11873 - DNA, 108 bp, Homo sapiens; identical to SEQ ID NO: 7552
  chr7:6443719-6443827
  hypo

SEQ ID NO: 11874 - DNA, 101 bp, Homo sapiens; identical to SEQ ID NO: 7553
  chr7:6443856-6443957
  hypo

SEQ ID NO: 11875 - DNA, 61 bp, Homo sapiens; identical to SEQ ID NO: 7554
  chr7:6443990-6444051
  hypo

SEQ ID NO: 11876 - DNA, 177 bp, Homo sapiens
  chr7:6448767-6448944
  hypo
cgcgcgctttattgtttcaactcctgaatccactggccgaccccagagccagaagagtagcaagaattcaatcagcaactcctgatgtggacaaacaactgggcagtgggaataggcagttggggggctgtggctcggcggggccgggggctccacttactttcccgatcgggtttc

SEQ ID NO: 11877 - DNA, 57 bp, Homo sapiens; identical to SEQ ID NO: 6283
  chr7:64734140-64734197
  hyper

SEQ ID NO: 11878 - DNA, 144 bp, Homo sapiens
  chr7:653114-653258
  hypo
cgtctgaggaagcgtacgggatcagaaccagcagctccgttcacagccaaactcgccttcaaaaggcaaggagatggcgcgccaagctcagcccctgaaatcacacacgcggggttgaacgtgagtaactcagcccatcgttcc

SEQ ID NO: 11879 - DNA, 274 bp, Homo sapiens; identical to SEQ ID NO: 7555
  chr7:653522-653796
  hypo

SEQ ID NO: 11880 - DNA, 92 bp, Homo sapiens
  chr7:65553884-65553976
  hypo
cgtgcagctctcagatgcctacaggtaagccctgaactgccacctccatctgccgctgccggcctctgtatcccccgccgcccgcggacgtg

SEQ ID NO: 11881 - DNA, 314 bp, Homo sapiens
  chr7:65554018-65554332
  hypo
ttgcggcgctggaccagccaagggtccagccccttcagcgccagcacctctgtccccagcacgggaagcagcctgatgccccagaagaaaaaccccgacagtttggagctgatccggagcaaggctgggcgtgtgtttgggcgggtgagcaaggcagggggaggggcggggcctctgggctgatggtgggtggccaggggggcaggatcccgggtccagcccctgtgcctccctcttcccgcagtgtgccgggctcctgatgaccctcaagggacttcccagcacctacaacaaagacttacaggtgcgaggcc

SEQ ID NO: 11882 - DNA, 90 bp, Homo sapiens; identical to SEQ ID NO: 7556
  chr7:66293278-66293368
  hypo

SEQ ID NO: 11883 - DNA, 57 bp, Homo sapiens; identical to SEQ ID NO: 9946
  chr7:7102882-7102939
  hypo

SEQ ID NO: 11884 - DNA, 37 bp, Homo sapiens; identical to SEQ ID NO: 9947
  chr7:7102968-7103005
  hypo

SEQ ID NO: 11885 - DNA, 122 bp, Homo sapiens
  chr7:76106210-76106332
  hypo
cgtgccttcgtggaaagttttagctgatgtcctcgcctgtatttcccaggctgtttttgcagagttgtgagagttggttcatccgggccatgaggacatgttgggacataccccgtgtgccg

SEQ ID NO: 11886 - DNA, 102 bp, Homo sapiens
  chr7:76106380-76106482
  hypo
taattggcttggaaggcagtcctctgatttgtacctcattgtggttacagaaacttccaattgaagacactgagctgaaccattccgcccgcccgcccgccc

SEQ ID NO: 11887 - DNA, 59 bp, Homo sapiens; identical to SEQ ID NO: 9948
  chr7:76145303-76145362
  hyper

SEQ ID NO: 11888 - DNA, 75 bp, Homo sapiens
  chr7:76631604-76631679
  hypo
gtgcctcctggccatgtactgcaacggcaataaggtgcccccactggcccggggcggaggcgggtggcctgcccc

SEQ ID NO: 11889 - DNA, 107 bp, Homo sapiens
  chr7:76751570-76751677
  hyper
cggttggcttgactaggcgatgtaaacatcagctgcgtaatccccaggggcaagttgggatttgaaagctctgaactctgacctggaccccttgcctaagtccaccc

SEQ ID NO: 11890 - DNA, 230 bp, Homo sapiens
  chr7:76751716-76751946
  hyper
gtggaaagtcgcagagctccgcctcttagaaaccacatatcccaggaggcaatgcgcaggggagcacgggtaagagggcaggtgttagaatcgctggaaaggcgggcgccctttgtttcaagaccattggctattggaggggcggtacatgggaggccactggccaatgggaagcacggaagggggcaacgagggtaaagctgcatggtcaccttggataccaaggacgc

SEQ ID NO: 11891 - DNA, 322 bp, Homo sapiens; identical to SEQ ID NO: 6285
  chr7:8476750-8477072
  hyper

SEQ ID NO: 11892 - DNA, 274 bp, Homo sapiens
  chr7:889360-889634
  binary
cgacgggctgttggagctgctgcttaagccctcatcacagaagctcatagccaccagatcgcatttgctttgattgttgactgtctcgtgtgtaattgagtttcccagtttctacagactgccattgctatgcacggctgagatggacagagtttgcttgtgaatccgccacactcactgcctgtcaccacacctgcaggcgacgactgtaagggcaagaggcacctcgacgcgcacacagccgcccactcgcagtcgccacggctgcccggtc

SEQ ID NO: 11893 - DNA, 742 bp, Homo sapiens
  chr7:925633-926375
  hypo
cgggggagcgcggtggcgagggcacgtgggcgtggctcacggtctcctctctgtggcaggtacatgtcccagagcaagcacacggaggcccgggagctcatgtactcgggagccctgctcttcttcagccatggccaggtaagccgtcttgcttcctcctgcatccctttctgctccgggcaggcaagtggaggtgggaatgacctcccacctccactgatgggcaaccttgcgctgccctgggcctcggccactggggctgtgggtggcagaggggcccagagtcccccctggcttggctgctccactctcaagactggggctctgcgctgcgtttgtgcacgatggggctgagagggcgttgtgttggtataaacgtccccgtccattttcatgtgattctcggccaggagctctctttttcggcggcattgccaagggacgtggtgctcagaagagactcctcagcaccggccgcactctggcttctgctggaaacccagccttgtctttgctgtcctgaacaggtcagggctttgttcttgattcttgtgtgttgctttctcttgtagcaaaacagtgcagcagacttgtccatgctggtcctggagtccctggagaaggcggaagtggaggtggctgacgagctgctgggtgagcatccggcccttcaccccgggaccctgtgacagcggccccagtacgcccctccccgggtctctgcgctgtgtttcgtgtctgc

SEQ ID NO: 11894 - DNA, 376 bp, Homo sapiens; identical to SEQ ID NO: 9954
  chr7:93203842-93204218
  hyper

SEQ ID NO: 11895 - DNA, 139 bp, Homo sapiens; identical to SEQ ID NO: 6286
  chr7:94285147-94285286
  hyper

SEQ ID NO: 11896 - DNA, 448 bp, Homo sapiens; identical to SEQ ID NO: 8738
  chr8:100796506-100796954
  hypo

SEQ ID NO: 11897 - DNA, 170 bp, Homo sapiens
  chr8:101920213-101920383
  hyper
cggagtgagaagctcttatccgcaggcaggtcatcctgacatctctctgcgagtctagctgagtctgggacttctacgggttttgaagggaggaagtgtgtgctgattggtccatgggtggccatcggcggggctggaaaaaacaccaaaagttctcactcccgcggtgg

SEQ ID NO: 11898 - DNA, 62 bp, Homo sapiens
  chr8:101920468-101920530
  hyper
gggaacctatctgcctcctgctgccattgacaggtttgtccaccgcaatgccctggctatcc

SEQ ID NO: 11899 - DNA, 174 bp, Homo sapiens; identical to SEQ ID NO: 6289
  chr8:110987222-110987396
  hyper

SEQ ID NO: 11900 - DNA, 342 bp, Homo sapiens; identical to SEQ ID NO: 6292
  chr8:114447448-114447790
  hyper

SEQ ID NO: 11901 - DNA, 818 bp, Homo sapiens; identical to SEQ ID NO: 6293
  chr8:114449602-114450420
  hyper

SEQ ID NO: 11902 - DNA, 110 bp, Homo sapiens; identical to SEQ ID NO: 6294
  chr8:11561282-11561392
  hyper

SEQ ID NO: 11903 - DNA, 125 bp, Homo sapiens
  chr8:121136702-121136827
  hyper
cgggtggggaatcagcaggttatgaggtacaaccacacgaaattgcctacattcgtctttttgtaacctacagaaatgtccatttcgatacctccagctgattcccctgcaccttaaagtttgag

SEQ ID NO: 11904 - DNA, 57 bp, Homo sapiens
  chr8:124238881-124238938
  hypo
cgaaaagtctcaatgcgtggcgaaaagtcccaacgcttccagataaaggaaagccgc

SEQ ID NO: 11905 - DNA, 308 bp, Homo sapiens
  chr8:124730010-124730318
  hypo
cgaggcgactttctgacggggcgtgtctcagcaggtttggagtgcagatgcacaagtccacaccttacgtaaccacgccacgtgaggcgcattaagtaaccactcagatgcgctcgtgcttggcttggagccactgttgtctgtaaaaggtacaattacgctgctaacgctgtacctctggcttggggctcacgcccagactcgcacccaggctcgcttgcgcccagagaaagagtaaagccatgttgaaactccctgcgattcctcgagtgtttttccagctgcccgccaccccaccgacttttttc

SEQ ID NO: 11906 - DNA, 73 bp, Homo sapiens
  chr8:125680364-125680437
  hypo
cgctgggctctaaaaccaagatgccaacaggcccggccagcaactgaggaggacacagcgcaagcggccacac

SEQ ID NO: 11907 - DNA, 44 bp, Homo sapiens; identical to SEQ ID NO: 6624
  chr8:126044399-126044443
  hypo

SEQ ID NO: 11908 - DNA, 631 bp, Homo sapiens; identical to SEQ ID NO: 7564
  chr8:128871653-128872284
  hypo

SEQ ID NO: 11909 - DNA, 191 bp, Homo sapiens; identical to SEQ ID NO: 7565
  chr8:128872459-128872650
  hypo

SEQ ID NO: 11910 - DNA, 62 bp, Homo sapiens; identical to SEQ ID NO: 8745
  chr8:128888848-128888910
  hypo

SEQ ID NO: 11911 - DNA, 43 bp, Homo sapiens; identical to SEQ ID NO: 8746
  chr8:128889422-128889465
  hypo

SEQ ID NO: 11912 - DNA, 171 bp, Homo sapiens; identical to SEQ ID NO: 7566
  chr8:134335659-134335830
  hypo

SEQ ID NO: 11913 - DNA, 151 bp, Homo sapiens; identical to SEQ ID NO: 6295
  chr8:140643192-140643343
  hyper

SEQ ID NO: 11914 - DNA, 104 bp, Homo sapiens; identical to SEQ ID NO: 9968
  chr8:141634072-141634176
  hypo

SEQ ID NO: 11915 - DNA, 327 bp, Homo sapiens; identical to SEQ ID NO: 6625
  chr8:142227279-142227606
  hypo

SEQ ID NO: 11916 - DNA, 934 bp, Homo sapiens; identical to SEQ ID NO: 6626
  chr8:142235190-142236124
  hypo

SEQ ID NO: 11917 - DNA, 641 bp, Homo sapiens
  chr8:143386158-143386799
  hypo
cgctgtgagctacggggtagagacgttcctcccaggggggacatggccatacacgcccctggagagcggcatgacggttgagcacagcctcctcctgccagcggtgacaggccctacaacagccccactgactggggtcccgtggcctgggtaaagtcaaagcccccaggtaaacataacaaacttttgaggtaagaggtccccggggcagcccggctggtgtgcccgaggacggagatgtaggagcctgccctcggccctgacagcaaacagccacaggcgagggggctggaggaaatgtgctccctcccacgatgaaatcctccagggcagctaatgcgggcgagtgagatggccaggtggagaaggcaccacaggacgttctgtgcgatgttccctggacttgggggtttcagtgacagctccccaggagctgtgggcagagggtgccaggcacccatggagacctgcctcggatctgtgccttgggattgatgccacctcctgcatgtggagaaggggaagctcaggaggataggggagggcgcaggggtgggaggggggtgcaaacggggttccgtgtggacgcccaggaaagcggccaggctggggtgcgggctgtgtggacacccaggaaggca

SEQ ID NO: 11918 - DNA, 53 bp, Homo sapiens
  chr8:143386940-143386993
  hypo
tgcaggacaaaagccaggggaggaagagatggcttagacgcccgggtccctcc

SEQ ID NO: 11919 - DNA, 66 bp, Homo sapiens; identical to SEQ ID NO: 7574
  chr8:144343416-144343482
  hypo

SEQ ID NO: 11920 - DNA, 228 bp, Homo sapiens; identical to SEQ ID NO: 7575
  chr8:144343992-144344220
  hypo

SEQ ID NO: 11921 - DNA, 231 bp, Homo sapiens; identical to SEQ ID NO: 6627
  chr8:144351704-144351935
  hypo

SEQ ID NO: 11922 - DNA, 207 bp, Homo sapiens; identical to SEQ ID NO: 6628
  chr8:144414283-144414490
  hypo

SEQ ID NO: 11923 - DNA, 139 bp, Homo sapiens
  chr8:144557088-144557227
  hypo
cggccccaggtgtgcgctcgcccgggcgtgtttgccgtacctggcatcatcctttttccaaaagcgaaacatggtgcttgtgagcaactctcccccaccccacagaaaatcaggggccgctcagccacgcgaggtgggc

SEQ ID NO: 11924 - DNA, 48 bp, Homo sapiens; identical to SEQ ID NO: 9972
  chr8:144589930-144589978
  hypo

SEQ ID NO: 11925 - DNA, 220 bp, Homo sapiens; identical to SEQ ID NO: 9973
  chr8:144590082-144590302
  hypo

SEQ ID NO: 11926 - DNA, 121 bp, Homo sapiens; identical to SEQ ID NO: 7580
  chr8:144636569-144636690
  binary

SEQ ID NO: 11927 - DNA, 229 bp, Homo sapiens; identical to SEQ ID NO: 6629
  chr8:21959610-21959839
  hypo

SEQ ID NO: 11928 - DNA, 197 bp, Homo sapiens; identical to SEQ ID NO: 6630
  chr8:23423722-23423919
  hypo

SEQ ID NO: 11929 - DNA, 88 bp, Homo sapiens; identical to SEQ ID NO: 9979
  chr8:25904367-25904455
  hyper

SEQ ID NO: 11930 - DNA, 106 bp, Homo sapiens; identical to SEQ ID NO: 9980
  chr8:26267649-26267755
  hypo

SEQ ID NO: 11931 - DNA, 1497 bp, Homo sapiens
  chr8:29206374-29207871
  binary
cggcggcgggaggcggaggcgcagcgcggcggggggcgcccggaccccacgcgccctgcccgctccctagcccgagggccgcggacccaccctgccctgcaggtgtggcgggcgccaggtccctccagggactcggacagcacgcgatttttccaggatttccgactaccaaatgtgacaagacagtctcgccgccgagagtttcgccagggctcgctaaaatccggcacgcgccgccatcagatagtcgaaaatccgggctgaacaaaaggtgatcattctccgctgcccggatttgcaggcgctagaggaccggttccgcccggcgtcccccagatacccagtccttcagcctcccgctcccagagcctggatctagcccgggacggggattggccaccttccaagctgagcttggagttgggcagcgggaacgcagatacagatcgctctacacagtgtgtgcaacccaatctccctttctgcatttgccagggtcttgttttcagtgaaactggcaaggccaattgtacctcggcgcccacccctcttcaccttttctccacctctgggattctcccggtccggctcagtgtagggccccagcacgccaaaccaacaggcctatcttgtccccacgcgccccgtggtacttggaaactgttcccgggactcaagatggaccgcgcagaggagtcgcttcatcctcgaggctaggaccgttaatgtcaataaacggggcctcgctaggacggtgcggaattgcaggtgaccggagaaacccgtccgcactttccctgaggacttgaacctcgcacttgcacagaaaccttgcaaacccctacacaccaacacacacaaaggggcgcgcggggatccccgcaaccacgaatcacgccggggactccttcccgtgccaataaggcgcaggccgccaagaccccctccatctccccgactccagctagcgcccggagccctcgtttacctttgagcaggcagatgtcggtgcgctcggcgttgcggcgcagcgcctgcaccaccagcgacacggtgctgtcctcgcggaggctctcggcgcgcgggctgcgctcgtcgtagacgatgaccgccgagtagaggccggagcgcaagcgggcgcgtacctcctcctcggcgggcaggatctgctccaggctcacggagcccttagcccgccgccgcacgatggtgttacagcgcacgttgaccgaacctaggatgtagcccgcgctgtgcgccaggaacggtctgcagtccagcagcaggcacttgccgccgctcggcagccccagggtgccgtggctgccgctgccgcccgcgccgccgccattctcgtcccggttcatcagccttttgagcacactgcagtccatctcccgcagctcctccatcgtcaccatggtcgccgggaaccgaggcggctgggcgcgcgaggaagagaagagaacccgggccgcctaggctgcagaaaggggc

SEQ ID NO: 11932 - DNA, 283 bp, Homo sapiens
  chr8:29387050-29387333
  hyper
cgccatccgtcatttctcggcttcctcccacgcgccttcatgcggatgtgtaggtatctcctctccctggctgagtcaagtcactcagagactgaaaagagagagaggatgtggcgtgaagctgaagcctgcacccagggcctggcacctactgggttgggcttggcgctgcgtgcttgcatttccgcggatagaccgagatggcatctgggctgtgacactggctgcccagcttttcttttctttttttccaacagcatctggaagaggctctgggagggtc

SEQ ID NO: 11933 - DNA, 270 bp, Homo sapiens
  chr8:29387367-29387637
  hyper
gtgctgggacgagtgggcggaaacagccgcaggtctctctcttctcttcagcctgaaactcactgcacaaataccagaggttttttttagagattagataaatttgcatccttctccccccaaccccgcccctaagccagaggaagtgcttgaggaagtaatgtgtttaaagaatgtgggggaggggagcttacattaggaagcaggactcttagcgtgtagccagaaaccccaataacctttaagctgttaacccttgaggatacggct

SEQ ID NO: 11934 - DNA, 231 bp, Homo sapiens; identical to SEQ ID NO: 5851
  chr8:33372206-33372437
  binary

SEQ ID NO: 11935 - DNA, 85 bp, Homo sapiens
  chr8:4848968-4849053
  hyper
cgaccgcctccagcctcacgactccgcaaacaggtcacgaattatgccccacgcatcaaaaactctgcgcctgccttcgccacag

SEQ ID NO: 11936 - DNA, 398 bp, Homo sapiens
  chr8:4849835-4850233
  hyper
aagcagccgagctagggccgccgcggtctccacgcagcaacctctgctaattgcgggggaaggcagccggagcgtgcggaactcgagggaaccgagagtgagctcagaggctgagttgcctgcctggaaaggaggaagccccgggcccagttaggcttggagtgcaggggaaagggcgggaagttttgcggagttgcgtggcaggtgtttcctctccacgcaggggctcggctggaaaaagccaggtcctgtcccttgggctcctgccctcaccccgctgcgacacacacgccccagcacacctcacagggcacaaccctcttttccctagactttagctgcctcgccttccaattcccagccagtccagtgctgaccagaggccgctgccagtcggg

SEQ ID NO: 11937 - DNA, 188 bp, Homo sapiens; identical to SEQ ID NO: 6631
  chr8:49571728-49571916
  hypo

SEQ ID NO: 11938 - DNA, 232 bp, Homo sapiens
  chr8:54570292-54570524
  hyper
cgcagctcccacccggcctcccctccgcagagctgggaccgtccccccaccccccatccttgctctgtgggcgccgcctgcactctctgaagcgcgaggctctgcacggtgtggggctggggcctttcgctccccttggctggctctctcctcctttgtcatttgcctttgtttgctgtgtgtgtctggttcaaagggcacgcctaccgagctggatagagtaaaggaagaa

SEQ ID NO: 11939 - DNA, 61 bp, Homo sapiens
  chr8:54570562-54570623
  hyper
cacagactcaaaacaggacaaagcaattagagaaaattatcacgggcggaaggggcggatc

SEQ ID NO: 11940 - DNA, 293 bp, Homo sapiens; identical to SEQ ID NO: 5855
  chr8:61193765-61194058
  binary

SEQ ID NO: 11941 - DNA, 85 bp, Homo sapiens
  chr8:65499649-65499734
  hyper
cgaggagagtgtttgtgctgggacctggcaggactggaggaggaaaggagccgccttccagcaggtccagcatccctaggttgca

SEQ ID NO: 11942 - DNA, 281 bp, Homo sapiens; identical to SEQ ID NO: 6304
  chr8:67025640-67025921
  hyper

SEQ ID NO: 11943 - DNA, 235 bp, Homo sapiens; identical to SEQ ID NO: 6305
  chr8:67026578-67026813
  hyper

SEQ ID NO: 11944 - DNA, 146 bp, Homo sapiens; identical to SEQ ID NO: 6635
  chr8:71447942-71448088
  hypo

SEQ ID NO: 11945 - DNA, 50 bp, Homo sapiens; identical to SEQ ID NO: 6636
  chr8:71448124-71448174
  hypo

SEQ ID NO: 11946 - DNA, 202 bp, Homo sapiens; identical to SEQ ID NO: 6314
  chr9:100610480-100610682
  hyper

SEQ ID NO: 11947 - DNA, 150 bp, Homo sapiens; identical to SEQ ID NO: 10003
  chr9:100849678-100849828
  hypo

SEQ ID NO: 11948 - DNA, 126 bp, Homo sapiens; identical to SEQ ID NO: 6637
  chr9:123176142-123176268
  hypo

SEQ ID NO: 11949 - DNA, 60 bp, Homo sapiens
  chr9:125986796-125986856
  hypo
cgattcatcttttcacgcaactttcacggagcatttactacgtgttctaggcctgtactc

SEQ ID NO: 11950 - DNA, 250 bp, Homo sapiens; identical to SEQ ID NO: 10008
  chr9:126780315-126780565
  hyper

SEQ ID NO: 11951 - DNA, 36 bp, Homo sapiens
  chr9:132643756-132643792
  hypo
cggggcgtgggtggggaaggggctctgggaccagac

SEQ ID NO: 11952 - DNA, 193 bp, Homo sapiens
  chr9:132643821-132644014
  hypo
cagtctttgtagaagcaggtggtggtggaaattccagcaggtgggtcccgcagaggccctgaggcctcacttttcggatcttctgtcccagatcctgctccctccctgctgagcctggggttcccctggcattggccccagccttctgaaagccggcgctgcagccagaggccgcacgctgcactgtcgcgac

SEQ ID NO: 11953 - DNA, 203 bp, Homo sapiens; identical to SEQ ID NO: 6640
  chr9:135781263-135781466
  hypo

SEQ ID NO: 11954 - DNA, 574 bp, Homo sapiens
  chr9:136385211-136385785
  hypo
cgggactggtttgaggctgggtgtgcggacactggggagccggtccttgtccgcaaggcttgtctgcaggggttgaccactcacccatcagcgagacccacatgctcagggctgtcccgtagacactgaaatactccaggatgtcgtgacgcatgaagcacagcacagacaagccgggtccattgcaggcatggtggagctgccagaaaacccacaggtggtcacagcacaaagaggccagagctggtccccgagccacggcccccagagtgccaggtcacttgctggctgtgagaagtcactttggcgagtcacttaatgactgtgtgcctcagtctccccgtctgaaaaatgggggtactgccgagcactcccgcagagggtcctgtggggattaagtggcacatgccagcgaggtgtttaggggctggggtgtgccaagggttcactcaatgtcacctcagcagaattcgctcatctgcactggcaggactgggcggagactgagtggtcactcaggtgaagcccgcttaggtggggcggtctccgggagggaccctacacggctctcccc

SEQ ID NO: 11955 - DNA, 275 bp, Homo sapiens; identical to SEQ ID NO: 7614
  chr9:138660497-138660772
  hypo

SEQ ID NO: 11956 - DNA, 99 bp, Homo sapiens; identical to SEQ ID NO: 6641
  chr9:138743599-138743698
  hypo

SEQ ID NO: 11957 - DNA, 166 bp, Homo sapiens
  chr9:138780870-138781036
  hypo
aggggagaggatcccagagaagagggggctggatagggagaccctctaaatctgtgtcacatcctggccactcctgaagcaactacagtggcacagcagccactctgagggccacagcccacagcccagccagagcggcaggacgaagaccgaaaatgaaacctac

SEQ ID NO: 11958 - DNA, 216 bp, Homo sapiens
  chr9:139106812-139107028
  hypo
cgtgcccccgcagccacagccctgggtgagctgaccgtgtgagaggagtctgaagtgccattcccctgcctcagtggcctggcgacatgctgcctcccatacagcagtacatgcctttgcacacaccggctgggttaacttgttaggcagaccatcggcccctctggcctgtatgggcacagcttacctgtgccaaccagtgcatctgggtgggtc

SEQ ID NO: 11959 - DNA, 265 bp, Homo sapiens; identical to SEQ ID NO: 6642
  chr9:139110897-139111162
  hypo

SEQ ID NO: 11960 - DNA, 81 bp, Homo sapiens; identical to SEQ ID NO: 6643
  chr9:139111384-139111465
  hypo

SEQ ID NO: 11961 - DNA, 174 bp, Homo sapiens
  chr9:139730175-139730349
  hypo
cgtgctccctttctgcagagggagacgctgttgcggcagctggagacgaaccagctggacatggacgccacgctggaggagctgtcggtgcagcaggagacggaggaccagaactacggcatgtatgtggccggacccgcccgtgcgggcggtgtgggggctgcgggcgtggcc

SEQ ID NO: 11962 - DNA, 309 bp, Homo sapiens
  chr9:139803935-139804244
  hypo
cgggcctgaccatagcacatctggggtgccaagccctccgcagcagcatgtcagggtctgtcttggagacgtcccgcatgccgccagccctgcccatccgccaggccctcccaccggcctcgcctcccagcgggagcagcgtttccccatcttcaccggggccgttgtttcacgtggcttccaaatctcctctggtggcttgggtctccctcgcattgccctgagctggcagaacaaacaaagcgttaagatctccgaggctcctgggtggtgctggcaggatcctgcccgggaggagcactgtccttc

SEQ ID NO: 11963 - DNA, 344 bp, Homo sapiens
  chr9:139804283-139804627
  hypo
cgctgcccagcctgagcactgtgtgccgccctccacccgcgcctggcattggcgtccaccctcacactcctgatcccttcttttgaaggcgcaccacgaggtctgccccaagttccccttaacttgtgacggctgcggcaagaagaagatcccccgggagaaggtgagtgtccttcacctccttggaggaccgcagggcggggcccatgtgttggacgtgagggtcccgtgggtgggggtggggcaggttatgacccttgtgcccaaaggaacagcagtgcaaagcccctgtaacgttgggtcatggatgcgttcagggtggcggccgctctcctgagtgggcc

SEQ ID NO: 11964 - DNA, 43 bp, Homo sapiens
  chr9:139809677-139809720
  hypo
cgaaaactacaaaaaaggtgcattctgagacgtcagagggaaa

SEQ ID NO: 11965 - DNA, 37 bp, Homo sapiens
  chr9:139818622-139818659
  hypo
gcagtttgttgtttccatgatttctgagcactggtcc

SEQ ID NO: 11966 - DNA, 1802 bp, Homo sapiens
  chr9:139834961-139836763
  hypo
cgtgaccggccgctcccaagccccgggcgcacaaccacagccaggagcagcccctgccaccactgggccaccgtccagggccccacaggaccagccgaaggtgccccgggccgaggccagctgggtcaggtgtacccctagcctggggttgagtgaggagcggcacccccagtatcctgtgtaccccaagttgcccaggaggccgagggggccttgggctccatctgcactggccaccccgtgccaagcatcacagctgcgtgagcaggtttgtgtgtgagcgtgtggcggggcctggttgtccccttcctaaggcgtaactgctataagcatctccacctctcccgctcgggaaaaagccacagagcctggcgatgtcctcaaggggtcccggtggctccagtgcacccagcacacctcagcgcctctggctggcaagccaggagaagaaggtgcgaggccgtgggcgaggtgcctggaggacgcgcatggtgcgtggggagcgccaggctttgatggtggcgtcgtcgctggccgtgagcagcagctcctgctcctggggactgaagaccactgagttgaccacatcctcgtgccgcagcctggccagacagatgttgtagtggcggtcccagatgtagccgtgccggtcctccgccccgctgcagaacagcgcctgggtgagccggccgcccgcccgctgctgcccacacccgccctgcaccacgccgcgccctgcacctggccacgaagtccctgctgacgtccaggaagatgaagaagcactcgtcgttgggcgtgtaggcgcggtgcgcacgcagagcccgcctcacctcccgcatggtcttgaggtcgaacaccagcaggtcaatctcctccgcgattggtggcggctgcatggggtcggccaccaccgcaccgttgggccaggcgcggctgttcacgtacaggtacctgggcgaggggcactgtgctaggtgtgggccgcctgcgggcaccccgcctgggacactggcaagaggcccacctgttgtcgggcgacaggcccatgccgatgatgtgtccgtgtatgtctatgacgtggtccagcgcgtcgaagaaggcatcggagccccggccctcacccagcacgggccctgccgtggtcatctggtgtggcaggatctgcttgatgcctgcagggagggctacggtgagggtccctgtccaatgccccaaggacatcactccagggcagcttcctacctcagtggtgtctctggggctgtgagcaccacagaggtccgtgggcactgcctgctccgggggccccagacctgaatcaggcccgtcggttgcttgctggccagcggccctgcctgcgtttgttttcactgctcatcccacaggccccaggtctgggcttgtgaccccaggggcgagtgaacgatcccagctttgcctgtggacttgcttgctgtctgcccctcaggacccctgcccggcctcccccaagctcctaggaccgaggcgggcagcatggcggcaggggtgtaccgatctggtgtggggagtaggtgaggcagccagtggtgaagatgaggtacttgctcttggcgcctgtggcactgcgctcgggtggcttggtgtggccctgggccagcagctcggccaccttggtctctagcatgcgctccgacagctgtggctgcgcccgcccctccagcacgcggtccagaaagtgccgcaagccctccttggcgtgggcgggggccgggccagccaccacctcctcgttgtcgctgcccaggtcaaagatgcgg

SEQ ID NO: 11967 - DNA, 594 bp, Homo sapiens
  chr9:139836968-139837562
  hypo
gggcagccccgcccctagccccgcacgcacctggaaggcattgttgagccacagcaccgagcaggaggtgatatctccgatgcggtgcaggttccccgagatgaggctggtctcggtgagccaacagccaaacacgtcatagggcttgttccgcacgcgggacagcagcgcgaaggagtctgtggggaggccggggctggacaggctgtcggcgtggggcgggggcagggtcaacccgccgcccgtgctcacctaggctgatgacagcaatctcgccggatgaggagttgtgcggccccaggaacacccccgaggccagcagtagcgagtcgtccttgttgaactgggagaactgggtgtagctccagttgtagggccgcatgtccgcgctgtgcagcagcgagatggtcaggtcgttgctccagatctgttcggcaggggcggctgtagtgatcgcctggccaggtcgcggggcgggggcctgctactacacagccatgaggccccagctctgccagccctactcagaggccaccagggagcagggaccccttccagccactgtcatccactcggggggcattggtatagagc

SEQ ID NO: 11968 - DNA, 42 bp, Homo sapiens; identical to SEQ ID NO: 6646
  chr9:140166945-140166987
  hypo

SEQ ID NO: 11969 - DNA, 249 bp, Homo sapiens
  chr9:140582119-140582368
  hypo
cgtcacgcgaggacacggcaagaagatggcaggccatgagcccggaaatgagagcctggccacacgctgaatttgccagcaccttgatcttggatttccgagcctccagaacttaaacaaataaatttctgttgggtctgtgccacccacatgaaggcagtttgttataatagcctgaaaggataaagtcagagcacgtcatcgtgtcaccgtcttcacggtgtggtctctgatccttcaacatggggc

SEQ ID NO: 11970 - DNA, 134 bp, Homo sapiens
  chr9:140707377-140707511
  hypo
cggacattttataaatctcatctgtatcacattttcaagtcagctttaaatgttttgtggccttacattttcccttttagcctctttctttctcgggattcagatgtcaccttaaagaacaaggaaggagagac

SEQ ID NO: 11971 - DNA, 58 bp, Homo sapiens
  chr9:140707900-140707958
  hypo
atgccccagcaactacaagtacgtctctcagaactgcgtgacgtcccccatgaacatc

SEQ ID NO: 11972 - DNA, 480 bp, Homo sapiens; identical to SEQ ID NO: 6649
  chr9:140708213-140708693
  hypo

SEQ ID NO: 11973 - DNA, 216 bp, Homo sapiens; identical to SEQ ID NO: 6650
  chr9:140708771-140708987
  hypo

SEQ ID NO: 11974 - DNA, 587 bp, Homo sapiens
  chr9:14348452-14349039
  hyper
ggtggagagaaaacaaggttatttaaagtgactcccagaacgcagctttcgttcctagactctttaggtgtcagtgcttcggctccagtttagcacggcacaggcggcccagcctttgatatttaagccaggccagcgcccgggtgaaactacctgttgggggattctgccgcctggaacccttcttcttctgcgcaatactggcagcagtgggatggctctgggggtgccacgcgaagagagagggcggaagagccgggagcagcggacagtcagctgcatgtggcagtgcctagcgagctgctcccgcgcctctgctcgctctttgaaaactggaaacagccccctgtgctctgtgctgggcccctggctgcggagatgggcccaaactcggcacgattctctaagttcggaaaccacgaagcttgcgccttcatgcgtgtctaacattaaaaacaaaaaaacctcctggcggcttcctgggctcccgcccccaccttgcgctccaacacccggcacttttccctgtaccgaaattcactttactacttcttgaaattcggaaaactccaccgacgcttggactc

SEQ ID NO: 11975 - DNA, 224 bp, Homo sapiens; identical to SEQ ID NO: 6320
  chr9:16133902-16134126
  hyper

SEQ ID NO: 11976 - DNA, 55 bp, Homo sapiens
  chr9:16154771-16154826
  hyper
gtgcggctccgacgccacgctggtgctgcagcagcaagcgccgcgagccagccac

SEQ ID NO: 11977 - DNA, 138 bp, Homo sapiens
  chr9:16192269-16192407
  hyper
cgaggggtggagagagtcgtccccggaattgcatggcttggggcttggtccagattgcgtggcgaggagggtaagcaggcccagcagagggcgccaccgcgctggctctcttctcccgcgcagtgcaggcaacggggc

SEQ ID NO: 11978 - DNA, 97 bp, Homo sapiens; identical to SEQ ID NO: 6321
  chr9:19127135-19127232
  hyper

SEQ ID NO: 11979 - DNA, 72 bp, Homo sapiens; identical to SEQ ID NO: 6322
  chr9:21395928-21396000
  hyper

SEQ ID NO: 11980 - DNA, 36 bp, Homo sapiens; identical to SEQ ID NO: 6323
  chr9:21396327-21396363
  hyper

SEQ ID NO: 11981 - DNA, 170 bp, Homo sapiens
  chr9:2177846-2178016
  hypo
cggccagaggtagatttcttaactagcatatcagccttcagcatgtctctaagcttaaaatataatcaaagctaaagctgacatttatgtaaagtttataatgtatgcagtcaccagtttagagtcatagtatagatgtggaattatacttttggtttgtggaggtaatg

SEQ ID NO: 11982 - DNA, 71 bp, Homo sapiens
  chr9:2178158-2178229
  hypo
catggccacgtcgcggtgtctgttcacttccatgaagaggagaggttcttgtccaccaacacctgtgaacc

SEQ ID NO: 11983 - DNA, 543 bp, Homo sapiens; identical to SEQ ID NO: 6324
  chr9:34701753-34702296
  hyper

SEQ ID NO: 11984 - DNA, 894 bp, Homo sapiens; identical to SEQ ID NO: 6325
  chr9:35756575-35757469
  hyper

SEQ ID NO: 11985 - DNA, 61 bp, Homo sapiens; identical to SEQ ID NO: 10024
  chr9:37118798-37118859
  hypo

SEQ ID NO: 11986 - DNA, 163 bp, Homo sapiens; identical to SEQ ID NO: 10026
  chr9:74640002-74640165
  binary

SEQ ID NO: 11987 - DNA, 545 bp, Homo sapiens
  chr9:93955385-93955930
  binary
cgtgaaacacaacgtgagaatgggaatctgacatatgagtaacccggccgagaggcacctcttggaaatgacactgggccttggctagaattacgcacaggccctgggagggctgcggctcgtaggcccgtagggggcagggtgagggcggaggtcctggcgcccccaggcctgacccgcccgcaccgctgggctatttttagcgtccactaaacttagccgactccaccctcttgaataacccacatcttaaaatgctatttttctccaacaggtcaaaagaattctgcgagttagagcgcagattaagttgctagcgacgggcattgaaggttttagaaccgagaaaatgagccggtggcggggagcgcgtcctcagcggccaggcccggcacggggctcgggcactcggggacacacggtggtcgtcgctgtgtctcagcaggaccctgtgcgctggagagcttggggccgcgagtcgcgcagcaaggaggcttctggcttctctatttttagcctctgaacgttttccaaaataattacca

SEQ ID NO: 11988 - DNA, 268 bp, Homo sapiens; identical to SEQ ID NO: 5859
  chr9:93956177-93956445
  binary

SEQ ID NO: 11989 - DNA, 370 bp, Homo sapiens
  chr9:96069038-96069408
  hypo
cgtttctttttcccttgcagggtctgccctgaagcgtctctgcctaggcaaagaacacagcagtagtaattatccgggttttttcccctttgtcctctctcatcgcatgggctttctcgtggctagcgcacatcagggttcccgcggccgggcgggcgtgggcctgccctgtgcctgccccgcgcctgctccatgcctctcggccgggcactgcttcgcttctgcctggcgggatcgctgtcctcggctcccccgtgtgtctcgtggcgcctagagtttgtgcggtctcgccagttcacatctaacgggcttatccttccccggaacacccgcaaattgccgatcattaattggctccttttccaaaacc

SEQ ID NO: 11990 - DNA, 156 bp, Homo sapiens
  chr9:96720648-96720804
  hyper
cggcggcggcggcggggcctcctctgctcaggcactgccgcgttggcggccgaaaaaagagggtcccagagaaggggaaccccctccctgtcgaggacaccgaggcccagagaggggaagcctcctccccagtggggtgcagtctgggattgcagt

SEQ ID NO: 11991 - DNA, 182 bp, Homo sapiens
  chr9:97865087-97865269
  hypo
gcagcgtggggacgcagagctaagagtaaacgacgtggtgtggaccatgacgttcgctctcctcggccccccctggcagcacacagggcctgcagccggcctgcaacgagcccgccagggtcagtgcagccagcacgggggctccggctgtagcccaggcacgtgccagtgtgtccctgggc

SEQ ID NO: 11992 - DNA, 294 bp, Homo sapiens; identical to SEQ ID NO: 10032
  chr9:97867233-97867527
  hypo

SEQ ID NO: 11993 - DNA, 37 bp, Homo sapiens; identical to SEQ ID NO: 10033
  chr9:97867556-97867593
  hypo

SEQ ID NO: 11994 - DNA, 237 bp, Homo sapiens
  chrY:14532909-14533146
  hyper
cgcctccctccccaagcctctcagctctacgtccccgcccccgtctgtcctccatactgaggcagcctccgtctccccgtgcccactgcgcctggaccacctgtactcctcagcactcggcgcctcggctcggcccacccacccgcaagcgccgctagcctatccctgcgccccgcacccctccccgcctttgcttttgggcaacctctctctgacctccagctcccagcgcctctc

SEQ ID NO: 11995 - DNA, 241 bp, Homo sapiens
  chrY:14533316-14533557
  hyper
cgatcccctgcaccccgctgcagcccccgcacctcttccggcgccctggctgcctctgcccaaagccggcgctgggggcccggagggcagcgattggcctctgtcctgaagcccggccccgcctccgcccagccctggtaggcgcgggtcagctcctcagccctgcagcccctgcccgcaagcccgcgcgcctcctggtgtccagccccagctaccaaggagagagacccaggaaccgcca

SEQ ID NO: 11996 - DNA, 41 bp, Homo sapiens
  chrY:14533613-14533654
  hyper
ttggcggtttctaggtttggacatttaacctttaattggcc

SEQ ID NO: 11997 - DNA, 74 bp, Homo sapiens; identical to SEQ ID NO: 7627
  chrY:16635744-16635818
  hyper

SEQ ID NO: 11998 - DNA, 624 bp, Homo sapiens
  chrY:16636060-16636684
  binary
ggtatcaggtgatccggagccctagtcggtgcccactaagaacaccccttctcccatcgggggttcggaggagtgttaagcctgcgggtctgccagtccctaaggtagggatgggggaggggtctgaggaatccgttccaataggcacaccatccccacagccctagaaaaggcaaccaccacccgctccttcctcccgcaccatcccatctcaaggctctctgctgacccgggccgatttcatctggtctcttctcccccgcttcccacctcccaattcccgcgcagctcggctccgttccctcccactcccctaggcggaactgaaagcgaagatcagccaagagcacagtcggaggcggcagagacggtggcgggtgagctaggggctgtgagacgaagcagggagagagtgaacttcagccccgtcccctccccactgccacggctggggcaacccaacccgcgcctgaagcggcttggcttgacctgcggaagcgcgggccgggatggcgtggggagagggaggtaggtgccactgggctgcagatgacgagtgggttgggggcttgctgtgggacaagaggttcaggttccggcctgcgccttccactccgcggtggc

SEQ ID NO: 11999 - DNA, 90 bp, Homo sapiens; identical to SEQ ID NO: 7629
  chrY:2655227-2655317
  hyper

SEQ ID NO: 12000 - DNA, 596 bp, Homo sapiens; identical to SEQ ID NO: 7630
  chrY:2655346-2655942
  hyper

SEQ ID NO: 12001 - DNA, 52 bp, Homo sapiens
  chrY:4869596-4869648
  hyper
cgcgtagcgataaaacggctcttttttttttcgaggaaagtaatgtaccttt

SEQ ID NO: 12002 - DNA, 49 bp, Homo sapiens
  chrY:4869714-4869763
  hyper
gactttagaagagcggagcggcagtccgcccgggttgcggctgggactc

SEQ ID NO: 12003 - DNA, 246 bp, Homo sapiens
  chrY:7140850-7141096
  hyper
cggttagctgtgcaaggatggctcggcctggtccccctaaaaatgtgtccgttctaacttagaggccgctttggctctcagaaagcccccctgacctgaggactgagggactggagaccgctttcagtcgcagaatcgctgagatccctcaaaacaaaggcgtttccagtttgaccccttgctgctcaatgtgtggttggccaaccgacagcctggggcgccctggttgcgggtcaggggagcagc

SEQ ID NO: 12004 - DNA, 89 bp, Homo sapiens
  AC241851.2_88-34049:15853-15942
  hyper
cgctggcgccccgggctctgctcctgggccgctgcagcctgcatagagcagcgctgcgctcggccgcgttgggagagaagaaggagggc

SEQ ID NO: 12005 - DNA, 205 bp, Homo sapiens
  AEKP01149809.1_1-6354:1345-1550
  hypo
cgtcccgggtacaacaccgtcctgcgtacagagccgtcccggatacagagccgtcctgggtacagagccttcacgggtacagaactgtcctggacacagagccgtcccaggtacagagccgtcccgggtacagagccgtcccgggtacaacaccatcctgcgtacagagccgtcctggatacagagccatcccggatacagagcc

SEQ ID NO: 12006 - DNA, 306 bp, Homo sapiens; identical to SEQ ID NO: 5867
  chr1:108506290-108506596
  hyper

SEQ ID NO: 12007 - DNA, 113 bp, Homo sapiens
  chr1:109204221-109204334
  binary
tcagcctccgctttcatcccagagcagtccacgggggccttaaaggaatgtaggctgggtgaagttggcccagtgacacctgcgttcagaaaaacgttctttccgctcccaac

SEQ ID NO: 12008 - DNA, 122 bp, Homo sapiens
  chr1:109656099-109656221
  hyper
cggcgcttgggaaattgcggctaaggcaaactcctcgcttaaactcggatcaactacagtgtcagggcttctcttctagccggttgtaaaagcacggatggatttggcgggatgtaagatct

SEQ ID NO: 12009 - DNA, 204 bp, Homo sapiens
  chr1:109656291-109656495
  hyper
ctctccatcttctttctctcggttcacacgccacgtgtgcaacatcggagatgctcataaaataacccctggcccgaaagggcagtagaaaacggaaatttgttggctggcttggaggatgcttccactgtgttcttcacacgagccccgggcctgcctgttgggccggttgcgcaccccgggcgcgcgctctcccgcgcccac

SEQ ID NO: 12010 - DNA, 116 bp, Homo sapiens
  chr1:109657070-109657186
  hyper
tttggggatgaggcgtggggggagggaagaggagccagtctggcgtcatgaggaggccagcacattggaggactcacggatagatcatcctcacagattgggatgctgagctcagc

SEQ ID NO: 12011 - DNA, 365 bp, Homo sapiens; identical to SEQ ID NO: 10095
  chr1:110753530-110753895
  binary

SEQ ID NO: 12012 - DNA, 47 bp, Homo sapiens; identical to SEQ ID NO: 10096
  chr1:110753957-110754004
  binary

SEQ ID NO: 12013 - DNA, 53 bp, Homo sapiens
  chr1:11538821-11538874
  binary
tatcaggaaactcggaggcggggctggggggtggtgcctggcccggaccgtct

SEQ ID NO: 12014 - DNA, 35 bp, Homo sapiens
  chr1:115632692-115632727
  hyper
cgccctgagtcctgtgggctgccctcaacccagcc

SEQ ID NO: 12015 - DNA, 121 bp, Homo sapiens
  chr1:15102346-15102467
  hypo
cgggccaccgggtccagtctttacacttgaaggcgtcacaggccctttcctacagcggtcgacacccaggtctcttccacatggaaccaccatagtgagtgtggtcctgcgtgatcactgc

SEQ ID NO: 12016 - DNA, 142 bp, Homo sapiens
  chr1:151801432-151801574
  hyper
cgacagtgtgagactctgtctcaaaaaaaaaaaaaaaaagcctggtgcaggctccctgtctcccttggcagcagcgctgagttcctgagttcctgaggccaccccgcctccgcacacccccctacctctatctccttccttc

SEQ ID NO: 12017 - DNA, 298 bp, Homo sapiens
  chr1:152733117-152733415
  hypo
cgccgctcccagagctgtggcccgcagccctcctggggcgcctcctgccctgagctgaggccacacgtagagccacgtccactcccaagcttctgtccaccacggcgtcttgaccagtgtccagagtcaccactgcagcgatgtccacctcctgctccacgtccacgtctgcgcccagaaccatgcataagtctagaaccacgcccgcgtcctctaccacgacaactttcagaaccttgtttgtatccagaaccacttccagcactacgtccaacaccgcggccagttccccttcctc

SEQ ID NO: 12018 - DNA, 220 bp, Homo sapiens
  chr1:15283890-15284110
  hypo
cgacagacgttaccgagtgcccgtgatgtgtcgcgcagtcactgtttccagcgctgaagacccaacagtgaaggagacgaggcaggatatgcgattgggccccgctctcggatcctgtgtccaccaagcacgccgctggggagcgagtgagcctccacgtcactacggggttttgtccgggttgcctgccgtgctgttgacgctggacaggagcggagcc

SEQ ID NO: 12019 - DNA, 174 bp, Homo sapiens
  chr1:1534828-1535002
  hyper
cgccgtcatggccaccacgatgtcctgcatgccggccggctcggcggtgaactccacgcactcggccggctcgggggtctctggcgcggcggcggcgggcccagcgcgcagcggcagcggctgcaggcacaggcggtagaggacgctgtcgtgcacgtcgggcagcaggtagtc

SEQ ID NO: 12020 - DNA, 383 bp, Homo sapiens
  chr1:15374975-15375358
  hypo
cgagcccacatgagcctaccgttgcccccgcaggagcctcccctccatggccagagccagcgttgatccttggttgttggtcctgggtcgttgatccttggtcgttggtcctgggtcgtcggtcctgggtcgctggtcctgggtcgtcggtcctgggtcgtcggtcctgggtcgtcggtcctgggtcgctggtcctgggtcgttggtcctgggtcgttgatccttggtcgttggtcctgggtcgttggtcatgggtcgtcgatcctgggtcgtcgatcctgggtcgtcgatcctgggtcgttgatccttggtcattggtcctgagtcgttggtcctgggttgttggtgctgggtcgttggtcctgggtcgttggtccttggtc

SEQ ID NO: 12021 - DNA, 245 bp, Homo sapiens
  chr1:154474305-154474550
  binary
cgcaatttgccgccgccgcccccgggcttggcccgctccgacacggtcttcaggttcagggggaactccttgaaccacttggccgccatgagggggccccggccggctcggcccaggagcgtcggggccgtggagcaggcgagcgaggaagcccagcccagacacgcagaggcgccaggggtcggggaccactgcattccccgtgactggggcgctggaggccgcggcgaggccccgcgacggct

SEQ ID NO: 12022 - DNA, 270 bp, Homo sapiens
  chr1:155164146-155164416
  binary
cggacacagaactatcctttggggagcagagtggtattggggacaggtaggcacgtagcggggggcaaaagcacacgtgaggtgcgtaatgcgcgacagccaagaggtgtgtgcggcagcagtgcacgaggggaggaagctatcccaggccgcggcagcacgtggaacttgggtcccgcagtcgcaggctgcgctctaggccgacggaagcagttccgcctgtattcagaaaacagttctcagccccaaagacacaggttggaaagaaca

SEQ ID NO: 12023 - DNA, 594 bp, Homo sapiens
  chr1:155164455-155165049
  binary
tcagatcagcaggcgagagaccaccgctctcgcccgcgcgccgcgcggcgcccgaggcgcagctttgtgtgcggcgagaccctggggcaggcgctgggcggggtggggacatctgacgtcagcgcgcccgggagcgcgggccggggaggcggggagccccccaactcgcaggccggagaaaacacgagtagctaggtgggcggccccaaacctcaactcccggcattgccaagcaacagccattcagttcggttgctgggacacgcgtcaccatggcgacggctccgcgccgcgcagtctgagtacttaaagagcaagcgcgcgcaacgcccgggcgtcggaaagcggccttctgggactccgcaaactcccgttctccctcccccctcccccttgccattccctttgccttccgggcgccaagtctctctggcctccaaggtgaacccaactccccagcgcgccccgggttcccgggtcgggccggcttcaggcggtggggagcgggatcccgggccccgggcgggcgggagggacgggacgcggtgcagtgttgttttttcccccgccaatattgcactcgtcccggcctcc

SEQ ID NO: 12024 - DNA, 43 bp, Homo sapiens; identical to SEQ ID NO: 7658
  chr1:156390054-156390097
  hyper

SEQ ID NO: 12025 - DNA, 48 bp, Homo sapiens
  chr1:158669657-158669705
  hypo
cgtaggtacatgagagtcacactgccaaagaagagcgaaaagacaatg

SEQ ID NO: 12026 - DNA, 58 bp, Homo sapiens
  chr1:158710986-158711044
  hypo
tgtgcagatttgttacacggggattttgcgtgaagctgaggtttggagtacggatctc

SEQ ID NO: 12027 - DNA, 37 bp, Homo sapiens
  chr1:161582198-161582235
  hyper
cgggacatgaggagtgcgggggggaagagaagacggc

SEQ ID NO: 12028 - DNA, 109 bp, Homo sapiens
  chr1:161591364-161591473
  hyper
gtcactggtttcaaatcaacttcaaattttttggagacgtaagagtgctgagcattttttcttcagtgaagtgacttggcagcccaggtcgccaacgcccgtttctgta

SEQ ID NO: 12029 - DNA, 83 bp, Homo sapiens
  chr1:161591546-161591629
  hyper
acttttgtgaaccttgagtttttgaaactttcactgaaaaaaaccgcgtgcgatgctatccgccgggagcgctggagccttgg

SEQ ID NO: 12030 - DNA, 181 bp, Homo sapiens
  chr1:163392854-163393035
  hypo
cgccagtggtattgtggtattgccggcccccacctcccgcacagcggtgcttcacggaattcctgaggcgtactgggagcaccggcacagccgccgccatttcccggcaggggcacatgggagcgacagcgaggcgtcagggccggaagtgtccctgtctttgccctcgttggctactgcg

SEQ ID NO: 12031 - DNA, 35 bp, Homo sapiens
  chr1:163393064-163393099
  hypo
aggcctttggtggctgcgcacgttggggaggggac

SEQ ID NO: 12032 - DNA, 238 bp, Homo sapiens
  chr1:167096217-167096455
  hypo
cggccttggctaagaagagacaacggaggctggagctgctggagagaagccggcagacgctggaggagagccagtctatggcaagctgggaggcggacagctccacggccagcgggagcattcccctgtctgcgttctggtctgcagacccctcagtcagcgctgatggggacacgacgtcagtactgagcacccagagccaccgctcccacctgtctcaggctgcaagcaacatagc

SEQ ID NO: 12033 - DNA, 135 bp, Homo sapiens; identical to SEQ ID NO: 6669
  chr1:171811643-171811778
  hyper

SEQ ID NO: 12034 - DNA, 181 bp, Homo sapiens; identical to SEQ ID NO: 6670
  chr1:175372314-175372495
  hypo

SEQ ID NO: 12035 - DNA, 145 bp, Homo sapiens; identical to SEQ ID NO: 6671
  chr1:175372572-175372717
  hypo

SEQ ID NO: 12036 - DNA, 153 bp, Homo sapiens; identical to SEQ ID NO: 6672
  chr1:175375048-175375201
  hypo

SEQ ID NO: 12037 - DNA, 195 bp, Homo sapiens
  chr1:180123493-180123688
  binary
cgatcctgtggggtcttggtggtcgcagaccaagcgtccctcttctcacatctaattcacaacgtctcatcgctccgcgggagcccaggaactgccctacaacagccgaaatccgggtcgtctattccaacggactcctcttccgttggatacgggggccgtgagaggccaaacaacctccgcgaggctaccccc

SEQ ID NO: 12038 - DNA, 883 bp, Homo sapiens
  chr1:180123700-180124583
  binary
cggcgggcgctccattcctttaccggactgtacacctcgcctcctggggcctgaggcgggaacccgggtcgcgctgctccgaggcctcggcggaccgcgaaaggatggctcaccacccggccagggccagcccctgcaacaagctcagccccgcccgctcccgcgcccaggagcggccggcggggcggggtggctgggccggcctcgggggcgggggctcgggggcgggggctcaggggcggggccacgtggctcctccttgcgggcggaggcaggcggtgccgcggcgccgggacccgactcatccggtgcttgcgtgtggtggtgagcgcagcgccgaggatgaggaggtgcaacagcggctccgggccgccgccgtcgctgctgctgctgctgctgtggctgctcgcggttcccggcgctaacgcggccccgcggtcggcgctctattcgccttccgacccgctgacgctgctgcaggcggacacggtgcgcggcgcggtgctgggctcccgcagcgcctgggccgtggagttcttcgcctcctggtgcggccactgcatcgccttcgccccgacgtggaaggcgctggccgaagacgtcaaaggtgagaagcgggggcggcccgctcccccgtgccccgccgcccggacccctccacctgcccggtgggcagcctcctactccgggagcgcgtccctcttccagtcacctccgcccacctcttcctctccgcgcatcccacgcccaccaccttcatgtttctcagctccatttttgcctcccgctcccttgccttttcctcttggccctcatcccgagcttctttccctctccgcggcctgggcccccagacctgccctgctcgcccggttcgtccccc

SEQ ID NO: 12039 - DNA, 1580 bp, Homo sapiens
  chr1:180199369-180200949
  hyper
cgggcgggggagggaagaggaaaaaagccagagctgcagcaacagcgtctcaacctgggatgtgcaccaaccccggagagcgagatcaaagggactggaaacagactggggactggcggggggagggggccggccagcctgtggagtcctccctgagaagcggagggcccggcttccaccgtgactccagcggcctgcttggggttttaattattattttgaaatttctgaatcgagctagagcgagagagcgagagatctccgtagactgcgactcgctggctttcgctccgagatgatgcagagtgcgactgtccccgcggaaggggctgtcaaggggctcccggagatgctaggtgtgccgatgcaacgtaagacacccccctttctcgctgatttaattctaacaagacagctagcagcctcagccgctgcggggcgggccggacgccgctcaggggccgggaggggctggcggccggggcgcagaggcggtcacagggcaggggcaccagccagagtgcgtttgagggggccaggctcttggctgtttggggccgaatgtgaacgcctcctggatcatgcttgaggcgagccgagtaccgaaccccgcatctccagcccaaggcttttcttggaacgctggggagagtgctgtttggggacacccaggggtacgagctgtaggccaggcctgagggcgagggtggtccccacaaatcttctttcgccggcgtgacggtcagcgcttgcaggaccgctagtgcaacttcaccccagctggcgggaagttggagagcgcgtctctcgcccctggggctggcggcggagaagccccggccacactcttagtccctgcggcccgcgccccgggcgtgcgtgccgggtgagtccccagccgctactgcccgcggcgcccgccgcgtgcgccgcgggaaactgactgctccttgtgagggaatctgctcgcgcattccagctagcctaggaatgcaggggagggagaagcgaccgcaagttgtgaattccgggttcagcctttgcgcacgcgagggcaggtgctcagggtggctcgggtttggaggggtagagacgggggtgtgtgggagctttgctagcctgcccgcccgctttcttcccgcgcccgaaattagcgagacagccggagctcgcggcgtgtttatccccaagtctctctctgtgtgtatgggtgtgcgcgcgcagagattttcccgaagggaatccgtctctgtgcttcactcctgagcgagagtccccgagagggaatctgtgcagaggccagaacaggtgcccagtcgtcgcgcgcgcgcgcgcgcgcgcgcgacaagcgccgggagagtcctgcccctgtggcttgcacgctcagcagggcgccccgggcaccctggagagaccaaggagttcctcgctccgcttgccaaggggttgtacttccgcctgcgacttctttagtggtgcggtagctacatcttcggggtttactttaagtaagggccggctcatccagggatggtgactacctacaaactagggcgcacgagcgcgccctcctgcgcctc

SEQ ID NO: 12040 - DNA, 226 bp, Homo sapiens
  chr1:181382621-181382847
  hypo
cggcgcgggggcctcatcgagcagcgcgacatcatcaaggcccacgaggcgcacaagatgcagagcaccccgcaggcccggcgcaaggaatgggagtgagtatggcggggacgcgggggcgggcatggctggctgggcctgaggtcggggtgggttcctggagcggatgggccccgtgaggccgccctggagggtcgggagatgctttcgctgtgctgcgactaac

SEQ ID NO: 12041 - DNA, 203 bp, Homo sapiens
  chr1:181767556-181767759
  hypo
cgacacgcgggcagcatctctccacctgctgatggaagcgaggagggctccccgctgacctcccaagctctggagagcaacaatgcttgcctgaccgagtcttccaactctccgcacccccagcagagccaacatgcctccccacagcgctacatctccgagccctacttggccctgcacgaagactcccacgcctcagactg

SEQ ID NO: 12042 - DNA, 85 bp, Homo sapiens
  chr1:181767807-181767892
  hypo
gggccgttccaacaccatcggctcagccccacccctgcggcatagctggcagatgcccaacgggcactatcggcggcggaggcgc

SEQ ID NO: 12043 - DNA, 360 bp, Homo sapiens
  chr1:184943416-184943776
  hyper
cgggcgggcgggcgtacctcggatgtaagcgcacttgccctcgtccagctggctggaggctgagccgcccatgaccgcgagctgcctgtgctgagcgcggaaactgcccggtccgcgcccgctgctagctcctggaggttgatccgacggcgaacccggctctgaaattaagagcaaacttccttcgagaggcgagagacaggaggcaagaggcgtcgccttctggggcgcctcctccaggtccgcgccttctgatgatccgtgggccggcccgggggctgtcttcccgccctcgcctagctggtgagctccgacgggctggcaaccgaggaggtcggccagctcctcctcctcgcccac

SEQ ID NO: 12044 - DNA, 51 bp, Homo sapiens
  chr1:197882002-197882053
  hyper
cgcgctcctgaccctccggggagctgctgggggtgtctctttcttggaagg

SEQ ID NO: 12045 - DNA, 220 bp, Homo sapiens
  chr1:197882208-197882428
  hyper
tatttctgcagagctgagggcaggcggcgcaacaaatctcaggtaaaagagcatcagatttcagaagagctgtattctagacttggcgcaggcccctttggggagaagagcccaggggctatagagaacagaggtttgaaggaagcaaaagctggcgagaggttttttttttgtcgcgaagggtgagggtaggcagagaacgcgcgaaagggcagggcct

SEQ ID NO: 12046 - DNA, 261 bp, Homo sapiens
  chr1:197882611-197882872
  hyper
gtatggatctgccaacctcagtgtagggggaaattttccacatggagtatctcagtctccactgtctggagaaaggccccagcgtgtcccggcaatccgctcaccttccatccagcgcagcccgggcatccagggccaggtggcgcggcactgaacgcatggttcccagcctcaggctgacgctgacgtttcactgggccttgggtgctcaggacagtgccagacgctggatactgttttaagagccgcgcctttcaaacc

SEQ ID NO: 12047 - DNA, 61 bp, Homo sapiens
  chr1:205425836-205425897
  binary
acacatatgcaggcatttgcacacacgcgcgcacacacatgcacgcacatgcacacacaca

SEQ ID NO: 12048 - DNA, 455 bp, Homo sapiens
  chr1:205425997-205426452
  binary
gtctctcttctctcttttgcagccccccagccccggggccggcgtgcccggcccaccccgccctccgcgccccccgacggccgcggtcagccggcattccggagcagcgcgtcggagctgcaacttcgcgcctaagcgcccgcacctcgcagcccggcgggcgggagacaaaagctgcggcgccgccgccggaggccgcgcggccaaggtgtgttcgctaattgtcaggaaatgtgtgtgtgtgcggccgggagcccgcaggggcgggggaggggacggaggaagaggagacccacccctcctacccccgccactcgccagcgccgggtacccgaaccgggattagagaataaattatctgctctcttctcattgggctgtggctgaggacgccgtcggcggcgccgggctgggagctctcccggctctttgcattcaccgcacagctccggctc

SEQ ID NO: 12049 - DNA, 258 bp, Homo sapiens
  chr1:212873467-212873725
  binary
cggagggaacgcgaagcccacccacgcgaggcgacgcccgggggggtggggaccaggggggcgccatgcagcctttggggtccttcggcggctgccggggaactcaggttgagaaacacagtgggtgttttggggtcggtgttttttcccggtcccatcgcggcatcttcctgcgcctcagccacgccctgcgtccgccccccggcgcgggggtcacagtcccgggggactttctccgcggcgatcagtcatccgggc

SEQ ID NO: 12050 - DNA, 225 bp, Homo sapiens
  chr1:212873750-212873975
  binary
cgaagccgcggctctggggtgaagacgccggcttcaccgagtcccaccgcgcaccccgagccacgggcgccccagggactctgcagggagtgcctgcccttcccgtctcgggtccgccgggctgtgggagggaacgaggcggggcggccccgagggtgaattcccggagcggagggtgggcatggggaggatgtcccggacaaaaacggtgacgggcttccctga

SEQ ID NO: 12051 - DNA, 235 bp, Homo sapiens
  chr1:224803483-224803718
  hyper
ttgcagggtctgggagcagagcagtaaacgcagccctaagcactgagtatgctacagtttggtaaaatccatccaagcagctttgggatccaaggcttgcactgtatccccaaccaacactaggcaacgccccaagtccccacacttcccactccgataggcgaaactgcaagaaccgggaggggcggctgcggcgtttaggcgcgaggcacacaccatacccttccgcagcttc

SEQ ID NO: 12052 - DNA, 311 bp, Homo sapiens
  chr1:226827405-226827716
  hypo
cgggcagaaactgttctcacccacccaacaccacagagcaggcgagccccatctgaacctggggcagggccagtggaggcacccaggtgtccacgtatggcgcatggaggtggcgtgcacagcagaggggagcctgccctgtgcccagacacaggagaacgcagagggtggcgctgacatccccaggcgagtgaacagtggtaggaaaggcccggaggtgtgaagggcatccaggctgaggatggaggagcatgacccggggctggcctgtcctgggtgcaacagcagggccaagagagagggtcggcctc

SEQ ID NO: 12053 - DNA, 358 bp, Homo sapiens
  chr1:226829392-226829750
  hypo
agctgggcagggctagaagccactctgctctgaggcctgagccccctacacagccatcccgcctgaggaataggctgatgtctccaaatgtctggccttggggcgggccacccacattctgagcctgtgcctggagaagcttacagcttccaaagggcgctgagagaagccaagccccctgaggtgggcacgggtggggcccgaggctgccctcactcgccggcctcaccttgattccctcgatcctgaaccccagggtggccgtggagctgatggtctcccgccactgcatgtaccgtggcttggtcacagcccgctgtgctttttcctcctcggtgggggcctcggggtccacctc

SEQ ID NO: 12054 - DNA, 1207 bp, Homo sapiens
  chr1:226925659-226926866
  binary
cgaggtccaagtccttggctcctaagtatgctgtgtgcggggcgcggctgactcagctctcccgggctgaggacaccccagccaccgtctccgggtctccccagcctgagcaaacattggctatccagggcaacccggcagccctcgccctgggcttcagggtctccctgctccaccctctcggggcatcagagaccgaccggctcggagggaacctaagcgggacctgccttgcccgagccgctgccagcgcccggatctgggagggcgcccgcgtgcccgccgtttaccttcctgaccctagccttggggctgtgtctctcggcctacgaaggcctgggcgggcagcggggccgcagccgaagcatttttcagggctagccttgtcgcctatccctagacaagtgttttgtgagtgtgggcgcaccgaggttctacacgttctctttaccggaaccagtacttgctgcccccctgccgtcgtcccctatgggggggtgtctgtgagtgtgtgtgtatacacgcgtgtgtgtatacgccgcacgcgcgcggagcgagtccgctctcagcgcgccctgttgccgaggacgcgactgcccctgcgggctcccggacccgcgcccactcggaggaacttaggggcgtgcatggctgcagccgggcagcagccctaggtgcacagagcctctagctctgcaaacctcccaggagccggcgctctaacaccccagggcagcgccgcggagcgcagggcttctccgcatcccgggcagcctcgcccggcgccagcagagccgccccgagaccccagcctggggactcctggagcgcgctgagggaggcggcgcggagtgagcggcccggaaggcgggtaggagaaatgcggagacctcgtctctccctattttctccccaccgccactccatgtcaccctccaaaatcaaacccccttccctgcctccccagcccacccctttgccctgtttcggaaccaggaacgccgagattcgctccagagcagaaagtgagggaaaagagggttgttcagaggcgagagccattaaaaggccgccaaacttacctgcagtttctcagattctcaggtcctgtgtagactacatgcccagaggcgcaaacctcgtagggacgagatggctttaaaagtaaaaatgctcagaaattattttctcacaagctatggaagac

SEQ ID NO: 12055 - DNA, 49 bp, Homo sapiens
  chr1:226926951-226927000
  binary
gcacgcccttttcgaccgtggagatactgcccctgtcagtgtctgctcc

SEQ ID NO: 12056 - DNA, 46 bp, Homo sapiens; identical to SEQ ID NO: 7693
  chr1:228083620-228083666
  hypo

SEQ ID NO: 12057 - DNA, 162 bp, Homo sapiens
  chr1:228111872-228112034
  hypo
cgggctcgcagatccttgcttgaccgtctgcccaggaattccttgacgaacttgctgctgtacttaaggttgtctccgcagcccccccactgccaggcctcacggttctccaggtcgggtgcctcatcgcaggtacagcgctccatgcggcccgcgctgcac

SEQ ID NO: 12058 - DNA, 217 bp, Homo sapiens
  chr1:228459748-228459965
  hypo
cggaggttatgtggtacaaggacgggaagaagctgagctccagctcgaaaatgcgtgtggaggccgtgggctgcacacggaggctggtggtgcaggaggcaggccaggcggacgccggggagtacagctgcgaggctgggggccagcggctctccttccatctgcatgtggctggtgggtgccagggttaggcaaaatggaggtgatgctgagtgtc

SEQ ID NO: 12059 - DNA, 829 bp, Homo sapiens; identical to SEQ ID NO: 6689
  chr1:228461610-228462439
  hypo

SEQ ID NO: 12060 - DNA, 200 bp, Homo sapiens
  chr1:228473703-228473903
  hypo
cgtctgtcctggggagcactgctggccaagcctgcccaggacggtggggcccctgagcagtctgtgcctttgcaggccggagagtgcacatcatcgaggacctggaggatgtggatgtgcaggagggctcctcggccaccttccgttgccggatctccccggccaactacgagcctgtgcactggttcctggacaagaca

SEQ ID NO: 12061 - DNA, 110 bp, Homo sapiens
  chr1:228473932-228474042
  hypo
cgatgcccagcccgggggctaccacgtgctgaccctgcggcagctggcgctcaaggactcgggcaccatctactttgaggcgggtgaccagcgggcctcggccgccctgc

SEQ ID NO: 12062 - DNA, 500 bp, Homo sapiens
  chr1:244013722-244014222
  hyper
cgctcgggcgggggccgggtcacgccggcggggcggcggctctgggccccggggcgcgcccggcgcggggaggggttctgcggcctcctcccgggctgcgcctcgctgaggggaccccccgccgcctccccgccccctccttcctcccgctcggggccgccgccgatcggttctcgccgtcgccgcggggcttgttgttgactttgaggaaaactcctgacgtcaggggctggctctcggcgactggcgggagcggcttccccgcgtccccggccctgcccgccgcctctgctcccctccctgcccggccctcgtcctcaggcttccccgcgcccccaaaccagcggtgccccgcgccccctctcctctcgcgagaacatccccctagccagccagagccgggagcgggggcagtcgctcccgggcgggaagttctgggtttccccctcgcccgcgtggcccttggcgggcacccgaggcccgggagcggaggctcctcg

SEQ ID NO: 12063 - DNA, 248 bp, Homo sapiens
  chr1:247614695-247614943
  hypo
cggtgtcagcacacgacagcttgatcacggccggcacctcacagaaaaagttgttcagcacctgccgcccgcagaatggcaattgcaccgtcaggaccacctgcacgaaggagttgccgaagccactgagccaggccagagccacgagctgctgacagagagcacggtgcatgagaacggcatagtgcaggggcttgcagatggccacgtagcggtccagggccatggcggccaggacgatgcactcc

SEQ ID NO: 12064 - DNA, 124 bp, Homo sapiens
  chr1:248074927-248075051
  hypo
atacaattcccactatcgaagggggtgtacccccctgttgtattgttcctgatatccagggcgtgaggaaatgatatcactcttaatatcgcagggtgtgtacaccctcacgttgataatgttc

SEQ ID NO: 12065 - DNA, 332 bp, Homo sapiens
  chr1:248099374-248099706
  hypo
cggggtgcagaagagtctcagccagagtgatgtgctgggcagcgtccaattttaccaccctccgcatcaggtcaaacagctgcacgtgctccagagagtcttggagcatgtcactcttcagacgtttgcagttcttcacatatgggctgtcagagctgttctcatcccaaactaggccccatttgtagaaatatttctgcttcttggtacaggagatcacgcgtaatgggatgagccgtagggtcttcaacatcaccaggcgctcttggttttcacaggtctggaagagtgtgaaacctggtagtacttaaagagaaggtagcccatgccct

SEQ ID NO: 12066 - DNA, 399 bp, Homo sapiens
  chr1:248469372-248469771
  hypo
cgaggtggatctgtcggttggaaactagtttctaaaacgccttctgttccgcatgcgtttattctcttcttctgcacagaatttgctccgtggtgagcctggagatgtctctggatggggacagctccattcccagctacttctgcggggctggtggcgcagagatgggcgcaaaggctgaaagtcgcaagtcctgtgcttctggagttcaaatgcttcctttccagcgggtctccttgcgccatggggccgtgctggggtgaatctggggaaaacaacaggagagggaggccagggaacgcagggatggagggagcctaaccacggactcagacggagccaggcgggtcgcgggtgctggagccgcctgaggactggaaccccctgaggacaggagcc

SEQ ID NO: 12067 - DNA, 321 bp, Homo sapiens
  chr1:25255291-25255612
  binary
cggcctcagcttccagccacctcgggcagcaccacccccagccgccggcccttcctgccctgcccttttctcacggcagctgtgagaggtttaggggaaaaccgaggcgttttcgtttcatctcgctgcccccttaaaaaaatgaaaatgaaacagtcgcctactccctggcataaagaaaaaggtcctctaaatggctgggggctgccagggttaggggtcccccaatctcaactcgccattcgggacgcataatatccccgagcaaacgtctggagagcagtgccccgatcccggcctagcgccgtccggtaaaatttc

SEQ ID NO: 12068 - DNA, 89 bp, Homo sapiens
  chr1:2999275-2999364
  hypo
cgcagcaaggagaggtggggtgcgcttcatctcagctgccccagggctgagctcagctttgcccgctttgtgcggagtccaccgagggg

SEQ ID NO: 12069 - DNA, 33 bp, Homo sapiens
  chr1:2999791-2999824
  hypo
cgcaggggtcgggtctcctggctgcgccccacc

SEQ ID NO: 12070 - DNA, 83 bp, Homo sapiens
  chr1:2999864-2999947
  hypo
ctccccatcatagccctgtcctggactgggcggcgcgctcatttcaaggcagtgcggccatctgggctgggcctggcgctggc

SEQ ID NO: 12071 - DNA, 304 bp, Homo sapiens
  chr1:3052594-3052898
  hypo
cgctttgtccgggagccacaggacaccaggctggggcggggctgggggcagaacgctcctccagcagcctaggagccacccctgggaagaaagggggtctcgggcagcctcgccatgggaccaccagctttgggccttcgttacaggggtgatgctgccccgctgatagggttgggggcctggggctgcagcgtagctgaagtggaacctgcccagcctgcacttcccagctggccagccccgcgcgatgctccggggtctcggcgaggcacgccaggcactgagtcctcagacccgctgtccg

SEQ ID NO: 12072 - DNA, 40 bp, Homo sapiens
  chr1:3052927-3052967
  hypo
cgaggcagtggaggcccagaaagatggaccgacagtcccc

SEQ ID NO: 12073 - DNA, 120 bp, Homo sapiens; identical to SEQ ID NO: 6703
  chr1:3111118-3111238
  hypo

SEQ ID NO: 12074 - DNA, 326 bp, Homo sapiens; identical to SEQ ID NO: 6704
  chr1:3111463-3111789
  hypo

SEQ ID NO: 12075 - DNA, 164 bp, Homo sapiens
  chr1:3193780-3193944
  hypo
cgtggccggccccatgcctctctgtgcacggctggatcttgcaaacagtcgagtcctggctgctgcgccacccggggatggcatcgtctgtcacacgcttcactctccctgtggcgcactggcatccaccatgcccacctcagaggccaggaggcacgtcagcc

SEQ ID NO: 12076 - DNA, 130 bp, Homo sapiens; identical to SEQ ID NO: 6707
  chr1:32410105-32410235
  hyper

SEQ ID NO: 12077 - DNA, 300 bp, Homo sapiens
  chr1:32930159-32930459
  hyper
agaaaccgcgggtatgcaataaaaacctgttgaatcgattaaaccatttcccttatttccagatttttgcggaaagcgccagtaggtgaaatatgtgcggactgatgagtcaaagctcttattccctggactgcattaatacccacgacgtgcttttcgctctccagacaaagagaccggtacttggcaggtccctcaagtgggactcaaaagaccgaaccgagctgcagcctttcgctagcactggtcctcgccccttttggcatcttggtacttgtagttttgtccactctatcttta

SEQ ID NO: 12078 - DNA, 62 bp, Homo sapiens
  chr1:32930558-32930620
  hyper
tgctggccgaagggcccgccttcccgaggccaggcgctcccgcgattggccagccgccccgc

SEQ ID NO: 12079 - DNA, 859 bp, Homo sapiens
  chr1:3321132-3321991
  hypo
cggccacggcagagaggaggtgggcagggagacaccagcatgtgctctgatccctcggcagcgtggtgggggctccgaaggggcactgggaacaagctgtatggttggggtcccctcccgggcagagggcaggtagtcgggccccgcagtgagcctcgtcctctgcgcagcctggagcagcacatggtcatccacacggaggagcgcgagtacaaatgcgaccagtgtcccaaggccttcaactggaagtccaacctcatccgccaccagatgtcccacgacagcggcaaacgcttcgaatgtgaaaactgcgtgaaggtaacctgcggggcggccccgtctcagccccggggcagcaggaggctgcagacgggcgcccgcccccgtgctccctacaccccctggtccaaatgtagatggagtgcggcagagtgggtaggaggcccctgcggtggctcgggcccttccgtgtgactaggaaggaaaggaagtctcagggaagaccgtgtcccccaggtcagaaggatcagggccgagaccagaacccaggcccctccagagcgcggctcctgtcctcccgccggtgtggaaggaagaggctggcggggctgagccgagcctccaccccgagcccgccagggtctcagcaccacagctgaaaacgctttctgcagccctgtctcacgcagcctcagttcaggaattgttcttgaggaaagcagccggggaggctctgcggctcacttaaggccctgcagcgggtccttgctacacagagacctgtcccggcctgcttggtgcagactgcaacgtggcaagagagacaggcagggccctgccccccacagccggttggtcc

SEQ ID NO: 12080 - DNA, 179 bp, Homo sapiens; identical to SEQ ID NO: 10129
  chr1:33219389-33219568
  hyper

SEQ ID NO: 12081 - DNA, 307 bp, Homo sapiens; identical to SEQ ID NO: 10130
  chr1:33219596-33219903
  hyper

SEQ ID NO: 12082 - DNA, 238 bp, Homo sapiens
  chr1:3343487-3343725
  hypo
cgtgcactcatgcacacacgtgtacataacatgtgcgtgcataaacatgcctgcctagatctacacacacgcatatgcacacatgcaagtacatgcacatggacagtgtgtgcacatacacatgcgtgacggacagccgtgtgcgtacacctagagacacatgtacacgcatgggcgcacgtgcgtctagacacacagcagcagaacgatggtggaattcggatccaggaatgtcggc

SEQ ID NO: 12083 - DNA, 384 bp, Homo sapiens
  chr1:39956953-39957337
  binary
cgtgtcgggcccggtggcgaccacggcacaccacggcgaggcagccgggtggcaccactggcgggaccgggacggcgccgcggccttaggatctctgcgccgaggcccgcggcgggagccacgacggccctgaccacgctgacgcccaggctgcgggctcctcgcccggaccaaccgccagccacgccgaggtcgcacctcggggtcgccccacccgcaacacctgccgccgcccggggctcctagcgggcgcggcctccgcgcccaggccccgcccccgcgcccccattggtcagtcccgggggtgggcgggcggcacagacggctgagccggggcaaggactcgcgggaatcgcgccgcccgggtcgctgccggagctcgcc

SEQ ID NO: 12084 - DNA, 214 bp, Homo sapiens
  chr1:4037053-4037267
  hypo
cgtcttggaggacgcgggaggaaagcacgcccagcggacaggagccatcacgcggctgcgggctgctgctgagaacctggcgtgggccaccgtcgtcagcagcgtggaggtaactgacgaccttggccaagaagttgggtggcagcgtggaggtcatgctcagagtgagtgggcgcaagagacggtggcgggagagggagtggagatcataggc

SEQ ID NO: 12085 - DNA, 913 bp, Homo sapiens; identical to SEQ ID NO: 5881
  chr1:43389625-43390538
  hyper

SEQ ID NO: 12086 - DNA, 339 bp, Homo sapiens
  chr1:4673912-4674251
  hypo
cgggcaagcctccccatgaagagacgatccaggtgcgacacaggaggtgcaaacacagcgacatgcattcccgcgtttaaaacacatgctccgccgggcatgcggacgagagcatctgcctggctcgggtgtggcagaggggcaggatctccaggagtgaccaggctctacggaggacggagggccctgagggcagctggggagggcaggcatgggggaaaagggacaatgtgagttaagccctctgagtgggaaacagtgactcgttgtaggagtgtgtccggtctgcagctgggactgaggacttcctaggctgcaggggagaggcggcgtgaccac

SEQ ID NO: 12087 - DNA, 896 bp, Homo sapiens
  chr1:6052426-6053322
  binary
cgaggactggccgaggggcgcgccccgtccgctgccacccgcgggaggagcctcggaaggcggcgcaccgcgccgcacactcagtccaagaacccgcctcgcgtcactgtcgccgtcagggccgcggagccaatcagagcccaagtcgagggctgcgctttgcgagcgccagccaatcggtgcggcggcgggcccatcctgatttgcatgtccgacgacccctcaaccaatggtaatgtgactggcgtgaacaatagccaatcagaagctggaagaggcgtggccccgggcgtcccacgaggtgaagatgctgctggcggaacctgcaggagctagcgggattcgggggcgctaaagtcgcaggggcagggcgggaaggaagatccggcgcggggcacaggatccggagctggagcccccaggtgagtaccggggagaccccggcggggcgcgctttccaccaagctgctccgggacggcggcggcgggtatccgcgaggcccgcgctgcggcaggcgccgcggtcccgtctccatctcttcttccccggccctgcgtccctgcctccgccgctgtctcacctcctctccagcctcctcacctccttctccatcgtctcccttcccccatccctttctgtctttccttccctgtcctcccgcccgcccgacccttcagctcgcatccctgacccctgcccctgccgccgtccctcttcccggtgcacctcttccccatctctgcccgctccggtcctagcagcctcgccctcccctttcctccatcctcctctcatcccctctcccggcctctgcgcagccccaccggggcgctgctgttcccggtcctccccatctctcctcctgatcgcttctcaaggctcatccgtcgttctc

SEQ ID NO: 12088 - DNA, 224 bp, Homo sapiens
  chr1:6240708-6240932
  hyper
ccccaagggcgcggaggcagggtcttcagggcagcgcgcggcccgctcccccactcggttcacaggcgccgggacccaccccgctcccggctccggcctcggcacgttcctaaccccctctccaaagaggattagaagaaaaatgtgttccacacttggggaaaagacgctctggagactgtgggtctgatttacagcagaaaaatccgcgcaggcgggctccc

SEQ ID NO: 12089 - DNA, 280 bp, Homo sapiens
  chr1:6241264-6241544
  hyper
cccagaaggcccgtgaagggagggccccctctcactgcctcgcaggggcactgggggaacccacctgagacacgcaggatcggcagcagtttcccttcttcccgttcaattttattgccagcaaaccccaaacaaaagaccctctgcattcatccctgggcaaggagaggtcggtccagccttctggaaccaaagactggggtgttgggaacccctccatctcccagatccgctttaactacgctgtagatagagaagccgggtcagcccagtgctggcc

SEQ ID NO: 12090 - DNA, 220 bp, Homo sapiens; identical to SEQ ID NO: 7736
  chr1:6479997-6480217
  hyper

SEQ ID NO: 12091 - DNA, 61 bp, Homo sapiens; identical to SEQ ID NO: 7738
  chr1:66999412-66999473
  hyper

SEQ ID NO: 12092 - DNA, 36 bp, Homo sapiens; identical to SEQ ID NO: 7739
  chr1:66999673-66999709
  hyper

SEQ ID NO: 12093 - DNA, 47 bp, Homo sapiens
  chr1:67773780-67773827
  binary
tatatatatatgtatatatatatttttaaagtcttccaatacgatcc

SEQ ID NO: 12094 - DNA, 801 bp, Homo sapiens
  chr1:85462482-85463283
  binary
cggttaacctgaaaacacctgatcctctctccggaatccttgcctggggaaaacgataaggctgccgggccatgcctcctccttcaaaactttccagggctctcgggattcggaacaggaaacaccgttcacggccgactcatttcgccctcgccgtaacgcgtccgccgaagttggagccctgcaaagcggggttcccttctcttaccctttctgccggccgcgtggtgcgcgcagaccccggcccgagagcaggcgccgcagtcgtggagtgcggcgggcagttctcgggcggctgaaaggcggctctgtgtgcaccctgcaggatgcggcgcgtggccaggcgctcccgccccgcccccaaggggctgccccgccccgccccgccccgccgcctcctaccggggaccggagcttccccagttggggtcctaggggacttattccacgcttcagcggaccagcctccccgcgctcccggagaagggggtcggcgacgcggaggcggggtgggggccgtaggggatggaaccgaggcgcgcgcgagaagagccgaggaagtaagcagtcccaaaagggggcggcggtggggcccccagggaggcgtggggcacgccaagggcgccgtggggcactgacctgtggtgcggcccccaggacaggcccgaggcgcggttgcacaccggcaggtccagcacctccatgcctcgaggcatggcgcggccagggagcggcaggaggacacctagcgtgggacggctacacctgtctgggcgcaggcccgccgcccttgcactctcc

SEQ ID NO: 12095 - DNA, 1156 bp, Homo sapiens
  chr1:90098160-90099316
  binary
cggaggagttcccagaagggctatttttagtggtggctgctcccctctaacttacccaggggaggagctgcggtggctgagccgacgctgcgcgcacagccgcctgtggttttccgcgcattgtgagggatgaggggtggaggtggtattagacgcagccgaatcctccctcagagtccgccaggtgggcgtctcaggggtgggagtggccgcgtcgtgaagcggagagaggatttctctcctggtcctggagaaggcccccggcggccggcggcatccctcgctggcgagtcccgggagcgaggtggtctctgcaggggaggaagttcccgggcggcgcggcctgcgtcacagcggggctggcaccgcggagtcgactcggcgggcggtggcgaccccggggccgggcgctgggcggcgctggctgccgctagccgggctgcgtgcggggcggcgctggaggcggctccgtccgcggccggggaggcggaggggaggagggcttgcggggctggggcgttagctgcgtcccggctggaagcccgcgaagagaagtaggaggaaggcgccgccgtggccgcggccgcagtgctcgggcgcgacaagccatgagcagcgaccccgcgggcgacgccgccgtccctggcagccgctgagcccgacccccaggcagctcgccgctccctagcaccttctccagtcgacactctcgcgcccggaggtaagggcgggggatccgcggagggatggagaggggcagcccgcagagggccacccgctcggtccgctgtgcgcgccggaccgggactcgccccgcctcactcgcgtccttgcttccccccggctctcagacaggcagaatgtggttgcccgcccggcgtgtggtgctgggaaccttccgctactgcggctcaggagcccgccaacccctaccccacccaatccgcgctagcccgagcggccgcgcgaggatctcagcctggcgcccaacgccgcgccgcagcggcaggtcctgcagactgggcgcgggggtgggggggcggtccgcgaggggaaatgcgtccgtggccggggcgatcgttgttctttcctacctcgaaaatctctgagaccccggggccagtcctttccggtctatcacccccctgccacctcc

SEQ ID NO: 12096 - DNA, 81 bp, Homo sapiens
  chr1:91869781-91869862
  hyper
cggctggggaccgaatcagcacctaaagcaaaataacagctctgtggatttcctaaggagaatatcctaaatccaaggcag

SEQ ID NO: 12097 - DNA, 74 bp, Homo sapiens
  chr1:91870376-91870450
  hyper
ccagtcgagcgccgatttatcagcccctctgaggaccgccaagcctggctaagccgagctccaagcaatggatc

SEQ ID NO: 12098 - DNA, 285 bp, Homo sapiens
  chr1:92495420-92495705
  hyper
cggcctggcccgccgcaccccgcaggcccggctctcccctgcgcgctccgggctgggcgcggcgcgtgtgcggagccgccgcggtgacacggaacgccggccgccccgggccgggggaggcgcgcgtcgagaggcgacggcgggctggcctggcgcgctgcggcgctcgctcacccgctcccgaggaagggcagtgggccccgccgccgcctcccaatggcgaggctgcgggattgcctgccccgcctgatgctcacgctccggtccctgctcttctggtccctg

SEQ ID NO: 12099 - DNA, 64 bp, Homo sapiens
  chr1:92495832-92495896
  hyper
cctccttgggcacccactgctacgtgcggatcaaggtgaagggccgcgcgggcctggcgggagc

SEQ ID NO: 12100 - DNA, 171 bp, Homo sapiens; identical to SEQ ID NO: 7745
  chr1:92948154-92948325
  hyper

SEQ ID NO: 12101 - DNA, 226 bp, Homo sapiens; identical to SEQ ID NO: 5891
  chr1:92949466-92949692
  hyper

SEQ ID NO: 12102 - DNA, 228 bp, Homo sapiens; identical to SEQ ID NO: 5892
  chr1:92950207-92950435
  hyper

SEQ ID NO: 12103 - DNA, 426 bp, Homo sapiens; identical to SEQ ID NO: 8928
  chr1:9711649-9712075
  binary

SEQ ID NO: 12104 - DNA, 109 bp, Homo sapiens
  chr10:102587493-102587602
  hyper
ccccagcctcaccccatcccacgacccccgcaacccttcacatcacccccctcgaaggtcggacaggacgggtggagccgtgggcgggaccctcaggcccgggcccgcc

SEQ ID NO: 12105 - DNA, 212 bp, Homo sapiens; identical to SEQ ID NO: 10156
  chr10:103535916-103536128
  binary

SEQ ID NO: 12106 - DNA, 198 bp, Homo sapiens
  chr10:10965181-10965379
  hypo
ctgtgacgtctaggaaaaatggaaaaatgcaactcaggcaactgccaactagtgatatgtggctgggaaggaagacggtggcatttgagaacagttttatggtttggttttcattggctatgactgtcttgaaatgttccgaaagaccatttacacgggttgcataagggtggagtatttccaccgtaattaccttac

SEQ ID NO: 12107 - DNA, 240 bp, Homo sapiens; identical to SEQ ID NO: 6731
  chr10:118891774-118892014
  hyper

SEQ ID NO: 12108 - DNA, 239 bp, Homo sapiens
  chr10:121265805-121266044
  hypo
cgaagcagctcaagtcagcccttgccccagagcgccaggacgggccacacagaaggctctgtcgccttgcacggctctccagcttcacgacagaccagccagagatggacagtgtgccaggggtgggattggaactccagaaggagtctggacaccagcgggatcagagagacctcgcttggacgatatcccctcccaagctcacgggttcacgcgtgtggcggtcacacgtgtggagc

SEQ ID NO: 12109 - DNA, 132 bp, Homo sapiens; identical to SEQ ID NO: 10161
  chr10:121301363-121301495
  binary

SEQ ID NO: 12110 - DNA, 760 bp, Homo sapiens
  chr10:121301911-121302671
  binary
agctctgcgctcccgtcgcggctgggaccgcgaaggtgcggtacccagcggggagaggtggtgcggtcggccggggctccagtctgggaggtaccaccgagccgcgcccgagcacaagagggagggcaggaggccgggcgggcgaaacggcgccccgaccccgagcccgcgggcccccgaagccgcttacctgacggcggccgcttcctgctcagccggctcacggcgcggttgaacatcgccgcgggcgcccgaggaggaagaaggagcagcccggcggcgcggcggctgagccggaggaaggcgaggaggaggaggagggcgaggaggaggaggaggagggcaaggaggaggagcgggctcagcaccgccccggagctctaggtccccgcccgccgccctcctcctagccaggcgccgcgtggcgcgctcagtgcgccctgcccgcccccgctggtgaggactcgcggttccgctccggggtgcccgggcggggcagggcagggcagccccgggtgacccccgatcgcccagagtgtgccccgcgcctgggataaggtgcactggcccagagggagcccgcgccgccgggaacttagtagccccgcggaggcggttagcgcgtcccggggtccctggccctcgcctgagatgccgccccggcccgccccgcccagcttcaagctcccgggcccatcgcggtctcccgccttctccctgtagccccggagaaactggcacggcgccgcgggcgcaccgc

SEQ ID NO: 12111 - DNA, 1193 bp, Homo sapiens; identical to SEQ ID NO: 6732
  chr10:126106668-126107861
  binary

SEQ ID NO: 12112 - DNA, 392 bp, Homo sapiens
  chr10:126819324-126819716
  hypo
cgactgtactgccagacaagactagcggaactctaactcccaggttgccttgatctgaacaggttctagaaactgccaagcatcgccccctcattttagagggaggcaccctgccacccagagagggcaaagggctcgctgtccaagctggagaaaatccctgggtatcgcctccgacccactgtatctcaaatacgatgtgtgttggctcggctcttccaaaaaccgaagccaagacacgatcagctctggaagagacttcttggggaggcagacaggcggggaggcagagggagacgcaagtctgacagcagatgcagatgagatggcagggaaggcaggaggctggggaggaggagtcttcacctgctgtccccggctgggagcagccc

SEQ ID NO: 12113 - DNA, 379 bp, Homo sapiens
  chr10:126830153-126830532
  hypo
cggaacaggaagcagggagacagcacacagtaagcacatggcaagcacacagtaaacacacggcaagtacatggcaaatacacagcaggtacacagcgagcacacagtaagcacacggtaaacactcagcaagtacatggcaaatgcacagcaggtacacagcgagcacacagtaagcacatggcaagcacacagtaaatacacagcaagcacacagcaagtacacagtgagcacgcggcaaacacacgacatgcacacggttagcacactgcccggctccctccaaagccacttcccccacagagaaaggagaaagcggccctggcctggcagtcactcacagtccctctggacctggagccagcggctatggcggac

SEQ ID NO: 12114 - DNA, 175 bp, Homo sapiens
  chr10:130300191-130300366
  hypo
cgagctgagaggatgggcgtgtcctggaaatcatcacacggacattctccgcgtggatagcgctctttgtccaatcattactgggacgttctccgcgtggatagcgctttctgtccaataatcactcggacgttctccacatggatagcgctttctgtccaatcatcactcggac

SEQ ID NO: 12115 - DNA, 98 bp, Homo sapiens
  chr10:132869762-132869860
  hypo
cggagatgcatgctgatgacgacgtattcaagggtaaaatgtcgtgatgtcttacactcgctccacgtcttcgtgaaaatgtacgtgtgtgtgcacgc

SEQ ID NO: 12116 - DNA, 51 bp, Homo sapiens
  chr10:134659606-134659657
  hypo
gtggtggtcctgtcttggcaccggagctggtgctgtagctgcagcagggcc

SEQ ID NO: 12117 - DNA, 118 bp, Homo sapiens
  chr10:134680051-134680169
  hypo
cggctgtgcacccggccttgctagggcgccccgggtgtgggccggtggctgagcccctgcactaggatctgggcctaccccgcatccccccagcctctcctcgctaagcagagccccc

SEQ ID NO: 12118 - DNA, 387 bp, Homo sapiens
  chr10:134830248-134830635
  hypo
cgctgggcgagcaggccagggctgcccgtctccacctttgtgctggaccatttacaatcaaagcgcagcatcgagatacccaggaaagagccaggaacaggccaggaagctgctgccccaccactgaccccaccgctctccttccctccttccttcccgctgggctgggcacaggtggagctcaccgtcgtcccccttcatcccttggcccctccaaggctcaaggactggaggccgactgggcagcagacatgtcaccatcaccatgctccccgtcaccacgctccctgtcgccatggtcactgtcaccatgctccctgtcgccatgctccccctcgccacgctccctctcgccacgctccccgtcgccacggtccccgtcgccac

SEQ ID NO: 12119 - DNA, 79 bp, Homo sapiens
  chr10:134830671-134830750
  hypo
cgtcgccacggtccccgtcgccacgctccccgtcgccacgctccccgtcgccacgctccccatcgccacagtccctgtc

SEQ ID NO: 12120 - DNA, 121 bp, Homo sapiens
  chr10:134875690-134875811
  hypo
cgcatgaaaatagccagttccgggggctccgcacccgcgtagggggcgcgtcggtcctttccattttagctgcgtgggggagggtgttggcggcaccattgtgctttcattccacgtttcc

SEQ ID NO: 12121 - DNA, 128 bp, Homo sapiens
  chr10:135090197-135090325
  hyper
cggggtccgcgtcgcgtcctgcggggagagccaccctgccccgcgctgcgcccgggacggttccctggaaccactcaccaggcagcatcatcgcgcccagcagccagagcccgaggccgcgcatggcc

SEQ ID NO: 12122 - DNA, 99 bp, Homo sapiens
  chr10:135090391-135090490
  hyper
cgaggctcttttccgcgcgccccgccccggcgccccgcagccaatgggcccctcggccggtgggaggggcggggcgcgcggcacctgggggcggggtcc

SEQ ID NO: 12123 - DNA, 156 bp, Homo sapiens
  chr10:1443319-1443475
  hypo
cggcagccacaaacaccgtcaggcccagcgtcaccctccccacctcccggatgagaaggagcctccggagcagctgagggacccactgtggaggcagccgggtgggggacggcccggtgtgtgtggtctggtcgtgactttcccacaaggcatcac

SEQ ID NO: 12124 - DNA, 311 bp, Homo sapiens
  chr10:1443566-1443877
  hypo
aagcctgggtcctctccctgtcagagaagacagctgggttctggggtttcacagcacacgggtacccccggttccaggactgaccatggagggcaggtgccagcgctgttcggggcctccggtgatggtcccagctcccttcccacaaaggccaggtgcagccttggaatcctctgacacttggatccccatggattcaatgggagctcgcatgctgtgaagaccgcggtgcattttaaacggcaccagcaaggaggctacactgtgtatcccgtgtccccatttctaccgaagagcggcggcttcacggc

SEQ ID NO: 12125 - DNA, 97 bp, Homo sapiens
  chr10:1708231-1708328
  hypo
cgggcatggaggctccaggctgagaccagcattggatagggtgggtgggcagggattacttaggtgccaataacccaggagtagaggagatggcacc

SEQ ID NO: 12126 - DNA, 174 bp, Homo sapiens
  chr10:1708478-1708652
  hypo
ggccacctgccctgcctgccccgccagggcgagcatctgaatccacattctcctgggccgcagctcatctgcgagtcggagcctccgaaggggggccagtagcacatgtcccagcctctctcgcccaggtgatcctcatgaccagacgcggctttgctacaagacagctcagac

SEQ ID NO: 12127 - DNA, 130 bp, Homo sapiens
  chr10:1708689-1708819
  hypo
cgaggatttttgtcatgcacacgccgctgccagcccattagctctccctgcttcccatggtctgccgcatctggggtatccagcgtcctcctgcagccgagggggaattctgaatgttttgctagaaacc

SEQ ID NO: 12128 - DNA, 90 bp, Homo sapiens
  chr10:17157485-17157575
  hypo
cgcattaaatcctcacagatgccatggacacagcgtgccacagaacccccttcacagtcgtcatatttggatgcacactggggtccgtac

SEQ ID NO: 12129 - DNA, 209 bp, Homo sapiens; identical to SEQ ID NO: 5728
  chr10:17270445-17270654
  binary

SEQ ID NO: 12130 - DNA, 369 bp, Homo sapiens; identical to SEQ ID NO: 6737
  chr10:17272233-17272602
  hyper

SEQ ID NO: 12131 - DNA, 54 bp, Homo sapiens
  chr10:17347083-17347137
  hypo
cggtcgtaatattcagagggagatagggtgatagtacccctaatgtcgcagggg

SEQ ID NO: 12132 - DNA, 262 bp, Homo sapiens
  chr10:17347174-17347436
  hypo
aggggggacagaatgatagtaccccccatatcacatgtggcgttttcactcccctgtgattccggatattatttccaggaagggacaggatgatagtgaccccaatgtcgcagagagtttgtactcccctttatgatactggtcaaaaaacccagcggggggaagattcatagtacccccgatatcgcagggcatgtatacacccccctatgatagcggtcgtaatatccaggaagagaaaggatgatagtacccctatgtc

SEQ ID NO: 12133 - DNA, 260 bp, Homo sapiens
  chr10:17495133-17495393
  binary
cgcaaaacaaacctgaatcttaacaccggtgccctttaaagcatagaaaagaaaaagcaaaccaaccaaatccctccataaagacaggctgagctgcttctctccaaaggtggcggggtcgggggcgggggtgctttcaacacaccattgtcgagaggaaaactcagcacccgtttttcaaatgcagctgctggaggatcccccttgattcaaagaccattcacatccaggcttagagggttgagggagtgtgaagggtg

SEQ ID NO: 12134 - DNA, 323 bp, Homo sapiens
  chr10:17495680-17496003
  binary
agttgctacaccccgccgggagctgttggctgaaaggctgggagtcgcgctccttgcctggcagggagatctcgcactccccggctcccaggccaggtccccagccccagagttggaagagccttagggcgggaaggaagagacagcaaggaccagaatggggagcatgagatcctgatgcggaacccgacggcaggtcccgctccacagctgcctcgcccacagcgatgcgcgctagagcccccgcagccctgaccggtccctctgctccccagccgccgtccaccggtcggagggtcgcctccctgcgaccccctccccca

SEQ ID NO: 12135 - DNA, 52 bp, Homo sapiens
  chr10:1767929-1767981
  hypo
tgttatgagtgacaagaacgctgacacaagacactaacctttctagaggtgc

SEQ ID NO: 12136 - DNA, 46 bp, Homo sapiens
  chr10:1789180-1789226
  hypo
cgcgtgacgtgtatgcgagtgtcacatgaatcgcctgatgtgtacg

SEQ ID NO: 12137 - DNA, 139 bp, Homo sapiens
  chr10:1789266-1789405
  hypo
gatcgcctgatgtgtatgtgtcacatggattgcgtgacgtgtatgcgagtgtcacatggatcgcgtgatgtgtatgcgagtgtcacatggatcgcgtgatgtgtatgcgagtgtcacatggatcgcgtgatgtgtatgc

SEQ ID NO: 12138 - DNA, 264 bp, Homo sapiens
  chr10:1994498-1994762
  hypo
cgcggatggagccggcaggtaaggatcaggcccgctggcggccgcgctcctatccgcaccccttatccgcaccccttatccgcgccccttatccacacccgttatccgcaccccttatctgcactccttatccgcatcccctatccgcaccccctatccgcacccctggcccaacacctccactccgaggcctcttcagggggtcctttcccagcgcgtctcctctccctccctgggactcccagagccataaaatcaggcccc

SEQ ID NO: 12139 - DNA, 166 bp, Homo sapiens
  chr10:2006696-2006862
  hypo
cgcggggcggactggagacccaggaaacgcctgaaaggagggccgtgcaggacgaagcccccaggacacgcgaggagacccggccgcgcgccgcgtggggcttgggagcctccgaggggccatgcccagcctggaataaccatttcggtttttgctagatggctgc

SEQ ID NO: 12140 - DNA, 32 bp, Homo sapiens; identical to SEQ ID NO: 6742
  chr10:22626103-22626135
  hyper

SEQ ID NO: 12141 - DNA, 416 bp, Homo sapiens
  chr10:2932075-2932491
  hypo
cgtacgtggtcaccaagccgcaaaagccaggcgtaagcgaacagcttccagcgtcttaatcagagaaaatgagcaacaaagtttccccgacacatttgatgcatacgtaattgtcaccgtgctgcatgctaattaagcatcattcctacgtcgttttctaaatgactatgattggaacgatggttgcacagccaccggcagcgttcaggggagcagagcagggcggcgggagatggggcggaaggggaaactcctccggagccccctcccacagggagctggtggcccacgaacccgggaggcagcctcacgggcagcgtctcctccagtgaaccctcatggcctggagtccggagggccacctgcccggcgctctggctgaaaaaggtggctgctgcctttggtttcctccgccc

SEQ ID NO: 12142 - DNA, 193 bp, Homo sapiens
  chr10:3109168-3109361
  binary
tccgcgcccccattccacccctccccgccatcggcgctccccgcaactgcggggtttccacccgccccggcgctcgcgcccactcacggtctccctcgcccccccgggagatgctcccggcgttctatcccgccccgccctggcgcgccccgcaaacgatgtgaccccggccccctgcggtctcccctcctcc

SEQ ID NO: 12143 - DNA, 1896 bp, Homo sapiens
  chr10:3109459-3111355
  binary
ggccccactagcagggacccgcccacctgtggcgctacccctgcctctgccgcctcccgcaccgctagcgcggcccccacctacgacgacccccgcgtagatgctcctgcccacacccgccccagccccggcccctgcccctagccgcgcccgcgccccctcccccgcagcccctcccatacgctcgggccccgcccgtcaccgcccattggcgctggggccgggcgggggcgcgggcggggcggcggttccgagtcaggcgcgcgcgggcagggtccccattgcctgctgcgcacccggacgtgcggctcccctcggcctcctcgccatggacgcggacgactcccgggcccccaagggctccttgcggaagttcctggagcacctctccggggccggcaaggccatcggcgtgctgaccagcggcggggatgctcaaggtgcgcgcccccctcccggcggcgagggagggacggacggacggagctggggagaaccgggcgaaggcgatggggtgaccggagagaagaggggggaagcgatgggggggacccggggaaaggtggcgaagcgatggggagaaccggggagaagagcggggaagcgatggggagaaccgggaagaagcccgcgcccggaagcggcaggggtacctgcggggcggcatgagccggcgaggcagccccggggtccttgcccggtggggcgggggaggaagggacatggcggtaggaacctccatccggaagatcagtgagttttccaccttcggttttgttttaaatggaacctggcagagggagtcgcctgaagcgccctcgggggtcgttctgcctctgagctgtaggacggggccgggcgtcccctccgaagcgtgggtacagcgcgatcacttcctaagtgcccccccgccccccaactccgccgcacgccaccccctagaatgtcgaggaagaaacggctgggtccccgcgcgcctcctgtcgcctcgtgccctgcgcggcgtgggcggggtcctggctgctgcaatgcgggacgcggcgggggtgcgcggggttcccgcctggcgtctccagggcggtccggcagcccctcgcgtttccgctgggagatttttaaaaagggtttcctgcgctcgcatgtgctgtcgccttccggctcgtgacaaaaacgaaaaccaaaatgggtcccaggccctccccgccagcctccgcagacgggaaggatcaggaagcggggactccgggatgtcagcggcgccgcggcgcgggctccgggcttccctgccctgcaatgtggaagctgctctctaggaggggcccgaggctgggcccacggacgcgggcgcgccgggaggatatttaacattgaagagcggaaggtggcggagactcggcgcgccccaggccccgggtgcacgtgggggcgccggtgcccggatgatggagtgtcccgatccgtgcaatccctggcgggtagatcggcgcttcccaggcgaacgcaacctgggagccttagcgatcgcgcaggctggagacgcggcgcgccccgagctgggttttgatttttgttttcccggttcctcctgccgcagatgcgtggaaaggcccggatggcggatttcctcccgtttcggggccgcgcactgcacagggttggagcggggatgcaccccctgcccactgcgcgggtgaccttcccttcgcccttgagcgcgcggggcgggcgcgggtgccgcaggttgaggcgctgtgggcgccgccccgcccgccacgagcgcctacgtgatgcccggcccgtcgtctccacgagccccggccccgacacccgtgcgccgcgcgctccccaggcccgcagcgcagcctccccaggcccagcgccccccgcgggagaccc

SEQ ID NO: 12144 - DNA, 252 bp, Homo sapiens
  chr10:43572998-43573250
  hyper
ctcgggcgggagcggagcgcgggccgggccgcgggggtcggtgctcagaaccctagccatagccgcaggtctcaatctggccgcgccctgcgccaaagccgcgtcctggagcaaacgggacagccgtttcggggccgacctggcggacgggtcagggagccccgaaagcccgcgattcgtgcggagagttctgtttcggcaggagacggctccgtcctggtttccttttcccgctcagcgtccgtgcgttcc

SEQ ID NO: 12145 - DNA, 94 bp, Homo sapiens; identical to SEQ ID NO: 8948
  chr10:50606762-50606856
  binary

SEQ ID NO: 12146 - DNA, 73 bp, Homo sapiens; identical to SEQ ID NO: 10186
  chr10:64578688-64578761
  hyper

SEQ ID NO: 12147 - DNA, 1236 bp, Homo sapiens
  chr10:71078140-71079376
  binary
cgagccctcatttccgaggaatgggaccgccttcgtgcccccggggctgccagtccctagactagccctaggggcttctcgtcccggcggagccgggcggtgcctcctgcctgcgcctcgcacctccccgcctggcacggcccacccgggcacggcgccgccacgcgtgaaggcccgcatcggctccctacgtgggggacgtgcaggatgatgcggggtcgggggggatttcgctgcgtcgcccgccccctttccggcgcaggagggagcggccgccgcgtccccgctccccggccgggacgccaccgccgggcgttgcagaggcgcgccgcaaccaatgggcgtggaggaggtgggtcggctggcggctgtcaccctccaggggacgggagcgcggagaccgggagcgcgcgagctgtcgccgcgccccgggccgagggggaggagccgggggaggaggaggaggaggagccgccgagcagccgccggaggaccacggctcgccagggctgcggaggaccgaccgtccccacgcctgccgccccgcgaccccgaccgccagcatgatcgccgcgcagctcctggcctattacttcacggagctgaaggatgaccaggtcaaaaaggtgagcccccgcccgcgccgccgctggtcctggccgcagccttgcgttccggcatccgctcgccgcctccgctgcctccatcctccggcgcccggccttctccgggccagcatcgagttggactgcagggcgcaaggaaagccttcgccttcgattctaccggcattgtcagtgtctctgtgtgtgtgcgtttttgggaggggggcaatcgggcggaagacccccgagaccgggctgcctgctgcagtgtccttgaaacgggccctggatgtcagataggcccccgggctgtgcggggaggtggccggtgggcccttccgcagggcctgttcgggagggtccgagcgccgtgggaggaggtgtgatcatggagatgctggggaggtgatcgagcagcaggcgggggtgctggctggaggccaggcctcccatatttggggttcctggcggagggtgtcgggtgccccggagaagctgtcgccgggctctcccagttgtttgagctgctcgttaatctgaggacgaggtgacccgcccggcttcccggaacggggaggggcggcgaggccaccggaaactttgctcataggcctcgtgtctggagcggcac

SEQ ID NO: 12148 - DNA, 204 bp, Homo sapiens
  chr10:71158354-71158558
  hypo
cgattagcactgctccaggtccgggctatcctccagcagctaggtctgaatagcacctgcgatgacagtatcctcgtcaagacagtgtgcggggtggtgtccaggagggccgcacagctgtgtggcgcaggcatggctgcggttgtggataagatccgcgagaacagaggactggaccgtctgaatgtgactgtgggagtggac

SEQ ID NO: 12149 - DNA, 71 bp, Homo sapiens
  chr10:7202899-7202970
  hypo
cggagagatggcacagagacaactttcatggcgacgccaggctgcgccctcctgtgcagtggtcccagcca

SEQ ID NO: 12150 - DNA, 35 bp, Homo sapiens
  chr10:7212711-7212746
  hypo
cgtccctgccaggcagctctcagcaggggccttgg

SEQ ID NO: 12151 - DNA, 122 bp, Homo sapiens
  chr10:7214457-7214579
  hypo
tcccccgagcccgcggtgaagtccacggcagaagacctccgtttcttctgcacgaaaatggatttccgtcgcttcctccgcctggcgggtttggggtgtccgctgtcggggttgctttcccc

SEQ ID NO: 12152 - DNA, 324 bp, Homo sapiens
  chr10:72238261-72238585
  binary
cgcactagcgacgagggaagaggaactggcttcccgggcagtctcccccgccccaaacttttcctcctcgcggagggtgggcgggcggagggaggaagcgcagccggggaacgtggcgcccgcgttcctcccgcccgggggctgcggctgggctgagtgtgtctttaaatctgagccccccgcccctcgcggtggggccgggactcgcggtccgggcgggggcgggcgcggtgattggcggccgggtcgggtccgcccctcggcgttgggtagcggggcgctggggagcagcgcggcgcgcacgggccggggcgcgcaggtccc

SEQ ID NO: 12153 - DNA, 217 bp, Homo sapiens
  chr10:72765340-72765557
  hypo
cgagccaagcgccagagtgggacagatgcacaggtccgtcctcagcctcccaagctcccgctcactaagtaaacacctgtgcgtgggctcgtcgctcacctccctaatgagctcatcgctcacccggctctccatcgcgctccatccgtcttcaccttgctgccatggctccactgtgcagctatttttgcacttcccagtaagcattccactgggc

SEQ ID NO: 12154 - DNA, 36 bp, Homo sapiens
  chr10:7409523-7409559
  hypo
cgcaaggttctctctgctccttgcaaaattacaggc

SEQ ID NO: 12155 - DNA, 151 bp, Homo sapiens
  chr10:7409632-7409783
  hypo
gttgttctgtgtgcaccaccccacggggtgcaaatccgcgatgactacgtcacaccagaagtcggccctgcggtcctccccgtaaccgcagtagcgcagaagcagcagctgcccgcacgtggtaatgatcgtggccacccagtacgtgtcc

SEQ ID NO: 12156 - DNA, 52 bp, Homo sapiens
  chr10:8097537-8097589
  binary
cccgacctcccaggcggaccgccctccctccccgcgcgcgggttccgggccc

SEQ ID NO: 12157 - DNA, 186 bp, Homo sapiens
  chr10:88200334-88200520
  hypo
cgtgagccactgcgcccggccttttttcactgcttttgaggcctgcctcttcctcctttcctgtgtgtgatgggtttctgatttgctcttaaaatcttgtcattggaaataagaaaaagggatataaagatcttgcggggcctccagagccacgatgagaactttggtcttgatcctgaaatcggc

SEQ ID NO: 12158 - DNA, 509 bp, Homo sapiens
  chr10:92617539-92618048
  binary
gcccgcgccgaccgctggggggcgcctggctctgtctcggagccccgcactccccggacccccggccgctgcgggtaacgcggcagcgcggcctcacggggactccctgcgggaggcgcttcggcccccgacggacgcctgggacgcgcggagtcgagggagctcgggctgggctccgctggcagctccacagttcgcagcagcagctcggctgcgccgagagcgcccgggcggcagcggcagaagttgcggagtgcgccccgcccctcgcgcccgccgccgccgccgccgccgccgccgctcccctgcggcagccgcgccgcgtccccgccgccgccgcctccggccgctgcccgctccctcgcgctcctgggacgggatacccgggctgggcaggcaccgccgcctctcccgcgcctccctactgtgagggggcggcgctgcacgcgcctcccgggatcccgggtcccctcgcccgggaagctgtccttgccgcatgatagatactt

SEQ ID NO: 12159 - DNA, 64 bp, Homo sapiens
  chr10:92618077-92618141
  binary
cacactagtcagccacagttcagtgggggcatttttcttttgttaagaggcctaatgagccagc

SEQ ID NO: 12160 - DNA, 57 bp, Homo sapiens; identical to SEQ ID NO: 7798
  chr10:93647662-93647719
  binary

SEQ ID NO: 12161 - DNA, 231 bp, Homo sapiens; identical to SEQ ID NO: 7799
  chr10:98272415-98272646
  hyper

SEQ ID NO: 12162 - DNA, 715 bp, Homo sapiens
  chr10:98272768-98273483
  hyper
tgcccgctgtgacgcttttctttttaaaatctcccaagagtaaccacagatcttgggaaactttgcgcgaaacttaaaaatgctgtgaaatcggagccaggaactccatctgagcctcggagcgccgcgcccagtccagctcttctgctccggcccggagcgtctggcggtggccagtgctgcccactcgctgtcaggcggccctggcacccaccccggcccctgggcgccctctcggcctctggcacccgctctgattcgctttgggaacgcgccagctgtcgccccccggtgcgcaccgcaaacctggggccgggacatcccagcctcggagtggtttttaagcaattcctcggaggcattgtcttccgggggagccggggatctcaggggaggggaggggagacccgccccatagacggtagtgcaggcttgcccaccacctcatttgcatttcaaaggcaaacttctgcgggacttccccagcggcggcacctaccggctttgcaagggtcgtggtaatgctccagctgctgctccgtgccctcctcgccgtccagctctgagtagtctgcggtggcgtccgggcgctccccgagtcccccggcgccgcgaggcagcggcagcagcagcagcagtgacaccagggccccaagtgcagtcgcccggggcatggtggcgcggggccggctggggcagagggagttgcgtgcac

SEQ ID NO: 12163 - DNA, 115 bp, Homo sapiens
  chr10:99474279-99474394
  binary
cgtttccactgtcgcccgcgcccgggaaccctgacgctcagctcccgcccgacggcagcgccgccgccgcccagaatcccagcccagaatcccgaccgccgcgccggacgcgccg

SEQ ID NO: 12164 - DNA, 62 bp, Homo sapiens
  chr10:99474467-99474529
  binary
cctcgcggttcctcttcccttccctgctgagactaagacgtggacaggggccgcgcagatcc

SEQ ID NO: 12165 - DNA, 227 bp, Homo sapiens
  chr11:106889091-106889318
  binary
ccgtgcgccgcgctcccgctcacggggaggctccgagagtgtgtgaccgcggtcggcggggcggggagggctgcggcccaagcagaaggggaggcagaggcagaggcttctgccgcctgcgcgcctatctcgccccctttccctctctgctcccgcctctctccacttgctgccctgcctccctccttctccctttatccccccgcccccccccatgctctccctcc

SEQ ID NO: 12166 - DNA, 160 bp, Homo sapiens
  chr11:12030561-12030721
  binary
cctcaagcctctctcagcccctacctggggtggaccaagcacaggtcagccccctccccttggcgtcgggtcctactcgagcgccccgccccacatccaccaagagaggctgagctcagcagagtcgtcccctcccccgccgccgcccctcacccacccc

SEQ ID NO: 12167 - DNA, 333 bp, Homo sapiens
  chr11:13031624-13031957
  hyper
atgacccaggagaaacagcggcgagtggtgcgcaaggcctttcgcaaactggccaagctcaaccggcggcgccagcagcagacaccgtcgtcctgttcgtccacttcgtcgtccactgcctcgtcctgctcttcgtcgccgcggacccacgagagcgcgtcggtggagcgcatggagacgctggtgcatctggtgctttcccaggaccacacaattcgccagcaggtgcagcggctccacgagctggaccgcgagatcgatcactacgaggccaaggtgcacctggaccgcatgcggcgtcacggggtcaactacgtgcaggacacttacttg

SEQ ID NO: 12168 - DNA, 902 bp, Homo sapiens
  chr11:133734500-133735402
  hypo
cgcctgatcccacgccgccactcacagacccttcgttgaccggcagcattgaacaggaaaaaaaaaaaaagatgaaaacacagaaaaccccaaaaacccagacggggagacgatgtggggaagagaacgtgctgggagcctcagtagccagtctcctcctcgtagtaagcggaatattcaggggcctctccagggccaggacggtcgcctgcacccgagggagccccatcggccactgggccttgcgggcagtacttggggtcgtatatctgccggcccaggccaaagacctggccgctctggttggcgccctgcgcgtagcccatctgcagggacatgaaagagttgttacacttgtcggttcccagcttggtgtcatagatgtaccgccgggtcccgggagccgtcgtgcccacctggctggcacacttgtttgcacccatctggaggctgatggtcgagcggtccatggggggcaatacgtggttcttggggtcatagagatgcctcctcgtgctgtacgcggtcatgcgggactggctggtgcatttgtgggtgcccatctgcagcccgatgacgcactggcgggcattcatggtggcgtcctcaaagtcccactcctgcttctccgagtgcgtgtcaccgatgtccgcccctctctgcggccccttagtcttggccttccctgccagggcgagaagagacacctgcacctgcatcgtgttcccactctcagacaggtcgttggcctcaaacaggtccacggggttcatgccgtaggttttctagctggtgccagttctgcacggagcggttgatcttggggtctgagcccggctgcagcttgttcatgagtgtgcgtaagataatccaatccttcaggccctaatggaagtcgggac

SEQ ID NO: 12169 - DNA, 161 bp, Homo sapiens; identical to SEQ ID NO: 5733
  chr11:133939437-133939598
  binary

SEQ ID NO: 12170 - DNA, 658 bp, Homo sapiens
  chr11:13689464-13690122
  binary
cgtgccccacccctcagaagtaaacgttattctaactcctatcactaccggtaagttttgtagggaattattttggaggaagtggaaggtggaatgaatgggcccacagtcccctgggactgggcgagacccgtggaggctccaggggtccgtagagctcttcgctctcaccgacccgggccacacccgccaagctggtagttctccgaacggatccctcacgcccagcaatggccggagggcccccgggccccaccataatagcgctaagcacgccacaatggcagccccgctgtctcccgcgcgggcctcgctgcgtgctcccaaccttgggagttggcgcccctcccgcgcgacggacagccgggcgtggccctgggcgcgacccgacaggacgccagcagccggcgggggcgctccaggactcgagatgtggggcgcgggcccattggctgagcattcccccgcgagcctcccggccgcagggcccacctcccggccctctctccgcgcccccattggccgttcgcgttccgcgggcgtccgctcccgccccactcccgcccggagggaaaccgggttgggggtgagaggctaaagcagggaggaggatgactggtcctgcggataagggtgtgcgcgagagccaatcaaaagc

SEQ ID NO: 12171 - DNA, 555 bp, Homo sapiens
  chr11:13690157-13690712
  binary
gtcgcgaggtgcggtcggggccggctgacgcgactgcgggcctcagccaatgggcgtgccactgcccgtccgctcttcagcagccggtcgcgggcggtggaaaagcgagtgaagagagcgcgacggcggcggcggcggcggcgcagctattgctggacggccagtgggagagcgaggcctgagcctctgcgtctaggtgagaagggggtgcgccagcgggagcggccgggctgcgggctcctcctcgcctggctcgggaagtggttgcgggagctcgggctgcaggcctggccgaggcgggggcgccgaccagccgtcccgcccccgcccccgcccgggtacgcccagaagtgagggcgcccgcctcaccccgggtggtctctgcccctctttgccccgccgccgcccttcacagggccgggaccgcgtgggggacgtacggtggggcctggtttgcagccgcggagcccggggagccgcctggggtgggaggccgctagaggtggcgaaggtggggcggggtggttagccgagcagcgggctccgcgtgctcgc

SEQ ID NO: 12172 - DNA, 39 bp, Homo sapiens
  chr11:2108016-2108055
  hypo
cgaggaatgcacgtcagaaccagtaggacagctgccatc

SEQ ID NO: 12173 - DNA, 64 bp, Homo sapiens
  chr11:2108109-2108173
  hypo
tgctggggatgggccgtggtgccaacgctatggggccgtgggctcctcacacatgtaaacctac

SEQ ID NO: 12174 - DNA, 158 bp, Homo sapiens
  chr11:2466019-2466177
  hyper
cggaggcagggccaggccggtccgtggggagagggcgggccaagccggtgggcgcgggcagggacgccctgtgcgcgccggaccggcgggggcggggcgtgcaggcgggggcggggcacgccgtcccatgggaccggccctcggccactgccccctcc

SEQ ID NO: 12175 - DNA, 251 bp, Homo sapiens
  chr11:2466191-2466442
  hyper
cgcccgggctgggccggcagcggccccccgcggcggggctggcagcagtggctgcccgcactgcgcccgggcgctcgccttcgctgcagctcccggtgccgccgctcgggccggccccccggcaggccctcctcgttatggccgcggcctcctccccgcccagggccgagaggaagcgctggggttggggccgcctgccaggcgcccggcggggcagcgcgggcctggccaagaagtgccccttctcgctg

SEQ ID NO: 12176 - DNA, 154 bp, Homo sapiens
  chr11:2782417-2782571
  hypo
cggctcagcagcctgggctctcctgcgtccaccccagccaaacccttcatcgttcctccggtcaatggtctgccggcctgtcggtgcctgttggtgcctgtcggtgtgctcctacgctggtgtgttcctctcgacctaccctcaacgtccagcc

SEQ ID NO: 12177 - DNA, 140 bp, Homo sapiens
  chr11:3128538-3128678
  hypo
cgcaccggggccccaggggtctctgactggtcgctgccactctccgtcttccggctatggtcctgggtctcggtatctgactcctcagggttctctctctccgacttgtctgagaatgcatcgttctccagggaagaccc

SEQ ID NO: 12178 - DNA, 94 bp, Homo sapiens; identical to SEQ ID NO: 8982
  chr11:3164459-3164553
  hypo

SEQ ID NO: 12179 - DNA, 716 bp, Homo sapiens
  chr11:3243313-3244029
  hypo
cgcacagagggagaccggctgcctgggtccctcctggctgcctcaccatcaggggcgggatgaggagctcagcctcagccacagtgcgcaaggtgaagagttttgatccctcgtacatcctcgagccaggcagggcgcccggcttctatcccaggtagcagagtctcctatcccaggtctccgacggcgaccgcaaccctttgcccgtggaggacttcccctgtctaagggccattgggagtgggatggcctaatttctggggtcgctttctattgggcacttcaaacagtgctgggcaagggcagtcgtttgaggcagcttggagtgaagttcttagggaggaggtcctgcgcagctcggccagccccggtcaggcccaggcagccaccaaccctggtttctccatcacccctgacccctcccacagccccttctcgtgtttgcccaccgtctaggccatgcttccactttctcacctggctgggtatcccctatggggcacgggtgtcggccccgccgaggctgggctttggtctgtcttgttctctctgggaggggtctggtgcgggtggaatacgtggagggagcctccgtggggggagcaactgctcccggtgttgcaaggaggacagagccaatgcccgccccatcgtgtcatggccgacggtggcctcagaagatgtgtccacgtccccagtcgctggaagctgtgcac

SEQ ID NO: 12180 - DNA, 203 bp, Homo sapiens
  chr11:35439896-35440099
  binary
cgttttcccgcctcccgggaagcacccaaatctcttccacccttccttagagctagccagggagattccgccttccagggacaaggaccgatcggagcgggcccagcatctccatggcgactctgcaaacctggcgttcaaggccgcgcgcgctggtccttgccccgccccagggccctgtcttggctcattccttccgagcc

SEQ ID NO: 12181 - DNA, 239 bp, Homo sapiens
  chr11:35440137-35440376
  binary
cgctccaggcgctgctaccccggtgtctgctcacactatgcccaatcccctattgttttgaaatcccaaaagtaacctcaagaggatttcttcctcacactctcaggcccccagcgcaccttaccctttttatcaaaataaaacaaccctccacctctcgcattttcaaaggattaagcagcaatctccaggaaagaaaatcaatcccctccccaccatcccatccccagccaagctac

SEQ ID NO: 12182 - DNA, 174 bp, Homo sapiens
  chr11:43600280-43600454
  hyper
cgccaataaagcacttgcaacacgtggagcggtggttggggggaggtgtccaagagtcaagaagggggcggagggacaccccatggcctcatttccacctccccattcttccccaccccttctcattgcttggcacaatgcacaagtttaccccccgaactggatcctattaaa

SEQ ID NO: 12183 - DNA, 231 bp, Homo sapiens
  chr11:43964015-43964246
  hyper
gggggcgggcggcgccggggaaggggccgttactttcccagagcggcggggcgacgtcaggcggaagggcgcggggcgcgcacgctttaaatggcattcgctgtcatccgagctcagagccgtgtgggcagccgcgggctatataagccgcgagcctggccgccgcggggcagacggcgacagcagcggcggcgagcgcctcggagcgcggcggaacagcgccccccgagc

SEQ ID NO: 12184 - DNA, 118 bp, Homo sapiens; identical to SEQ ID NO: 8991
  chr11:44748073-44748191
  hyper

SEQ ID NO: 12185 - DNA, 257 bp, Homo sapiens; identical to SEQ ID NO: 8992
  chr11:44748419-44748676
  hyper

SEQ ID NO: 12186 - DNA, 314 bp, Homo sapiens; identical to SEQ ID NO: 8993
  chr11:44748871-44749185
  binary

SEQ ID NO: 12187 - DNA, 185 bp, Homo sapiens
  chr11:44749218-44749403
  hyper
cgccacgccacccggtaagacagtgagggaccagggactgggagcggcgatcggggccgggagggctgtggggcccggcagctgcatggagggcgggctgcctttggggtccctggcagcggggcggggcggggcggaggcgccactcgttcctccaggaccccccttattccttaggtgtgtgc

SEQ ID NO: 12188 - DNA, 394 bp, Homo sapiens
  chr11:537174-537568
  hyper
gaccgcctttacccgccccgcgtgggaagcgccaggatcgcgaggaaacgcgacacgtgcatcgcgacggcccaggcacggagccgcaggaagctggcacctgacgcgcctgcgcccacccaactcgagttggtggcgcgtcaccttcccctgggatcgcccgcagcaggggcgcccacgcacgtgccagtccacgtggccccgccctagcgaccgttgctaaggggcgtggctcagccgcacggaacccgagcccccggcgacttataaatatttgcgtattcaaatgaggcctggctcccgttgctatggcgcccaggccgcaaccccgcggcggccggaagaacagcctggagtaggagacagcgcctggaggtggagggcgcccagggcc

SEQ ID NO: 12189 - DNA, 138 bp, Homo sapiens
  chr11:60282711-60282849
  hypo
cgttcctagaggcaccaaaacgtagttaaccgggtgtctgaccacatggctgccaggagcctagtgagtctgcgcacacgcactacctccgccccggcagttcctgagtgggtgcgcaggcgcaagaggagcacaccg

SEQ ID NO: 12190 - DNA, 166 bp, Homo sapiens
  chr11:60282878-60283044
  hypo
agcctgagagccggccgggtgctgggctcctggctatccctgtgatggtagctcagcgagatctggggacctggcgctgagcgcgttgccagccgggatcttcctcttcatctaggcctgggcgctggcgtgagaactcggactgggtcctggacgagcgcccccc

SEQ ID NO: 12191 - DNA, 316 bp, Homo sapiens
  chr11:61276101-61276417
  binary
agggtggcgccttggccccgccccgccccgccctccctccgcctcattggcagccgcacgcgcgtcggggttgccagggcgacgggtcgctaagctgcgagtcagcgcgaaccctagccagtcggcctccggcggaggcaacgggggaggcccgagggcgggcggtggagcgcggcgcgcggcggcggtgccccaagtgggtgcctcctcccggccccgcacggcccccctcccggcgcgggggaaggccggggcggggggcccgggggccggcgcggctccggcaccgtcggggcggctggggggcggccggggc

SEQ ID NO: 12192 - DNA, 550 bp, Homo sapiens; identical to SEQ ID NO: 7823
  chr11:64512349-64512899
  binary

SEQ ID NO: 12193 - DNA, 61 bp, Homo sapiens; identical to SEQ ID NO: 7824
  chr11:64513748-64513809
  hyper

SEQ ID NO: 12194 - DNA, 58 bp, Homo sapiens; identical to SEQ ID NO: 7839
  chr11:69516911-69516969
  hyper

SEQ ID NO: 12195 - DNA, 259 bp, Homo sapiens
  chr11:69517461-69517720
  hyper
gcgcatctgcgtctaagccacaccgtgctcctggtagattaaaaattaattctaaaaaaaaaatctctcctatcccaaatgcactgttttctgccttgcttgacaattgatttgtttttaaaggaaagttatgggtagatcctcttttttctttcccattctttttttcttcttttatactggagggagggaaacggaggcgaggaccacacacgcgcaggcagaggctgaaaaggcccgaggtgggttttcctgttta

SEQ ID NO: 12196 - DNA, 845 bp, Homo sapiens
  chr11:73693765-73694610
  hyper
cgagccgcagggagaacacggcagtgcgtgcggctgtgtctgtcggctggcggagggcgcgtcggacgagccgggcgagcgtggacagtcaatcccaaggcgcgcgcagctgggcttcgcagtggggctccgcgcaggcggcggcgcggcttaagcctcgggggcggggcccggggtggggcctgcggggcggggccgggcctgccagctcctacttgggtgcggagaccctggagcagccgcctttccgcggggaccgccccgcctagggttctctccatgactttctccactcccgtttccgtgcgtcccatcaccgcgtttactccttcgttccccgagatggtcactcccttgccactccccgcctctgcctcacactctctcgggccgccaacctctgtgaggatggcaagactgaccgccagaaacaagtcttgtccagtcacacacctcttgccttcccagccaggacggtttctaacagcgtccagcggggccgtgtcttaagtgcacttcctcttttatgggcccagcccccctacgctgggcaaactacccaccctcctgcgagcgagcgcgcggctggctcctgcagggcgggactggggcctcgcgaccggcctcgctgtcgattggttacagccgccgcgttgtcgggggaaggaaccaatcagaactgcagcaacaggtggcccggcaaccgacaacagccgttgggctcggctggggttcgcgccttctcccccggtggagcggcctggcgtttagggaccaggacactaaaggccccggcggggcgggagcacccagcgtgacctcacgctcctacacacagacaagca

SEQ ID NO: 12197 - DNA, 325 bp, Homo sapiens
  chr11:74951799-74952124
  hyper
ggggaggcaaaccctgcccactcggctcggagcccggagcggccgcggaagccggaggccggcgcgcagggcgagggcaccgggggcggggggctccgctccccgtctgacccctcttgcccccggccagtcagccagtaagtgcggctcctcagactttcgagacagcgaacggaccgaccgggactgccagccgctccgggtcaaggactcgccccacccgtgccccccaccaggcgctcccaactcactggtgagcgcggcggcccgggcgctggatgcgggggcggccgcgatggccccgcgcgcgggacagccggggctc

SEQ ID NO: 12198 - DNA, 510 bp, Homo sapiens; identical to SEQ ID NO: 5735
  chr11:76381512-76382022
  binary

SEQ ID NO: 12199 - DNA, 174 bp, Homo sapiens
  chr11:97588960-97589134
  hypo
cgaccccatgaagagggaacggtggtccatgcgcgggacccagcctgtaatcaagcccagcaggctccggcctgccgcaccaaggagcccgcccccaccggaacccgcgccggcccaccatcgcggcactcagcctgggctcccgcccacacctctccctccacacctccctgc

SEQ ID NO: 12200 - DNA, 212 bp, Homo sapiens
  chr12:104443924-104444136
  hyper
cgcgaagccgctgggaacccaggagttgcgctggcagagaggggcggccccagaaaccacttccagatgtgctcggctggccggctcggatgcgccagacttcctctggctaagtgcaaaacatgcaaaaaacaacgctgttctggaggaaaagacacaaaaccagagaagagcaaatgctttcagggtgaatttctaccacacgttgagtc

SEQ ID NO: 12201 - DNA, 349 bp, Homo sapiens; identical to SEQ ID NO: 10236
  chr12:104851545-104851894
  binary

SEQ ID NO: 12202 - DNA, 161 bp, Homo sapiens
  chr12:117316504-117316665
  hyper
tcagggcgccagaggctgcagaaccctggagggtgtggctgcaggggacgcccgggcgggacaaggcaggtaggagaagaacccagaggtgtgggaagagggtgtctccgagtcagggcgcagcacggaagtaactctggggtagaaggcgagggcggggc

SEQ ID NO: 12203 - DNA, 89 bp, Homo sapiens
  chr12:122667648-122667737
  hyper
cgcgcacgcgtcctagcggttgccgggcaacgcggcccgggccatggaggcgtcgtacgagtccgagtccgagtccgagtctgaggccg

SEQ ID NO: 12204 - DNA, 65 bp, Homo sapiens
  chr12:122688584-122688649
  binary
cgggcgcggtagaccccgccagcctgggccgcccgcgcccgacgcgcagcgctgctgccaacccc

SEQ ID NO: 12205 - DNA, 385 bp, Homo sapiens
  chr12:124246524-124246909
  hyper
cggtcggcgtggggtggggtcgcaccctcggctgcagcggcccgagggcggctcctggcggcgagggtcccgctccgcatccaggggcgtgcgcgctgccggggccagggagcaaccagcctacctcggcggcccgggggcctggtgcgcgcctccgagatcccggggccggggcgtgggctgcggctcgcgggttcgggatcgaggggccgggcgcggggcactgccgagcttgcagcccccagcgccggcgccgtcggcggggcgagctgcggccgtttccggggcgcccattgctagggccgccgttgccacggacgcccgccctgcgcccggctccctctgcactgcgcggcgccatggacgacctgcgggtgctgtggat

SEQ ID NO: 12206 - DNA, 54 bp, Homo sapiens
  chr12:124246937-124246991
  hyper
atcaccgacccccagcttttcgaggacctgctcaaccgcgacgacggccagggc

SEQ ID NO: 12207 - DNA, 150 bp, Homo sapiens
  chr12:128899867-128900017
  hypo
tggagctctactacaccgtgcacccaggaaacgagcgaggggactgtgccgggggtgacttcaggaagggcaacgccatccgtccaggaaaggatgggctggaggaaaccacgtcccacctgcagaggatcggcaccgtcggcctttacc

SEQ ID NO: 12208 - DNA, 230 bp, Homo sapiens
  chr12:129189650-129189880
  hypo
cgtggctgcagttcagtgatggctctgtgacgcccctggacatctacgacaccaaggacttctccctggcagccacctcccaggacgaggctgtcgtgtcagtcccccagccccgctctcccaggtggcccgttgtggtggccgaaggggaaggccagggcccactgatccgagtggacatgacgatcgccgaggcctgccagaaatctaaacgcaagagcatcctggct

SEQ ID NO: 12209 - DNA, 206 bp, Homo sapiens
  chr12:129189909-129190115
  hypo
cggacagaacgatgctgactccagccccggcggggactatgaggaagatgagatcaagaaccacgccagcgaccgccggcagaagggccagcaccatgagcgcacaggccaagatgggcacctctatggcagctctcccgtggagcgtgaggaaggggctctccgaagagccactaccacggccaggtccctgctggacaacaaag

SEQ ID NO: 12210 - DNA, 63 bp, Homo sapiens
  chr12:129190144-129190207
  hypo
aggctggcaggagaggggcagctgcagaacatccccattgacttcaccaacttccctgcccac

SEQ ID NO: 12211 - DNA, 153 bp, Homo sapiens
  chr12:130037501-130037654
  hypo
cggtccagatccaacaactacaacatggatgccccaagtccgagtctctggggacaagaaaggtcacgccaccatccgagccccagccttgctggtctgacagcatccaccggagcagcttcggttactcaacctttcaaggccaggctcttc

SEQ ID NO: 12212 - DNA, 484 bp, Homo sapiens; identical to SEQ ID NO: 6814
  chr12:130184247-130184731
  hypo

SEQ ID NO: 12213 - DNA, 91 bp, Homo sapiens; identical to SEQ ID NO: 6815
  chr12:130184760-130184851
  hypo

SEQ ID NO: 12214 - DNA, 160 bp, Homo sapiens
  chr12:130892190-130892350
  hypo
cgtggcctcagtgtggtgtaccacgagggaagggaagggtgtggttgtgtccgtcatgaagtgcagtgtttggctggtacctcgacatcgacgttgggcgagctttctctggggtcgtagtcatacagggccaccattctccgcgtcgataccgaatgac

SEQ ID NO: 12215 - DNA, 573 bp, Homo sapiens
  chr12:130933888-130934461
  hypo
cgtccgcctctgcggaagctcccgtggaggacctgagaggtgtgcgggacaaaactggctcattacctctcagcgagcacaaacactgaaggcccctgcacgggaagcccactcagcggctgtcatcgcagcgagatgcagcctgcagcgcccagcagagggtgaggatgcgggagatcagggtgctggacacaccccctttcactctcggtggtggggatcggggctctggacatgtcccctttcactctcggtggcgggatgtcccctggaaagacgcactcatggaccaacccctgcacctgtgaatgggaccttatttggaaacagtctttgcaaatgtgatggagttagtcatactgcagcggggcagattccaatccagggaagggtatccttaaaggaagaggggagaacgcacaaagacagggagggcgaggcggccaggcaggatggaggatggaggcagagactggagccacgcagctacaagccagggccgcctggtctcccggcagccagaagaggaaagaaggacccctccttggagccctcggagggcgagaccctgcc

SEQ ID NO: 12216 - DNA, 41 bp, Homo sapiens
  chr12:131077283-131077324
  hypo
cgggggaccttggccgtggcgggccaatcagcctgcatttg

SEQ ID NO: 12217 - DNA, 95 bp, Homo sapiens
  chr12:131077362-131077457
  hypo
caggcagggaaatcgggagcgggagagatggacagcgagctggtgaggatccgggctgcgatgtcgggagcggtgagagcgagcgcggcttccac

SEQ ID NO: 12218 - DNA, 429 bp, Homo sapiens
  chr12:131095743-131096172
  hypo
cgggaaccgccgcagctcctggaactgcacattcccctcccatcccacgagctctgtccccacgtcccccagaccccacaggggaagcactcagtgcctgcctctccaggagccgccttctcctccctgatgattgacgtccctcccgtaaaggatctctttgagctacagcctccatcagacaatacgttgcaggatattgggggcccttttgtcttccactcccgcagaagccagggcacctggggccgcttcatttacccgcatctctgcccccgatcctccgctggaagacaccggctgccggctaccgggcttcgctgcaggtgtaagtggcagatgccaccatgctggcggcgacgcgtctcctgcggagaggatttacctccgtagcctgggctaggaccttcaggaggcctgcacagcctc

SEQ ID NO: 12219 - DNA, 229 bp, Homo sapiens
  chr12:131110936-131111165
  hypo
cgactaccgccagcatcaccatcagctcctccatcaccatgactaccactggcatcaccaccatcttctccatcacgactaccgccagcatcaccatcagctcctccatcaccatgactaccactggcatcaccaccatcttctccattaccatgactaccgccggcatcaccaccatcttctccatcacgactaccgccggcatcaccaccatctcctccatcaccac

SEQ ID NO: 12220 - DNA, 79 bp, Homo sapiens
  chr12:131159367-131159446
  hypo
cgcctgctcgggacgggtcgtatacgtgggatcctgtaacacgtggccttccgggtccggcctcttccacacagcgtgt

SEQ ID NO: 12221 - DNA, 261 bp, Homo sapiens
  chr12:131159530-131159791
  hypo
cattcacgtttcgtttatctgctcatctgtagaggggcgtgcagtgagctttttacagatgttcccacccattcgtgtcaaagagagcatccttgatccaaagacacaaactacaaaagggcacagccgggactaggaccccagttgtcccgaaggacctgttggccgccagatagtggttgaaggaagggacgcaagccctggttgacggagccgcggcctctgctgagacaggcgggtttgtccgcaggccttcgggaa

SEQ ID NO: 12222 - DNA, 174 bp, Homo sapiens
  chr12:131193281-131193455
  hypo
cgccccagctcactgcaccttctctaagaggctcgcgtgggccctggacacaggcgtgtttcagagctccctgggactgcatctgacccagaaccggctccgccccagcttctctgggatctcacaggtcctgcagcgctgtagtcccaacccagcttcgcggtcaggcagccc

SEQ ID NO: 12223 - DNA, 108 bp, Homo sapiens
  chr12:132312451-132312559
  binary
cgcagggaccgcagagcctccgccgaggaccccagcccccccaacacccgccctcgccctccagtcccccgcgccccccaagccccaccctccctctcccgcggtccg

SEQ ID NO: 12224 - DNA, 246 bp, Homo sapiens
  chr12:132313659-132313905
  hyper
ccgaaagccttgagcccccgagtttgctcggttgagggtgttgggggcacagggatgctggcccccagctccccactggacaaggacctggccctcagcctccttcccctccaccccaggtcggccaggctggccctgccttgccctggtacagtgctgagccgggggcgcggggagagccttcctcactccacacccagtagctgtccccagctcagcttagaaaccctgcctgggggcagcgac

SEQ ID NO: 12225 - DNA, 235 bp, Homo sapiens; identical to SEQ ID NO: 10249
  chr12:1639655-1639890
  binary

SEQ ID NO: 12226 - DNA, 454 bp, Homo sapiens; identical to SEQ ID NO: 6830
  chr12:1943616-1944070
  hypo

SEQ ID NO: 12227 - DNA, 155 bp, Homo sapiens; identical to SEQ ID NO: 11058
  chr12:1992067-1992222
  hypo

SEQ ID NO: 12228 - DNA, 209 bp, Homo sapiens
  chr12:2602388-2602597
  hypo
cgctggaaacgggccacgggcggcagtgccagaacggcacggtgtgcaagcccggctgggatggtcccaagcacggcatcaccaactttgacaactttgccttcgccatgctcacggtgttccagtgcatcaccatggagggctggacggacgtgctgtactgggtacgtagcatgagtgggcagtcagagggtgggggaacagcggcc

SEQ ID NO: 12229 - DNA, 116 bp, Homo sapiens
  chr12:2613903-2614019
  hypo
cggatcctggcgctgcgtgggtcagtgtctcgggagccggggaccggcactggccgtgctcggttgctgagtgtgcctcactaactatcattccgttcttccaggtcaatgatgcc

SEQ ID NO: 12230 - DNA, 249 bp, Homo sapiens
  chr12:2788614-2788863
  hypo
cggtggcctgttcggcaaccacgtcagctactaccaaagcgacggccggagcgccttcccccagaccttcaccactcagcgcccgctgcacatcaacaaggcgggcagcagccagggcgacactgagtcgccatcccacgagaagctggtggactccaccttcaccccgagcagctactcgtccaccggctccaacgccaacatcaacaacgccaacaacaccgccctgggtcgcctccctcgccccgc

SEQ ID NO: 12231 - DNA, 95 bp, Homo sapiens
  chr12:38595387-38595482
  hypo
cgcagaccgggcagtgcgggaaccagatcggcgccaaggttggcagccagggctctgagggcccagctcgggcctgccgggtggccagggaagat

SEQ ID NO: 12232 - DNA, 37 bp, Homo sapiens
  chr12:38595561-38595598
  hypo
cagctggcgaggcggccagggtggaccccagggacac

SEQ ID NO: 12233 - DNA, 86 bp, Homo sapiens; identical to SEQ ID NO: 5742
  chr12:4377809-4377895
  binary

SEQ ID NO: 12234 - DNA, 245 bp, Homo sapiens; identical to SEQ ID NO: 5743
  chr12:4378558-4378803
  binary

SEQ ID NO: 12235 - DNA, 247 bp, Homo sapiens; identical to SEQ ID NO: 7891
  chr12:4379920-4380167
  hyper

SEQ ID NO: 12236 - DNA, 401 bp, Homo sapiens; identical to SEQ ID NO: 7893
  chr12:4381033-4381434
  hyper

SEQ ID NO: 12237 - DNA, 167 bp, Homo sapiens; identical to SEQ ID NO: 9032
  chr12:4382439-4382606
  hyper

SEQ ID NO: 12238 - DNA, 51 bp, Homo sapiens; identical to SEQ ID NO: 6838
  chr12:4382915-4382966
  hyper

SEQ ID NO: 12239 - DNA, 210 bp, Homo sapiens; identical to SEQ ID NO: 6839
  chr12:4382999-4383209
  hyper

SEQ ID NO: 12240 - DNA, 255 bp, Homo sapiens; identical to SEQ ID NO: 7894
  chr12:4384059-4384314
  hyper

SEQ ID NO: 12241 - DNA, 79 bp, Homo sapiens; identical to SEQ ID NO: 7895
  chr12:4384533-4384612
  hyper

SEQ ID NO: 12242 - DNA, 441 bp, Homo sapiens
  chr12:4554361-4554802
  hypo
cgtcccgactggctgcagctggcactcactgtaggggttctcctcgtgggtcccgctgatccggccgtcggggagcacctggaggtgaaagccgatgcccacgttgcagtagagcctccgctgccgcttgatccccaccaaatagccactttcccagttcaccccggcaatctctccagctagcccggcgcgagacctggacagcagggtgccccagcccctcgagtccagcagcgtgttgttggcacgggtgcctgcaggcgagggcaccaccatgcccactaggatgcctaggaagacgagagcccacagcgtgccctgcagacgtcctgctccccgggacatagtgatgaacagtttctgtcccagggccatccaccttgcctctcaggcacgtggtcagaattaatggccctaaaaataccgcccttcttgtttttc

SEQ ID NO: 12243 - DNA, 89 bp, Homo sapiens
  chr12:4554937-4555026
  hypo
ctcggggacgctctctagctcgcccgcttgctccgtccctagttgatgatatttgatttgacctatctttatagttgcttcagcagccc

SEQ ID NO: 12244 - DNA, 176 bp, Homo sapiens
  chr12:48398744-48398920
  hyper
acagggaggagcccacagagattcagagtcctaaatcttggagacaggctagctgagccagatctgaagggttaccccgacctatcttttagcccttccctgcagtacctggtccccagactcccacctggacgttcacagcgactgccctccacccctcccccatccagctctgc

SEQ ID NO: 12245 - DNA, 494 bp, Homo sapiens; identical to SEQ ID NO: 9039
  chr12:48576976-48577470
  binary

SEQ ID NO: 12246 - DNA, 939 bp, Homo sapiens; identical to SEQ ID NO: 11060
  chr12:48591606-48592545
  hyper

SEQ ID NO: 12247 - DNA, 557 bp, Homo sapiens
  chr12:4920230-4920787
  binary
cgagtcatccgcctggtccgggtgttccgcatcttcaagctctcccgccactccaaggggctgcagatcctgggcaagaccttgcaggcctccatgagggagctggggctgctcatcttcttcctcttcatcggggtcatcctcttctccagtgccgtctacttcgcagaggctgacgatgacgattcgctttttcccagcatcccggatgccttctggtgggcagtggttacaatgaccacggtaggttacggggacatgtaccccatgactgtggggggaaagatcgtgggctcgctgtgtgccatcgctggggtcctcaccattgccctgcctgtgcccgtcatcgtctccaacttcaactacttctaccaccgggagacggagcaggaggagcaaggccagtatacccacgtcacttgtgggcagcctgcgccggacctgagggcaactgacaacggacttggcaagcctgacttccccgaggctaaccgggaacggagacccagctaccttcctacaccacatcgggcctatgcagagaaaagaatgctcac

SEQ ID NO: 12248 - DNA, 381 bp, Homo sapiens
  chr12:49582713-49583094
  hyper
cgctgactccacccaacggccacaaagagccgaagccgattctcaccatggttgctgcttcgcgactgccgagctgatggcggagacgaagaggagaggttgttgcttcttacagcgcgactcttaggcggtcgatgtaagagaacctgcggcacataggcggatgcggctccctatatacaactcggtcaccatggggatgggccggggccttttcctgttggtccagacccccaatctgcccagagaagccatgacaggagactggtgattggtgcaagcgacgtgggatgaggtaatctctcccccacccctttttctctagcatccgtagactgtttgcatcctttagacaaagagaccgtgcagaagcagtcggcc

SEQ ID NO: 12249 - DNA, 54 bp, Homo sapiens; identical to SEQ ID NO: 6843
  chr12:52401605-52401659
  hyper

SEQ ID NO: 12250 - DNA, 56 bp, Homo sapiens
  chr12:5252231-5252287
  hypo
cgagaaatccacatcatccgtaatccaatcacctccacatcatccgtaatccgatc

SEQ ID NO: 12251 - DNA, 265 bp, Homo sapiens
  chr12:5252323-5252588
  hypo
catccgtaatccgatcacctccacatcatccgtaatccgatcacctccacatcatccgtaatccgatcacctccacatcatcggtaatccgatcacctccgcatcatccgtaatccgatcacctccacatcatccgtaatccgatcacctccacatcatccgtaatccgatcacctccacatcatccgtaatccgatcacctccacatcatccgtaatccgatcacctccacatcatccgtaatccgatcacctccacatcatcc

SEQ ID NO: 12252 - DNA, 144 bp, Homo sapiens
  chr12:53007462-53007606
  hypo
cggcctcaccttggtctggtacagggcctcggcctcggccttgctcttccgggcgatctcctcatactgggcacggacctcagcaatgatgctgtccaggtccaggttccggttgttgtccatggacaggatgatggacgtgtc

SEQ ID NO: 12253 - DNA, 249 bp, Homo sapiens
  chr12:53045577-53045826
  hypo
cgcctccaccgaaaccaccaccactgaagccgctgccacctccaaagctgctgccgcctccaaaaccacctcctctgccaccaaatccaccagcggcgccaaagccaccacctcctccagccacactaatggagatgctcttggtccctccaaggccaacaagactccgactgccaaagccgcctccaccgaagcccccgccaccaccaccatggcggctcaagcaggagaagctggaagttgatctcc

SEQ ID NO: 12254 - DNA, 58 bp, Homo sapiens; identical to SEQ ID NO: 7909
  chr12:54144782-54144840
  binary

SEQ ID NO: 12255 - DNA, 180 bp, Homo sapiens
  chr12:54378541-54378721
  hyper
cgggttgcctcgctctctccctctctcccgcatttcccccctctccgcccccttctccccaggagttacaggctggttactggataaacaaaccccactcttcctagaacccccacccccacccccacccccctccacccctctacctcccctgccgcccggggggcgcttcctttgttc

SEQ ID NO: 12256 - DNA, 220 bp, Homo sapiens
  chr12:54447599-54447819
  hyper
ggagtcacatggtgaaagtaactttacagggtcgctagctagtaggagggctttatggagcagaaaaacgacaaagcgagaaaaattattttccactccagaaattaatgatcatgagctcgtatttgatggactctaactacatcgatccgaaatttcctccatgcgaagaatattcgcaaaatagctacatccctgaacacagtccggaatattacgg

SEQ ID NO: 12257 - DNA, 261 bp, Homo sapiens
  chr12:54448041-54448302
  hyper
agccccgccagcctgcagccagccagcccccgaccatccctccagcgccgccagcaagcaacccatagtctacccatggatgaaaaaaattcacgttagcacgggtaggcaactttgctttttgctccccccctccctcccttcttccctagcgctccccaccctcctcggccccctctggcccccgtcctcctttctctccttccccctctctctccaggagcgactctgggttagcacaattgaactggatttacgagc

SEQ ID NO: 12258 - DNA, 466 bp, Homo sapiens
  chr12:5603587-5604053
  hypo
cgagagccggagcggggagggcccgccaagtcagcattccagccggtgattgcaatggacaccgaactgctgcgacaacagagacgctacaactcaccgcgggtcctgctgagcgacagcacccccttggagcccccgcccttgtatctcatggaggattacgtgggcagccccgtggtggcgaacagaacatcacggcggaaacggtacgcggagcataagagtcaccgaggggagtactcggtatgtgacagtgagagtctgtgggtgaccgacaagtcatcggccatcgacattcggggacaccaggtcacggtgctgggggagatcaaaacgggcaactctcccgtcaaacaatatttttatgaaacgcgatgtaaggaagccaggccggtcaaaaacggttgcaggggtattgatgataaacactggaactctcagtgcaaaacatcccaaacctacgtcc

SEQ ID NO: 12259 - DNA, 479 bp, Homo sapiens; identical to SEQ ID NO: 9052
  chr12:70760478-70760957
  hyper

SEQ ID NO: 12260 - DNA, 82 bp, Homo sapiens; identical to SEQ ID NO: 9053
  chr12:70761129-70761211
  hyper

SEQ ID NO: 12261 - DNA, 86 bp, Homo sapiens
  chr12:81102562-81102648
  hyper
ggagctgcttcgtgttccttctttgggtgctatgtttgtgtgttgttttttcgctcaggaggagcaagtattgattcgtcagcctc

SEQ ID NO: 12262 - DNA, 55 bp, Homo sapiens
  chr12:8123528-8123583
  binary
ttttcaggaatcggcgtcttctctggaaagccgccaaaggttttaagagggtttc

SEQ ID NO: 12263 - DNA, 232 bp, Homo sapiens
  chr12:8757695-8757927
  hypo
accagaatccccgcccacttcttcccctcgagcttccccactaactcattcattccgcatcgcaatcccgaatgcgggctgctgcactgcgcctgcgcggaaggccctttcgcacctttgaaggtcatgatggctatttgcaccccggcgcggtgcagccgccgcagcccctcgggctcagccttgcggtcctcacagaagtagaggcgcgcggtgaagatcctcagactga

SEQ ID NO: 12264 - DNA, 162 bp, Homo sapiens
  chr12:8757966-8758128
  hypo
cacagtcgtagcaggggctccaggaggtgaaccaggtgacgcggtagcagcggccagggtctaggtcccagtccgagatgtagcggaggaagagcaattccacgtggcagccgttctggagagacagagaggaccacgctaaaattcactgacttttattgc

SEQ ID NO: 12265 - DNA, 752 bp, Homo sapiens
  chr12:8849750-8850502
  hyper
cgtagcaactaacttgtccaaggtttacgccggtttctagggggcagagctggcgctatccaccccgcctgtatctccaaacccgcttcagccaggaaatttatcatgtggttttaaatttgcctctcaatatacagaggtactgtctttactccagtcccggataaagaccttctaggtatgaatgatctttgtctccatatctttgcctaccggagggaggaaccaccgtaagcggagactccgggcggcggccggcggaagggctgggcgggaggcgtcgggatgccggcaggaccctgcgcccgagggggtagggggctcgtgtcggggttccaggcgcagattgatggggcctaagcagggaatgtgagggcggggagggcgtacaacggaagggactaatctcgcggtttcgagttgggagcaaacctcgccccccaccccccccatccgtttccctttctcagtgaagacggtttgggggcgggtggggaggcgcgtcctcggagcgccctcgcgctcccttttcgctccccgcgcgcgatccatcgcctctcttcccccgaggccagcgatggctcgggtgcgggcgaggagctgggagggcggctctcgacgcaggtgtcagatccgctcggcagtgctcggcgcgctggcccggcccccagctcctccggccgccgccccccgcccgccgcgccgcggcgccaggagggcggggccggggcgcgcgccgctcctcagcaagc

SEQ ID NO: 12266 - DNA, 311 bp, Homo sapiens
  chr12:8850744-8851055
  hyper
gcggaggagaaaggaggcggctcccggtatcccgaccccctccccctcctctccttcccccacttccagccgcccggcggcccgcgcttcctcgaaggccccagcccggctcagtcggccgagagcgagggaggagccccccgacccaggtgagcggtacgaccgctgttgccctcgggtgtagagcagtgaggcgaaggcgcgccctcccgagtgggcgagttcagcggaatggatcccccgattagcgggggctgggccggggaggggaccggcccgagcgcgcccggggtccggggctagttgaggcc

SEQ ID NO: 12267 - DNA, 113 bp, Homo sapiens
  chr12:8851275-8851388
  hyper
tcctcgggattgcggcgacactccccctccccccccttcccacaaattctatggagcgaccgcgggaggaggatcacgtggtgcggtcccgcagctactgtattcgattccac

SEQ ID NO: 12268 - DNA, 72 bp, Homo sapiens; identical to SEQ ID NO: 10269
  chr12:8906544-8906616
  hypo

SEQ ID NO: 12269 - DNA, 617 bp, Homo sapiens
  chr13:106912373-106912990
  hypo
cgtcatcagaagacgcagaaacccacagagagcggaacagcctgcgaagacacagacgtggggaaggcgccctgcggccatggaggcgcagattgcggtgacaggactgcaggtcaggagcgccagtgtcctccaccgaagctcggagagagagcacggcccgcccccgtcagacttctggcctccagaaccgtgacagaattgattgtgttgatgtaagccacccgttttgtggcagttagctacagcaggcacaggaaaatgatacgggtgtgttaaatttgttacgtctactcccccctgagaagccagttttctgctctgaaccggagatccagaaggaccctccagggatgacctcccaactctttgcctagagatcggcaagcacgttgccggaggctctgtccagaacatccgctctgcggctcacttttcatggtcccacctgaggccacgtctgccgaagctgcctccgatgtcgctcacctgccatcgggagagtatgcagccttcccgcctgtgcctccttcatctccggctgctcgcatcccccaggcaccgcctcaaccccgtgagcacctccctaagtgagaggccctcctaaccggcctttc

SEQ ID NO: 12270 - DNA, 241 bp, Homo sapiens
  chr13:107187426-107187667
  binary
ggcagctccgaggcgcgctgcgcagctccagcggtcgccgggccaggtgcgctcgctctccggggccctcagggcgcggggcgggagcgcacgcgcggggcgcggcggcgcggcggactcggggttccggggcgccgcgccggacgcagctcggacggccgactcccgtgcggctccagggtgccgggccggccgcggctggcgggtgggcgcggggcgggtgcgggctgggacacaaaga

SEQ ID NO: 12271 - DNA, 547 bp, Homo sapiens
  chr13:107187695-107188242
  binary
gcgggcgctgcgccccgagcggggccgcctgtgactatagatccagtgcagcgggcagcggcccgagcgcgcgggcgccgcgtcggcgcggttccatgtcccggagcacggagcggagtagggcgcctccgggcgcgcaggagccttctcagtccgcgcggctcccggcccccagggcaggaaagagggagctcggtccccgccgcgggctccggacgcgcgcgggcctttgtgtgcggggagggcgccgggacccgctgcgtgcgcagctcctcgctccggccggcgccgcggtccccgccgaggagagtcagcgcggccgccgcgctgtcagagcgctataaacgcggggccccgccccgccgcgcgaagcccattggcccgcggctccgcggccgcgcgctggttggacggccggtccgtccgtccgccatcccctcccgacattgggtgccgcgaggcggggctcgggctgacaggtgagccccgcccctggctcccgcgggcggcgggagcggagcagaagccgggcaggagaagcgctcag

SEQ ID NO: 12272 - DNA, 309 bp, Homo sapiens
  chr13:107188430-107188739
  binary
ctccgcagatgcggcgctgccccgcgtgcaagacttgcactccgcgcgcacccttagagctcccggcttctgcgcgcttctcccgacgcctctcggcgagggcttctcacttgattttggtaccaatcgcctacggctcagtttcagtcagtggggccgggaattgcaagacgattcctgcgacgcggcgccggaatttgcagctctaatcagggcctgagcatcgtcgcctcccgccttctctgcgggcgtctcccttccctcctggccccccgggaaggtggcgcccctggagctttccccgcgtgt

SEQ ID NO: 12273 - DNA, 280 bp, Homo sapiens
  chr13:107188808-107189088
  binary
ccagagatttagagggtgtgagatggaaaagtcaaggcatgtgcttctcactcggcgtctgcaagaccccagagcagagctggcaggaactcctcgctactttcccggtcgagcgccggtgctgacgctcgtccgtgacttccacggagccacagcgcccactagcggccagctttgcttctccgcatctcgagcgctctgcggtccaccgacccggatccagcatactgcagcatctaatcaagtcacagttccaaggaaaatctttttatatgtccaa

SEQ ID NO: 12274 - DNA, 54 bp, Homo sapiens
  chr13:112690683-112690737
  hypo
cgtgacggctccgcaccgacgcacccttctcagggcaagatcgacacagagtgc

SEQ ID NO: 12275 - DNA, 150 bp, Homo sapiens
  chr13:114616940-114617090
  hypo
cgggagatgaatcacacgtgagccgacggtggaggaggcattgatcgggagatgattcacacgtgagccaacggtggaggaggcattgatcaggagagattcacacgtgagccgacggtggaggaggcattgatcaggagagattcacgc

SEQ ID NO: 12276 - DNA, 148 bp, Homo sapiens
  chr13:114617363-114617511
  hypo
cgacggtggaggaggcattgatcaggagtgattcacacgtgagccaacagtggaggaggcgttgatcaggagagattcacgcctgagctgacggtggaggaagcgttcatcaggagagattcgcacgtgagctgacagtggaggaggc

SEQ ID NO: 12277 - DNA, 87 bp, Homo sapiens
  chr13:114769900-114769987
  hypo
cgtttttcagaagacaaatggccaacaagcatacgatataaagcccagcgtggctcatcacctgaggaatgagagccagagctgcct

SEQ ID NO: 12278 - DNA, 168 bp, Homo sapiens
  chr13:20735265-20735433
  binary
cgcgcgcttcccagcacgcacacctaccgcccccgcatccctaccctgtacgcgcagccacagcactcgcccgcgtccgcattccacaccctaccccgcgcgcacgtccatgcctagcgcctgcatccccatcccgcacctgcgcgggccctggggatgtggacgcgg

SEQ ID NO: 12279 - DNA, 142 bp, Homo sapiens; identical to SEQ ID NO: 6867
  chr13:22243864-22244006
  binary

SEQ ID NO: 12280 - DNA, 58 bp, Homo sapiens; identical to SEQ ID NO: 9079
  chr13:28540416-28540474
  hyper

SEQ ID NO: 12281 - DNA, 112 bp, Homo sapiens; identical to SEQ ID NO: 9080
  chr13:28541283-28541395
  hyper

SEQ ID NO: 12282 - DNA, 258 bp, Homo sapiens
  chr13:36788459-36788717
  hypo
cgcgtcctggaaggggcccttcctgctattcgctccccacagttccccgacaatgagagctccccaggccgggctttgagggccgaggggaccaccgacctagggcccgcccgcgaggttataaacgcagctgcctccccttccacagcctcttacctggcccgagatctggcagtgctcctggcagataattgaggaagccatggccgctgcgcacgtgctgggtcctggggcagcctcccagcaggaggagctcca

SEQ ID NO: 12283 - DNA, 291 bp, Homo sapiens
  chr13:36788746-36789037
  hypo
cactaatggctcctggccgcagctgagggcgagcacgccccaggcgcccttaaagtggccctgtcgccagttctggcgcgtgggggagcagcaggccgctctgaggggtcaacgcggaacccgggtcgggggcctgcccgcgggggctactcaagctgtcctgggggcccttaggagaccgcgtcactagctgactgcgcactccaagtccccttcccagggcagctctcacgacactaagccccgcgtactcactcccactgcgccgcctggggaggcgggaggcaaggc

SEQ ID NO: 12284 - DNA, 347 bp, Homo sapiens
  chr13:37679456-37679803
  hypo
cggggcccaccggcccgcaaggctgaggatgagggctgctggaaatggccaccgaggcgtttcccggtgttacagggcgtggagtcagcctgatccctgcagcacaccaggatttccgccaggccacagtttgcgagggtttctcaaggttccaggctgggccaccacctctttctcggtggcggtcgctgcctcgctgtcgtggcgatgtcgtgggctgagaaagggggcacagcgagttggggcagcagtactgctgccaccgctaccaacggctgtgggccagagggcccggtcacgccgccggcgccgccattttgttcctccacctcagccaaccacaaatc

SEQ ID NO: 12285 - DNA, 108 bp, Homo sapiens
  chr13:45149906-45150014
  hyper
cgcctggcgcaagaggctgtgcctgcagctgagcctgcgaaaggaggttcaggctttgtggaggcggaggctgtggtcccgacgtagaagatgctgcagggggcggcg

SEQ ID NO: 12286 - DNA, 141 bp, Homo sapiens
  chr13:45150276-45150417
  hyper
ggagacgccggagaggaaaacgggacctgacgctccgcctggcgcgattcctccttctcctcctcctcagccaaaggcgccggtcgctcctgccttcgagagcgagcttcggaaaggaggatgaacgagggtgaacagggc

SEQ ID NO: 12287 - DNA, 300 bp, Homo sapiens
  chr13:68343652-68343952
  hypo
cgctgaccgaccagggttgctctcctcgctcggccctgcaggctgcactcgactcgtgccaccaacccagatcctgtgcctgctgtggctctgcactcagcccacgggctggaccaggcgtgccgccagcggcttccaccttgggcacccgcatctagatgagcggaagttggtggtgcctgaaaacagggatgccagcaaccgtgaagcctggggagtcctgagagctgagcccctaagaaatgttatggctgctgtagttcagcgagcagcagggaatggcgcccagtggctttttct

SEQ ID NO: 12288 - DNA, 43 bp, Homo sapiens
  chr13:68344002-68344045
  hypo
gggcgcgtgttacagctttcctgctcccgctgccccacagctc

SEQ ID NO: 12289 - DNA, 112 bp, Homo sapiens
  chr13:77459256-77459368
  binary
cgggcaggagaaggactgggcgctggagtggcgagggggtctggggagctcactccctgcagaagacgtactcggtgtagctggtccagatcttgtcctcgctctggtcggt

SEQ ID NO: 12290 - DNA, 718 bp, Homo sapiens
  chr13:77459628-77460346
  binary
tgtaggagccgcggtagccgatggtgatgtagcccgagcgccggctgccgtccagcgactgggacggcgtgagcagcgggcccgccgcgcccccggacggactgcggctagccagctccagcgtgggcgacggcgccccggcagaggcgccctcctgctgttcgggctccgagtagccaagcggcagcagctcgtcacccagcgagccctccttgtgcaccccgcgccgcgagggcggcggccccgggccgggctgctggggcgccccgaggcggcgcacgagctctggcagctcgaagtactcggcctcgcgctgcagccggctgcgctcggggaagtagtcgggcagcacgagctgcaagtcccgcaggtaatccaggatgtagcggaagaggaagccgtcccggtccagaaagaagcggcctttgctgtcccgggccagctcctgcggctgctgctgcgtgaacatgcgccagagcagcgagtcgggcaccgacaccaccgtgcagcgccgggtcacgtacacctggccccccacgttcagctccacgatgtcggggaagagcggtggctccgcggaggacgacgaggagccactgccgcccccgccgccgcccccgttgggtaatccacgtgtgctgtccgccagagccatgacagagaggtggccgggccgggacagtggcaggaagccgcgctgcactcaggagctgcaacc

SEQ ID NO: 12291 - DNA, 420 bp, Homo sapiens
  chr14:101349283-101349703
  hypo
cgcggtggagggacactcgtaaaaggtctcgctgtgatcactgtctccagcctgctgaagctcagagggctctgattcagaaagatcatcggatccgtctgagcttggctggtcggaagtctcatcatctgcttccttcgggttaaacacgtcggccaggtctgagtatgggtgtggcagtccgggtagcaggctcatgccgtgcctctctagggcaatgcatggcgggggcgggcggaagcagttcttcaggcagtagggagagtggaaggtgcagcggcctttgatccagtcgacttcgggggcgtggactcggagccagcggatgcctaggaccacagagaagttcggtgaaggtacgatgtcaaattcgatggactcctggtggttctggtggatacacaccaggggctccgtgta

SEQ ID NO: 12292 - DNA, 246 bp, Homo sapiens
  chr14:101349750-101349996
  hypo
ccggctgtgggtacggcttctcgtagagctcgacgtagtgctcttgggcgaacttctcatccatgaagttgccgtcagctcccgaatccaccagggcctggaccgcgacgctgtggtaggggttcactctcaccatgagcagcaggaagaggtgggcgcgattgatgtccggatggacttcgctgggcaaccagctgctgaccatccacctctctggagcaggtgagtcgatccaggtcaggttcc

SEQ ID NO: 12293 - DNA, 415 bp, Homo sapiens
  chr14:101489771-101490186
  hypo
cgctgtcttcggggaggaacggttggacccaccaccacttctccatgacacccgaagagatgattttctgtatggcatgtgtttttctgcatgatgcaaaatggcataatctcgctcctcttaaatcaagttctgccttgggaaatcgcgccatccctggggaggagaccttgattcttcccggaatcagtgccattccatggtgctcaatgacgtggttgactacgctacgcttattcagtagacaccgtgacctgcttcttctcagcgtcaaatgcagcctagaagaagcgccctcaggcaacttcgtggacatgagccttcttccagccaccaccaccaccatcgtgcggtacttgaagaaatggtttaccgtcccacatacattttgaatatgtatgtgggatggtaaacc

SEQ ID NO: 12294 - DNA, 100 bp, Homo sapiens
  chr14:104623761-104623861
  hypo
gtttgatgggggagaggcggaaagtctggcttctggaccaccatctgcctccctctctgcctccaaggagtcctgctggggcagaccgcccacacacccc

SEQ ID NO: 12295 - DNA, 138 bp, Homo sapiens; identical to SEQ ID NO: 6891
  chr14:104640046-104640184
  hypo

SEQ ID NO: 12296 - DNA, 101 bp, Homo sapiens; identical to SEQ ID NO: 6892
  chr14:104640582-104640683
  hypo

SEQ ID NO: 12297 - DNA, 140 bp, Homo sapiens; identical to SEQ ID NO: 6893
  chr14:104641166-104641306
  hypo

SEQ ID NO: 12298 - DNA, 77 bp, Homo sapiens
  chr14:24808635-24808712
  hyper
cggctggggtcaaccggggtcactcacgagtttacgatcttgaccgccacatcgtagccccacttcctatgttgcgc

SEQ ID NO: 12299 - DNA, 84 bp, Homo sapiens
  chr14:24808863-24808947
  hyper
ccctgtgactcggcgttctcactgcaatccccagcctccctcgccggcccccaccgtccccggactcaaagacgttctctgagc

SEQ ID NO: 12300 - DNA, 439 bp, Homo sapiens
  chr14:36003004-36003443
  binary
gcggagggcgtcgtgaggtggccttttcgcccggctccccagtgggacgctccgcggaggcagccaaggcggggagtgtcgagctccctcacactctggaccttaccttctggcgtcttcgcccgggaggctgcagggggaggcggacccagccggccacaggggcaggttcgcggcgctgtgaggcggggctgggcgtgcgccgccgccgccgccagattcgtctactccagtgaatcggcacgggagaaagccccgcccccggcgcccgctcccactcctgattggccgggccagcccggggaggcccggcgggaccccggcccgcgtctcagctataaagatagccccggcatgacagccgcggcgaagctcttctagttcatctgctggccggctctcagtccccgtggcgccccctttcctcttgtcccagagc

SEQ ID NO: 12301 - DNA, 255 bp, Homo sapiens
  chr14:37050246-37050501
  hyper
ccgcggcggttcccacctcgccaccgccgccgccgccgcacggctgcccgtcgcgaacaagcaccggcaccaccacgcgacgcagcaggccgggcgcggcgtgcagctcggcggatgctgccaggtcaggcgactccgccgcccctggagcgcgagcgcgcttcagcttgtagcgatgattctggaaccagatcttgacctgcgtgggcgtgaggcgaagcaggctcgccagctgctcgcgctcgggcgcagaca

SEQ ID NO: 12302 - DNA, 214 bp, Homo sapiens
  chr14:37050539-37050753
  hyper
gtctgcgccttggagaatagcacccgccgcttcttccttttctcggcgtccgagcccggagacgcgggcctagcggacggccgctgcgacgagtctggcgggctggtctccaggctgctctcgtccgaggctagggacagcaaaggagacacgggtgggtgagacgccggaccctacgagggcctgctgcccttctggcgcgggcgtggaggca

SEQ ID NO: 12303 - DNA, 251 bp, Homo sapiens
  chr14:37050794-37051045
  hyper
gaggccatttcctgagtccacatctggacatccacctctccgaatgcggtgacctcattcataccacagcggtcatcagcgggcctgagatcgtgccccgaaaaaacccaccccggggccctcttaacatgtccgcaccggtagttgcgctggccgaccagtttatcacaagctgggtcaccagcgccggcctcctccaggtcgactgcactgcagtgtgccgaggtttgcggagccctgagtgggaacgg

SEQ ID NO: 12304 - DNA, 712 bp, Homo sapiens
  chr14:51027134-51027846
  binary
gacgggccgtagccgagccgctccctgtttgggcggaggaaccatggccgagcggtacccgcgtcaccgaatcgcgctgtcggggtgagggctgcagcttcgcgcaggccgggcctccagctccttcttccccacccccctcccgcctcctcccagcatttggacagcacccaccaggcgcctccggggacttgtgggttccgccttagcgatcggttgggaggaaggctatgggggtgggcagggggctgttgttactcggccccagaggggcgaggggtcggggatctagagcaggccaagccccaacccccctccccgggagccgccaactcgctggctctgcagggcgcgggctcccggcggcgggcggcgggcggcgcgctggaacaatgaggcggagcgcgccgggtcccggacggacggtagcagaccgagcaactgggagaagggccaccctcttgggaattcctgagcactgcagtactcctcttaatttgggggttgggtgggggaattggggaagaaggagagcaaagttgtggtttccagccttctgccccaccccgacgtggtaccccattcagaccagccccaagggtggctttgttctttgattttaccttttggagacattgggctcatgattcagcaccaggccgaggggaggggaaaggagaggcgagacccagtatgttcacaccgcgagtgg

SEQ ID NO: 12305 - DNA, 104 bp, Homo sapiens
  chr14:51027881-51027985
  binary
gcagcgatgcggaagaaatcgcggccccgcccgccttgctgctccagacctagttctggacggttagtgtgggcaggctgggcgtctttttgtcgtaggttccc

SEQ ID NO: 12306 - DNA, 85 bp, Homo sapiens
  chr14:54423285-54423370
  hyper
cgggctcgccagcagcagctcctggggacctctgaacggttgcagtgaacctgggcgagggccggggactgtggcgctgcaggct

SEQ ID NO: 12307 - DNA, 129 bp, Homo sapiens
  chr14:55595810-55595939
  hyper
cgcccctgcggcggcggctcggggtgtctggccggcgcggggctcgcccagcctggtccggggagaggactggctgggcaggggcgccgccccgcctcgggagaggcgggccgggcggggctgggagta

SEQ ID NO: 12308 - DNA, 134 bp, Homo sapiens
  chr14:55595968-55596102
  hyper
cgcccgcagcacctcctcgccagcagccgtccggagccagccaacgagcggtgagctgcgcggggcgcgggggacgcggctccggccgggcaggggagagggcgcccgggcgctgcttggggcgcggtccggag

SEQ ID NO: 12309 - DNA, 437 bp, Homo sapiens
  chr14:55596153-55596590
  hyper
cctgtgctctgccctccaggagcggggcggcgggcagcgatctgggcccggggcagtcgcctttgattatcgagggcgctggcgttcggggaaggttggcagcaccttacgagacccacacacgtccccggggcggcacgggccaccttctgcggagcctcgtgggcttcgccgccgtcgcacctccgccgcctgcgctctgcggccccagagtaagccccatccggtgacgagccgcagtctggtcaccccagtcccaccaggtcccgctgcgaggggaggcggaggggctcgctcagcaaaccagacggccgctccagtttctctaattggggttggagccccgtcacccttccccagatcacggccgcgggggagcgaagggacttcccaggactgcatagggcgcctcccgggacccacagcttggctggccc

SEQ ID NO: 12310 - DNA, 62 bp, Homo sapiens; identical to SEQ ID NO: 7961
  chr14:60794412-60794474
  hyper

SEQ ID NO: 12311 - DNA, 134 bp, Homo sapiens
  chr14:60982999-60983133
  hyper
ctgctaccctgtcattccacaaagcctaccccacctccactaagttttccgtgagccagtgagctccacacagataatgtgccaccaccttttttaatgctcccaccgcaccttatctaaacgtctgttttagc

SEQ ID NO: 12312 - DNA, 167 bp, Homo sapiens; identical to SEQ ID NO: 6904
  chr14:61104864-61105031
  hyper

SEQ ID NO: 12313 - DNA, 182 bp, Homo sapiens
  chr14:61113933-61114115
  hyper
cggccctcgggcctggcttataggacggccgttttgtaactaaaggctaactgcaaccatacaatccctgttcctgtgttacttgctaactcttcagcccctcgtgtccccctctcaaacttcctaccaacacccaccccaacccatcctttctgggcaggggaaacttcgccgccccgcac

SEQ ID NO: 12314 - DNA, 276 bp, Homo sapiens
  chr14:61114722-61114998
  hyper
tcttaatttggggcgccggggagtaaatgcagcgccaactctccccaaagctctctttttgttgtatctttaaaagtctcctccatttgtccagctagtgagaaatgaagcaggctacctctaaaccaaaagactatcaagagagagctgtggagaaccaggcgggagtgggggcagagccaatgtctcaggccagcttcacccctctggggagcaagaggagagaggttcgcgaacctcagctcccaccaaacccctttccttgcgacaccaatc

SEQ ID NO: 12315 - DNA, 167 bp, Homo sapiens
  chr14:64805585-64805752
  hyper
cgacttcctccacgttttccttgtcctctccggccggcagtgtagcagcagcaactccctacgttgaagtcgtctccctccgtccccgcccttacttccttttcccttaaggacctcgcgcgcgcttccatattcagaggggcgcaggcgcggtagcgcggcctccc

SEQ ID NO: 12316 - DNA, 50 bp, Homo sapiens
  chr14:74208160-74208210
  hyper
cgggcggctctgaagaggaaatctcaggccctagatgctacaggtcattg

SEQ ID NO: 12317 - DNA, 67 bp, Homo sapiens
  chr14:77228490-77228557
  hyper
cgcaggcggggaatgtgcgcgtcggcgcgcgccccctccccgctcccggccagctgcgagtcttggc

SEQ ID NO: 12318 - DNA, 83 bp, Homo sapiens
  chr14:77965137-77965220
  binary
gtctcggttccgaggctgctctgcctgcacctctgcacgcggccgcgaacccagtcgcgccccgcctcgcctcctccgggggc

SEQ ID NO: 12319 - DNA, 181 bp, Homo sapiens
  chr14:77965244-77965425
  binary
cgcggggcacggggccgcgcggggcgggggcgcgcagctcgcacagcctctctggccccggctcctcgcgtgggcgcccgcacagctctagggtccgcgcacctggacgtcccccaccctcctccgaggggcccctcggcgctccccgacccgtcttgaccctgtgggcggctctctttga

SEQ ID NO: 12320 - DNA, 329 bp, Homo sapiens
  chr14:94209931-94210260
  hypo
cgatgtcggtgaatgtgcttcccaagactccgaggttaagttcagcctttgctgtgggaaaccgaaggcagaagcacctgggctgggagttgtttctctgtcttaaaaccagtgtgggcctggtgactcggccatggggagcagaggtgaaaggagtcacagccctgcttcagggacagtctcatggcaccgctggtcctcagcgtgtgcaggggtcccctttggcaccactccctcccgcccaccaaagtgtcttgaggaaactgtccagaatgtcacggaaaagtgcaaatgcacgggactcggtgcgcgctgaaagggggcgggac

SEQ ID NO: 12321 - DNA, 518 bp, Homo sapiens; identical to SEQ ID NO: 7970
  chr15:101459489-101460007
  binary

SEQ ID NO: 12322 - DNA, 50 bp, Homo sapiens; identical to SEQ ID NO: 7971
  chr15:101460335-101460385
  hyper

SEQ ID NO: 12323 - DNA, 203 bp, Homo sapiens
  chr15:26026151-26026354
  hypo
cgtgggtcacttacaagctccgagaagccgcggaccacctgccgccgcttcaggttggtctctccatccaggttggcggtctcgatgtggcatagcccgtcggggtcactggaggagagcagcagaatgtccgcagggaagatttcgttgcagcgaagacgcacaaagtctcccacgtggatttctttccagaatcggttcac

SEQ ID NO: 12324 - DNA, 144 bp, Homo sapiens
  chr15:26234718-26234862
  hypo
cgcggcaagactccaagtagaagcggaccttgagaggcagccaggccaggcggcagccgcgcccggagggtgcggaatgaggagcgcaaggtgggcagagcgtgaaaccttcaccgactgcacctccgccctcgctgccctacc

SEQ ID NO: 12325 - DNA, 103 bp, Homo sapiens
  chr15:31188921-31189024
  hypo
cgcgctctgtcgtccaaagtcctgggatcacaagcctgagcctccatgccaggccgatctattcctttctgattaataaattacgccgggcgcggtggctcac

SEQ ID NO: 12326 - DNA, 47 bp, Homo sapiens
  chr15:34729898-34729945
  binary
cgccgccgtcctcgccgcgccgctgccgggtctctcccgggggctga

SEQ ID NO: 12327 - DNA, 72 bp, Homo sapiens
  chr15:34730043-34730115
  hyper
ccgcagggccgcgccacatggcgcacgcgcactgagctgcatacctaggtgacaaacgtgcacgttttgcac

SEQ ID NO: 12328 - DNA, 162 bp, Homo sapiens
  chr15:40575352-40575514
  binary
cggcgcgggagctgccgcccgcctagatacctgactttatagccttgggggtctccatggcaatggctgtcctgggagcggactgcgccgtcagggcagagacggacggggcgggggagaccgctcctgacccccaccccttcgtgggccacgaagtagggg

SEQ ID NO: 12329 - DNA, 213 bp, Homo sapiens; identical to SEQ ID NO: 7977
  chr15:41805862-41806075
  hyper

SEQ ID NO: 12330 - DNA, 135 bp, Homo sapiens
  chr15:41953174-41953309
  hyper
ccaagggaaacggtgtcggcgtcgcttttctgagaacttggcgcagcgttttgacacctgtgcaaacgtcttttctaacaagtaatttccggccaaattgtttgaggcaggacgtcaagtttaataaaggagggc

SEQ ID NO: 12331 - DNA, 105 bp, Homo sapiens
  chr15:45421846-45421951
  hyper
tggagcccagacccgacggtgtcgagaggatctgaggagagtctcccctccccataccctctccgcctcccaccctctccccagccccatgggacttgtgaaggc

SEQ ID NO: 12332 - DNA, 78 bp, Homo sapiens; identical to SEQ ID NO: 5755
  chr15:48936649-48936727
  binary

SEQ ID NO: 12333 - DNA, 105 bp, Homo sapiens
  chr15:59729552-59729657
  hyper
cgtgtcccccgcaactccgctgaaatcctgcccaccgagaggaagcacaattatgagtgaatgggcttgtgcgtcctgatgagaatccaaaatcgagaggaaggt

SEQ ID NO: 12334 - DNA, 91 bp, Homo sapiens
  chr15:59729815-59729906
  hyper
cacatggcagccccggagggttcgttcacctgcacaggtggggcgtcaccgtggcctaatcaaataacttctccccaatttgaggtggggc

SEQ ID NO: 12335 - DNA, 79 bp, Homo sapiens
  chr15:72612906-72612985
  hyper
attcctcttctctattcccactatcgagccagtccctcggagccaatcccaccccgccccatcacacatctctgtcttc

SEQ ID NO: 12336 - DNA, 247 bp, Homo sapiens
  chr15:75248843-75249090
  binary
ggggccggagcccgggccgcctccctcggccccgcaccccgctggcgcctcttcggagcgcaccttacggaagttctccatgcgccgtcgtcgccgggaccgccggctttgccatggggcggcctcagccccggggctgcatggccgccggtcgcgccttgcaagggccagcaggggtaagggcgccggagcagcgcagacgccggcgggcgggctgggacggcgcgatctcggccccacttctctc

SEQ ID NO: 12337 - DNA, 195 bp, Homo sapiens
  chr15:82339684-82339879
  binary
cgggccggggcggtgcgcgctggtcctctccgcgcgcatccccctccgccgcccactagggcggacgccccttcgggccccgcgcgctctgctgtcctttgttccgggagccgccgggctcgccgcgccctttgcgtcccgctgcggatcgttccgcagagcggctgggcccgcggttcatagagtcgcccaaga

SEQ ID NO: 12338 - DNA, 35 bp, Homo sapiens; identical to SEQ ID NO: 9169
  chr15:89942592-89942627
  hyper

SEQ ID NO: 12339 - DNA, 110 bp, Homo sapiens
  chr15:91427360-91427470
  binary
cgcggacaccctgggcttccctgggcccagcatctgcctggggcctcgccctgggctccccctcctgacccccaccttgcgccccttcccggtgttcccggggcgctgcc

SEQ ID NO: 12340 - DNA, 77 bp, Homo sapiens
  chr15:91427979-91428056
  binary
gggtgtccctgtaaggggtggtgggtggaagggcctggggagggaggctccaggttggctcctgttcccgaacgtgc

SEQ ID NO: 12341 - DNA, 230 bp, Homo sapiens
  chr15:93595181-93595411
  hypo
aagggcagggctgtgccctacagccgccccctcccccttaccttgctggtggcagtggccgctgagccgggcagcacaggcgtgttggtgacctgcacgttcaggtaattattgtcgatgagcggccaggcgccctgcaccttgcaggtctggaagcggtcggtgaaagtcctgaggtgtgggtccccgaagaggccacagtgcgtgtagttgggggtggccgagtgctt

SEQ ID NO: 12342 - DNA, 121 bp, Homo sapiens
  chr15:93595508-93595629
  hypo
gggccatccttggagcagttgtgctggctcatgaggtcctctatgccatggacggccgagtggtaggccaggtcaccccggcaggtgcgggccgtccgccgcgtgcacagggcgtagctgc

SEQ ID NO: 12343 - DNA, 351 bp, Homo sapiens
  chr15:94048797-94049148
  hypo
cgcctccgcctgggttttacttgcgtccactgggcttgttctgcccacttggcccggcaggctgagctgggctcatgctactgcccagatcccacgcctgccaagggcgagccaggtgcggagcagcaaggggtgtgtgagtgagcgagcatggagtctggccactgtgtgtagccatgcgtgctggctgcagcagggtgggccactccaggcgccggcacaagcgccggctccagccctgtgtgaacctgcagctggagcatgtgtaccacaagcggcttctgctgtgggccccagcgtctggtcaaggggaatgcaattgcgcccaaaagcttggagatgccaggaacc

SEQ ID NO: 12344 - DNA, 79 bp, Homo sapiens
  chr15:99192824-99192903
  binary
cggaggagggtccccgacctcgctgtgggggctcctgtttctctccgccgcgctctcgctctggccgacgagtggagaa

SEQ ID NO: 12345 - DNA, 266 bp, Homo sapiens
  chr15:99192941-99193207
  binary
cttttcctccgaggggctgcgccctgtttgcgaaacccgagttgccaccgtcgcagctgtcgggcccccgggctcgggagcggcggggtggggcgcagggcggctctgccgggagggaggctgcagcggacccgggacccgggctcgttcgtctggagccccgcgggccctggctccgcgcatccccgcgcgggaagggcttttctctttctccgtcctgacagcccagccgtgtttcccggctaggcgcgaggactcggtaggga

SEQ ID NO: 12346 - DNA, 91 bp, Homo sapiens
  chr15:99254469-99254560
  hypo
cgaaaacattaagcacagaagaatcccattcaggtaatcttctgttggctggctgtagaactacggagaacatctggagaaacacgtcaag

SEQ ID NO: 12347 - DNA, 225 bp, Homo sapiens
  chr15:99256133-99256358
  hypo
cggccatctagtgtgcactttggactgatgagctcccctacctgaaatcctgtagcaagtccctataggataggcatgtggtacagtgtgaagctcctgagtggtcaacagctaccccgtgacaacatgccacactccatgtgccactccctcccgcctgcctgctgtgtccttggccccagtggtgctctcccgtgctgaccagccggcacggctcacctggcc

SEQ ID NO: 12348 - DNA, 182 bp, Homo sapiens
  chr15:99276224-99276406
  hypo
cgcgagcccatttttcaaggatacatgtttgtcttttagattctataaggagtagctgctacacagaaagatgtctacgtgtgggtgaacacctggcgtatcccatgcagggaggcttcagcagaccttggtggcgatggaaccaccacagtgatccgaggattgggtctgaaggctcctcc

SEQ ID NO: 12349 - DNA, 191 bp, Homo sapiens
  chr15:99451886-99452077
  hypo
cgctaacatcgatttctgtgcttctaggaattactccttctacgtcctcgacaaccagaacttgcagcaactgtgggactgggaccaccgcaacctgaccatcaaagcagggaaaatgtactttgctttcaatcccaaattatgtgtttccgaaatttaccgcatggaggaagtgacggggactaaagggc

SEQ ID NO: 12350 - DNA, 59 bp, Homo sapiens
  chr15:99454579-99454638
  hypo
cgtcgaagaatcgcatcatcataacctggcaccggtaccggccccctgactacagggat

SEQ ID NO: 12351 - DNA, 322 bp, Homo sapiens
  chr15:99459893-99460215
  hypo
cgagaagacaaaatccccatcaggaagtatgccgacggcaccatcgacattgaggaggtcacagagaaccccaagactgaggtgtgtggtggggagaaagggccttgctgcgcctgccccaaaactgaagccgagaagcaggccgagaaggaggaggctgaataccgcaaagtctttgagaatttcctgcacaactccatcttcgtgcccaggtacccagctcatgtgaaatttcagttggcaaaacccactgctcaggccggttctgttgcctttctccccaccaggtagtgtgtaagtcagcagctggggggtacaatac

SEQ ID NO: 12352 - DNA, 209 bp, Homo sapiens
  chr15:99465447-99465656
  hypo
cggccgcagacacctacaacatcaccgacccggaagagctggagacagagtaccctttctttgagagcagagtggataacaaggagagaactgtcatttctaaccttcggcctttcacattgtaccgcatcgatatccacagctgcaaccacgaggctgagaagctgggctgcagcgcctccaacttcgtctttgcaaggactatgccc

SEQ ID NO: 12353 - DNA, 254 bp, Homo sapiens
  chr15:99504104-99504358
  binary
gtggccggcgccgaggctcgtggcgtcacgccccccccgccagggctgtacctccgtctccctggtcctgctgctcacaggacagacggctcgctcccctcttccagcagctgctcttacaggcactgatgatttcgctgggaagtgtggcgggcagctttgcctaagcgtggatggctcctcggcaattccagcctaagtgaaggcgctcaggagcctcctgctggaacgcgacccatctctcccaggacccc

SEQ ID NO: 12354 - DNA, 130 bp, Homo sapiens
  chr15:99505061-99505191
  hypo
cgtgttcgtggccgacctggcctctcctggcctgtttcttaagatgcggagtcacatttcaatggtacgaaaagtggcttcgtaaaatagaagagcagtcactgtggaactaccaaatggcgagatgctc

SEQ ID NO: 12355 - DNA, 86 bp, Homo sapiens
  chr15:99506062-99506148
  hypo
cggagttaaggcgaattgttcaagaacacaaactacatcgcactcgtcagttgtcagttctggggcatgactttagcgttttgttt

SEQ ID NO: 12356 - DNA, 97 bp, Homo sapiens
  chr16:2042503-2042600
  binary
cgggacctcgcgccacgcggcgagcccaggcgaggcgccccaagcctcgggcccaccgacctttcctcctccgggcgaggccgccgtgggccaccgc

SEQ ID NO: 12357 - DNA, 226 bp, Homo sapiens
  chr16:2042617-2042843
  binary
cgcgccgcactgttcgcaggactctggtccttcctgtggttcgtgggcttctgcttcctcaccaatcagtggcagcgcacggcgccagggccggccacgacgcaggcgggggacgcggcgcgggccgccatcgccttcagcttcttctccatcctcagctgggtgagtgcggggcccgggagggcggggcgaaggggcgggcgctcggctgatcccggctgacccc

SEQ ID NO: 12358 - DNA, 214 bp, Homo sapiens
  chr16:21531388-21531602
  hyper
cgcccacgatggagaagacgccgcacgcggcccacaccaccagcgccagccccggcgagcctgcctccttgagcacgcccgtgggcgtcacgaagatgcccgagctcatgatggcgaccacgatgacggccacgcccttgagtagcgtgatgttcccctgcagggtcacgccctcgccctcgcctgccggcgccgcgccgtccgcgcgcttggc

SEQ ID NO: 12359 - DNA, 184 bp, Homo sapiens
  chr16:23193716-23193900
  binary
cgggagtggaaggaagtcgcggggcagtaatagggggcagcaggcgctttgaggcgccttggggtaagtgccgcagagacccagcgggaatgcaggatggcagggcggcctcggggcggcagcaggcactgcgcggtggcccaggaagacgcagcgcggccgggctggggcgcagggcggcttc

SEQ ID NO: 12360 - DNA, 275 bp, Homo sapiens; identical to SEQ ID NO: 8008
  chr16:2391769-2392044
  hyper

SEQ ID NO: 12361 - DNA, 444 bp, Homo sapiens
  chr16:28891072-28891516
  hyper
tcccctgcaccccagaggcaggttttattttaagctttaagggtgttctcagccaaaacaccgaagctaagccaccctcgcggcttcaagagcttggagagctcgggttacccacccgaactccgggctccgggtcccgccgcgatgccggctgcggcgcggggggccactgccactcccggcatgcgccgggcggacggccgctccaccaatccccgcgcccgtcggcgcccctgccccgccctccccagcctcctgacgctgattggtcgaggggaggactcgctcctagtggcgggaaagcgcggcggtgtgatgatgactccaaggagcccggcgcccggtcagggagggcactggcatccctcattacccgcccagcctggccttagcccttccccgcgctccctaggcacccccacccccgcagggcatctccagggc

SEQ ID NO: 12362 - DNA, 533 bp, Homo sapiens
  chr16:29624651-29625184
  binary
cgtagcagagcgcgcccacgatggagaagacgccgcacgcggcccacatcaccagcgccagccccggcgagcctgcctccttaagcacgcccgtgggcgtcacgaagatgcccgagccgatgatggcgcccacgatgatggccacgccgttgagtagcgtgatgttccgctgcagggtcacgccctcgccctcgcctgccggcgccgcgccgtccgcgcgcttggaggccagcatcttctcccgcgcctcttccttctcctcggccaccggggccgctagcgcccgccgcttcgggcccgcacccgccatgctctgcttaccggccgggcctgggacacccgagagccgcagccgagcgaggattgtgcgcgccgctcgccgcccgcagctgcgtcaagaaccccgcccgcgccgccttttaggccccggcccgctggccccgcccaccgtccgcggctcctccccgccccgtggcccggccgcggctctcagccccgccccctcgacccagctcggagcacgtgcgtcctcc

SEQ ID NO: 12363 - DNA, 50 bp, Homo sapiens; identical to SEQ ID NO: 5983
  chr16:3238043-3238093
  hyper

SEQ ID NO: 12364 - DNA, 305 bp, Homo sapiens
  chr16:47176468-47176773
  binary
cgtaccctcgaaatttttaaaaaaagaacatgttacgacattacaaacacgtcagctttcaatttaaatcagcagggggaaaaagggaagtcctttactgagtggtggtgctgttttccctctggaaattgaaaagacgatttattcagtccgagtttcaggagcaactttgtatcccaatcctaattatctatgtatataaattttcatctaaattaccacctcctgggaaatgcaaagccggtggagtaggttttagagctctgtgctctggacaagccaactgttttaattcccagtacaac

SEQ ID NO: 12365 - DNA, 107 bp, Homo sapiens; identical to SEQ ID NO: 6964
  chr16:54966659-54966766
  hyper

SEQ ID NO: 12366 - DNA, 367 bp, Homo sapiens
  chr16:5703287-5703654
  hypo
cgtgtgctgggcttcagtgcagaaggtggggtgctgagttgtgtgctgggcctttgtgcggaaggtggggtgtggagccatgtgctgggcctatatgcggaaggtggggtgctgagccgtgtgctgggtttctttgaggcaggtggggtgtggagccgtgtgctccacctttgtacggaaggtggggtgctgagccgtgtgctgcgtctttgaggaagttggggtgcggagccgtgtgctgcgcctttgtgcagaaggtggggtgctgagccgtatgcgggcctggggtgattgcctctccctgacctcctttgcctctccctccgctaacagaccagaagcctgttctgccgcatgtgcagctgcc

SEQ ID NO: 12367 - DNA, 812 bp, Homo sapiens
  chr16:84650982-84651794
  binary
cgccatgcgccaggggcaccccatgtggccaccggttcctcccgggttcgctctggccggggctccccgggtgcagacaacctcccaacgaccgcgcatccgcccggcaggcgcgcctccctacctgtgcactgctggatgaagtgctggtactccgctccctgctcgccggggacgatggtggagccgtcatatttaaaagtcaccctttgggttgggagaagaaaaaaacacacacacacatcagcgctggtggccgcgcgacgcggcgcttgcagaggacaatctaacagacgcgctggccacggagaagcccgcgggggcctggcacgccgtcccggaataaggcgaggaagacagcgcgggaggcccgaatccgtcccgcctggaggccggctcggtgcacgaggccccgcgcgagcccggggagcggggcgtggagacgaatgaaaagttcctaccagatgacggccgagccgtcgtcgcgcaccaggttgtacgccgcccggcaagcctctttgtcgatcttggtggccatcgccgcggagccgcagcgggacactgtccggggcggccgagcgcgcccctggccggcggcggggatgggagcgcggcgggtacgcgccgagggcgcacgggctggcggcggtggcgacggctacgcggcgcctgcaagctgcgagcgcggcggcggcttccactgcggacggagagcgcgcggggaccccaggccgtggcccgccccgcccccccgcgcccattggccgcccaggcggcggcccgcctcttcattggccgtcgggctgcggggg

SEQ ID NO: 12368 - DNA, 270 bp, Homo sapiens
  chr16:86542673-86542943
  binary
tgcgctttgaaaacggggccgcggggccaaataggcgggttttcagtgtgtgttgggggtgggggagggcaactgaactacgtgtgagttcagatccgagcgtggcgtgtgtacgcgtgagtgggagtgagtgcgaacttaagctcctgtgggccttaagcttccgtgtcaacgagtgcattagtgggtgcgcacatgcctgagcgccctctgcatatgagtgtgcacacacgcatgggtgtgtttacacgtctgtttgcgtaatttacc

SEQ ID NO: 12369 - DNA, 353 bp, Homo sapiens
  chr16:86543822-86544175
  binary
ctgccctcggcctcagctcggctcctttccttgtgggagggcgagaaagaaagagggaggagagaggtgggggaggcgggagttggagagagaggggctctgagccaaccgccggcggatccagcagctcctcggggagggcgggcgggagcgcgggggcgggcgcgccgcggctcgctcgggagaagtggccgccgatgacggcagaggtgcagccagccccgcgcgcgcagccccctccccttcgccctcctcccccccgtcgtcctcttcctcctcctcctcctcctcctcccggcccgtccgcggcgcagagcagcggcggcagcggcggcggcggcagcagccacccg

SEQ ID NO: 12370 - DNA, 60 bp, Homo sapiens
  chr16:87635912-87635972
  binary
cggggagcgcggggctgggggcgcggagggcggggcgcccggggtccccgcccgcgcgcc

SEQ ID NO: 12371 - DNA, 190 bp, Homo sapiens
  chr16:87636008-87636198
  binary
cgccgcgctccgggggcgggggcgggggcgggggcggggggcggggggcggggggcgggcgggggcgcgcgggcgggcggggtgcgggcgcgcgccgcgcggcccgagcgcgcgagccgggcccggagcgcacgccgccgccgccaccgccgccgccgccgcccgagccgccgcattgctgctgctgctg

SEQ ID NO: 12372 - DNA, 491 bp, Homo sapiens
  chr16:87902835-87903326
  binary
cgataatggtccccacgatgatggccacgccgttgagcagcgtgatgttccgctgcagggtcacgccctcgccctcgcctgccggcgccgagccgtccgcgctcttggcggccagcatcttctcccgcgcctcttccttctcctcggccgccggcgccgctagcgcgcgccgcttcgggcccgcacccgccatgctctgcgcaccggccgggcctgggacacccgggagccgcggcccagcgagcagtgtgcgcgccgcccgccgcccgcagctgcgtcaggaaccccgcccgcgccgccttttaggccccggcccgccggccccgcccaccgtccgcggctcctccccgccccgtggcccggccccgtccctcagccccgccccctcggcccagctcggagcacgtgcgtcgtccggcccagcctggcgggctattcccaggcccgcgtggtcctcgaaggccccagtcctcctgcgccatggagacccc

SEQ ID NO: 12373 - DNA, 225 bp, Homo sapiens
  chr16:88368380-88368605
  hypo
cgacgggaggacacacatgtgatggatacagatgagggagccgtgtgggaagatgccgacgggaggacacatgtgacagagacggacgtgggagccgtgaaggaagatgccgacggaacgacacatgtgtgacagagatggatgtgggagccgtgaaggaagatgccaacggaaggacacatgtgtgatggagatggagggggagccgtgtgggaagatgccaac

SEQ ID NO: 12374 - DNA, 164 bp, Homo sapiens
  chr16:88993230-88993394
  hypo
gctcacaaggccttccgtgcctgtcccttgtgccccacctcacagcgaggtccttgcagcagcagggcagccccgtccggcccccgctgcctccctgccctcatctcctttctctgagacaaggctcctcactggtcctggaggtggcggcacactcctgcctc

SEQ ID NO: 12375 - DNA, 400 bp, Homo sapiens
  chr16:89006909-89007309
  binary
ccgcggccgtcaggaccccagggaccgcatgccaggcagggtccaggacccccagcgcggaccacctttagcctgcggggcagcgccggggacccgggcaggagggagaggagcaggagggagctctggacccccctccccagaccggccgccgccacctctgcctctcccagggccgccctcggcctccccactcccgggtctccgtcacgcgggccgcggggcctttgttaggaaaaccgggcggccccaggggagcccgcgagactcccagcgcccgggcgcgtcgttcccctcgaagtttcgccgcagcccccgcaggtcaggctctgctcacggggggctgcgctcagcccggatgggtgggcgctgggcgggttggctccaccctgccgtgggc

SEQ ID NO: 12376 - DNA, 92 bp, Homo sapiens
  chr16:89007789-89007881
  binary
gcctccgcctcctgccccccgccgccgccgctgcgccacctgcctcccgcccggcgcccatggcgctcagctccgccccggggcgccggcct

SEQ ID NO: 12377 - DNA, 374 bp, Homo sapiens
  chr16:89007995-89008369
  binary
gggagaggggcgcggggagggggcgacgggcgcgccgcctcctgcggggggcggcgcggggaggcgcaggcgggggcgagcgaagaggttgaggggtgcgggcgccgtggagggggcgcggctctggggggcggcccccgcctgcgcccaccctctccccctccgcaggccgcgcacacccacctcgcagcagtcggcggccgcgggcctcgcagctttagaaccgcggcttctggcggccgcgcgggaggctgaacgggagttggggggtgtggggggggtggggaggtggggagttgggggggaggtcgctccttcggccgccgcccccgccccctgccccgcgctcgcccccagcgcggcgcctggcccgg

SEQ ID NO: 12378 - DNA, 152 bp, Homo sapiens
  chr16:89028925-89029077
  hypo
cgtgagtcccgaaggagaggcccagggcccaggccactctgcaccctgagggcacgtggtggggccagatcaccaaagggcacatttgggaggactgaacacagatgccgagtcccctggaccacgtttcggggggagacagccacgtagcc

SEQ ID NO: 12379 - DNA, 34 bp, Homo sapiens
  chr16:89109415-89109449
  hypo
ctaacccaggtggcaaacaggggccgcccgactg

SEQ ID NO: 12380 - DNA, 121 bp, Homo sapiens
  chr16:89109659-89109780
  hypo
agctctgctcgctcagcctcgtccccgcctctgacatccttccattcccgctcatggccctctctgtctgccaccaccctccccgccatgggtgcttaaagcccccggcagctgccctccc

SEQ ID NO: 12381 - DNA, 356 bp, Homo sapiens; identical to SEQ ID NO: 8084
  chr17:27038294-27038650
  hyper

SEQ ID NO: 12382 - DNA, 60 bp, Homo sapiens
  chr17:27332307-27332367
  binary
cgaggtcccaaccccgggtccggccgccatccggccccgtctcccctcagtaagaacact

SEQ ID NO: 12383 - DNA, 122 bp, Homo sapiens
  chr17:27332733-27332855
  binary
gggcagccagatgcccgaagctgggcaccgggtctcccttcccacccctggggccccgctcccgcccccgtcctgccgccggatgccggggtcccttaccgtgagccaggagcgccagcagc

SEQ ID NO: 12384 - DNA, 74 bp, Homo sapiens; identical to SEQ ID NO: 10358
  chr17:28088056-28088130
  hyper

SEQ ID NO: 12385 - DNA, 338 bp, Homo sapiens
  chr17:29248950-29249288
  binary
cgccgcggccgggtccctctccacctgccgggcggagcgcacgggccatgggctgagccccgctgagcccgccgggccggccatgggcgatcgcgagcgcaacaagaagcggctgctggagctgctgcgggcgccggacacaggcaacgcgcactgcgccgactgcggggcggcaggtaagggcgcggcggcgcgggcagcgcgagacccccggccggaccccaggcccacccgactcctcccctcggccccaccgggtcccgccctcggccccctggacccagacgtggcacctgcgggccccgacccctcccacccacaccgtgaacctctcaccc

SEQ ID NO: 12386 - DNA, 256 bp, Homo sapiens
  chr17:29297825-29298081
  hyper
cgggtttctagcagctcgcggcatgttggtttcccagggcaagaggccgccactgaaggtcagctctgtctttccagctgggcactggaggctctaagtctgttttcagcaggatcggaggaaggagacggggtggcgccaaggaaggaggagaaaaggcggccgagaaaaggaggagggcaaggggaagaggaagggcgagggaggagcctgaggagactcgcccggctcaaccccgacgtccgcgccccggccg

SEQ ID NO: 12387 - DNA, 33 bp, Homo sapiens
  chr17:29718746-29718779
  binary
cgggcggaggctgcgcggcgcagacccagacgg

SEQ ID NO: 12388 - DNA, 69 bp, Homo sapiens; identical to SEQ ID NO: 10359
  chr17:30846659-30846728
  hyper

SEQ ID NO: 12389 - DNA, 308 bp, Homo sapiens; identical to SEQ ID NO: 10360
  chr17:33700165-33700473
  hyper

SEQ ID NO: 12390 - DNA, 207 bp, Homo sapiens; identical to SEQ ID NO: 10361
  chr17:33701376-33701583
  hyper

SEQ ID NO: 12391 - DNA, 168 bp, Homo sapiens; identical to SEQ ID NO: 10362
  chr17:33701612-33701780
  hyper

SEQ ID NO: 12392 - DNA, 717 bp, Homo sapiens; identical to SEQ ID NO: 10364
  chr17:33814248-33814965
  binary

SEQ ID NO: 12393 - DNA, 122 bp, Homo sapiens; identical to SEQ ID NO: 8090
  chr17:35078956-35079078
  hyper

SEQ ID NO: 12394 - DNA, 77 bp, Homo sapiens
  chr17:36729187-36729264
  hyper
gcgcggccccgccggcgcagccccgcagaggagcggcggaggctggtggctgcgtcgccgcggtcacccgatacgcc

SEQ ID NO: 12395 - DNA, 130 bp, Homo sapiens
  chr17:38478466-38478596
  hyper
cgtctgggcgggcaccttggagcagtgagggggattcctcaagcacaaaaggcaggggagaagtggcagggaagaggtggcaggggagaggtggcaggggctaggcacagttgggaccttgcttgcctgg

SEQ ID NO: 12396 - DNA, 459 bp, Homo sapiens
  chr17:3867210-3867669
  binary
aagtccgggaggaccgcgcagagggtgccaggcgtccggtctccccagctggaacccgctcccagcccccagcccccagccccggcgccggcgaaggtggccgcgcagccccgccgggtgccccaggagcatccgaagaggtttccggagccctcgcttcctgcccgcccagagccgggtggggaggcaggaggggaaactgagactgcggcgcgcgcggcccccgctccccggcccggcccggcccgcgcgctcaccgttggggccgtagcgctcccgcgcgccggtcacctgcgccgggctcaggccgccctcggctgtcaccgagaagtggcgcagcacgtcggcggccgggagcagatgcgccgcctccatgccgcccgcccggccgtctgcgccgtccgcaccgtcgaggccgcctctccgccggggggctacaaagcggggcgcgggggactc

SEQ ID NO: 12397 - DNA, 201 bp, Homo sapiens
  chr17:3867893-3868094
  binary
cgcccgcggggcgcgtgctgggcctgtcgggagccgggggcgcgtggcccgggggtcctcggtcccggtccgcggagctgctaggggtgggatctggccgagagctggggcggtctgcggagcacccggctctgggctgcgcgtcgcctcctctgggctctcctgggcccggggcgtcctgcttcccagctcgaattctgc

SEQ ID NO: 12398 - DNA, 71 bp, Homo sapiens; identical to SEQ ID NO: 7014
  chr17:3908060-3908131
  hyper

SEQ ID NO: 12399 - DNA, 508 bp, Homo sapiens
  chr17:39658629-39659137
  hypo
cgtcctggccctcgagcaggctgcggtaggtggcgatctcctgctccagacgtgtcttgatgtccagcagcatcttgtactcttggttctggcactccatctcactgcggagctcgctcagctgggcctcgatgctgctgatgagtccctggatctgctgcagctgcagggcatagcggcactccgtctctgccaccgtgttctccagccccgctttctggtggagcgacagacaagaagttacagagggagccaggccagagggaaacctagaggtggtcgccaccgggcaggaggctgcaggcataccatgctcagctgggactgcagctcaatctccaggccttggagcgtgcgcctgagctccgtgatctctgtcttgctggtctgaatcatggcagtgttggtagacacctccttgttcagctctgcactctgaaatgcaagcaggaagaaggtggtggggaagctcagctcgagcagcctgaccaagaggctgtgtccgccc

SEQ ID NO: 12400 - DNA, 104 bp, Homo sapiens
  chr17:39659216-39659320
  hypo
cggcggttcctctctgccatggcctcgtactgctccctcatctctgccagcacgcgggtcaggtcaatgcctggggtggcatccatctccacgttgacctggcc

SEQ ID NO: 12401 - DNA, 37 bp, Homo sapiens; identical to SEQ ID NO: 8098
  chr17:40332770-40332807
  binary

SEQ ID NO: 12402 - DNA, 322 bp, Homo sapiens
  chr17:41995104-41995426
  hyper
cgacagggacctgatacaacagtgcgttaaataaggagcttattgagctatcatgtcgtaagccggtggagaagtccagggctagtgtgggggctccggcgggggctgtggcccccatccgcatggagcctccccacggttcacaggtctcggtcttcggagccttcagccccgtgagcccgaacagtccacacggcggcgccagaccctcttcccaacgccaccctctgaagcctccgctccaaccgtctccacttctgcttcaggctcaggattttcacttttctcgaatgggggtggccctcccctgatcttctgagtc

SEQ ID NO: 12403 - DNA, 122 bp, Homo sapiens
  chr17:42906461-42906583
  binary
cgatttcacatcgtcttgatgctaacaaaattaagcatgagcataatgaaatcggtatcactgccagttctcaatgaacaaaaagaaaaccaaattcgcccatttcgcaaaggaaaagtact

SEQ ID NO: 12404 - DNA, 54 bp, Homo sapiens; identical to SEQ ID NO: 10370
  chr17:46620299-46620353
  hyper

SEQ ID NO: 12405 - DNA, 64 bp, Homo sapiens; identical to SEQ ID NO: 11245
  chr17:46687527-46687591
  binary

SEQ ID NO: 12406 - DNA, 321 bp, Homo sapiens; identical to SEQ ID NO: 11246
  chr17:46688806-46689127
  hyper

SEQ ID NO: 12407 - DNA, 149 bp, Homo sapiens; identical to SEQ ID NO: 11247
  chr17:46690905-46691054
  hyper

SEQ ID NO: 12408 - DNA, 66 bp, Homo sapiens
  chr17:47653244-47653310
  binary
cgagagcggcgccgctggagccgaggggggcgccgagcgcagatctggagcagcagagccacggcg

SEQ ID NO: 12409 - DNA, 715 bp, Homo sapiens
  chr17:47653373-47654088
  binary
gcgcagctggaccaggggaggggggcggcggctgcacagctggaccgaagggggcggggtcggccctgggcgacccgctgaggggagggccgcgggccgccggggactggagcatgggacggcgcgcctgaaggagcaggaaggggaaggaggcctgggaccccgaaaagagaaggggagagcgaggggacgagagcggaggaggaagatgcaactgactcgctgctgcttcgtgttcctggtgcagggtagcctctatctggtgagtggtccgaggggagctgcgcagaggggcgggggcccggaggatcgggggagagcgcgggaagcttgcgagccctgaaactttctcccttcccccgacatcccggggatggcggggaagactggaggctgggggagagggcgggtccgaggccggagactggacagatagggttaataggggcggggagagggtgcttggctggcccacccactccgcagcgggtggctggaggtgcgaccagcgctcggaaaaaggcctggagccgggtcgccagggttaccctaccccttcccagagcctcaggaccgctgaagccgggggcgagtggggcgcgggtcgtggagctggtgacctgcaggcttttcccctgacctctgggactcagagagcctcgggttctgggtcccccagagcacagagccggtccaggcggggggcggcccccgc

SEQ ID NO: 12410 - DNA, 80 bp, Homo sapiens; identical to SEQ ID NO: 8121
  chr17:58498618-58498698
  hyper

SEQ ID NO: 12411 - DNA, 112 bp, Homo sapiens; identical to SEQ ID NO: 7021
  chr17:61777761-61777873
  binary

SEQ ID NO: 12412 - DNA, 76 bp, Homo sapiens; identical to SEQ ID NO: 7022
  chr17:61778423-61778499
  binary

SEQ ID NO: 12413 - DNA, 256 bp, Homo sapiens
  chr17:71431621-71431877
  hypo
cgccggctgcattgcgggcgaagcactggaacatgccggtatcatcgggcaccaggccgctgatctgcaggcccccgtcgttgcgctgccggaagcgggtcaacttctccacctccaccacggctgcgtccttgtaccaggtgatggagggcggcggcacacctgtgggcaagacgtgggcccaccgtcaacctgcctcctgcctcctctccgcctaggaggggtgcttgggaggaggccgggcccggaaatctgc

SEQ ID NO: 12414 - DNA, 81 bp, Homo sapiens; identical to SEQ ID NO: 7025
  chr17:73584287-73584368
  binary

SEQ ID NO: 12415 - DNA, 170 bp, Homo sapiens; identical to SEQ ID NO: 7026
  chr17:73584951-73585121
  binary

SEQ ID NO: 12416 - DNA, 44 bp, Homo sapiens
  chr17:74864600-74864644
  binary
cgggcgcgggttgccctcgtcgagagccatgggcgcggcgcggc

SEQ ID NO: 12417 - DNA, 164 bp, Homo sapiens
  chr17:74865294-74865458
  hyper
cccctggtgatgaccagtggggctgggctgggggaacggatggcgttggggttcggggtgcggatggggagggttgtgttattcggggacctgtcccgagttgggcagggttggagaggactcggggtgcagaggtaagaatgggggcagaaaacccccaggtc

SEQ ID NO: 12418 - DNA, 104 bp, Homo sapiens
  chr17:74908627-74908731
  hypo
cgcagatgttcacggcagatgtcctggccactgatggagcaacaaggctggacggatgagccggtcccgctctgctcctcgggtctcggtgtttcaattaactg

SEQ ID NO: 12419 - DNA, 132 bp, Homo sapiens
  chr17:74908814-74908946
  hypo
ggcacgagggagccgtgcgctctgtgatgagactgcagcaaggtgatgtcagccagtccccgcccgcgccccgccgtgtgcggagggaagaagccaaaccctagtgcctgcccagccgctgcatcctgagac

SEQ ID NO: 12420 - DNA, 244 bp, Homo sapiens
  chr17:76851787-76852031
  hypo
cgccgcgccgcggtaccacgcacaggagccgtcacttctcttgatgcaggcgaagaacttggcctggtgcccgttgatgttcttctctgtgacccagtccatccagaggcactcgtccggggaggagatgtagcacgggatcatggggcagcgcgtgatctggggaggggcacacggagggggacggagtcagggacccaggaaggggtgggcagaggctgctctgggggcatgtccagaaccc

SEQ ID NO: 12421 - DNA, 287 bp, Homo sapiens
  chr17:77113248-77113535
  hypo
cgcccccccaggagtctgcggtgaggaggccccactgcctggaaggacagatgccgcctctgcctggagcagcccagtgtgttaggacccctgctcagatgtggatgggtctgacgctcagccaccctggcagggacaggcaggagtccgcgtccttgctgaaggtgggctttgcggtggggaggaggagcgcccagcagggaagtggctgctcacctccctcacctgcgcctccaccccacgctcccatcacccggggccacgcacgctttgttcacaccacacac

SEQ ID NO: 12422 - DNA, 47 bp, Homo sapiens
  chr17:77126804-77126851
  hypo
cgataccgagcagtcttctgacacagtccctggaacgagtggagtgc

SEQ ID NO: 12423 - DNA, 245 bp, Homo sapiens
  chr17:77126880-77127125
  hypo
atggggcctgccatgctctaagctctggcctccctgcctggaggcgggacctggcccaagcctcaaagccgaagcacaaattcctcatcagtgaagatccagagccgccgtggtgctaggacacggtgcgcgggaatcagccccgcacctgcaaggcagcgtgctctgcgtgccctgcgtgtgccccatgtgtactgtgtgccccgtgtgtgagcatgtgtgccccatgtgtgctgtgcccccat

SEQ ID NO: 12424 - DNA, 295 bp, Homo sapiens
  chr17:77127177-77127472
  hypo
ccccgtgtgtgcacatgtgcgccccgtgtgtgctgtgtgacccgtgtgcttgtgtgtaccgtgtgtgagccatgtgctgcgtgtgctgtatgctgtgtgctccgtgtgttctgtgcactgtgtgtgccctgcgtgtactgtgtgctctgtgcccatgtgtgctccgctcagtctccatgtgccctccgtgtgtattccatgtgccctccgtgtgctgtgctctgtgcacgctgggaacagcgctagagcgtctgtgcttctggacaggaaaacaagcccctcgtctaccttcacc

SEQ ID NO: 12425 - DNA, 221 bp, Homo sapiens; identical to SEQ ID NO: 8144
  chr17:80186335-80186556
  binary

SEQ ID NO: 12426 - DNA, 818 bp, Homo sapiens
  chr17:80186618-80187436
  binary
gcgaagcgagcctggactccgggggaggcgaggccgggaagacccagtcccgaggagcagagggggcgggccagctccgggccgggggcgccgacggggccggttccggttgggggggtccctgggcccggcggggttgcgggacgcgccgtcggggagctgcggcccgggagcccgtccggaggcggcgcggggtccgggcggggcgcgcaggggcggcgccaggcggtgacgtgcgcgggggacgtgccgcgccagcgacccgagcacttaaagtcgcccccggcgcggagcggaccggcagaggcgggcagaggcggcgagaggcggcgagaggcgggctgaggcggcccagcggcggcaggtaggcgcggccgcgatgctcgcgcgcgggccggggcccaggagctcccccgtgccgggcaagggggcgacctcggggtccgcgctctcacccccaccccgcccactttgtccatcaggtccgggggcgcccggggcatggactagccttctcgaccccgagcgggccccaccgagggctcccgagagccagccgcgcccctccgcgccctcgcatacctggctgcccagtctcgtctcccccggtccggcccggcgcccacccgtcgggctgccctcaggggctgggctcgggccaggagatggctgcgccggcggccaagcccggtccgggtataaatagctcggtccgcggtggcggggggcgcgggctatatttggtggggctgctgcagccctccctgtatgggtggcctccccgagggagtggggagcacttgcgctcgggccgtggc

SEQ ID NO: 12427 - DNA, 278 bp, Homo sapiens
  chr17:81038567-81038845
  binary
cgcgaagcccagggcgccgagggcaccgcggccgaacccgccctgcgcgagcctcgcagtcgccagttccggggttcgcagatgcgcggggacccgagtgacgcgcgcctcccggagagccgtggccgggctggcccgggcctgggtcccgcttcccctcggcgcggcccccgcccccgcccccgcccccgccgcgggccgagtcacgcggtgatgtcgagcgaagctgttttccgagaaggtcggggcagagccggtgcggggcgggtggtgtccgc

SEQ ID NO: 12428 - DNA, 508 bp, Homo sapiens
  chr17:81038865-81039373
  binary
cgcagccgcagcctccgttccgggtccccgcgaagccacagtcgccccccagcgcccccggcggagcctccccgggggaaggggcgtggcgctggggggcagagtcgccccgagggccgtgggcggtgcccggctgtcccgggagcggccgcctcccttctcggccgagcggggccgcgggcggatggaggtctggggggggtcggccgggaacgccggcgccgggagcctccgaggccgacggctcttctggggccgcccctgcccccgcggagtgattcagccccggctcgctgcctctgcccggcgggtcggtgcatccccgaaccgaggcccggggcgttccgctccagcagaccgaagccagaaacgccgcccccgccacccaggccgagtgtgtcgagaaggggccggcgcccttttcagggtgtcaggggactgtgtgcccggtaggagggggcgcctcccggagcccgaagggagggcgcggtaggcagccgagggtggc

SEQ ID NO: 12429 - DNA, 79 bp, Homo sapiens
  chr17:81050575-81050654
  hypo
cgaaggccctgggacatggccggactgagggtcttgctctcggacatgtgcccatcatggccgaggtgcaggtgccttt

SEQ ID NO: 12430 - DNA, 206 bp, Homo sapiens
  chr17:81050716-81050922
  hypo
tgtctcccgtgctgccggcccctccagcacgtgccgccaactcacatttgaagtggcgttggtcacaaaggtgccttgacgtggacaccctccctgacttggctttgctgagtgtgagatcctttgacggtggtgggcggcgttccagagcctgtcccgtccaggctgcttcctgactctgcctttcttctccagcgccgtgccgt

SEQ ID NO: 12431 - DNA, 134 bp, Homo sapiens
  chr17:81080737-81080871
  hypo
cgcagagccgtgggctcggaagaagcacagcccaccatgccgtggatctccacgcgtggctcctctccacgcctgtgggttgctccaaagctgcagcgtcacgcgcagatgccaggtagccgtgatggaggctc

SEQ ID NO: 12432 - DNA, 539 bp, Homo sapiens
  chr17:951725-952264
  hypo
cgttcagctccctgttgtagacggagccatcgcagcctgcgcctggatcacctcttgggccacggtcaagaagctcggcgcccagctgcgcctggatcacgtccggggccacggtcaagaagctcggcgcccagctgcgcctggatcacgtccggggccacggtcaagaagctcggcgcccagctgccgcctggatcacctccggggccacggtcaagaagctcggcgcccagctgcgcctggatcacgtccggggccacggtcaagaagctcggcgcccagctgcgcctggatcacgtccggggccacggtcaagaagctcggcgcccagctgtgcctggatcacgtctgcggccactgtcaagaagctcagcacgcccaacgcccgaggctcaacctcagtacgggtcagttaccgtctcccttcatttcatggtcacagaatctacccccaaaccagaccacttgcggcacagcacgaggccacacgaggtaccagacgggagtgtgagcggctccaccacgtcacgccttttccc

SEQ ID NO: 12433 - DNA, 307 bp, Homo sapiens
  chr18:12407715-12408022
  binary
cgagcgtcgcctcctacgcccgcggcatctgcagcaagcgcgcatcgcgcaccccagggtagcagcgcaggtctggggctgcgccacagccgcgcccgcagagctatttttagccgctgcagccagcctagccaccagacggggtgggcggcatccaagggcgccccgcccatcgaggccccgcccacgccgcgcccggagccgcgcggcccgaagcacccggcccggatcgcagagcccgcgccctgcgccggcggcaatgaagatctggagctcggagcacgtgtttgggtgaggccgggctgag

SEQ ID NO: 12434 - DNA, 207 bp, Homo sapiens
  chr18:12408117-12408324
  binary
tccccgccccgcgccggccgttcccagaccgcaacttcggcgtcccggagagggcacgcgcgcttccccgggaccgcggtctgggcgaggctctgcgccgggtacggcctctcccccggcgtgcgcaggggcctggctgcaggcacagaggccccgctggtggtcgacagccagggcgggggcagccggagcgggggcggccggggc

SEQ ID NO: 12435 - DNA, 158 bp, Homo sapiens
  chr18:22804909-22805067
  hypo
cggcagtttccagtatcaagactcttactatgcgtgactttgtgttcagtaagagttaaaagggagggaaaccgctctccgcaaatagggcacatgtagtgtttgacagggcctaggtgggtctgcatatgttcccggaggccattttcggagaagaa

SEQ ID NO: 12436 - DNA, 1113 bp, Homo sapiens
  chr18:23806188-23807301
  binary
cggatgccgcagttttccaagtgcagcttgcccctcccacgtgataggtttctggcatcgcccctccttgctggcgattctggggaagattttaacgctccctggagccgtccccagtgacgtcacgggcgcggctccgctccttggccaatcacgcggccggatcccggggaaacccggggcggtggcggcggcctgggcgcgtgcgcgaggtctccgcgtggctatataaacatggctggcgtggccgcgcggcggggccgtgccaatcgcgcgtagggggctgtgggcactcggggttcgtagttttgaaatttctggcgggggagcagctgcgcagttaggctcgaggtgtgagcgacgaccttccgggagccgcaagtccaggctcccccgcagcgggacccgagcctgaggcgcagggctgaggcagcgcacgtgtgagcgccgctgaggaagctgcgagaggtcgggcgggtgtcgctccgggggcagcccaggctcgcgcggacgagaggaaggtccgggacgcgcgtgtcctgccgtgcagcgggcgcccgtcactgacttcgctgctgcggcccccgcgcctctccccagcgatgctgtggaacccgaaccgcaccggagtcggctgccgcgcgccaagcctcccctcacctctgctcccggaaccgcagcgccaaagctgccgctgagcccctgggggatgcccgccggcctcaccgaacccgccggcgccgctcccccggctgctgtgagcgcctcggggaccgtgaccatggccccggccggggcgctgccggtgcgggtggagagcactccggtggccctgggcgccgtgactaaggctcctgtcagcgtctgcgtggagcccacggcgtcccagcccctgcggtcccccgtggggaccctggtgaccaaagtggctccggtcagcgcccctcctaaagtcagcagcggccctaggctgcctgctcctcagatagtcgccgtgaaagcccccaacaccacgacaatccagtttcctgctaatttgcagcttcctccaggtatgttgataaccctttccagccttgtctgtcggtccagctggcggcgacgggaaaattc

SEQ ID NO: 12437 - DNA, 122 bp, Homo sapiens
  chr18:24130266-24130388
  hyper
cgcatcaattgaaacccatccatcaatttgcattttttttttttaagaaagaatgaaagaccaggtctcagggcagtgtgggcttctgagtgggagttgacgatgtctttttctgcagcgaa

SEQ ID NO: 12438 - DNA, 238 bp, Homo sapiens; identical to SEQ ID NO: 8157
  chr18:2848166-2848404
  binary

SEQ ID NO: 12439 - DNA, 369 bp, Homo sapiens
  chr18:2906430-2906799
  binary
cctttcagtcacttgcgacgcacccgcggtttccgcgtgctgtgaaatcgggaattgttgatgccggagccaagagtgaggccggtttggaaagtgcagccgtctgcgccggagaggctggaaacgccccggccccgggcaggggtccccggcggcgtccgggtggcccgcggcgtcctcggaagatgcgggcggacgcccgtgtgtcccgctggcctgacgtcgcaggggtggccgcagagtcctcacggggaccccgctcgccgggactcatggaggggaccctgacggggcagtcagggctgaggtttcctaatcccgtgtgtttctttctccccgacgcccggcagaggcgccctcgcccccgcc

SEQ ID NO: 12440 - DNA, 414 bp, Homo sapiens
  chr18:35249615-35250029
  hypo
cggcttaacctcagcaaagcgtcagcaggcctttgcaggggtagggaatgcaggaccccgcagtacctacagacggagaggcaggcgctactcctggcacgtttcccgtgtgcgcaggtggcccaggggaaggggtgactgctcgccgttgctccgagcttgtctctgggccccggagggcagtgggaatgccaccctgagcagacgtgagactcacagggcatccccaggcgcactctaggcttcagtcgtgcacacgtacacatttactgagcctgtaccgtgtgccaagtgctggggattccgcaagcaagaaaacattcggagtctctgacttcacagagctaaaattcacacgggaggaggcggtcggcacataacagacaactagagaatgacgcgagttgagatggc

SEQ ID NO: 12441 - DNA, 80 bp, Homo sapiens; identical to SEQ ID NO: 6007
  chr18:44335955-44336035
  hyper

SEQ ID NO: 12442 - DNA, 204 bp, Homo sapiens
  chr18:47813485-47813689
  binary
cgaccctccatcgtggcgcctcacagaccccgcgtaactcactgcggacttcccatcgcggttctccacgcacccctccctgtttatctcatagacccacctggcacccgcacccacccccagtcgcggctgtccacggatacccggacacggactcctcgtcacggctcactacagaccactcaatgtgactccttacaaccc

SEQ ID NO: 12443 - DNA, 103 bp, Homo sapiens
  chr18:5133043-5133146
  hypo
cgcctcgggttttggtaagctggtttggtgtccatgggggcctggctcttgagctgctccaggctgagagcagcgagctgcgggttcccgggaggcagcgagg

SEQ ID NO: 12444 - DNA, 34 bp, Homo sapiens
  chr18:54789287-54789321
  hyper
tcctacagttttgcagagaagtctatgagtgatc

SEQ ID NO: 12445 - DNA, 135 bp, Homo sapiens
  chr18:75339359-75339494
  hypo
tgggacagagagcagcccggatgcgcggagcagacttggacttcagagcaccttcgctgaagccgagtgctgctgtgccaggtttgtggcggtcatggtggaaagtggtgagtgcctcgggatgggtgctcctgc

SEQ ID NO: 12446 - DNA, 241 bp, Homo sapiens; identical to SEQ ID NO: 8168
  chr18:75873544-75873785
  hypo

SEQ ID NO: 12447 - DNA, 107 bp, Homo sapiens
  chr18:76123588-76123695
  hypo
cgtgatccacagaaatgattgctacgttccctgcagaacggacggcagtcgctggacagggccccagagcgcctgggtgcggtcagctccgcggactccccccggga

SEQ ID NO: 12448 - DNA, 31 bp, Homo sapiens
  chr18:76123894-76123925
  hypo
ctgtgggcccgagcgccgagggtcccatttc

SEQ ID NO: 12449 - DNA, 144 bp, Homo sapiens
  chr18:76129277-76129421
  hypo
cgcagtaacacacggcacagaccgcgtgcctttcctccatctgcttaccgagtcggcgcggccacttaccacccatggcagcacattgcaaggtttgtccgtataaaagaaagtgccggcagatcgtgacgtggaggcctcgga

SEQ ID NO: 12450 - DNA, 180 bp, Homo sapiens
  chr18:76129450-76129630
  hypo
ggccaggctttgctgcgatcactaaaacctggttcgaaatgagccactttagccctccgcatggtggcctcctaggcatccaggcagagggaccctccccgacagcgctctgggggcagcccaggaaggctcagtgctgcggtaattcggggcctccaggtccaccttacgctcatccac

SEQ ID NO: 12451 - DNA, 441 bp, Homo sapiens
  chr18:76151089-76151530
  hypo
cgtccacacagtgcgcaggtcaacactaggagtcggtggcttctgcggcctggcacggtccacggtgctgcgggttccaaaacgccaggcgagccccacggcctgcgggtgcccgggaggtgcagactgaagggcaagaccttgtcagagagagaaagaagcaataacgcatccgatttcacctgctcgcggagagagctacacagcccaccccgacacttttacacgacgaaaggggcttcgcggtccggcaagcctgagctgaaacgcaggtccatcgcttaccctgcagcagttcttcaagcttcggggcttcggtttcttcctccaccccagggggacggctgtgcagggccgtggtgtggcctgagccgggctgcgtttgtggcttccttcccggcacctgctgtgtcctcggggtcttcggtggccgctcccatc

SEQ ID NO: 12452 - DNA, 115 bp, Homo sapiens
  chr18:76189679-76189794
  hypo
cgtgggacccatgacgcagagaggcaggtccctacccaccgggccgtgggccgctgagcacagagcgtggagccctgcggcggggtcgttcctgggccccgcgtgccatcctggg

SEQ ID NO: 12453 - DNA, 273 bp, Homo sapiens
  chr18:76189872-76190145
  hypo
gctccctgtctgcgggccccttgctttccgcagcagccggcctgtcggtcctcggcgggagcctctcgttccccagccacggggccttcccggggtgcggccgagtcaggcggagaccccctggggtgggtggcgggagcggggccgcagcaacagggcggcgtggagggggagaaacaccttacccagccggcggccccctccagcgtgcagctggaacgggaagctgtctgctcagccgtcagaaggatgcgagaaattacctagctcccc

SEQ ID NO: 12454 - DNA, 464 bp, Homo sapiens
  chr18:76435960-76436424
  hypo
cgttcactcaggaagccgaagcccagaagagtgaggtctcaaagttcacagcacgtggcctagaattcaggggtgcagagctcctgcttggtaactcatcccctgtgcggtgatgcttctgatcccacagcaatgcctgcttctgcgaggctggtccagggctggaacggagccctgtgccgtgatgcttccgatcccacagcaatgccacgctcctccagagctggagcagattccgatcccacagcaatgccacgctcctccagggctggagcagattctgatcccacagcaaggccgcgcttctccaaggctggagcagattctgatcccaccgcaatgccgcgcttctccaagactggagcacattctgatcccaccgcaatgccgcatttctccaaggctggagcagattccgatcccaccgcaatgccgcatttctccagggctggagcagattccaa

SEQ ID NO: 12455 - DNA, 148 bp, Homo sapiens
  chr18:76480528-76480676
  hypo
cgcttggggaggaagggaagaccaaggcttgagggaaaccatcgaaggatgaggccattgtttgaaatgattctcctcagctgcaaggatggataagggtgtcgctgatctgaggctggccaggccgtgctgggccgacgtccttgcc

SEQ ID NO: 12456 - DNA, 487 bp, Homo sapiens
  chr18:76486313-76486800
  hypo
cgagtgatggcgcaaagcaggccggtgaagcctcggcgctgggcccggcctggcactgcgcatccttggccttcgggacccgggctcccgcccccgtgcccagcctcacggagcccgcccaggcctgctgtcccccgagctccaggcccactgcccgccagaaccttctggtcttgcctcgcttcccgcctgcacttttctttcccggcctggcagagacatctataccagtgggaaaggcgagccactccggcagcgctgccaggttgcactccagcacctcacactcgcttctcccgggacttaaatttaaactcctcgagcgtcatgtccccatggctgtctggggccatcattgccacctcgtactcctctcttcactgccacaagaccaagagacagatgcgtcccggggtccttccacagcgttcccaggggaggaggagggcgcctggagccctggggaaggcgagcccgagccagcgca

SEQ ID NO: 12457 - DNA, 432 bp, Homo sapiens
  chr18:76495838-76496270
  hypo
cgccacaaggaaacatttttatcctcggtgtgagcccggcctcgcctccctggtcacaagcaaagccagagggaagcagcgaatatctgtggacacctgctctgcgccgggccgcccgcacggctccagggcaagctcggacctactctgtgagccgtcattttgccccattgtagacaaggaagccgaggcctccgggcagccgtcgtgggtaaatattcgatcccagctctgagtcctgatgtgcggtggtttccagtttccaaggggtccccgtcacggccgattccaaggtagcaagcagacagcactgacggggttaggaagagacggagtgggaacaacacggcggcgttccctccccgtgagcgtgaagcgcggtcgatgccccgcaacggtgcgaggtgagcagtttccatgtttatcaccgtc

SEQ ID NO: 12458 - DNA, 284 bp, Homo sapiens
  chr18:76534718-76535002
  hypo
cgcctgcagactgagcccagctcttaaccccaccgatgtttccaggttccctggcacccgctctctcccgaggctcagagtgggcgttggtgtggaacagcccctaagaggcacctcggccttcccggagccccggaacgtggaggctaacccaggacagagacggtcactgcaggagaaaagacgacaccgtcagtccttcccccggtgcacaaccgaggacctcctccgcatttgcccctgcgtctgaggcagcatctcgggaatctgcagtctccaagtgc

SEQ ID NO: 12459 - DNA, 178 bp, Homo sapiens
  chr18:76552775-76552953
  hypo
cgggtggcgtgagactggcgggtggtgtgagattggcgggtggcttgaggatggcgagtggtgtgaggacagcgggtggcatgtggatggtgcgtggcctgtggacggcgggtggcatgaggacggcaagtggcgtgaagatggtgggtggcctgtggatggtgcatggcctgtggac

SEQ ID NO: 12460 - DNA, 63 bp, Homo sapiens
  chr18:76626405-76626468
  hypo
ggctagagggagggtgacagccgcagccgaacctcagagctggctagagggagggtgacagcc

SEQ ID NO: 12461 - DNA, 56 bp, Homo sapiens
  chr18:76653387-76653443
  hypo
cgcaccacatgactctatctacgggaaacacccagcagccagtcaccgaaggctac

SEQ ID NO: 12462 - DNA, 138 bp, Homo sapiens; identical to SEQ ID NO: 8169
  chr18:76685353-76685491
  hypo

SEQ ID NO: 12463 - DNA, 299 bp, Homo sapiens; identical to SEQ ID NO: 8170
  chr18:76685836-76686135
  hypo

SEQ ID NO: 12464 - DNA, 102 bp, Homo sapiens; identical to SEQ ID NO: 8171
  chr18:76686279-76686381
  hypo

SEQ ID NO: 12465 - DNA, 584 bp, Homo sapiens
  chr18:77160022-77160606
  binary
ctggtgccgctcgtggggtcccgacgcccctacccccgggtccggaggagcctgcgccgggccgggacccccagggcacaagaggccgggggacccctgcggtcgcgcgcgcgcgagggggcgggggcgggggggacacgagtttatttaaaaactcgtgtccggggagtttatttaaaactcggaagccggcggccgcgagccggttgtttatgtaaacccggaaacgccccggggggcgggggcggggcggggacggggggaggggcgggggtcacgttacgcggaggacgcgcgggcagcgccgggagaaccgaacccctggcggccgcgaccccggctcccgccccggccccggcccgacccgccatgacggggctggaggaccaggagttcgacttcgagttcctcttcgagtttaaccagcgcgacgagggcgccgccgcggccgccccaggtgggtcagtcccggagggcgcggggggcgcggggccaggtcggggtttgggggcgcccaggccccctccgcgtcctcgtcgctccccggggaccccaggagtccccggcgcgcccgggaccgaggg

SEQ ID NO: 12466 - DNA, 67 bp, Homo sapiens
  chr18:77160661-77160728
  hyper
cgagcgctcgcggcggggtcctgggggaagagcgcagcccggacacgggcgtggacgaagtggtccc

SEQ ID NO: 12467 - DNA, 385 bp, Homo sapiens
  chr18:77307943-77308328
  hypo
cgaaggcctccagggccctctgttggctgctgacccagggccttctctagagcacctgactcgggcacacggaggctgctggaggagtgagagagtgagtggggggaggaattgcaaccaaattcagaatccgcccggccctgaggccgccccttgcctgccacccacccgggtgggggctttatttcgactcaggcacaggcgcacctgccggacccccggtgtctctgcgactccttctccgcactggcctgggcccgggctcccagccctccgctctgtctcgctggggcaaggcgtccctcactggccagttctgacattggtcccgggggagccgccttccacctgctggccctgctggccctgagtgtgactcagccgt

SEQ ID NO: 12468 - DNA, 174 bp, Homo sapiens
  chr18:77308568-77308742
  hypo
cctcaacgcaacaaaaaggtgatttcagaattgtaattactaaagaaaacattaccaagaacgactctgcagcacccctcgttcacgtccccactcagcatctccacgcgggggccacgcgtccgtgtttgctgccggcagccatcagcatccgcaggggtcccccgtctccgc

SEQ ID NO: 12469 - DNA, 122 bp, Homo sapiens
  chr18:77334284-77334406
  hypo
cgcattctgcgtgtgtcccaggaggaccctgtgcggtgactgttccacactttccacatttgcttctcctgcgagtcgcaatgggactgcgtgtgccgctggcccctggcattgcacattgc

SEQ ID NO: 12470 - DNA, 115 bp, Homo sapiens
  chr18:77338977-77339092
  hypo
cgcgccgagtgtcctaacacagttgccacacggctccatgtcctgtgcacaggccaggggttcgagtgggcatcagcaatgctcacttcagagcccctccgccacgacgtggcca

SEQ ID NO: 12471 - DNA, 259 bp, Homo sapiens
  chr18:77339121-77339380
  hypo
aaactgcgtctcctgcctccagctgcgttacttggagaagcaggaacctctccatcctcactttccatccgcacatccagggccgcccacgtgcacccacaccgtgcgctcactgtgtggcctgtcgagaacacagtgtcctctgcccctgatttcccaggagagtcgcacgtctgtgatggtggtctcccaggcacgcatggccatggagcacgggaacgtgtgcgcctgctgggagcacatgggaagactgcacgcc

SEQ ID NO: 12472 - DNA, 60 bp, Homo sapiens
  chr18:9707859-9707919
  hyper
cgtgggacccagaatgtcgcttgaggatgggacccccgcagacctccacgcgctgccacg

SEQ ID NO: 12473 - DNA, 276 bp, Homo sapiens
  chr18:9708063-9708339
  binary
cggatgccggagggcgctgggggaggccgacccgcgcggggctggtccgagggcggaggcaatccgccggcgacgccgcaggtcccgggtggctgacgccgtccgggggcgttcctgggagctgggggccggcgaggctggacccgacgcgcccgggaggagccggccggcggccacgtgacccaccgcggcggggccggcggcccagaaatagcagcggcggcggttccgcccgcgggcggcgcgagcgaggggcagaggcgagagacgccggcg

SEQ ID NO: 12474 - DNA, 202 bp, Homo sapiens
  chr18:9709406-9709608
  hyper
gctggtctcatgaaaaccatttcctaaaaaagggcagcgaaagggtcgcattcttgtgcgaactgatctgtcaagatgggggtacaagaactgtagaaagaggaaatgatttcggtgaggactgaattgtgccagcgtctctaggcttcctctaggctcttgtggaacctccggcaggctcccatcatcggctcccatcacc

SEQ ID NO: 12475 - DNA, 215 bp, Homo sapiens; identical to SEQ ID NO: 10403
  chr19:10400761-10400976
  binary

SEQ ID NO: 12476 - DNA, 279 bp, Homo sapiens
  chr19:10401208-10401487
  hyper
cctggcaaccgggtccctcagctgttcccgcggttccttccatgagcccagccttgcgtcccggctccgtgttcttcaccgggtgtagggtccttcctgatccttgacccagcctcgtctctcctttgcccttgccgcaaacgcactctcctcgtatcccggcattctgccaggaccctgagaactggttcatcccccatcccccatcccgggtccccttctctcagccttgctgtgttcatccaagaacccacctttcctctcctctacgccctcccc

SEQ ID NO: 12477 - DNA, 485 bp, Homo sapiens
  chr19:10529649-10530134
  binary
cggtttttgctcggcgttcgcccacgccgggagccccctctggcggggagaaaagtggctgtgggggttgaagaccggcagtcttttttttttttttttttttttttcaaataaggagaagggcgcggggggagggcggtggcaaacggcatcgcgtgccctggggagcccgtgacagggggcgcacgggggcaggggtctggtccccgggtcccgcagcagagcagtttcgcgttcgagctcttatcggcgtggggggggggggcggtgggacacgcgggcgcgtgcactccccccgcccagcagccatccttgggggggttgagggggatgggggcgcactcggatcccgctcgctctctgcttgctcgctcggcgcggcgctgggggaggcgggagcgtgagtcacggcgactcccgatttaggtgccggaaggggggctctgctggcgggggccgcagggaggaggctcgcctgtttactc

SEQ ID NO: 12478 - DNA, 111 bp, Homo sapiens
  chr19:10530526-10530637
  binary
cctccaaataggtagcacatgtgcgcacacatccttcacccacagacacacacagttatacacacagccaaatccagagaaacgggcagacaacagcagccaaccacgtgc

SEQ ID NO: 12479 - DNA, 631 bp, Homo sapiens; identical to SEQ ID NO: 9301
  chr19:10530654-10531285
  binary

SEQ ID NO: 12480 - DNA, 285 bp, Homo sapiens
  chr19:11532739-11533024
  hyper
cgagggaggccattgtgggatggcctcctgaagaaatggccctctgctgcgggcaggataggtcttctgtctcgggctgctccagaactgcagataggtctccgagcttttcggggacagggtgggacttctttcccttggaggcggagcttgagacgggacagggtctctgacgtcttgggcttccttggggagtgagagcttccccagggaggtggggcggggactctgaggaatggggtggggcttcccctgtgggcggggcctctgacgtccgggacagag

SEQ ID NO: 12481 - DNA, 68 bp, Homo sapiens
  chr19:11592604-11592672
  binary
cgtgattggtcctcctgactgtggagtcatgctcgctctctgctagggggaacctggcctctctctaa

SEQ ID NO: 12482 - DNA, 189 bp, Homo sapiens; identical to SEQ ID NO: 10409
  chr19:11593453-11593642
  binary

SEQ ID NO: 12483 - DNA, 255 bp, Homo sapiens; identical to SEQ ID NO: 6022
  chr19:12075818-12076073
  hyper

SEQ ID NO: 12484 - DNA, 221 bp, Homo sapiens; identical to SEQ ID NO: 7076
  chr19:12995851-12996072
  binary

SEQ ID NO: 12485 - DNA, 106 bp, Homo sapiens; identical to SEQ ID NO: 10413
  chr19:17392397-17392503
  binary

SEQ ID NO: 12486 - DNA, 240 bp, Homo sapiens
  chr19:17716539-17716779
  binary
gggatgtggcctcctccatagggacgaggtttcccccatcccagctcaaaatgccccctaggtgctgggggcgtggcctcaagttggggatgtggctccttccttcgtcgcgcccttgggcgtggcctcccgagagggcggggcatcctccattcctaattccccaaaagggaaagctgagtcaagggcgtaggcgcagcccacccttggcgtggagccccccgagccccgcccctgggg

SEQ ID NO: 12487 - DNA, 133 bp, Homo sapiens; identical to SEQ ID NO: 8212
  chr19:17958343-17958476
  hyper

SEQ ID NO: 12488 - DNA, 62 bp, Homo sapiens
  chr19:18899652-18899714
  hyper
tgttgatgcacacggagttggggacgcagttatgttgcccggtctcacactcgttgatgtcc

SEQ ID NO: 12489 - DNA, 91 bp, Homo sapiens; identical to SEQ ID NO: 8221
  chr19:19729161-19729252
  binary

SEQ ID NO: 12490 - DNA, 136 bp, Homo sapiens; identical to SEQ ID NO: 8222
  chr19:19729395-19729531
  binary

SEQ ID NO: 12491 - DNA, 147 bp, Homo sapiens; identical to SEQ ID NO: 8223
  chr19:19729585-19729732
  binary

SEQ ID NO: 12492 - DNA, 51 bp, Homo sapiens
  chr19:19738572-19738623
  binary
cgagggggcggtgccgaggcgtggaggtgatcggagtggacagagaggcgg

SEQ ID NO: 12493 - DNA, 505 bp, Homo sapiens
  chr19:19738668-19739173
  binary
cgggcggggcaataggctgttccgggtgggacggaggacactggcggtctccgggacaaagacagcggttggggaagggatggatggccgggcctccaggcgtctccagactggggaaggggtagggggttaagggatcagagggcggcgtcctggccccgcaggcacgtgccgcgcccttcccccgggcccaggcccgcacccgcccgcctcccgtccgtgcaggcctcacctgggcctccagtcacgccgcagacaaggcgggctcgcgggggttcggggcgggctcgaggcccatggcccggcgactgcggcgggagcggtagagcgtccgggtgcgccctgtgcgggttgctgagagggcgcgggaggcggggtctccccggcgccccgcccccaccacctgggggagccctgccccgccccgccacctgggggagccccgcctccacggccgcgtcgggggcggtgtcgcccggaaccgcagcccccctgtttcctcccc

SEQ ID NO: 12494 - DNA, 247 bp, Homo sapiens
  chr19:19739428-19739675
  binary
tccctgatccgacttggctcccaccgcccggacccccgcccagcttcggctttgccagctcgcagtatcagcgagccgcggcctcctgtgcgaggcccacctctgcggccccagctgatcatcgggcgcacgctagggttttgcaatcccgcccccgtacccctcaccctgggacagcgctgccccctgcaaagcccggccctgccctgccctgccctgtggcttcctccctcggcctccctgcggc

SEQ ID NO: 12495 - DNA, 262 bp, Homo sapiens; identical to SEQ ID NO: 5771
  chr19:19843330-19843592
  binary

SEQ ID NO: 12496 - DNA, 47 bp, Homo sapiens; identical to SEQ ID NO: 5772
  chr19:19844044-19844091
  binary

SEQ ID NO: 12497 - DNA, 196 bp, Homo sapiens
  chr19:22799568-22799764
  hypo
cgtttgaccgtgtcctgggagttcataggtaaaataactgccgcgacctgcactgacccggaccggagtgcctgaaaggggccagctgcctattccgccagtccgcctggagggctgggacaggcttggtcctgtggacgaggttccatctcccctgcctgcggaaggaagaacgtgaagcacagagaaaggaagc

SEQ ID NO: 12498 - DNA, 331 bp, Homo sapiens
  chr19:267237-267568
  hyper
cgctgcgctgcgctgtcaggacgcgcagttcccgccccgctgaagggacaccgttttacaacacgccgcgtagaccgtgacagggaagtaaggcccacggcagcgctccctcctcagcactcgcggccgcggacaggacgccttttcctcctcctctcacctggtgaccgggtgtcccgaaccgcggccgctcccgggcgggtcctgaagagaccgtggctccgtcttcccggtcgacgccccggggcgacgagtgcggatccgccgcggttcccgcgcgtgctccaggttgggcgggagccgggcgccccctcgcggcagtcctggggag

SEQ ID NO: 12499 - DNA, 296 bp, Homo sapiens
  chr19:30936361-30936657
  hypo
cgagtgccccgactgcggccgggtgttccgcacttaccaccaggtggtcgtgcactcccgtgtccacaagcgggaccgcaagggcgaggaggatgggctgcacgtgggcctggatgagcggcgtggctcgggcagtgaccaggagtcccagtcggtgagccgctccaccacgccgggctcctctaacgtcaccgaggagagcggggtcggaggcggcctctcccagaccgggagtgcccaggaggacagcccgcacccctcctcgccatcctcctcaggtaggttagctgagaagc

SEQ ID NO: 12500 - DNA, 412 bp, Homo sapiens
  chr19:31767664-31768076
  hypo
cggtggacagtttggataagtcccgtagccggaagcctaagtgtgactctaggtgactgatgtacgtggaaggagtcctgatttgggacgcacaatcgttacaaaagaagacggggtggccagtgtccaagtttttgaggaactttgttccacctgtccttcgaagctggtatttcacgttggccagccagtggctgatggtggtcatggacagcccggtgaacctggagatatgcatccgctcctgggggctcaggtctgacatgatgtacttcccttctgaggtctgccggaggctggcggcaaactgggcctggaggatcaggaggtgctgggggttccagtttgactggcggcccttcctcttctgggcgggcgtcgactcctcagcctcctccagagtggccccgtc

SEQ ID NO: 12501 - DNA, 701 bp, Homo sapiens
  chr19:31768105-31768806
  hypo
gagtggaggattttgacgtgtggctctctgtcaagttcttcagcatatcggatatatctgacaaggcattctcgcgtagcggcgagtttgacatgaatgatacgacggcagatgtctttgccgttgtcaccgtggatgaggaggttgccggggctgtggacgtgggtgacagaagcactgaacccaaggagcagcctttgtcactcttcccttttgtcaagtctatgggctggtcgttgttgacgtggtagaaatagcggtcgaggtggtctgccttcttggactgcaggggcggcggggtggccacagcagccttctccgccaggctgttgctcatcttgaaaagcatgctcatggggtccagggcaggcagggagggcttggcggccttgcccaggtgaatgttcatgactgactgcagggcgctcaaagggttaacaaaaggctgttcaggcgggtggtcggtgatgatggccgtgctgccactcaaactgctggctaggggcttcaccagctccttgccattctccaccggctcagcgagggggctcccatccttgcacccatcccgcggggggctggggctgttctcctggctgcggaagcccccatcgctggatgcctccatcttgatgggttccccgacttcgctgctacatggggagggagtggcccgcttgggcggggaaagcttcccatcc

SEQ ID NO: 12502 - DNA, 574 bp, Homo sapiens
  chr19:31769887-31770461
  hypo
cgtcttccttcccttccatttccagcaaggagcgtttgcgaggcttggaccagcgcttggggttgttgttatcggtctcatggttgtcgtcgcggtaatgccccgtctcgttcatgtgcaccgtcaactccaccagggtgtcgtaggcagcgctgcagtccttacagcggaacttgctggcccccgtgaagatggagccatagagcttgctgctctgccggtacagctgcacggtgctgaagaggctgggctccgggagcatgcggctctgtgacacctgctgcagcgtcttagccatggcgctctggtgccagtcgaagctcccgctgccacagctgctgctgctgctactgctgctgctgctgctgccgttgttcttctccgaggagggctggtgcaggttgaggttgaggttggaccagtaggagttggagaggaagttgttgtacacggccttcatctgctccaggctatccgacacagtcgtgtcttccagtgggaccgtgacctccttggtctcctcttcgttcttgatggagccgctttcaaagtcagccattcggtcactggtctc

SEQ ID NO: 12503 - DNA, 157 bp, Homo sapiens
  chr19:31770490-31770647
  hypo
ggcaggaaaactcggcggccggggagttctggtagctggggcaggccctggcgagctccttctccgggcacatgtacttggccgagggctctccatctgccgtatgctcctctgggtctaaaccttcgtccaccagggcagcagcctttaactcttc

SEQ ID NO: 12504 - DNA, 59 bp, Homo sapiens
  chr19:31839508-31839567
  binary
cgccagcatctaacatggacttgacagtcatctgacaatacccagaccctgtgcgctcc

SEQ ID NO: 12505 - DNA, 63 bp, Homo sapiens
  chr19:36478303-36478366
  binary
ccctgcggcccccgcccccgcgctccgcccctgtgctctcccttgctggcccgcaccattccc

SEQ ID NO: 12506 - DNA, 47 bp, Homo sapiens; identical to SEQ ID NO: 10427
  chr19:3785511-3785558
  binary

SEQ ID NO: 12507 - DNA, 38 bp, Homo sapiens; identical to SEQ ID NO: 6048
  chr19:38182720-38182758
  hyper

SEQ ID NO: 12508 - DNA, 86 bp, Homo sapiens; identical to SEQ ID NO: 9382
  chr19:38719834-38719920
  hyper

SEQ ID NO: 12509 - DNA, 264 bp, Homo sapiens; identical to SEQ ID NO: 9383
  chr19:38719956-38720220
  binary

SEQ ID NO: 12510 - DNA, 187 bp, Homo sapiens; identical to SEQ ID NO: 9384
  chr19:38720439-38720626
  binary

SEQ ID NO: 12511 - DNA, 390 bp, Homo sapiens
  chr19:38754883-38755273
  binary
cgcgtgtctgccgccccctcctcccaccctgaggccagtcctagagcgaaggccctcctccgacgtcgtcaccaagcccaagggaagggtggcaggtgctcagcgggcagacgccccgccccgccccgccaggttctgttgggggcgaggcccgcgcaagccccgcctcttccccggcaccaggggcgggcccaggtgcgcccagggccggggagcggccgcgcaggtgcctgccctttgcgcctgcgcccagctcgccctgcctagccaggtgcgccccgccccctgcctgcccggccaccttcgggagccgcttccaataggcgttcgccattggctctggcgacctccgcgcgttgggaggtgtagcgcggctctgaacgcgctgag

SEQ ID NO: 12512 - DNA, 175 bp, Homo sapiens
  chr19:38755344-38755519
  binary
gggcgtccccacactgaaggtccggaaaggcgacttccgggggctttggcacctggcggaccctcccggagcgtcggcacctgaacgcgaggcgctccattgcgcgtgcgcgttgaggggcttcccgcacctgatcgcgagaccccaacggctggtggcgtcgcctgcgcgtctc

SEQ ID NO: 12513 - DNA, 182 bp, Homo sapiens
  chr19:38852786-38852968
  binary
cgcttgcctggaggctctcgccccgctgcccaatcccttcacggtgccgggcgatccctgcagccgtacgcggacccggtgcacgaccccacctggcgctggtgggcgaacaacaaacaagaccaggtaggcggagcggattgggagccgggaaaggggcggcgcccggacacccctcaccg

SEQ ID NO: 12514 - DNA, 291 bp, Homo sapiens
  chr19:38853193-38853484
  binary
tccggacgcagtcagaactcggtctgcgcgggaccagagtggagcccgaagggcggggcgagggctaccagaatctgggagcctggggggcggggacaccatcggaggggcggggcctgtctgtgagggaggccttaaccccgtttactgcccggagcaggcaccgccttccagctgcatagccaggtggacgtgggcgtggtgctggccgaccccggctgcatcgaggcctcggtgaagcaggaggtcctgattaatcgcaactcggtgctattttcggtgaggcccccc

SEQ ID NO: 12515 - DNA, 100 bp, Homo sapiens; identical to SEQ ID NO: 10434
  chr19:3966587-3966687
  hypo

SEQ ID NO: 12516 - DNA, 183 bp, Homo sapiens; identical to SEQ ID NO: 10435
  chr19:3966755-3966938
  hypo

SEQ ID NO: 12517 - DNA, 127 bp, Homo sapiens
  chr19:42927599-42927726
  binary
cgaccgtggctccttgagccctctttggcattcttcgaggccggggccatagcggcctcggcgggctccgttcccccggccaactccatcaattccccgcggtcctcccgcgggggccaattccagc

SEQ ID NO: 12518 - DNA, 33 bp, Homo sapiens
  chr19:4304684-4304717
  binary
ttggggacccagcgtgcgcggggcccgcgggcc

SEQ ID NO: 12519 - DNA, 331 bp, Homo sapiens
  chr19:44222791-44223122
  hypo
cgcacagcctttgagtcgggtgacctcccccaggccgcctctcacctccaggagctgctggcctccacggaaagcatccgcctggaggtgggcgtcacgggcgagtcgggcgcgggcaagtcctccctcatcaatgccctgcgtggcctggaggccgaggaccctggcgcggctctcacgggcgtcatggagaccacgatgcaaccgtcgccctatccacacccacagttccctgacgtgaccctctgggacctgccaggagccggctctccaggctgcccggctgacaagtacctaaagcaggtagacttcagccgctatgacttcttcc

SEQ ID NO: 12520 - DNA, 345 bp, Homo sapiens
  chr19:44223175-44223520
  hypo
atcctgtgccagggcaagaagttctactttgtgcgcaccaaggtggacgaggacctggcggccacgcgcacccagcggccgtcgggcttcagagaggccgctgtcctgcaggagatccgagaccactgtgccgagcggctgcgggaggccggcgtggctgaccctcgcatcttcctggtgtccaacctctcgccggcccgctacgactttcccacgctggtgtccacctgggagcacgacctgccctcccaccggcgccacgctggcctgctgtcgctccccgacatctcgctggaggccttgcagaagaagaaggccatgcttcaagagcaagtcctcaagacc

SEQ ID NO: 12521 - DNA, 225 bp, Homo sapiens
  chr19:44273529-44273754
  hypo
cgtgcagagaggtgacttggacatgggtgcacatggacacgtgtgcatacaaagcggccctcacgcgttgatggcggccagcagcttgcgctgatgcctgcgggcagcatgagactccttcctgcgagtatgtttgtagaacatccaggcttcttgtagcactcgggcagcggactccttcatctgggggtgggtggcacagtgtccgtggagatagacccttac

SEQ ID NO: 12522 - DNA, 118 bp, Homo sapiens; identical to SEQ ID NO: 10442
  chr19:45656461-45656579
  hyper

SEQ ID NO: 12523 - DNA, 183 bp, Homo sapiens; identical to SEQ ID NO: 7117
  chr19:46002502-46002685
  hyper

SEQ ID NO: 12524 - DNA, 89 bp, Homo sapiens; identical to SEQ ID NO: 7118
  chr19:46519167-46519256
  binary

SEQ ID NO: 12525 - DNA, 421 bp, Homo sapiens; identical to SEQ ID NO: 7119
  chr19:46519582-46520003
  binary

SEQ ID NO: 12526 - DNA, 203 bp, Homo sapiens
  chr19:47137324-47137527
  hyper
cggagggctcagagcagaacacaaaagaggcgcttgtcgcggaaggggttctccgcggcgggtactggcgtcaccagcgggtcatctttggcatgcgtctcgcagaaagccaggagttccgctgctgcctgcgacacctgcgagcacccgggtggagatgtcaccgccctgcccggctccttggagccgcccacttaggcccc

SEQ ID NO: 12527 - DNA, 203 bp, Homo sapiens
  chr19:47776511-47776714
  hyper
cgaactggatgagagacgtggctagacgggggaggggtgctgggccgggggggaggtgggaagactgctcccctccgctgactcagccccttctctcctcagaggcaggccccgaaggccaggagacggcggagatcaccgacttccagagggtgcgtttctgcaaggtggtggcggcccctccgctgccgggggccgctcgc

SEQ ID NO: 12528 - DNA, 423 bp, Homo sapiens
  chr19:47776742-47777165
  hyper
gcgctctgcactaacctcccaccgcctcgctcctctgtcctctgcttctgccacactccagccaggagagggttaaatctaaggggggaggagccagggtctgcgagccgggcggggccagggcagtagtcgggtgcaggccccaccaacgggggacgtcacggcactgggacggctgggacgcttccgcgttagtctcccatggaggccctgggcggctcgagccagtcttcaggccgaatctcccgcctccaggattgcatccgaggcctggcagccggtgacacttccgaagggcttgaattactcgggcgccagccctgtcgtattaaacgcagtgcttccgctcacccttgaactgtgtttctggagggggcaggctgggtcgctgtgcttggcgggcttttctgtggcggaagaggc

SEQ ID NO: 12529 - DNA, 312 bp, Homo sapiens
  chr19:48901504-48901816
  binary
cggcgcctgtccctcgctgcatctcctcctctgtgcgtctctttatctcgtctccctgtccctgcgtctcccgtctgtgcctccctctcctccccgtctctcccggcccgggcgctcagaggccgcccggcggggcccgcaggcgatgcgcggcgccggtggcccccgcggccctcggggccccgctaagatgctgctgctgctggcgctggcctgcgccagcccgttcccggaggaggcgccggggccgggcggggccggtgggcccggcggcggcctcggcggggcgcggccgctcaacgtggcgctcgt

SEQ ID NO: 12530 - DNA, 219 bp, Homo sapiens; identical to SEQ ID NO: 5779
  chr19:50553779-50553998
  binary

SEQ ID NO: 12531 - DNA, 446 bp, Homo sapiens; identical to SEQ ID NO: 8283
  chr19:50833970-50834416
  binary

SEQ ID NO: 12532 - DNA, 73 bp, Homo sapiens
  chr19:51228809-51228882
  binary
cttcctggccacgaatggcagcgtcctccccgacccccagtctgggcgcttctgggagggctcttgcggtgcc

SEQ ID NO: 12533 - DNA, 36 bp, Homo sapiens
  chr19:52058332-52058368
  hypo
ttggtcactggaggacgccatcttcaaaagatggtc

SEQ ID NO: 12534 - DNA, 566 bp, Homo sapiens
  chr19:52342906-52343472
  hypo
cgatagccataatggcccccaactccgcatcgcttgctcgcttttcctggttccccagacaccgacttccactcgacgctgaggatgctccaatccagaccacagaagccctcagtggctaacccccagcttcagattccactgaccattccctgaagccttcttacaccgcaaacctccacaagtaccccatgctggtcgcatccggtcaaggaccccaacagcgctgggaaactcaccctacagctggagtcgcacaaacattcgcttgaggactagcaggtttccgtaacctcttcactcactgccgtagtcacgctcttgtgcagactcagtagcaccttcgcggaacacaagatgtctacagactttgaaaccaggcgtgcacatggaagcagcagtcttggaagatgcttcttacagatagcgagatggccattttctggcgactaaattccatcgtgctagaaaggaaagaggcaatgcagctgatcttctactgtccttttcaccacttccccagctgctaccagcagcgttgtgcattctcaggaacaacattcagc

SEQ ID NO: 12535 - DNA, 61 bp, Homo sapiens; identical to SEQ ID NO: 6060
  chr19:53141353-53141414
  hyper

SEQ ID NO: 12536 - DNA, 57 bp, Homo sapiens
  chr19:53193139-53193196
  hyper
cgggcacctccccaacgcgggctcaggagaagcggtgactgcggaggagagacctgg

SEQ ID NO: 12537 - DNA, 143 bp, Homo sapiens
  chr19:53806012-53806155
  hypo
cgacgctgacacatatgtgcgtgttcacgccaggcttcgcacacatcactggccgtgtcatggggggacacgcaagacggaagcctccaggcgtgttcagcagaaacctcgagcccacactgtgcttcagagtctcccatgcc

SEQ ID NO: 12538 - DNA, 80 bp, Homo sapiens
  chr19:54109766-54109846
  hypo
cggcaaggggttctcgggacatatcaggtagtaggggcactatgagggtgagcgccgctgagacaccaaaataggccaag

SEQ ID NO: 12539 - DNA, 285 bp, Homo sapiens
  chr19:54109903-54110188
  hypo
cggtgagggtggagggcttcttctcctgcgggacaggtatatgcaccgggcggtgagggtggagggcttcttctcctgcgggacaggtatatgcaccgggcggtgagggtggagggcttcttctcctgcaggacaggtatacgcactgggccaggaaaatgcacggaagtgaaggtacaaaaccctcttccctcttccccatctgagaacagggtagcctttaatgaaacctgtgcccagcggcagcccaaacagtgcccaaacccccgatgagacagaatgacc

SEQ ID NO: 12540 - DNA, 182 bp, Homo sapiens; identical to SEQ ID NO: 7132
  chr19:55691158-55691340
  hyper

SEQ ID NO: 12541 - DNA, 496 bp, Homo sapiens
  chr19:56538418-56538914
  hypo
cggtggggcttccggcctcgcacggtggttctgcacggaaagtcaggaattgggaaatcggctctagccagaaggatcgtgctgtgctgggcgcaaggtggactctaccagggaatgttctcctacgtcttcttcctccccgttagagagatgcagcggaagaaggagagcagtgtcacagagttcatctccagggagtggccagactcccaggctccggtgacggagatcatgtcccgaccagaaaggctgttgttcatcattgacggtttcgatgacctgggctctgtcctcaacaatgacacaaagctctgcaaagactgggctgagaagcagcctccgttcaccctcatacgcagtctgctgaggaaggtcctgctccctgagtccttcctgatcgtcaccgtcagagacgtgggcacagagaagctcaagtcagaggtcgtgtctccccgttacctgttagttagaggaatctccggggaacaaagaatcc

SEQ ID NO: 12542 - DNA, 74 bp, Homo sapiens
  chr19:56539122-56539196
  hypo
tcagctcacccctcgaggcgtggtccggcgctgtctcaatctggaggaaagagttgtcctgaagcgcttctgcc

SEQ ID NO: 12543 - DNA, 59 bp, Homo sapiens
  chr19:58545837-58545896
  hyper
gtttgaggccgaagcccctctacgtacccccattgcccgcccaaacaccgctcggccgc

SEQ ID NO: 12544 - DNA, 121 bp, Homo sapiens
  chr19:58556965-58557086
  hypo
cgcttccagctcacgatgcggctgcgctccataaaggcagaggacaagctgtttgctgaggaaggggtggacagcctgaacgtcaaggagctgcaggcggcatgtcgggcacgaggcatgc

SEQ ID NO: 12545 - DNA, 538 bp, Homo sapiens; identical to SEQ ID NO: 8289
  chr19:59049765-59050303
  hyper

SEQ ID NO: 12546 - DNA, 73 bp, Homo sapiens
  chr19:8115163-8115236
  binary
cgtgaaggctgccggcgggacaaacagtgaggggtgaggcagggagggagactcacgttggggacctccccca

SEQ ID NO: 12547 - DNA, 107 bp, Homo sapiens; identical to SEQ ID NO: 7155
  chr19:9129007-9129114
  hypo

SEQ ID NO: 12548 - DNA, 92 bp, Homo sapiens; identical to SEQ ID NO: 7156
  chr19:9129229-9129321
  hypo

SEQ ID NO: 12549 - DNA, 97 bp, Homo sapiens; identical to SEQ ID NO: 5789
  chr2:105468467-105468564
  hyper

SEQ ID NO: 12550 - DNA, 97 bp, Homo sapiens; identical to SEQ ID NO: 5789
  chr2:105468467-105468564
  hypo

SEQ ID NO: 12551 - DNA, 144 bp, Homo sapiens; identical to SEQ ID NO: 5790
  chr2:105471069-105471213
  binary

SEQ ID NO: 12552 - DNA, 155 bp, Homo sapiens
  chr2:105473814-105473969
  hyper
gggcgatcatgagatctcgttcatactgtggtggtgtttcgtttttgtttttgtttttaaagaagggtgaagatgcctgacgcacgaaaactgcactcgtgaggtttttccaccctgagatgacctacacggcagcggtggacagcacctgcctc

SEQ ID NO: 12553 - DNA, 156 bp, Homo sapiens
  chr2:108085842-108085998
  hypo
cgcgggcagccagtaccgtgccatgtgcctgcactcctcagcccttcggcggttgatgggacttgggaccgggctcagcggagcaggaggaggcgctggtcggggaggttcccgcgggcgtgcaggagcccacggaggcggaagctcaggcatggc

SEQ ID NO: 12554 - DNA, 701 bp, Homo sapiens
  chr2:108160925-108161626
  hypo
gtggagatggaaggagacctggtgcactgagaggcggatgtgaaactgaggggagatggaaggagacctggcgcactgagaggcggatgtgaaactcaagagagatagaaggagacgtggcgcactgagagccggatgtgaaactgagggaagatggaaggagacctgacgcactgagagccggatgtgaaactgaggggagatggaaggagacgcggcgcactgagagccggatgtgaaactcaggggagatggaaggagacctggtgcactgagaggcggatgtgaaactgaggggagatggaaggagactgggcacactgagagacggatgtgaaactcaggagagatggaaggagacgtggtgcactgagagccggatgtgaaactgagggaagatggaaggggacctggcgcactgagaggcggatgtgaaactcaggagagatggaaggagacgtggcgcactgagagccggatgtgaaactgagtggagatggaaggagactgggcacactgagagacggatgtgaaactcaggagagatggaaggacacatggcgcactgagagccggatgtgaaagtgagtggagatggaggcggggcgcactgagaggcggctgtgaaactcaggagagatggaaggagacgtggcacactgagagccggatgtgaaagtgagtggagatggagacggagc

SEQ ID NO: 12555 - DNA, 31 bp, Homo sapiens; identical to SEQ ID NO: 6084
  chr2:118981062-118981093
  hyper

SEQ ID NO: 12556 - DNA, 190 bp, Homo sapiens
  chr2:119068126-119068316
  hyper
ttccaaggctctggctttccccagccgacttgggtttcggggcagcgcgggctcccttctttccagcgcaggaagaaggggtgagggaggaggggccggggtgctggcactcaacggtaacatctgttttacttaagcagctcgatttcgttttaggatgaaaaagtattccctttcagcatgaggaatc

SEQ ID NO: 12557 - DNA, 287 bp, Homo sapiens
  chr2:122042359-122042646
  hyper
ctgccgcctgggaggagccctcgcagacatagggctctgcgcgctcgcctccccagcgggcccccaactccgcacgtcgggtcccgccggcgtccatctgtcagtccctaggcgggacgctgggcgggtctctcagtccccagagggcggacagcggggaggccagggcccagcaggggcgccccctctccgcccctggacgtccaacggcgcccggcccgccggcccggcccgagacccgcggggaccgcgcgcggcccttaccgcaggtagctgccggagttgtg

SEQ ID NO: 12558 - DNA, 110 bp, Homo sapiens
  chr2:122042982-122043092
  hyper
aactccgatgtggggctcaggtgacccttgccgcccccaacccgctccacacggcccctctggcctctgctccccactctacgcccagggccggtctccagagcggctcc

SEQ ID NO: 12559 - DNA, 244 bp, Homo sapiens
  chr2:127435291-127435535
  hypo
cacgagggtccgggaggggtgcttggagttgggacccagagcaccaggacttactgtcaaatctctctggcaccaaaacgcatgctccctatgccacctatcaggatgcacccttaaagcacttttaagatgctttttggaaagagccatttgttggtgtgcatttgtcttcaccactgccccaaacatagctgtccaatattcaggtgaaaatgtcccccatcggccgggtgcagcggctcac

SEQ ID NO: 12560 - DNA, 147 bp, Homo sapiens
  chr2:1282750-1282897
  hypo
cgcgcgaatcacccctctgtcagtgcgtgaataaccgctgtctgtgcgtgaatcaccccctgtcagtgcgcgattcacccctctgtcagtgcgcgaatgacccctctgtcagtgcgcgaatcacccctgtcagcgcgcgaatcaccc

SEQ ID NO: 12561 - DNA, 154 bp, Homo sapiens
  chr2:130512142-130512296
  hypo
cgctttaagtgatcacgtgccttccgaatgccaggtgcggcgcccgctctgcgctgctcgctgcaactgctcccaccctttcccagggcgggtgctccactgcgccattcccctcaatccagggatttaacttcagcgaggctgggagcgctcc

SEQ ID NO: 12562 - DNA, 129 bp, Homo sapiens; identical to SEQ ID NO: 9475
  chr2:136873862-136873991
  hyper

SEQ ID NO: 12563 - DNA, 913 bp, Homo sapiens; identical to SEQ ID NO: 9476
  chr2:136874020-136874933
  binary

SEQ ID NO: 12564 - DNA, 483 bp, Homo sapiens; identical to SEQ ID NO: 5792
  chr2:136875399-136875882
  binary

SEQ ID NO: 12565 - DNA, 218 bp, Homo sapiens; identical to SEQ ID NO: 6087
  chr2:136876145-136876363
  hyper

SEQ ID NO: 12566 - DNA, 189 bp, Homo sapiens
  chr2:147344896-147345085
  hypo
cggcggacaagcgacctcgctctgtggccagtgagttgtttctgattcggatgatttttgtccctcggcgcgtgcccttgctccccgcccccggctgcgagacccccggcccggcactcgctctcctcctgtcacgaaagggtcgcggcctgtagccctgtgggcagccgtgccgcgatgaaccccagc

SEQ ID NO: 12567 - DNA, 230 bp, Homo sapiens
  chr2:1488408-1488638
  hypo
cgaggccttccagcagtacgtgggtccctatgaaggctatgactccaccgccaaccccactgtgtccaacgtgttctccacagccgccttccgcttcggccatgccacgatccacccgctggtgaggaggctggacgccagcttccaggagcaccccgacctgcccgggctgtggctgcaccaggctttcttcagcccatggacattactccgtggaggtgagtgagtgc

SEQ ID NO: 12568 - DNA, 51 bp, Homo sapiens; identical to SEQ ID NO: 6089
  chr2:149632592-149632643
  binary

SEQ ID NO: 12569 - DNA, 91 bp, Homo sapiens
  chr2:1520228-1520319
  hypo
cgttataccgcgtcccttacagcccaccttgcgaacctttcccgccccggtccgaggcctccagggctccctgggtcctgtggtccactcc

SEQ ID NO: 12570 - DNA, 124 bp, Homo sapiens
  chr2:161264043-161264167
  binary
cgctgcgggcggcggcggcgggtgcgggcgcgggcgcgggcgcggggcagcctcgccgcgagggggagggcgcaaggaggtggccggccgggcccggggccgcggcagctctgggaactccctc

SEQ ID NO: 12571 - DNA, 204 bp, Homo sapiens
  chr2:161264419-161264623
  binary
cgcgccggccgggggcggggaggcggcagcgcaccgcctcgcgccgcgcccaggcccacccgcgcctccccgcccgcccgctgggcgcggcgcctgccgccccatcgcccgcccggcccccgcgctctccctcccgggatcggggccggagccggggccgggcggcccggggagcagccggcgcccccgctctggtgcaatggt

SEQ ID NO: 12572 - DNA, 238 bp, Homo sapiens
  chr2:1647077-1647315
  hypo
cgccaagcagtcaccaaaaccagggatgaaaaaggaacagacatggtgcccctggcacgcaccttcacagcagtcctgccacacccggaggtctaccctggggatctcgtcacagctgccgtagccgtgagggaactccgccaccctgaacacgtcgctctgcacccgggtgatgttgtccgcgttgtcgcataggatcctggccagcgacgtctgcttgatctgagtcagctgggcc

SEQ ID NO: 12573 - DNA, 237 bp, Homo sapiens
  chr2:1651995-1652232
  hypo
cgaacgtgtgtgccgccgatagattgcagtagaccctgtagtcgtggtagggtgggatcccgtggtcccggccccgctggatgttgatggccgccaggtccagagccaccgtgtgtgccatggagaacagccgctccgtgagctccgtgttcagcagctgcgagggcacacgcattttccccgccaccccgaacagccccctgagaagcggatcgatgccgccctcattcacaatcc

SEQ ID NO: 12574 - DNA, 211 bp, Homo sapiens
  chr2:1709564-1709775
  hypo
cgacctgggatgcaggtgcggctgcctatgacctgggacgcagggtgcagggcacggctgcccacgacctgggacgcgtggagtgtcaccagcccttttggagagtttcccgcgtggagtgtggggctacaaggagcagttctccgtccattacggcctcccccaggcactccaggccctgccgctcaggcatccatgtggcttggacacc

SEQ ID NO: 12575 - DNA, 231 bp, Homo sapiens; identical to SEQ ID NO: 9492
  chr2:172950233-172950464
  hyper

SEQ ID NO: 12576 - DNA, 233 bp, Homo sapiens; identical to SEQ ID NO: 9493
  chr2:172950493-172950726
  hyper

SEQ ID NO: 12577 - DNA, 163 bp, Homo sapiens
  chr2:172967062-172967225
  hyper
ggtgtagtagctgctgtcggtggcggtggacaccggaagggtgggcgactcctggggcttgtggaggctgctgctgctgctgctgttgccacccgggccggcgccgccgccgctcgggggctgctggtgctggtggtacgtgctggaggcggcgatctgggtc

SEQ ID NO: 12578 - DNA, 1041 bp, Homo sapiens
  chr2:174219326-174220367
  hyper
cgcgccactcgctcaggaccgcgcagctgcacaaggagagtggtccccgtagcccctaaagcccccctttctcaaaggggattttaggagtgcccaaggctatcctttgaggtcagaatatataggggggtcgtgttttttccagggggccacctagtcttgcgccatgtctggccgttaccacagcttgcaggacctgtgtcccaacgcgggaaagacagcccgagccccgcccctccgggcccgggtcggcgcgcccagcctgccagccgcgctgctgctgctcctcctgctgtgggaccgctgaccgcgcggctgctccgctctccccgctccaagcgccgatctgggcacccgccaccagcatggacgctcgccgcgtgccggtgagggctgggcgggcgaacccgaggggcgggcgcggtgggtgctggacgcaggcgggcgcgggccgaccctctccaactccgcagcctagcgctgccttaactggtggcctgcctaggcgttgcccgcttgggcaagcccctgattttgtgcacctgggataactgagggccatggggacgttcctgcgtggcgtgcgcacccgaagtgcgggcggcgtggagacttgagtcgtttgcaggatggctagcagcgctggaaagccctaggcacgtgcgtccgccaaaggccggacagcggccgggagcgctggccggtcccgattttgcctgccaggcagagccagcctgcctgccccctgggaggttgtcccgcagcggcccagccctttcccgcacacaactcggagccagtgcgtggctcgccgcgtctatacccgcgctcagtgggtggcccttgggcgcgcaccccgcccggcaagagacgcgtccgcttctaaccgctgagggccagcgcgtctgaggtttaaggtcttgcgaaccggtctcctagaacttgggctgcgcacgcagtgtgaagcgaccgtagtcccgggcggtggttaagtgcatttaaagggcttggtgggtcaaagcgttcgccgaccatttgctc

SEQ ID NO: 12579 - DNA, 42 bp, Homo sapiens; identical to SEQ ID NO: 7183
  chr2:175190730-175190772
  hyper

SEQ ID NO: 12580 - DNA, 518 bp, Homo sapiens
  chr2:175197265-175197783
  hyper
atggttggcttgaaaatgtcactagtgctaagtggcttttcggattgtcttatttattactttgtcaggtttccttaaggagagggtgtgttgggggtgggggaggaggtggactggggaaacctctgcgtttctcctcctcggctgcacagggtgagtaggaaacgcctcgctgccacttaacaatccctctattagtaaatctacgcggagactctatgggaagccgagaaccagtgtcttcttccagggcagaagtcacctgttgggaacggcccccgggtccccctgctgggctttccggctcttctaggcggcctgatttctcctcagccctccacccagcgtccctcagggacttttcacacctccccacccccatttccactacagtctcccagggcacagcacttcattgacagccacacgagccttctcgttctcttctcctctgttccttctctttctcttctcctctgttccttctctttctctgtcataatttccttggtgctttc

SEQ ID NO: 12581 - DNA, 206 bp, Homo sapiens
  chr2:175199935-175200141
  hyper
tgctagactgcagcttcagcttctattagcactttccacatttctgggactgatttttccccaagtttttggaacccagaaagatgcctttgcaagaaaaggccttcttaatcaagtcctttttcatttggtttcaaaaaaaagctagaggtttcttttcttcccctcgtgatttataccccatcccccgcattgctttggggatt

SEQ ID NO: 12582 - DNA, 76 bp, Homo sapiens
  chr2:175204013-175204089
  hyper
cgttttaaaaagcccccaaactaagcacttgatttgataactaggctttttaatgttatggaagacaactgctcct

SEQ ID NO: 12583 - DNA, 61 bp, Homo sapiens
  chr2:176995668-176995729
  hyper
aaggttgggatgcattttttttttaagaagggagagggggagaaatctgctttcatctcac

SEQ ID NO: 12584 - DNA, 41 bp, Homo sapiens
  chr2:177042492-177042533
  hyper
cgtggttggtgaggaggctgggagaaggcctttttgatggc

SEQ ID NO: 12585 - DNA, 279 bp, Homo sapiens
  chr2:1771840-1772119
  hypo
cggccactcactccagaagcccgtccaatccgcaaccactcactctttccaaggccagcgctccgatgatgctgtagcctcagtcccggcctctgtcaaaggccctccagcccctgacgccaggccacctttgagctcctcttctaagcgccccctttagtatcttgcacacggctgtccccgtgtgagcagctggtgtgagtagagcgtagggagcttatttggcaatctcttcgatgatccttgtgcgtgtctaatgacctgtgtttggcacacgac

SEQ ID NO: 12586 - DNA, 34 bp, Homo sapiens; identical to SEQ ID NO: 6099
  chr2:182323095-182323129
  hyper

SEQ ID NO: 12587 - DNA, 605 bp, Homo sapiens
  chr2:1863600-1864205
  hypo
cgttggggacagcgcgccggatgagaggggctctgggaaaggggacccgggccgcgctggtgacaggtctgtctccactcctgggcttgttttctggggattctctcgctgcggtttggctgtttggggagcacccaggggctgccacggcagcgtcactgtccatgctgcatgcagtttgtctgtttcccgaccatgcagcctaggactcttcacttatccctctgtgttgatcatgctgccctcgttgccaacactgcgaaccgctgcagggccgaaaggcgccccaagtacatccagcaataggctcctgtccagtgcggcagaacgtacctagcacatcctgacgtcccattcacttaacgggatgtgtccatgggaactgctgccagagcacatgcacgtccagcagcagtggagcggctaagcaagaggctggggccgccggagccagtattggggttggactcggaggacccatgcaaaaaaaaaatacaaaaggtgactggtgcagctgacgcaaggcaacagaaacgccaccccagcctctcgccctcgcgtggaagagtgagtttcatccagggcctgacgcattcaaaccacac

SEQ ID NO: 12588 - DNA, 444 bp, Homo sapiens
  chr2:1895697-1896141
  hypo
cggcgtttgccccatacagctgccccgaaagcgccgcgtgtctcggtggctgggtccgcggcccggcctcccccacccgccaggtggctccacctgcccaggcgcgcgtacccgcgtggcgcacaggtcctgcggcttggtgctcaggttctgcggcatctcgcggcagcgcgtggacaggttgaggatggcggtggccgccatgtgggccgcctccatgtcgtgcgtgtagtcgaagctgctcttgctgcacgtgctgctggcgctgctgcccccgccgcagctcaggttgctgctgctgctgggcgcgtagctgctggtgctgctgctgctggggctggggtccttgcagtaccgcttcgctggggagacagggacagggatgactcaggccccggccgcagggcacacggcagacagcacacggcagggcctgcccgcccc

SEQ ID NO: 12589 - DNA, 442 bp, Homo sapiens
  chr2:1940969-1941411
  hypo
cgactcccctgacccccacatcgactctgcctcagggcggcctccatgccttgcccagagcagctgcagccatcatttcgcacatcaagaagttcctaacgtccgcggccatcagatcgcacatcaagaaggtcctaatgtctgcagccatcagatcgcacagcgagaaggccctaatgtccgcggccatcagatcgcacagcgagaaagccctaacgtctgcggccatcagatcgtacatcgagaaggccctaacgtccgcagccatcagatcgtacgtcgagaaggccctaacgtccgcggccatcagattgcacatcgagaaggccctaatgtccgcagccatcagatcgcacagtgagaaggccctaatgtccacagccatcagatcgcaagtcgagaaggccctaatgtccacagccatcagatcgcacactgagaa

SEQ ID NO: 12590 - DNA, 107 bp, Homo sapiens
  chr2:1941452-1941559
  hypo
ccctaatgtccacagccatcagatcacaagtcgagaaggccctaacgtccacagccatcagatggcaagtcgagaaggccctaatgtccgcggccatcagatcgcac

SEQ ID NO: 12591 - DNA, 134 bp, Homo sapiens
  chr2:200326735-200326869
  hyper
ggctctcgcctgggccatcccgggctctgagggcccggcatccatccccaaggtccatggctttcaagttcggtcacccaggcagagagaccctgccttttaaagagccctggaaagttgcgccgcgttttccc

SEQ ID NO: 12592 - DNA, 280 bp, Homo sapiens
  chr2:200326960-200327240
  hyper
ccctggagcttgccctcctgggggcgggaggagggcgggagggaatcatttctttcaaatgaagcccacgccagctctgaagccaatttccgccgcggactgtccgtggagagttggcgaccaacactttctcggacggcataaccgcgaggggcttagactggaaatcagatgcgccaagaggacaagagccaggggccagaataccccagtgggggacgcgccttggaggacggttcgcccagggtgggcttcagccctttcccagagtgctccgggc

SEQ ID NO: 12593 - DNA, 280 bp, Homo sapiens
  chr2:200327794-200328074
  hyper
tggtgtcccttcggcggccgcgggccgggggaccggggaagacggagggtcctgcggcctggagcaccaccctaccacaccaggcaacgccccccggggcgcccttcattcttttgcagagcccagaacttaataggtgggtccccttctgcaaccacgctgcgagagaatgactgccctgctaatctagtttacttgtagaaatcgactgtaaaccgggacaacaaggcaagggtgggggaagaaaaggaagcgccgaaggagccgccgctgcgtcccc

SEQ ID NO: 12594 - DNA, 118 bp, Homo sapiens
  chr2:208688685-208688803
  hypo
cgaaacaccgttccacatgacagaaatcaacacttgtctgtttacattaaccgagcagagcttagtcacccatcactggattcgacctcgagcagacagctctacctgactcagggtc

SEQ ID NO: 12595 - DNA, 863 bp, Homo sapiens
  chr2:223183542-223184405
  binary
cgcgaagggcgaggggcgacagaagcccgagggacagaaaaccgaggctcctcagtggccgagttgggagagagtgtgagtccaggagagcccgggggcagcagggagagggtgcagaagctcgagcgcaccgagccagaggccccctcttctcccgccacgcggggctggaggtgcaggcgccggttccgcggcgtggcccggctatgtgtcgctcctccgcgcgccgcccgccgcagcccgtgccctcgggccgccgccgccgccgctgccccccgtcgagcccgcggccgcaccctcgggccgatacttgagccagcagatgacccaggtgacaacgaccgagaagagtgccaggatgctggccaccgacaggcagatgggccccacgggcgagggcgagggcgacccggtggccggtgcctcgccagggggcgccccgcctccgggggttcccccgccgccgtagtggttgacgaagatgaggccggtgaagagcagcaccaccatggagaggaaggagaagaccacgcacacgcagccagcggtgagcgccgcgcgcttgcagttctggcagctgtcgtaggcgcccggggcgcgcaggccggggcgggctcgaggcccgggggccgcgtcctcggcaggcggcggcggcggcggctgcggtggggcgggggagggcggcggtggcggggccggggtgggcggcggggcagcagcgggcgcgggcaggcgcgcgggcagcggcgggaggcggtcctggggcagcgggtcgtgcgctgcgcgcaaagccagcgggaaggcctcggctagcttggtgttgttgggcaggccgtgcacgcggctgtcgggcagcggcgtgc

SEQ ID NO: 12596 - DNA, 67 bp, Homo sapiens
  chr2:238280432-238280499
  hypo
cgtgatgggcgtcagcagtttctgctccaggctgggcagctcccggaaggtgctcaccgagaacaca

SEQ ID NO: 12597 - DNA, 235 bp, Homo sapiens
  chr2:238280812-238281047
  hypo
ccaccttggggtcatcgctgaactggatgacagccacccgggtggtgtcaaagcccacgtccaggtagtcaaccagcctctctatgagggtgcgaacgtactggaactcaggcccggcactttgggacccatcgatgagaaagaccacgtccctcttgccaccaacacctgcgaaacaaatgtgagcatggcttcaccttcatcgtcaccaaattcttagcgttcatgagccacc

SEQ ID NO: 12598 - DNA, 105 bp, Homo sapiens
  chr2:239888414-239888519
  hypo
cgtggctccccgtccctccggtgaccaggtgggcactggctcctgatggttcgaagccccggtcagcccccgccatccctaaactagtgacttccacttgcgttc

SEQ ID NO: 12599 - DNA, 76 bp, Homo sapiens
  chr2:239888789-239888865
  hypo
cccgtgcctctgtctaggagcgactgtggcttcgggttaagcctctgtctttacctgtagtgggagatgtctgctc

SEQ ID NO: 12600 - DNA, 155 bp, Homo sapiens
  chr2:240567524-240567679
  hypo
cgtatgcattgatagtgtggtcctcgtgtggccgatagagttgcactgtggatatatcaagcgtgtgggtctttcgcctgctgaggggcgtctgggctatgccagcgtttgaagttgggaatacgctcagactttgtgactttaccttgcagggc

SEQ ID NO: 12601 - DNA, 107 bp, Homo sapiens
  chr2:240672200-240672307
  hypo
cggcgcttgtccctgggatctccctgggcagggccaagccaggcgggtcattctcctgggagcaccgcactcattcccaggctctacctagcggcgctgtccggacc

SEQ ID NO: 12602 - DNA, 44 bp, Homo sapiens
  chr2:240690358-240690402
  hypo
cggtggctcggcaaagtcagtccctcacacatcctcgatccagg

SEQ ID NO: 12603 - DNA, 225 bp, Homo sapiens
  chr2:240725299-240725524
  hypo
cgatgtagcgtcattatcctggcgatgtagcatcgttatcctggcgccgtagcgtccttatcctggcgccgtagcatcacagcacacctttccccggttcaccacctctgttgccagcggccaccagggaggacccttcagtgctccagcagcagccaaaacatgttaccgcaaattcttaacaagattcaggaggaaccaatgtggttgtctcgcaggcttgac

SEQ ID NO: 12604 - DNA, 34 bp, Homo sapiens
  chr2:240809701-240809735
  hypo
gacacgcagcctcacctgggacacctgtcactcc

SEQ ID NO: 12605 - DNA, 206 bp, Homo sapiens; identical to SEQ ID NO: 8329
  chr2:241771771-241771977
  hyper

SEQ ID NO: 12606 - DNA, 206 bp, Homo sapiens
  chr2:25142479-25142685
  hyper
cgatccggcccccttcccacgctcggggcgctgtcttcccccccggaagcctggccctgcccctgcgtttacctgtgcgggaactcggccaccgcgtgctccgggacggtccccgcgcgggctggggcgggagagctcggcgcgcccgagggctgctccccgcagagccgcgccgccccggcagcgcctcggggcccggccggagc

SEQ ID NO: 12607 - DNA, 270 bp, Homo sapiens
  chr2:263894-264164
  hyper
cgccggttttcccgtcctcctcctcccaccaccgcccagctcttgagaggggagggtgctgccggacaggtgggtccccgggtactcactgctgcccgcccggccgcggcgccccgtcccgaggctgcccaggaagaggaaggcgcgctgccccgccccgcggacaaggaggccccagcgagggcgtacctgcggcaggtgacgaaggaggcggcgcaaaacacccgccgtgtacgtttcgcgggacaaaaaccacgcgcccgccgggcc

SEQ ID NO: 12608 - DNA, 259 bp, Homo sapiens
  chr2:264204-264463
  binary
gtcctcaagatcgaaaagcccagagccccgcggcggctccaagcacggtgttgggggtgggggtctcagggagcgcccaggcccaaggccgccctggtccggcgtggaccccgcggggctcaaggcaggttccccgcgtgacccgcccagcccctctatgcgaactcgaacgacaggcaccacagcccgccacgtgcgcgagactcgcgctgtgccccaacccaggtgggcggcccgcggagccgcgaggcctgagccc

SEQ ID NO: 12609 - DNA, 176 bp, Homo sapiens
  chr2:2696901-2697077
  hypo
cggtctatcctgggagaccccgagcaacagtctctcttcaccgtggctcctgccggctccctgactagcaacagtctctcttcaccgtggctcctgctggccccctgactactggtcctcataggcgctttccagacacccacaccttctcgacaagccagtgcaatcagctgccc

SEQ ID NO: 12610 - DNA, 110 bp, Homo sapiens
  chr2:2705311-2705421
  hypo
cgtgcacttggaaattttgcctccccacacccgtacgcgcaaacccacatgcaaggtggagagactccgtcgcatgtcccgagtctgaggacatgaccggagcggagtcc

SEQ ID NO: 12611 - DNA, 249 bp, Homo sapiens
  chr2:2737154-2737403
  hypo
cgaggccccaagagactgcatcgcactttcagtgctgtaagcaagtgcgtagtttggatggaaagagaggaagactcaggaaccggcagctgagaaccaccgcacacgcgtgtgcgggcaccgcgccgccccctgctgagaaccaccgcacacgcgtgtgcaggcaccacgccggctgctgcgagtccagtctcgctcagtctcttgagccagctggaagcgtgtgtggcattgaggggtccacctccc

SEQ ID NO: 12612 - DNA, 59 bp, Homo sapiens; identical to SEQ ID NO: 8339
  chr2:27938267-27938326
  binary

SEQ ID NO: 12613 - DNA, 442 bp, Homo sapiens
  chr2:2797217-2797659
  hypo
cggcaccacctcctgcctgcaaaaccatgacagccctcggacagctcccagctccagcatctcctccctcagtcccgctgtgtcactgccactcatccagagtgcaaatctgatcaccgctcgctttaaacactcttcagtaacttcccattttctttcataaatacggcagattcccagccaggctcaccgtggaagccccctggctttgcgcctctccccggcttgaaggcctcggttcttgtcactaggaccaactcctggccgctcactgaagcacacctcatacacagccatccccgtgatcggcagattttgttcctacgaatctacctacttgctaaaatccacttgtagcctccacatgaggtgcacttgcagccatctgtggacgcgaacagagcaggattaatacttgagtcgcccgaggcacagtttctgc

SEQ ID NO: 12614 - DNA, 98 bp, Homo sapiens
  chr2:2854244-2854342
  hypo
cggggaagccttcctcagggtttctgcagaagccctgcccactgccccctgcagagagccatcctgccacagagatgcgccccagatgcgtcctggat

SEQ ID NO: 12615 - DNA, 160 bp, Homo sapiens
  chr2:2854463-2854623
  hypo
acatgaggccgcctgtgtcagccatcagggtacccaccggcgctgctcatccacctgccacccccacctgccacttactcctagcacaagcaggtgccccatgaatcccgcggaatgagttatttcaggatccgcggaacacacgtaaccagaccccccc

SEQ ID NO: 12616 - DNA, 392 bp, Homo sapiens
  chr2:2893376-2893768
  hypo
cgcactgtgcagagaagcgagggactggagctcagaaaggaggcgctttggacaaaacccctgaaaacgtggctcggagcaggcagaagcccccgtggagctgccaggaccctgcagagccggccactggaacagttctccccccgacgccgattgccatcaaggttggtggataatgcttatcagaaagaatgttccccaatctgatcataatggatgcagtgtgctgtgtcgaatcacgtcctctttcctgattgcggataagaagaacgtgactcaatcagagcatctgagcagctcagagctaagcagcctcagcaagcacagcatccctggcccggcctcctgcacagcccggcagaaacgccaccaccagtctagaggccggtccc

SEQ ID NO: 12617 - DNA, 52 bp, Homo sapiens
  chr2:29033285-29033337
  binary
cgtattcacacgttgtgcttttctcagttcaagcggcctcttccttttgagt

SEQ ID NO: 12618 - DNA, 38 bp, Homo sapiens; identical to SEQ ID NO: 7206
  chr2:30453530-30453568
  binary

SEQ ID NO: 12619 - DNA, 69 bp, Homo sapiens; identical to SEQ ID NO: 10521
  chr2:31361021-31361090
  binary

SEQ ID NO: 12620 - DNA, 179 bp, Homo sapiens; identical to SEQ ID NO: 10522
  chr2:31361118-31361297
  binary

SEQ ID NO: 12621 - DNA, 70 bp, Homo sapiens; identical to SEQ ID NO: 10523
  chr2:31361690-31361760
  binary

SEQ ID NO: 12622 - DNA, 295 bp, Homo sapiens
  chr2:364121-364416
  hypo
cgggtttgaacggctggtctcccagctgatgatggaacccgacttacagtgttagagataaaagtgaacgggtttgaacggctggtctcctggctgatgattgaacccgacttagagtgttagagatgaaagtgaacgggtttgaacggctggtctcctggctgatgatggaacccgacttagagtgttatagatgaaagtgaacgggtttgaacggctggtctcccggttgatgatggaacccgacttacagtgttagagatgaaagtgaacgggtttgaacggctggtctccc

SEQ ID NO: 12623 - DNA, 77 bp, Homo sapiens; identical to SEQ ID NO: 7211
  chr2:42720186-42720263
  hyper

SEQ ID NO: 12624 - DNA, 281 bp, Homo sapiens
  chr2:42721246-42721527
  binary
cccgcccgcgcccgcacctccccggcttgctcgggctgggattcccgggcgccccgccctggacctcgggctccccgcctcgtgacgccgtcctccccctccgctccggcccgtagtggcggggaggggtccgcagggcgggggagcggggagcccagcgccgggatgcctgctcccgcgtcctgccctgggccatcgggatgaattgggcagtccccagggccccttttaacagccctggttcaaagcccagtgtggactcgggtgcggggacagacggc

SEQ ID NO: 12625 - DNA, 60 bp, Homo sapiens
  chr2:47747991-47748051
  binary
cgcccggcggccccgcggcctggagagggtccccggcgcgggcggacgggcggtctacct

SEQ ID NO: 12626 - DNA, 204 bp, Homo sapiens
  chr2:47748523-47748727
  binary
ttccggtaggcggcgtgctggctgctcaccaggtccccgaagccgatggtgctgaaggtgacgaagcagaagtagagcgagtccacgtagtcccagccctccacgctggtgtacatggccgaggcgcagcaggacagcagcacggcgaacaggcccaggatgagcagcacgtggtacaccgagggcttccagcccgccaggctg

SEQ ID NO: 12627 - DNA, 185 bp, Homo sapiens
  chr2:502892-503077
  hypo
cggtgggcaggaggcccttgccactgtggcgccaggagactgggtaaggcgcccaccacagggctggggatctcaggggcgtctgaagaggaagagctggctcggggcgctcggggtagcacagccacacatccaaccacggcgcgagaatcaaggtgccagaatcacaggacgcgggaatcacg

SEQ ID NO: 12628 - DNA, 96 bp, Homo sapiens
  chr2:503145-503241
  hypo
gcgggaatcacgggacgcgggaatcacagggtgccggaatcaagggacgccagaatcacggggcgcgggaatcaagcttctccataaatgactgac

SEQ ID NO: 12629 - DNA, 204 bp, Homo sapiens
  chr2:63278430-63278634
  hyper
cggccccggcagctgagggcaggtaaggagaaagccgcggggccaccccggactccgggagcgcgttggttacccttatctccccctcctcaaatggatcccggcttccccggtccccagcaggtggtcggggctgtgggagcggcctggctcccctcttggtgagccgaggaccccggggcgctgtcgcggcccgcagccccc

SEQ ID NO: 12630 - DNA, 282 bp, Homo sapiens
  chr2:63279141-63279423
  hyper
cgcgacttgctgccctccggcttcacaaatccccgagaccctttgaggtgctaggccagtcacccttcaccccctgctgggaccctgcggtccgcagcccagactgggcagagagaaggccgggtgcgcgctggcaacgaaggacgctggccgcagctgaggcgctcccgacctcaggccgcatcttggggtcgcccccctctacagtggccccttcggcgtcctctggccctctgcgaagcctgggcccgttactgcggttgaggtgcggtgggatttcgc

SEQ ID NO: 12631 - DNA, 99 bp, Homo sapiens
  chr2:63282552-63282651
  hyper
cgggagttgggtccgcggggcggtggagcaacaagctcccctagctccctttgacccactctcccccatccggcccactgcaggtctggttcaagaacc

SEQ ID NO: 12632 - DNA, 79 bp, Homo sapiens; identical to SEQ ID NO: 10529
  chr2:68547270-68547349
  hyper

SEQ ID NO: 12633 - DNA, 121 bp, Homo sapiens; identical to SEQ ID NO: 7222
  chr2:73147029-73147150
  hyper

SEQ ID NO: 12634 - DNA, 276 bp, Homo sapiens
  chr2:74425444-74425720
  binary
cggccttcggtgacactagcggcgtcaggcaggagtttgacttcctcagcctatcatggcacgttgccgaggcttcagcgccttacaggacctcgctccaggctcttctggctccaatcaaaagcagggctctttcggacttcgcttacgtttaataaagaaaaccggttggccccttcggctccacctggctcaacagacagccagtggcatgcggcagggaccaatgggtggcggagggaggcggggcctgccacgaggccgcagtataaccgc

SEQ ID NO: 12635 - DNA, 396 bp, Homo sapiens
  chr2:74425790-74426186
  binary
ctgctttggctgcccggctgctgcagcccgcgcacagctgctcccttcgccttcgccctttccacctcgcggcagttcggtaagagggtcacagagctcggtcagcgcggaaagctgaggggaacggagggcgaggggcacgccgggcccccgagggacaccgagggaagtccttcccgaacatctccgccccggcggtggtggccgctgaggggtgtggcggggcgacgtggcaccgagcgccgccgcagctctcgactggggcgcttcctcggcgcggagggctggtacccgaagcccgcctttcggagggagccgctctcctgcgactcggggcgtcgccggggcccgtggccagtcggcgggcgggacgggggtggcgtgcggaacgcgaag

SEQ ID NO: 12636 - DNA, 228 bp, Homo sapiens
  chr2:74426214-74426442
  binary
gcgccggccgcctctggctgggatgctgagagtcgtctgggggagaacaggcgagggttccaaaagagcagccctcggcgagttgtccttgcggggaccctagcggcggagggcgctgctgcagctgatgaaatcgcggagccgacttgctcggggtccccgcgccgccctcctccctccgccggtgggagtggcccgcgctgcctccgctctgccaggaacatgaac

SEQ ID NO: 12637 - DNA, 1610 bp, Homo sapiens
  chr2:75060920-75062530
  binary
cgccccacaccccgggtccgcgatcacgctccccccacccatagccgagcctgacgcggcggtggctcatgcgcctttccgtcccagcctttagccacggaccacacgtcccatctcaggcgccccgcccctcccccgccccccgcccccggcgcgcctccccaggctgccggctccggtgtctgagcggccgcgcccgcgagccgtgagcgatgattggctgcgccacggcggcgggcggtccgtgggcgcacacaccctccccgcgcagccaatgggcgtgcgcacgtcactgatccggaggcccgcgggccggcagcccctcaataagccacattgttgcatgaaactccggcgcaggagtcccgggctgccgctggcaacatcgtgtcacccagctaagaaaatccgcgggcccgagccacgcgcctgtgaatcggagaggtcccactgcccgagtggagccgggctgagattcttctcaagttgagcctcagtgatcctgtggccgaagttagcgccttgacgtgggacaaccggacacgtcgccaggagagaactgaggcgccttctagcagttgtgacgccaaaatcacgtctccggagacccgcgccctccgccagccgggcgcaccctcgccggtagccttctttgtgcgccgtccggactcccagctcccggcccggcagccgagccccagcacaaagcagtcggaccgcgccgcccgcctcccctctcgcgtctccgcctcggtttcccaactctgcgccgtcgggccgcggcaggatgattgcctcgcatctgcttgcctacttcttcacggagctcaaccatgaccaagtgcagaaggtaagtcagcgcgggcggggcggcaggctgggctctggcaaagtggtctggcctccatcagtctcttcctcgaccctgcggggacccgcttcctccctactccgggcctgggagcggaaaaagtttgggcagccgggacactcctgggcgccaggagccacgtccgctaagcacagccggcgagtgcgcgcgggcggggagccgaggtcgcgctccgccgggcgccctccctccctgagctccggcacgcgctcacgctctctcccccagtccctttttccctgttactggaggggcgggtcaccccgcaggtagtcagggattgctgcgcccacgtgggagggagcccccttctgcagcgcgagttccggcgagagcacgtggagagaatcgtggctgcgggaggctgctccgctgccgcgtggggccgccgggggccgtccgcgctcgcggaccgcgtgtaggagacgagcggttcccttctccttccccgcggccctgcgggggtgggctcgaggagaagctgacccgggaaggagtaggaaaggggcagaggaactccgcccgccgcgccccctccccggaactgtggcgcccggaactgaggctcggcgaggggcgtcccccattaacccccgcccctccaaatcagcctcgggaccgcccagcctcgtgtcctcaggatctgcctctgagtaaggggaggactttggttgttactttctggtttgccctaaaagttactcggagaggccaacgc

SEQ ID NO: 12638 - DNA, 229 bp, Homo sapiens
  chr2:75062575-75062804
  hyper
cgaaaacgagcttttttttccttaagcctcgacctgtctgttcccacctggctccgcagctccctatggctgagcgctcaccgcggccgggtcatttacataagaaagagcctcaggccaagccgggaagctctcattccccgcctcggggtatgggggtggggatggggccggggccggggacgggcagggccaggggcgcgctcagaattgagtttctgaaatgccc

SEQ ID NO: 12639 - DNA, 161 bp, Homo sapiens
  chr2:817641-817802
  hypo
cgtgacatgacggctccaaagcagatgcctggtggacccgcggagggagcggtgaccgggcgccaggtgcccacgtgtggctgtggctcagcggcctgcaggctgggcttggccctctgacagggatggggccgtcccccggtccgaccacctacacactc

SEQ ID NO: 12640 - DNA, 163 bp, Homo sapiens
  chr2:87018396-87018559
  binary
caccttgggactttttattggcaaaatgggcactgagggctgaaaaggaagaggaactagcgacctgcccgcttctgaggaactcgctagagcagccccagttttcaccgaggaaggaccctctcccttcccccaggagatttccatgagagcggcagcagcc

SEQ ID NO: 12641 - DNA, 71 bp, Homo sapiens
  chr2:875867-875938
  hypo
cgaggccggtttcccgtcgggctgcaaacggcagagcacgcggccctgtcccgggcaggctcggctccagg

SEQ ID NO: 12642 - DNA, 144 bp, Homo sapiens
  chr2:88752878-88753022
  hyper
tcttcaaaaacataaaggtgaatgttttcaaagacatttaaataagtaccttcggaattagcattttaaacccgaaagtttcaaagttttaagtaatttaaactgtgcaagaagcgctcatttacaaaaacagcctcatctaac

SEQ ID NO: 12643 - DNA, 348 bp, Homo sapiens
  chr2:9078588-9078936
  hypo
cgtgtttcatgctgccgtgtttcattccaccacgtttcatgccgccacattttatgctgccacgtttcatgccgccacgtttcatgccgccatctcatgccgctgtgtctcaggccacatttcatgccgtgtttcatgccaccgtgtttcatgctgccacgtttcatgccaccgtctcatgccactgtgtctcatgccaccacatttcatgccgtgtctcatgccaccatgtttcatgctgtcacgtttcatgctgccatgtttcatgccaccgttgtctcatgccgccacatttcatgccgtgtttcatgccaccgtgtttcatgctgccatgtttcatgcctccac

SEQ ID NO: 12644 - DNA, 211 bp, Homo sapiens
  chr2:9143655-9143866
  binary
cgcctcggggtacctggtcgatgggcagctgcacggcgttgctgaggggctgcagcagggtggagcccgtggtgctggtggtggccatggccgggcctcggcgctccggccgcccgcgccgctcgcccgctcgcgctgtgccgggcgacgacgaggatggggatgcagcggcgcgcccgcccctgggccgcccgcggtcggagctctgcgc

SEQ ID NO: 12645 - DNA, 59 bp, Homo sapiens; identical to SEQ ID NO: 7233
  chr2:96991316-96991375
  hyper

SEQ ID NO: 12646 - DNA, 43 bp, Homo sapiens
  chr2:97203334-97203377
  binary
cggtctgcagaagggacggggtggcggctggggagcgtcaggg

SEQ ID NO: 12647 - DNA, 39 bp, Homo sapiens
  chr2:97203545-97203584
  binary
gcggtgcaggacccccgagggcccagggggtcccaaggc

SEQ ID NO: 12648 - DNA, 213 bp, Homo sapiens
  chr2:98703022-98703235
  hyper
cgcccacgtccagtggctgagctacaacgaactgccccacctcttttaaagcgtctttctctgaactgtgcaaggaagagagcatcgcctgacagtggtgaggtgaaaattaaaactacacaggggtcaatgctctgctgaaaagtatgaaaagaagttcgtttgtagcgtttcccgcagtctcctcgcctctcctcggcctctggcgccttc

SEQ ID NO: 12649 - DNA, 201 bp, Homo sapiens
  chr2:98703475-98703676
  hyper
ggcctcggcgccccgccctcttggccacggtccgcagccatcgccccagtgagggcgcggtctgtgggcggggccggctccaggagccgcgctgtgattggccgtgtccaggcaaccgcggagacgccgtcgtcaacagaccgcgctcggaaccagaggcgcgggtcacagagacctagaacagctggaatccttcgcccc

SEQ ID NO: 12650 - DNA, 77 bp, Homo sapiens
  chr2:98703736-98703813
  hyper
gcccgccctctcgggtcaggcgggcccgggaggatgggagggtggctgctgagcgggagccgccacgtcttccaccc

SEQ ID NO: 12651 - DNA, 154 bp, Homo sapiens
  chr20:19192506-19192660
  hyper
cgggaggcccgcgagaagaggcgaggccagaggctgggcgcgggcagccaagcgcactcgcggcgccccgactccaggtagcacgtagagaggaggctgaagagcccctcggttttccgaaagtttccagcgaatccttcttggtgaagatcgg

SEQ ID NO: 12652 - DNA, 268 bp, Homo sapiens
  chr20:19193616-19193884
  binary
gagagcagaagggtgagtgcacgctgcctgccccgagtgggcgctgcggctccggcggctcggggctcccggggctgggcgcggggctccttcgggcggcccggccggagccccaggataagcgggctgggttggcggggggagtgggatgccaggcacgaggactccccctgccccacgcagaggcatggaggtggggaccctgagcgccagcagccagcaggcttaggcgtctggccgccctgggaacatttacctgtgcccgcct

SEQ ID NO: 12653 - DNA, 143 bp, Homo sapiens
  chr20:19497049-19497192
  hypo
cgctgtgaagcgagctccccacattcagtggcatgcctggtcaccatgttgttttgttcttgggttgtttgtgttgagtgctcagaaggagcacagtgggaatgctgctccacggaatccagggcctcagatggaccgactcc

SEQ ID NO: 12654 - DNA, 206 bp, Homo sapiens; identical to SEQ ID NO: 6114
  chr20:21080357-21080563
  hyper

SEQ ID NO: 12655 - DNA, 116 bp, Homo sapiens
  chr20:29873935-29874051
  hypo
ttccccgcttctgcacgaaccacagcattggcaacacctgctctgtggggctatcacacacaaaccccacagaggcctggtacacttcgatggcttcccccagggactgctgcgcc

SEQ ID NO: 12656 - DNA, 483 bp, Homo sapiens
  chr20:30555404-30555887
  binary
cgaagacaataagaaaaggggacccctcaagatcaaaggaggggatggaacaatatgtgagcactcaggaaactggaaatgagcgttagcatggagtgactgctaaagggttactggggggcccgcccaagtcccccagctcctttcttccaagtcccccacccacccccccgtcagacccaggccactggaggtgaacacaggagaaaaacgaagtggagagaatgggaagggggaggcgataaacaaaaaagaaggaagtgcagtccgaggggagatgagagacagaaagcatggggttggagccccgcgcctccgaggaaggagggagagggtgacctggggtgcgccccgcctcccctgcttccgcattcccgggggctgcccccccttcggccgcagctcaggcgggtgggggcggggcggggcggcgccgaggagaatgaataattgaagtggaggggaggaggaagaagaggagaa

SEQ ID NO: 12657 - DNA, 248 bp, Homo sapiens
  chr20:30556403-30556651
  binary
ggacagcgccggcgccttccggaccaaagaaggcagccccgagccgggtccccagcctgcgccctcctcggccagcgcctaccgccgccgctgctgccgcctctgcatctggctgctgcagaccctcgtccacctcctgcagctcggccaggtctggaggtaggagaagcgcaggtggagggacctgagcccgaggagtgggggtggcgaagggctacctgacgtcccagccctgatctgacctttcc

SEQ ID NO: 12658 - DNA, 126 bp, Homo sapiens; identical to SEQ ID NO: 8371
  chr20:3229128-3229254
  binary

SEQ ID NO: 12659 - DNA, 155 bp, Homo sapiens; identical to SEQ ID NO: 8372
  chr20:3229326-3229481
  binary

SEQ ID NO: 12660 - DNA, 32 bp, Homo sapiens; identical to SEQ ID NO: 8373
  chr20:3229526-3229558
  binary

SEQ ID NO: 12661 - DNA, 144 bp, Homo sapiens; identical to SEQ ID NO: 8374
  chr20:3229659-3229803
  binary

SEQ ID NO: 12662 - DNA, 60 bp, Homo sapiens; identical to SEQ ID NO: 7239
  chr20:34190072-34190132
  hyper

SEQ ID NO: 12663 - DNA, 390 bp, Homo sapiens; identical to SEQ ID NO: 8385
  chr20:37433723-37434113
  binary

SEQ ID NO: 12664 - DNA, 125 bp, Homo sapiens
  chr20:43017186-43017311
  hyper
cgagctgtgattggtgatcgaaccgagcaggcctcctctggatttggagagacatagtgcgtctgggcctgtgattggcgggattgctgtgattggtgaagtccctaaggctatctaagtttctg

SEQ ID NO: 12665 - DNA, 110 bp, Homo sapiens
  chr20:43017399-43017509
  hyper
gccctccggcccagcgcggtgcctgccctgccctgcgccctggggcaaccgcgggatgaggtggggcggcaaagggtgtcagggctcccagctgcggcccgggtggccac

SEQ ID NO: 12666 - DNA, 66 bp, Homo sapiens
  chr20:44937643-44937709
  binary
aaaggcaccttgcacagaccagatctgccagttcagaaacagtcactgtgcattgaggtggacacc

SEQ ID NO: 12667 - DNA, 414 bp, Homo sapiens; identical to SEQ ID NO: 10552
  chr20:4804008-4804422
  binary

SEQ ID NO: 12668 - DNA, 64 bp, Homo sapiens
  chr20:57767480-57767544
  hypo
cgtgcgctccacctggacgcccccagacaagtctcggcccctcttcttccactccgtccccact

SEQ ID NO: 12669 - DNA, 211 bp, Homo sapiens
  chr20:60094644-60094855
  hypo
cgaccccgaggagggctcatagcactggccaggcagcgctgcctctcgggctgctgcgccagcatcgcagggcgattaccctgtgctgctctctagatgggtgtctattctttcgttgttccttaatcgaatgccactagttcctgggcgcaggacgccagtgtgtcttcacaggcagactgcgtggtggtggtataatccccattaccac

SEQ ID NO: 12670 - DNA, 146 bp, Homo sapiens
  chr20:60173821-60173967
  hypo
cgagggactggctgcggggcaccccacatggcggggtcctccatggaagtgtggtcggagtacccgaggccccttccctactgcaggcactgcccgccaagcttccctggatggctcctccagggctgacactgcgcagcctgggc

SEQ ID NO: 12671 - DNA, 428 bp, Homo sapiens
  chr20:60226081-60226509
  hypo
cgtgcttggccgtgcactggtgtgcttgtgtgagtgagttagcgccgtgcttggccgtgcactggtgtgctcgtgtcagtgagttagcaccgtgcttggccgtgcactggtgtgctcgtgtgagtgagttagcctcgtgcttggtcacgcactggtgtgcttgtgtgagttagcgtcatgcttggccgtgcactggtgtgcttgtgtgagtgagttagcatcgtgcttggccatggcagtgagttctgattgcagggtctcaacgctcagggaaggacgagtgccccttctgtgccattttccaaaactctagggatattgagtcttgctcaggtcacccaaaggcacatgtcccagccccgagtcaagcgtacaggggcctcccgggagcacccttgtgcctgtcgcggcgttcctctccttctgcc

SEQ ID NO: 12672 - DNA, 353 bp, Homo sapiens
  chr20:60238496-60238849
  hypo
ttctgaaggctctgggtcgggggcatttcaggcgagggtcctagaaatgccaatgctggggatgccgccgagtgggtcagaggggccggaggaaggtgaacagggcagggggcagtggggctggattttatcccaagtgagtcgggagctgctgggacggcaggaccgggtgtgtgtgtccaagagaccatcttggctgcccaggggaagcggggactcgaggagagcagggagtgctgtcttcccggcgggagctggcggtactgaggaaggacgtgcagaaccaggcagggctgacagacgcggggtcgggggaagatcaggagctcccggtgtccaggctgcacaatgtg

SEQ ID NO: 12673 - DNA, 331 bp, Homo sapiens
  chr20:60273150-60273481
  hypo
tagccgcacgttgctggacagcacagacctggcacgtgtcgtccaccctcggaggggtccccttgcacgggctccactccggacggtccctgagactctcccgccctcacgcctgctctctaagccaagcacaaagccaagtgcagcccccactgaccattccagcccatgccggcgtctgccccaggccccagatccgtcctgctggtgcgattgagggcacagagtcgagccttcaagtaggtcttctaatatggctccattcatgcagaaacctcccagtggggctgtgccaggcacttggaaagtgggagccgcagccctgccgtcc

SEQ ID NO: 12674 - DNA, 546 bp, Homo sapiens
  chr20:60275663-60276209
  hypo
cgtacggcctcactgtggggccacacatcaccccatacagcctcactgtggggccacacgtcaccccatacggcctccctgtggggccacacatcaccctatacggcctcactgtggggccatgtctgtcttcatgggtgtcttcttcatgtcttcttcatgtctgtcttcatggcccaggcctggggcagagccggggttgccggctcagcgggtgagtgccacatgagtcttgccttcaaagctggagtgcctgatcttgacagcggaccgacatcttcaagggaacggcggctccccccttttttgcagaacactttcaaaggtgtattcgtgttccagggccgccataacagagcgccacagaggggcggtgtaaacagcagaggtgtatgctctcgctgctctggaggatggaagcttaaagccgaggcatcggcaggggtggtttgacgaaagccgtcagagagctcggagggaagactctgttccaggcctctctcctcggcttgcaggtgccatcttcttcccgcatctcttcacatc

SEQ ID NO: 12675 - DNA, 249 bp, Homo sapiens
  chr20:60313847-60314096
  hypo
cgctcctcctctcaccaccttcacggcaatcccgctcctcctctcaccaccttgacgaaggcgtgaaacgtccctgaggctcagcttcctatctgcgagatgggccagttctactcgccagcgctgccttcccgtgcctggcagtgcacccgccgcgtggaggctgcaggggctgggacaggacgtgtgatctgcattggggtcgcagaggcggcttttcagggcattgtaggtgtttgctggtacatc

SEQ ID NO: 12676 - DNA, 347 bp, Homo sapiens
  chr20:60352702-60353049
  hypo
cgcacacacgtgcatacaaagacacacacccatacgcgcacacacgtgcatacaaaaacacacacccacatgcgtgcacacgtgcatacaaaaacacacacccacatgcgcacacacgtgcatacaaaaacacacatccacatgcgcacacacgtgcatacaaaaacacacatccacatgcgcacgcacttgcatacaaaaacacatccacatgcgcacgcacgtgcatactatacacacatgcacacacgtgcatgcaatacacacatccacatgtgcatacacgtgcatactatacacacatgcacacacgtgcatactatacacacatccacatgcacacacac

SEQ ID NO: 12677 - DNA, 350 bp, Homo sapiens
  chr20:60373188-60373538
  hypo
cgccctctcaccctgcgcctctcctgagccagcagccataacccccgccccgcccggccctgccccgggctctgtggcagcacctcctgccaggagcaccctcagctccctgcgggagcacgcagcaacagaggggagggggtgtggtcccgcctcgcacgcatccccgctgtgggcggcccctcgctgcgcctcagcctctccctggccccacgggcctccacactcctcacatacagaatgggctgtgggtcctcagcccgtccggaccctccgctcctttcctgctacctccgtgcgcagcaggccttgtggggtgtggtccagagcgtggccccggggtgcatcgc

SEQ ID NO: 12678 - DNA, 111 bp, Homo sapiens; identical to SEQ ID NO: 7253
  chr20:60448951-60449062
  hypo

SEQ ID NO: 12679 - DNA, 242 bp, Homo sapiens
  chr20:60485425-60485667
  hypo
gcatatttacacttaacacgggtttgtgacattctttccttccattttgcagtttgcaggggaggtccccgaaaaccgcgtggagaccgtggtcgcaaacctcacggtgatggaccgagatcagccccactctccaaactggaatgccgtttaccgcatcatcagtggggatccatccgggcacttcagcgtccgcacagaccccgtaaccaacgagggcatggtcaccgtggtgaaggtgc

SEQ ID NO: 12680 - DNA, 194 bp, Homo sapiens
  chr20:60494919-60495113
  hypo
cgcggtgattgcatggaagcttgtgattgtgtggaagcatggtatcgtgattatgtggaagcgtggtgtcacggtgattgcgtggaagcgtgttgtgattgtgtggaagcgtggtatcgcggtgattgcatggaagtgtggtgtcacagtgattgcgtggaagcgtgtcgtgattgtgtggaagcatggtatcg

SEQ ID NO: 12681 - DNA, 105 bp, Homo sapiens
  chr20:60495161-60495266
  hypo
tgattggaagcgtgtcacggtgattgcgtggaagcgtggttttgtgattgcatggaagcatggcgtcacagtgactgcgtggaagcgtggtgtcatggtgactgc

SEQ ID NO: 12682 - DNA, 197 bp, Homo sapiens
  chr20:60992542-60992739
  hypo
cgtctgtcccgtccacgcagcccccccagtcatctgcacgctcctctgtgacgtctgtcccgtccacgcaacgcccccccagtcatctgcacgctcctctgtgacgtctgttccgtccacgcaccaccccccccagtcatctgcacgctcctctgtgacgtctgtcccgtccacgcaccccccccagtcatctgcac

SEQ ID NO: 12683 - DNA, 203 bp, Homo sapiens
  chr20:60992781-60992984
  hypo
gtcatctgcacgctcctctgtgacgtctgtcctgtccacacaccacccccccggtcatctgcacgctcctctgtgacgtctgtcctgtccacgcaacgcccccccagtcatctgcacgctcctctgtcacgtctgtcctgtccacgcaacgcccccccagtcatctgcacgctcctctgtgacgtctgtcctgtccacgcaac

SEQ ID NO: 12684 - DNA, 69 bp, Homo sapiens
  chr20:61665975-61666044
  hypo
cgcagcgtgattccgtgccacggcgtcaggagcggcatgtagcatcttttggtttgagagtaaaattcc

SEQ ID NO: 12685 - DNA, 441 bp, Homo sapiens
  chr20:61674884-61675325
  hypo
cgatgcgcatcatggtcggggctgttttggggccgtttccaacaccagcagcgtcgtggctccacagcagcaaggcttcctgaaggaagaagggggcttcgcagtatagttcgagtcgggctctgtttctttccatcccaaacacatagagacgaccaaggccctgatcccaaaagaagaacccaggctgccggcgatcctggggacaacgatgttaactcagggacaggcgcagtctctggaccaggccaggtcgtggtgcacacactcgatctctgcagcgtttcccacatgggcactgcggaccgggaatgtcaggggaacgcgggcaccgtggaccgggaatgccaggggatcgtgggcaccgccgaccgggaatgtcaggggaacacgggcactgccgaccgggaatgtcaggggaacgggggcactgcagaccgg

SEQ ID NO: 12686 - DNA, 78 bp, Homo sapiens
  chr20:61675700-61675778
  hypo
aacgcaggcacggctgaccgggaatgtcaggggatcgcgggcactgccgaccgggaatgtcgggaacgcaggcactgc

SEQ ID NO: 12687 - DNA, 248 bp, Homo sapiens; identical to SEQ ID NO: 10564
  chr20:61810310-61810558
  binary

SEQ ID NO: 12688 - DNA, 234 bp, Homo sapiens; identical to SEQ ID NO: 8411
  chr20:62031374-62031608
  hypo

SEQ ID NO: 12689 - DNA, 44 bp, Homo sapiens
  chr20:62461248-62461292
  hyper
cgatacaattaaaatgcccgtgagttctcggcgcacaggtgtct

SEQ ID NO: 12690 - DNA, 264 bp, Homo sapiens
  chr20:62461639-62461903
  binary
ttgagttgtcagacaccggctcgcgctcccccgcgaaactgacatgtctatttacagagaaacaaagacgcggctcgcagcggaccccgcttcctccgcgcgccccgtccgccccgcgcgccccgagccctccgcgccccgagccgccccgccccgaggcccctgcgccccggttcggccggcgattaagatggagaccaggccggcgcccggcgtccggggagacaatgaccccccggcctcagggcgccgggacccgcccgc

SEQ ID NO: 12691 - DNA, 136 bp, Homo sapiens
  chr21:40032971-40033107
  binary
cggaggagcagaggctgggacggccggaggagagagtccggccccagcaggaaaggaacccagcacgcgactactggaggggcgaggagcaagggaaggaccagaggggaggagagggggtcaggggagggaaagt

SEQ ID NO: 12692 - DNA, 76 bp, Homo sapiens
  chr21:40033358-40033434
  hyper
gccggatacagccgccgggacgcggggatgccgagggcaccgcggcctggtctgaccgacgcacgcggtgacagcc

SEQ ID NO: 12693 - DNA, 141 bp, Homo sapiens
  chr21:40033449-40033590
  hyper
cggcgtctgcaaccagcagcctccaaagggtgcagccaggaggctcagcttgtccgcctccggggctcggggctaagccccttccagaagttttcgtttctacgcgaattccgaccgcaaaatccagcttacctgagcgcc

SEQ ID NO: 12694 - DNA, 151 bp, Homo sapiens
  chr21:42593821-42593972
  hypo
cggcagacagagcagcaaacagcaaaaatccctgtcagagggaggcttcacgctggtggggcggaggcagcaggagctgtcgggaccccgtgaatggcatgattgcgcacggggcccaggcagtggctgagttggttacaagaatgcgctc

SEQ ID NO: 12695 - DNA, 91 bp, Homo sapiens
  chr21:46035068-46035159
  hypo
cggcgcatgtacgtaagcggcactgtttgttaccatgaaaaattagaaacaacctaaatatccatccacgagggaatggaggcgaatggag

SEQ ID NO: 12696 - DNA, 143 bp, Homo sapiens; identical to SEQ ID NO: 5810
  chr21:47063290-47063433
  binary

SEQ ID NO: 12697 - DNA, 68 bp, Homo sapiens; identical to SEQ ID NO: 9594
  chr22:21368234-21368302
  hyper

SEQ ID NO: 12698 - DNA, 94 bp, Homo sapiens; identical to SEQ ID NO: 9595
  chr22:21368697-21368791
  hyper

SEQ ID NO: 12699 - DNA, 328 bp, Homo sapiens
  chr22:22012017-22012345
  hyper
cggcgcgccgagaccctcgggagccccgcccagacgcctgctccgcttccaggccacccgggctctccagccgcgctcgctcgtagagatcctagacaagttcgacagcgaggtcccgcagagcaagacctgccagcagatctccgaggaggacttggagaggcaggcggacacctacactgggcgcgcgctgcgcctcctcttccgcagccccgtccgcaacccgtcgctggcggagagggtggtacaattggaacagcgcgggctctcttttttccggatgcggccgcggggcatgggaccggctgggcgggaactgtcactaccc

SEQ ID NO: 12700 - DNA, 137 bp, Homo sapiens; identical to SEQ ID NO: 5811
  chr22:22862472-22862609
  binary

SEQ ID NO: 12701 - DNA, 97 bp, Homo sapiens; identical to SEQ ID NO: 8441
  chr22:27053098-27053195
  hyper

SEQ ID NO: 12702 - DNA, 268 bp, Homo sapiens; identical to SEQ ID NO: 8442
  chr22:27053250-27053518
  hyper

SEQ ID NO: 12703 - DNA, 230 bp, Homo sapiens
  chr22:27054028-27054258
  hyper
ggtctcggaactggaggtgggggtggggcggtggggcagggtccttgagctccccttccctcatactcagcccgcccccgacccaaccccccgagcctgccattccttcacttcccagatgtccggcgtcaaatttggctccaaaaggatggagagggctggtaggtaacccaccctcgttgaaaacaacagtgacatcagtttatggagaggttactctacgcagggac

SEQ ID NO: 12704 - DNA, 210 bp, Homo sapiens
  chr22:43115852-43116062
  hyper
cgcggaacaatcactcgacgttggcggaggggaggaagccgcagagagggtgtcgtgagggaaaggtgggtgcaggggaaatggcgctttaacccactcagggccagaggctcagccgagactatccaggtgggaacttgtccctccggatgacaggtgatgaaactgagggaaggggactcgccctggcagtgaaacgggatgggcgct

SEQ ID NO: 12705 - DNA, 107 bp, Homo sapiens
  chr22:43116269-43116376
  hyper
ccaaatcctcaccctccctaaggccggcgccgacgctgccagcccggcagagccccctcctgccggccgctctccatccccgtccccggtcgcatccgctccggggc

SEQ ID NO: 12706 - DNA, 261 bp, Homo sapiens
  chr22:45277521-45277782
  hypo
tcctcgctctgcacctctgcgtgtgtgcatgcgtgtctgtggtcgtggccgcgtgcgatgcacacacgcgtgttcagtgcaattcggcaccatgtgatatgctcggggtgggagcccgtggctcctggacgcttatcctgttgtgctgagtccctcaggactgggatgtgggaatcgggcaagggtgacaagctgccactgcccaccctggatgcagaagcccttggcagcaagtctggtccccgaaggccggaacctccc

SEQ ID NO: 12707 - DNA, 198 bp, Homo sapiens
  chr22:45403714-45403912
  hyper
gtgctgaaaccccgagcgctgagctcagcgcaactaagtcacaatggacaacttttcctccccggagggggcccggaggggggggagcggtcgcgcctccgacgcgtgggagcttctcaggtgtccccaactacacctaacgcccggagcccaaagttggagcagaactggggagtcccgggggcgcgtttcttttgt

SEQ ID NO: 12708 - DNA, 177 bp, Homo sapiens
  chr22:45405768-45405945
  binary
gccgcctcctcccgcgcgagcctcccgcgggcagggactatatttcctccggcgcgcgcgcctggatctcgttgggcctcggcaaagttgtgcctcggcacgatgctaattcggcagtgcccggatggagcgggccggggcggcggggggcggtgccgggaccctcagcccgccgcg

SEQ ID NO: 12709 - DNA, 178 bp, Homo sapiens
  chr22:45406385-45406563
  binary
gcaagaaaattgatctcttggctcttcctttaatgatttttttttacacgattaaactctcaacagatgtcactggacattttaagactcttgttaagagtcgtaaacaggcccggtcaatgcgacctaaaacaattataattacagctgcggaggtcgcgtttcagaacccccagcc

SEQ ID NO: 12710 - DNA, 121 bp, Homo sapiens
  chr22:46367867-46367988
  hyper
agcttaggctggcgaggcgacctaaagtcccccggctcccgcgcgcgacggtcacccggtgccccgcccaggggcctcgctgccgcgttccctgcccgcccggttccagcgctggaggccc

SEQ ID NO: 12711 - DNA, 235 bp, Homo sapiens; identical to SEQ ID NO: 8471
  chr22:48027392-48027627
  hypo

SEQ ID NO: 12712 - DNA, 41 bp, Homo sapiens; identical to SEQ ID NO: 8472
  chr22:48027786-48027827
  hypo

SEQ ID NO: 12713 - DNA, 110 bp, Homo sapiens
  chr22:48280063-48280173
  hypo
cggggaagccgccgttcaaggtcacgtgtctagtaagtgatgacgcagatctccgttttctagtaactgtgcaacccgatgtttgttgatttaatacaattcgaatcatc

SEQ ID NO: 12714 - DNA, 302 bp, Homo sapiens
  chr22:49042371-49042673
  hypo
cgtgtggccgctcagtcgcttctgctcctctctgcaggtcagctggccgccggcacctgtgagattgtgaccttggaccgggacagcagccagcctcggaggacgatcgcccggcagaccgcccgctgtgcgtgtagaaaggggcagatcgccggcaccacgagagcccggcccgcctgtgtggacggtaagcacccgtggccccaggacccctccgggtgctgagcgcggcgtcaccaaaggtgcctcttccctgacgcggccccttacctgaaggtccccctaggcctcagcgcatcctc

SEQ ID NO: 12715 - DNA, 46 bp, Homo sapiens
  chr22:49146962-49147008
  hypo
cgtacaatatcttgaacatgcttcttccaatgggttttgtttccca

SEQ ID NO: 12716 - DNA, 106 bp, Homo sapiens
  chr22:49637423-49637529
  hypo
cgcgactccagctccttccgaggaggtcactgagctttgcacgatgccggctccttctcaggaggtcaccagagcttctcgtgactccagccccttcccaggaggt

SEQ ID NO: 12717 - DNA, 107 bp, Homo sapiens
  chr22:49637781-49637888
  hypo
tggagccctccatttcggccgctcccgcgtcaggcccaaaataggtgcctgctggtcatcacttctgcgatcatgctttcatctccactcaattacgtcgcctccgc

SEQ ID NO: 12718 - DNA, 279 bp, Homo sapiens
  chr22:49693555-49693834
  hypo
cgagaaaccaacccaatcccagaacgccgaagacaccaggctccccggacgggcttccagggagccacttctagcttcacaacgtgaactgttttctcaacacatgacttcgcaagagtaaaagtccgtattctccctaaggcctcctgcgaacgctgtgtccaggccccgctgggggatccaggctctgagatgccccggccccatgccaggctgtggatggggagtgaccgtgcactcaccgtggtggcaacgcctgtatgcggcctgtagatgaac

SEQ ID NO: 12719 - DNA, 298 bp, Homo sapiens
  chr22:49729101-49729399
  hypo
cgccagcggccgctctgtagcaataattcatcgcttgggtccagcgttagaagcaggtctcggctctggtgctcagaagggacagcgtgtgcgggaagctttgctgccctggacgcggcgccaccacccaaccccggcccctgcggtcccagagtatcagccacgacttggtgcctcctgcctgggtttctctgtgcactttcaggcatgttgaagtcagaccattcacagttttgccgcaggtcgacacggagtgccccgtggcttagcaggtgtgagctctctctggggctggccc

SEQ ID NO: 12720 - DNA, 108 bp, Homo sapiens; identical to SEQ ID NO: 8473
  chr22:49967872-49967980
  hypo

SEQ ID NO: 12721 - DNA, 60 bp, Homo sapiens
  chr22:49980101-49980161
  hypo
cgcaggctctcgtgtcagggcgcacagccatgtgatgactccacattcactcagtgctca

SEQ ID NO: 12722 - DNA, 239 bp, Homo sapiens
  chr22:50002819-50003058
  hypo
agccggtgtcctcgggagccggtggtggggctccctgaaggtcctagaaatccggcggcacagggacgtgcaggcggatgagctggagggagattctgcttttctcagttcctagtgagaagtcagagcccctctgaaagacagacagtcatctaggtcccatctcaggagaaagtggaaccgcccgggccgtgcctgctagaatcaagtgcagttttcacaagaccttgctggaaact

SEQ ID NO: 12723 - DNA, 211 bp, Homo sapiens
  chr22:50008973-50009184
  hypo
ctctgggcagcctggctagagctctgcccacggcacgtcagcccctccacttccgtctgaaaggtgccggccgcgtgtgtcacgcgagaccagtcctgcacgtggatctggacggggcaactgcgcgaagggtcatgaatcccgccggccagggaggatcgtctcctgtgcagaatgaggtgcggtcagaacacggcagaagctgggagct

SEQ ID NO: 12724 - DNA, 290 bp, Homo sapiens
  chr22:50009330-50009620
  hypo
aacccggaaacacctcgacgcggccggtcaatctgaatccccagaaaacaccgcggcgcggcaggtcagtccgaacccggaaacaccgcggcgcggcctgtcaatctgaacccggaaacaccgcagcgtggcctgtcagtctgaacccggaaacacctcgacgcggccggtcaatctgaatccccggaaaacactgcggcgcggcaggtcaatccaaacccgggacatcattgctaccagggcggaggagaatacacgcaaaatataccagggcggaggggaatacacgg

SEQ ID NO: 12725 - DNA, 48 bp, Homo sapiens
  chr22:50009663-50009711
  hypo
ggcggaggggaatacacgcaaaatataccagggcggaggggaatacac

SEQ ID NO: 12726 - DNA, 79 bp, Homo sapiens
  chr22:51042182-51042261
  hyper
cgggggaggagggcagggaggatggactggctgctggaagaggcctgggtggtgcagagagggtgaccccacctccctg

SEQ ID NO: 12727 - DNA, 299 bp, Homo sapiens
  chr3:101497996-101498295
  binary
caacgccctcggcccgcccccgccgaagctccaccaatcgtagccgggggtcggaggtgaggagacgtcgccgggtgaggaagcggggggctagcggcctggcgctgcggcgaccgaccggggcgtcaggatccctggcccccggagagcgaagggcgggcgggtcccggaggtgagtgctggatgtggtctgtgtgcggacgtcgggaggggccgctgcgggcggagcgacccattgcccggctctgccagcgcgctcctagactgcgaagcccctccctccgcgcgcatctgctccc

SEQ ID NO: 12728 - DNA, 98 bp, Homo sapiens
  chr3:101498512-101498610
  binary
cggcaacgccacagctcggtacagttcggacctccacgccgcagcgaaagacttctgtcctccaggcaccttcactaacccggtgcggagcacttggc

SEQ ID NO: 12729 - DNA, 199 bp, Homo sapiens
  chr3:106362771-106362970
  hypo
cggagggtgcgctgggtcccccagcactgccggcccaccttcaccatgctcgaaatctccccgggcctcagctgctgcctcgcggggcaggactcgggacctgcagcccgccatgctggacaaccttccctctgccactgtgggcttgcgtgcggcctgagcctctctgacgggtgccaccccctgctcccccgcgccc

SEQ ID NO: 12730 - DNA, 335 bp, Homo sapiens
  chr3:112051807-112052142
  hyper
cggtcacctttgaaaagggaaaaatgtctgaaaatagacaaagctgaatataaacatcatttaattccccccacacagacagcctccgctcctgtgagggcgtggggaaaacggagtgggagaagggggctagcgaggaggaagaggcgggaggtgcggcaggggcacaggtgacgctcctcccgcctgcctagcagagctccaggcgcacatccgcagtcagccacctcgcgcgcgcctccaggagcaaggatggagaggctggtgagcggggccggggcttgggaaggagggcgcagggcaggcgatgttgagccggtggccctggggcgggc

SEQ ID NO: 12731 - DNA, 80 bp, Homo sapiens
  chr3:112052419-112052499
  hyper
agctcccaaaactggggaggcacagcctattttaaactgcccccaaaagggaaagagaaatgctgtattggttccatatt

SEQ ID NO: 12732 - DNA, 104 bp, Homo sapiens
  chr3:112930511-112930615
  hyper
ggaccctgagccccggcccgccggtgtcagccgccgcgcgcgcgcacagacacacacacagagacacacaaacacacacagaaaagacacacacgcgcacacac

SEQ ID NO: 12733 - DNA, 152 bp, Homo sapiens
  chr3:112930655-112930807
  binary
cgcacgcgccctccctctccggcccgcaacttctcggtcctcggctcctttgttgctccagccgcggccgctcgcccgtgttgtgtgtccccggtgtcaccgagcgtgttgtgtgtccgtgcggcgcggcgctgtgtggctccctcgcgccc

SEQ ID NO: 12734 - DNA, 132 bp, Homo sapiens
  chr3:129982901-129983033
  hypo
cgagggcttccacttgaccacctatggcaaccggaagcagatgcagagacatgtgcgcgaggcttcagcccgccccttacagggaaccgccccccctgggccacgccctggagtggacgctggagaatgtgc

SEQ ID NO: 12735 - DNA, 237 bp, Homo sapiens
  chr3:129983103-129983340
  hypo
ggacagggagaagctatggactctgtccctggaggccaaatgcaagggcattaccctctttgtgctggccttgggtccgggtgtggggacccatgagctagccgagctagccgagctggtcagtgctccctctgagcagcatctactgcgcctacaaggggtctcagagccagaggttaactacgctcagggattcactcgggccttcctgaacctcctaaaaagtgagcagtcccc

SEQ ID NO: 12736 - DNA, 45 bp, Homo sapiens
  chr3:134370196-134370241
  hyper
acggtctccggagggttctcgagagggctggagccgacctcccac

SEQ ID NO: 12737 - DNA, 271 bp, Homo sapiens; identical to SEQ ID NO: 7335
  chr3:13611739-13612010
  hypo

SEQ ID NO: 12738 - DNA, 186 bp, Homo sapiens; identical to SEQ ID NO: 7336
  chr3:13612341-13612527
  hypo

SEQ ID NO: 12739 - DNA, 1495 bp, Homo sapiens
  chr3:140660238-140661733
  binary
cgtgcacaaacctttttatgcattgtgcgagggttactctgagatagacaccaagggaactgctgggtcataaatccaattttttcaaagtaaatccgcttgcgaacccggaaccaagtcgatttttcccgccccgccagttccctgttcaggagagtgcagccgtgattggcgcgttcactcaggccaggggcgccccaggtctcaggtgctaggagcgcggtgacctaccaccctccgggcacgcgttctggccacgcctcgcggcccctttcattgaaagagcccgtagggatcacgtgaaagaacactgcagagtgcgtgacgtcacgacgctcacaccaatgggagcctctgtttatgtcgggagccatcaaatagtcatcttccccctaccatcccccgcccactctccgtcgcgctgcgctgcgtcgctttcagcctctggtgaagggcggcgcgcttaggcaggcggtggcgcggctggagtgccgcggggagggctgtgccggttgctttctgcagccgcatctcggccagctctcctcgccgtccccggggcgctgtgcgtctccagtccgggaccgaagccgcctgccgtagcgggcggccagatccgcgtcccgcctcagcggccggaggacatgcgggagagagaatgagccagagggacacgctggtgcatctgtttgccggagggtaaggtcctggcggggcgtgcgcactggggctgagggtgctggggccgaagacgcaggcgaggggggcgaggggggccgaggggggtgggggggtgggggggcgggagtgaggcctgggcggggagctgccacgggcctgcgggtgaggggagcgacccagcccgtgggtggtgaggggggctccggttcggggaagcaagggggtgaggcccgggcccgagggcgagagagtgaggcccgggcaaagagggttgaggcatgaaacccgggccgggagtgaggttttgggcccgcggggccggggtgaggcggaggccgaatccatgcgtctgaggagacgcgggcaagagctggggtcggcgcttgattacccggacgccgctggacctggccgcacgccgcaatctagcaggcgtcggggatccagggccgctttgaggagcctggcttcggatttcgcgtaggttgcatggcccaaggggacggggcggaaagtgcggaggctgaggacaaaatgggcgccggagactcctttagccctcgctccttgcagcgctcgcttgggcctctgcacgtcactcacgccccacctcggacctcgggccgctcatttccgggctcggctttgcaaggtgggtggtaagggggctacgggatcgagcggggaaggctttggtattctcccgtggttgctgtagggtgtttctagcccttggaaaatttcttgcccgaggttttccaggtggtgaatggggtgcaaagctttccagtacctttggggtcagattcctttc

SEQ ID NO: 12740 - DNA, 92 bp, Homo sapiens
  chr3:14443834-14443926
  binary
cgcaggcaggaggcgcccagggcgggctgccgcacctggcaacgaacgttcgccgcgcggcatgagggtgtgcgcgcgcgctcggcgagccc

SEQ ID NO: 12741 - DNA, 580 bp, Homo sapiens
  chr3:14443996-14444576
  binary
cgcgcgtgtgtccgcacttggggcggggctggaagccccggccccgccccggccccgcccccggcccggccgagctggtatttttccacccagcaggatgggtgatgctgagagctgcctgctcagacaacagacacgcgaggtcaggaagaagccgcttataaattaccgcttccttcgcgccgccgccaacgccgagccccgaggaccgcaagcccagaggacaagctgcgccaagagggagtgctggagctgttcacccagcgggtcagagagcgagccgggcaggccagcccccggccggcggaaccctggcacagcctgagcagatgctgcgggcggcgccgcagccaccccaggtaccggagggaccgggagctgggcgcgcagccggcgctgcccgccgtctgcagcccctccccatccccgcgtcgccgcagtcccggcctcctcccctccgcgtgcgcccatccggcgcccctttcaccaccgcggaagggaccgagagtcgcctgctcagtcccgctggcggggctgttattgtttccccggcaaaagggctccggctcttggtgcgggc

SEQ ID NO: 12742 - DNA, 86 bp, Homo sapiens; identical to SEQ ID NO: 9666
  chr3:150802802-150802888
  binary

SEQ ID NO: 12743 - DNA, 33 bp, Homo sapiens; identical to SEQ ID NO: 6144
  chr3:157824101-157824134
  hyper

SEQ ID NO: 12744 - DNA, 271 bp, Homo sapiens; identical to SEQ ID NO: 9675
  chr3:169379645-169379916
  hyper

SEQ ID NO: 12745 - DNA, 138 bp, Homo sapiens; identical to SEQ ID NO: 10622
  chr3:179169640-179169778
  hyper

SEQ ID NO: 12746 - DNA, 581 bp, Homo sapiens
  chr3:180546449-180547030
  hypo
cgaccttcgctcgctttctgggccggggcctggtgagagtcagggggccggggcccctgaggcagagaaaactgttcacgccttggaggagagtgtccacttggctcccagggccggcctgcacagcctgcagcgtctccatggccttctcctgctgccgccgggcctccaggccctccacgtcgggcgggtagcagtggccacgcatcacggtcacctgctgtccctgggtgatggcccggctccggcagctgtgcagcgcgtggtcccggcaggtccaatacgccttctcccccacggccttctcccgcttgtagaggaacgactcgtgcaccaggaagctatccccgtagcacgtcctcaggaactcaaggggccgggcctgtcccaggcccaggatcgagcacttcttgggcgtcaggctcagcagctacaggattcggggtccgtcgtcgtcctccgggccggcttgctcagcactagcccaggggtgggctctggctccggctccttggggcactgccacaggccccccctctccagcggctcctccactcggcttccagagccctcaggacccc

SEQ ID NO: 12747 - DNA, 37 bp, Homo sapiens
  chr3:181430331-181430368
  binary
gagaaccccaagatgcacaactcggagatcagcaagc

SEQ ID NO: 12748 - DNA, 253 bp, Homo sapiens
  chr3:181430443-181430696
  binary
cgctgcacatgaaggagcacccggattataaataccggccccggcggaaaaccaagacgctcatgaagaaggataagtacacgctgcccggcgggctgctggcccccggcggcaatagcatggcgagcggggtcggggtgggcgccggcctgggcgcgggcgtgaaccagcgcatggacagttacgcgcacatgaacggctggagcaacggcagctacagcatgatgcaggaccagctgggctacccgcagca

SEQ ID NO: 12749 - DNA, 314 bp, Homo sapiens
  chr3:183145618-183145932
  hyper
gccagatgaagcccagagaccatcctcacccgccattaataaaacgcaggaaaaattaaagcttcgtttaccgacatgagtgatcactgtggccagtcgccgggtgagctcctggggaggcatctcttcttttaagcaagacagcatttcactgaaaaaccattccgtataaataaagccaaacaaaactgtttctaccgctgcggtggatgattttttaaaggcatctccgcccaaggatgctctgccctcgccctcttcctggctctccaggcaagaaacgagagtccctcgcagcctaggccagctctccc

SEQ ID NO: 12750 - DNA, 319 bp, Homo sapiens
  chr3:183146025-183146344
  hyper
aggaagcaagtcgccaatctcgccggaaccgcgccccggctcctccggccgggcgagctccggggcttccagaatcgcggtcccggccgccaggtttccggcgccgcctccagggactgtagagtgagggatgctccgccaggtgcaggggaggcggcaggtggccgtggcttctctgcgccgccggccccacgccccagcgcccacctcgtccagcccacgggtggcgcccggggctctcggggaggcacgcacgctcccaagcgccgctcgttttggggtcgggaacgctgcgcacctttccctgcggggagcccgc

SEQ ID NO: 12751 - DNA, 571 bp, Homo sapiens
  chr3:183542795-183543366
  hyper
cgccggcagctccgaggtcgcgtgggatccgggctccaggcgcctccgctctgccgcccaccccatccctctggctccgggcctccgcgtcctcccaccacagggtggggactcgttgcggtccctacccagcccatacctgtacgacgtggtcactgctgcagccgcgtccgcgtcgccgatgggcagcacgtagaccccgcgggcgccgggcgcaggtggcgcggaggactgcgcggaggatttgcccctgcggccgcccgcccccggtccgcgccccggcggcggatccttgggcccggcgggcgtggtccacaagccgaagtcccgctggtactgagtgagcggcacgtcccggccggaatcccgggcgcccgcgggaggctggcccctgcgcgaggcggcgccgcccgtgcccggctcctcgctgtcgaggtccgagtagccgtgcagagtgagcggcaccgccacgtcggagcggtccagctggttccagcgccgcgccaggcagcacaggcggctgatacagggccacgccatgccagccccggcgcccgccgccccgctcccg

SEQ ID NO: 12752 - DNA, 302 bp, Homo sapiens
  chr3:184870307-184870609
  binary
ggcagagcccggagccccgcggccgcagagttccggcagcgaccccggacggcccggcgggcgtcccccggaccgcggcggaaggcgggaagacgcggctcgacttacagtgacaccatcctaggtgacagcaccagtgcagcttgaagcacttgccatggctgtgcgtggcacagatagacagcccgtcgcacggctggaagtcgggtctgcgggcggcgcaactccgcgccagggcctgagcctcatctagtttctcgctcttccaaccccgctccgacgccggcgaggccgccgcactc

SEQ ID NO: 12753 - DNA, 291 bp, Homo sapiens; identical to SEQ ID NO: 5820
  chr3:186079331-186079622
  binary

SEQ ID NO: 12754 - DNA, 234 bp, Homo sapiens; identical to SEQ ID NO: 5824
  chr3:49906737-49906971
  binary

SEQ ID NO: 12755 - DNA, 49 bp, Homo sapiens; identical to SEQ ID NO: 5825
  chr3:49907379-49907428
  binary

SEQ ID NO: 12756 - DNA, 82 bp, Homo sapiens; identical to SEQ ID NO: 7369
  chr3:50377892-50377974
  hyper

SEQ ID NO: 12757 - DNA, 167 bp, Homo sapiens; identical to SEQ ID NO: 7370
  chr3:50378002-50378169
  hyper

SEQ ID NO: 12758 - DNA, 44 bp, Homo sapiens; identical to SEQ ID NO: 10641
  chr4:10458329-10458373
  hyper

SEQ ID NO: 12759 - DNA, 207 bp, Homo sapiens
  chr4:109088463-109088670
  hyper
gatccatttggaataagttaccctgcccctctacctcccatcctacacacacacacacacacacacacacacacacacacacacacactgcggaccgggggcccagctacgcacacaccccaaaacaaacgagggatctactcgggaccctcagccgggcggccgggcgccttcgttcccttcctccctctctgagtttcccaggga

SEQ ID NO: 12760 - DNA, 61 bp, Homo sapiens
  chr4:111543907-111543968
  binary
cgaaacaagagtgggcaaagacccccttcttctctccctccctcccccaagaacccctcca

SEQ ID NO: 12761 - DNA, 300 bp, Homo sapiens
  chr4:113435475-113435775
  hyper
ggaggagcgtcagtccgctctgcaaactctttagatatgccaccatcatctcttcccagggtctttttcgtctcaagaagcgcccccaaaacgccacccttggctttgacaataagctccatcacaccttcagtaaatcagagcccgtctgaatgaaggatacccaaagccaagaaatgcaagaaacaaccgaggaatcagaaaggctacacctgccctgtgaagtgagatggtttccagggcgtggaaaggaggggcaggggaagggaggagggctcgactggggacaggaaagggaac

SEQ ID NO: 12762 - DNA, 243 bp, Homo sapiens
  chr4:113436585-113436828
  binary
cgtcctcttcctccttcaactccaaggtctcggatttgacgaacatcctaccgaagagagaaaggggaaaaaggcagtgaggtgtaaggaaagaaacagaggcgcgatcttcgtgtcacaggggcgtgctccggcgcgcacccgagaagaccagctccgaatggcgcggagcaggaaggcgaaggaagaaacccaggcagtgctaaccaaggtcaggagcgccgctagcgctcgctgtgaccc

SEQ ID NO: 12763 - DNA, 113 bp, Homo sapiens
  chr4:113438278-113438391
  binary
gaggtcggataggggagcagttgatgagcttttagaggatgtgagaatgaaatcactcacatgttagagctgaaaggatccccctcattttacatacaggaaactgaggctcc

SEQ ID NO: 12764 - DNA, 81 bp, Homo sapiens; identical to SEQ ID NO: 7381
  chr4:113444864-113444945
  hyper

SEQ ID NO: 12765 - DNA, 115 bp, Homo sapiens; identical to SEQ ID NO: 7382
  chr4:113445444-113445559
  hyper

SEQ ID NO: 12766 - DNA, 215 bp, Homo sapiens
  chr4:115520945-115521160
  binary
tgtgtgttttggatttgaaggaggcaaaccgcatcggagagtgcaagtagatgcagtgcgtcggggcaaaaggacaatctgaggaggtgggcggggtacccaatctctatatacaagctttctggtttaattgagggtttataaaattgagtacggtaaacctgccattgtgcagcacttccttaggaaaggaatagcctctgtacctgtaccgc

SEQ ID NO: 12767 - DNA, 415 bp, Homo sapiens
  chr4:1395992-1396407
  hyper
cggggaaaacaggcaggcgcttcttcctccaggcagtagccgaagctgacaccgcccccaagctgacacgcctagcccggtgctcccttgcggggctgtggggcaggggagtgggaccggagcaggctgcaggggtggggagcaggaggcggaaaatgccgcggccccaccagctccatggctaagaggagaggcgaagaggaagcagctggtcactttccgagacctgtgatcttttttgggacggggagggggcggtcagggaggtgacgctgggacctgagcctcagccagcttggcgggtgagcccctgcgctcagcccctgcgcccacgacgacgggcaggcaccagcagagtggcctgaattccggccgggggacgccaggccggtgggaaaacgggctggagtcccgc

SEQ ID NO: 12768 - DNA, 995 bp, Homo sapiens
  chr4:146857459-146858454
  hyper
cgccttctccttcctcgcacaaaatttccctacacacgcagccgcctgcgagtgattttatgtgcatatatattacatatgtgatattatcctcagaacctctagcgggcaggcgaagaaaggactgcacaggggcattttttttttttaaaggaaggggaaaaaagcacaacccaagccctttgcgtcgactcctgcgtaccgggaaggggaaagaaagaggaatgtttgcggagcggactgcttgcaagtgcccttgctcgccacttcggctgcggcccgggtgacacggaggcgcgggggcgcctggcccgagcagcccgcgcccccctcccggtcccctgggcaggcaccgccgcggttatttcgcgagggggagatcgatcgccctgcctgtctgcagcggaaaagcacaagctcacacacagcccgagcccgagacaccataaccttaacccttcccccaccctccgtgaacttcaggtgaccgaccacgtcggcctgacacccgggcgggcgggcgctccggctccactcccgcccccagcccgggttttgcaggatcgggctccgagcagcgccaaaccgccgggagaggggagtagtgtggggggagagaagagaaattgaccctccgtctcccccgacccctccctccggcgcctcccgcgtcccctcctccccgtcaccccgccccacgccttctcccctgccccctcttccctgcattcaaggagccgggcggccccgggggatatttttagttgcttctttctccttcacttttagctttagcagcatctcgaaacactcaaagcggagaaagactggggggttggggggagctggagagggagtgggggaaaagttaagagtcgcgcaaagaaaagccggagggagggcggagagggaccgggggcgcgggtggaggaggggaaggggaccgggccgtgccggcgggtgtgtgtctccagttggcgtgtgtggctgccgcc

SEQ ID NO: 12769 - DNA, 411 bp, Homo sapiens
  chr4:150999731-151000142
  hyper
cgccccacccttccttccttcctcccctcggcgctcccgggagcgctcggcagacgcccgagctttgtgggcgcccgcgggcccagcgcgagcctcgggcggcccaactttgcctctcccggtcggctcccgagcgggacttgtgaggcgtggccgggtggaggaggcgcttgcgggggcgtggggctccccggcaggcgggaggcacggagcaagtcgcactggacaatgacctgggcagctcggcgctgcggacacttttagctgagggcgcgggcgggtcggctcctccgcggctcctcggccccacctgcgcggagagggcgggatgccagagccaggtgtcccggcgcgttaagggccctcgcagtcagacgtccctgcaccggcgctcgcacccttagtcggccc

SEQ ID NO: 12770 - DNA, 124 bp, Homo sapiens
  chr4:151000581-151000705
  hyper
ctggacgagctgctggaaggtaggaggggagggcgccgcacggcaggtgcggcggagcgccggcaggtgcagtgggcgtgagccggcgcagcggggagcccgcggggtgctttccaagccgcac

SEQ ID NO: 12771 - DNA, 191 bp, Homo sapiens
  chr4:153600941-153601132
  hyper
cggcagagttctgtagcctcgggcaccctaccagcttttgcgatcctccttcccaggagtaggaagtggaggcggcttaccccggccgacgggaacgagcgcgatcaccagggcgaagactagggctgcgcggggagcctgcatgtccgctcgcctcggcagaggcgcgctcaggatgctgcgccgggctg

SEQ ID NO: 12772 - DNA, 261 bp, Homo sapiens
  chr4:153601161-153601422
  hyper
tttcctgcttgtttgggtcggtgctgacttgaaggagaggtgtgtgcctgttttttaggaagtgatgtaattctgcaggagcctgtcagaccagcaaggattgcaaaagagaagttgctgttgaagcactggttctattatcacgcctctccagccctttggagtcccggcctccagcttttgaaaccgtccccggggcaacagagtcccttgctcagatgtcgttcggtatctgggactgggaggggtcctggaccacac

SEQ ID NO: 12773 - DNA, 1685 bp, Homo sapiens
  chr4:174089737-174091422
  binary
cggagctctgcggtggccgccagaggggagggggccacggggaggagcggagggaagagcccggggaaaggtgtagccgaggggagttccggatctggagctggaaagggcaggcagcggagagggcggcagccgtagcggtaggggtgggggaaagagggggaggagagccggaggagggggaaggagggaggggagagcggtggcggcggctgcgccgggctgtgagtctctcgccgccggaggaagatgaggctgaagattgggttcatcttacgcagtttgctggtggtgggaagcttcctggggctagtggtcctctggtcttccctgaccccgcggccggacgacccaagcccgctgagcaggatgagggtgagtgacccgcccggccccctccggcggcagcgaccggcaacttgttttgtttgcccgcgtgtggagggagcaggggcggcggggtcgcggcacggcgtgggcaccgcagctccgcaggtggtgctggcgcagcgcgggccgagggggtgccgagccccgcgcactccgacctccctggccgccgccggcccgccccctcgccgccccttcctccgctcttccccgccccgggctccgtcgccgacacccgcgctgccgcggcagcggctcgggcggccgctctccgcgccgggactgcgggcggagcgggcggagagccgggtccggggggctgcggccgcccggcgtcccgctctggggggccgggaccgcagcgctcacggcccggggacgcggggttggtccaggctgcggcctgtggcgcgtgcaggcctgaaggaggcgagatgccgatgccgccaccgctggtccggtggaccaggccccttggtccagcctcccctcccgcagccgcccgtctgggggtgttcgcagccccgggctcccccggcccgcccgccggggagtgggagggcgatggcgccccgcctccggctcttacggagagcgcgcctccccctcaactccggcggcggggagccggggtgcgatgcgcggccgaggcctcgcccggaccgccggtccccctcgcgtccctgggcgagggaggggcggttggccggagatggcggaggggcgtccccgccccgcctgcccgccgcccccagccctcagcgcctggggaagcccctgctgtggcagtgctcgggcgctatccgggggaagaggagcagttcctcttccttggctgcggcagggctgcttgggccggaaaactaacttgtgtcggcgcccggccgccccgcgccggctgccggctagctcaggccgacgccgaggggagcggcggcgcggagctcgcggcggctccgctgggacgcatttgtctgccgcccagggcgcgagtgttagcgctgacattccttggatttggagggtttagtcaggcgcctcggaacattagttacccggagccgcgccgcgcggggaagggaccgcgggcactgcggcttccctgacccggcagcgggcggcgcgcaccggcctcgcccccgaccctgacctgcttccccccggatgaaccgttgcaccacctgcttcctcctccccgctgggacagccaactgggccggctgccagtgggggtaggagagggtatgaggggctcacgaccgccgaggcggcggggctgcaggaggagtcgagtc

SEQ ID NO: 12774 - DNA, 482 bp, Homo sapiens
  chr4:189552385-189552867
  hypo
cgttcctacaccggttgacctcaccgtgatgcccaagtgctaattctactccacgttcctgcaccggttgacctcaccgcgatgcccaagtgctaattctactccacgttcctgcaccggttgacctcaccgcgatgcccgaattctacctctactccacgttcctgtacctgttgacctcaccgcgatgcccgaatgctacttctactccgtgttcctgcaccagttgacctcaccgcgatgcccgaatgctacctgtactccacgttcctacaccggttgacctcaccacgatgctggaatgctacctgtactccacgttcctgtaccggttgacctcaccacgatgccggaatgctacctgtactccacattcctgcaccggttgacctcaccgcgatgcccgagtgctacttctactccaagttttgtctccgtgtaaatatcgccatgtccccagaataatgtgtctcaactatttc

SEQ ID NO: 12775 - DNA, 203 bp, Homo sapiens
  chr4:189717765-189717968
  hypo
cgcccatcacagacgccgcgcccctcacagacgccgcgccgcacctcacagacgccgcgccacacctcagaccctgcgccgcacctcacagaccctgcgccctacatcacagacgccgcgccacacctcacagacgccgtgccacacctcacagaccctgcgccccacctcacagacgccgcgccacacctcacagaccccgc

SEQ ID NO: 12776 - DNA, 183 bp, Homo sapiens
  chr4:190345382-190345565
  hypo
cgcatacacacacacacacacacactgcacggaactcctgtatgcatacgcacacgcactcacactgcacggaacccctgtacgcatatacacacaggcacacacgcactcacactgcacggaactcccgtatgcatatacacacaggcacacacgcactcacactgcatggaacccctgtac

SEQ ID NO: 12777 - DNA, 702 bp, Homo sapiens
  chr4:190462487-190463189
  hypo
cgaggcatcatacaacccgacttcaaaatgcaccaagccggaggcatcatataacccgacttcaacatgcaccaagccggaggcatcatataacccgacttcaaaatgcaccaagctgcaggcttcatataacccgacttcaacatgcaccaagctgcaggcatcatacaacccgacttcaaaatgcaccaagccggaggcatcatataacccgacttcaaaatgcaccatgccagaggcatcctatcactcgacttcaaaatgcaccaagccggaggcatcatgtaacccaacttcaacatgcaccaagccggaggcatcatataatccgacttcaaaatgcaccaagccgcaggcatcatacaacccgacggcaacatgcaccaagccgcaggcaccatataacccgacttcaaaatgcaccaagccagaggcatcatataacccgacatcaaaatgcaccaagccgcaggcatcatataacccgacatcaaaatgcaccaagccgcaggcatcatataacccgacgtcaaaatgcaataagccgcaggcaccatataacccgatgtcaaaatgcaccaagccgcaggcatcatacagtccgacttcaaaatgcaccaagccgcaggcatcatacagtccgacttcaaaatgcaccaagccgcaggcatcatacagtccgacttcaaaatgcaccaagcc

SEQ ID NO: 12778 - DNA, 561 bp, Homo sapiens
  chr4:2060916-2061477
  binary
cgtctcccccacccccgcgatcacatggtgacccccggcagccaatgcagtggacgctaggaccctgcgggccgcgggcgccgcgactgcaccggcgccgccgcattataaatacttctccaaaatgcggcgcagctccctgcgcgcgccccggccgcccgccgcctccgccccgcgcccctgagctgccgccgccgccgccgccgctgccgccgccgccgccgccgccgcgggtccgagggcgccgcgcccttgccctgggcccggccgtgcccgccgccgcccggccgcgtccccgctgccgcgccgcccggccgggtgcatgcattgtgggcctcccgacatggtctgcgagacgaagatcgtggccgccgaggaccatgaggcgctgccgggggccaagaaggacgcgctgctcgccgccgccggcgccatgtggcccccgctgcccgccgcgcccgggccggccgccgcgccccccgcgcccccacctgccccggtggctcagcctcacggcggggcggggggcgcggggccgccgggggggcgcggcgtgtgcat

SEQ ID NO: 12779 - DNA, 142 bp, Homo sapiens
  chr4:41869059-41869201
  hyper
cgaattgaaatggatatttccctcctcggcccagctgaacgaggctcaatgcctcaaagatgcagagctgcctcggtggacatgctctgtggctgatattataattttcataatgcgcttttatgtcgcgccagactcctcc

SEQ ID NO: 12780 - DNA, 96 bp, Homo sapiens
  chr4:42317342-42317438
  hypo
cccagcaggcgcccaccggccgcaccgactgcggggcccacttagcccgtgcccacctggaacctgcgccggcccacaagggccgtgtgcagcccc

SEQ ID NO: 12781 - DNA, 958 bp, Homo sapiens
  chr4:56914942-56915900
  binary
cgccacacgcaggatgagcctcgctgtgagcccaccactgtaacctcagaccccacgagttcagcactccctcgagtcaggctttgcagaagccgggagggcactggtcaaccccacgcccctccttggggcccgctcctggtttctgggcacccctggggaggggagccatctggtgtgcgccactcccggagggcgcgagaaggaagccggcgcctcacgctcagctgtccctgggcgaagccgggcggggcggcggcgcgggtccgagcgcccgaggcgccggcggagcatgtgaccacgccgcgcggggccgggcgcgcagtgccgcgcggtggcggcagtggggagagcaatggaggccacggccgactgagaggcgggtgcgctgctggtgctgctgccgcggcggctgctgatgcggaggctgccgcgcgcagtgccgccgagtccgccgcccgcccgggaccgccggtcgccggccagccgctctgccagccggagcgccaggcggggacctcaggtgagcgcctgctcggcccgcggccggagccagacaatggggacaggggcgggcttctctcctccactcgcgcccctccgggccgggcccccgcagcgccccgggactccaggggacctggccccgggggcgtgggctcggcgcggcgggcggtgggcttcggggcggtgtccccatgtgggaggcgcggaccctcccggaggaacctgcgcgcggcttgcgcgctttggatccccgcaggggaacctgccgccgggctgcaccccgggaacttgcggagaatatgggacctcgcctgccttctcctcttcccgcgcctcgccatcctgtccccaggtccctggctcggtcccgaccgcggcaagggccagaaccagacctcaccgtccgggatcgcggacgccgtccgggctcagccctctccccaccgccccc

SEQ ID NO: 12782 - DNA, 1212 bp, Homo sapiens
  chr4:57180972-57182184
  hypo
cctgaaacccgaaggacaaagagaacactccgaggagccaggtatttgcgaggagcagaacccagaggccgagcggcgaagagagcagcagggaaggagcggggatttccagggggccgatcgtcctgggcccgaggaaaagagagaagaaggggacacggagcctctcctgaaacaagaggggccggtggaagccgcgcagcctccggtggagaggaaagaagccgccgcccttgaacaaggccgcaaggtggaggagctgcggtggcaggaggtggacgagagacagaccatgccccggccctacacgttccaggtgtcctccggagggaagcagattctctttcccaaagtcaacctgagccccgtgacgcccgcaaaggacacggggctcaccgctgctccccaggaaccaaaggcccccaaagccagcccagtccagcacgccctaccgtcgtccctgagcgttccccacaccgccattctggtcacgggcgcgcagctctgtggcccggcagtcaacctgagccagatcaaggacaccgcgtgcaagtccctcctgggcttggaggagaagaagcacgcggaagccccagctggggagaaccctccccgaggccccggcgacgcgagggcgggcagcgggaaggctaagccccgccaggagtctcccagcagcgcgtccgcactcgcagaatgggcttccattcggtccagaatcctgaagaacgcagagagtgacccgcgcagcagcgagagggaccagttgaggcccggtgatgagtccactcccaggggccggtgtgattcccgcgggaaccaacggaagactccgccagtcaatgcaaagttctctattatgcctgcctggcagaaattttccgatggtggcacggagacctccaaacagagcacggaagctgaaagcatacgaaaaagacccatgctgggacccagcgaagagacagccccccagcctcctcctgctggtgttcgcgagctcgggaagggtccggagaagtcggagatgcaccgggagcccgcagacaccaccgagggatgcaaatttgccaaagacctcccgtctttccttgtcccaagccttccttaccctccgcagaaagtggtggcccacacagagttcacgacctcgtcggacagcgagactgcaaacgggatagcaaagccagaccctgtgatgccaggtggaga

SEQ ID NO: 12783 - DNA, 510 bp, Homo sapiens
  chr4:57182262-57182772
  hypo
acagaagaagaagaagaggcacagcagcaccggagacagcgcggatgcagggccgcctgcagcggggagcgctcgtggagagaaagagatggagggtgtggccctcaagcatggtccatccctcccccaagagcggaagcaagccccttccacccggagggactccgctgaaccttccagcagccgctctgttcctgtggcccaccctgggcctccaccggccagcagccagaccccggctccggagcacgacaaggcagcaaacaaaatgccactggcacaaaagccagcactggctcccaagcccaccagtcagaccccaccagcatccccactttccaaactgagcaggccctacttggtagagctgctgtctcgccgagcggggaggccggacccagagccaagtgagccgtccaaggaggaccaggagagcagtgaccgccggccaccctcgcccccaggccccgaggaaaggaagggacagaagagggacgaggaggaagaggc

SEQ ID NO: 12784 - DNA, 94 bp, Homo sapiens; identical to SEQ ID NO: 9757
  chr4:57687545-57687639
  binary

SEQ ID NO: 12785 - DNA, 205 bp, Homo sapiens; identical to SEQ ID NO: 9758
  chr4:57687887-57688092
  hyper

SEQ ID NO: 12786 - DNA, 133 bp, Homo sapiens; identical to SEQ ID NO: 6184
  chr4:76555905-76556038
  hyper

SEQ ID NO: 12787 - DNA, 44 bp, Homo sapiens
  chr4:81123012-81123056
  hyper
cgtgtgtgtgtgtgtgtgcgtgcgtgcgtgtgtgtggtgtttgc

SEQ ID NO: 12788 - DNA, 173 bp, Homo sapiens
  chr4:8615920-8616093
  hypo
ctcacctgcctgctgggcacttggctgacaccccgacgtcccggctgtctctgcgcggctgacaccccggcgtcccggctgtctctgtgcggctgacacccctgacgtcccggctgtctctgtgcggctgacacccctgacgtccccgctgtctctgtgccacaggcatgtcc

SEQ ID NO: 12789 - DNA, 120 bp, Homo sapiens
  chr4:9523558-9523678
  hypo
cggcagtagctgtcagtgcgcctagcccggcgtgtggacctggggactcaccagaagggcccgatgtggagtctcacggagcgtcggcggaaggcgcacaggatgctaaagctttacaac

SEQ ID NO: 12790 - DNA, 115 bp, Homo sapiens; identical to SEQ ID NO: 6187
  chr5:100236036-100236151
  hyper

SEQ ID NO: 12791 - DNA, 337 bp, Homo sapiens
  chr5:110572-110909
  hypo
cgtgcacacatccacacaatctgcaacacgtgtgcacactggccactctgcaacacacatgcacacatccacacaatctgcaacacacgtgcacacacccacgcaatctgcaacacacgcgcacacatccacacaatctgcaacacgtgtgcacacaccggccactctgcaacacacgtgcacacatccacacaatctgcaacacacgtgcacgcacccacacaatctgcagcacacgtgcacacatacaaaatgcaacacgtgtgcacacaccagccactctgcaacaaacgtgcacacatccacacaatctgcaacacgtgcacacacccgcacc

SEQ ID NO: 12792 - DNA, 214 bp, Homo sapiens
  chr5:114506308-114506522
  binary
cgagcagtcatatcccgctttctgcttctatacccccaagtcgcgatgtcaccgcacgttcttgcccagtagcgcggggaccgcctgcagggtggagattcctctcccggatgctggccagggactgaagttaaaaggccgcggcaagggagagaccccccgccacccgggcctacgctttccttcctgagggccaggacagagggtcctgagc

SEQ ID NO: 12793 - DNA, 58 bp, Homo sapiens; identical to SEQ ID NO: 6193
  chr5:114515671-114515729
  hyper

SEQ ID NO: 12794 - DNA, 132 bp, Homo sapiens; identical to SEQ ID NO: 6194
  chr5:114515769-114515901
  hyper

SEQ ID NO: 12795 - DNA, 44 bp, Homo sapiens; identical to SEQ ID NO: 6195
  chr5:114516274-114516318
  hyper

SEQ ID NO: 12796 - DNA, 218 bp, Homo sapiens; identical to SEQ ID NO: 7414
  chr5:132082800-132083018
  hyper

SEQ ID NO: 12797 - DNA, 186 bp, Homo sapiens
  chr5:134366533-134366719
  hyper
cgaggcagccagacaggacctgcctttccctttcgttttcgggataaggccaacagctcccgaggtccccagcggcagggaatccactgcccagtctctggcccagggtatcctgctaacatctgagtgggtcctgggccccatagggcatgggggagtcccctgggggcacaggtctttgggctg

SEQ ID NO: 12798 - DNA, 124 bp, Homo sapiens
  chr5:134367305-134367429
  hyper
ccctccctctagggttcctgggaactgtccccactggaaagcgcccgccgggtgctggtcgtcagtaggcacctctagtctggtgtgccgcggagaagagcccaagaatcggagctggagccgc

SEQ ID NO: 12799 - DNA, 73 bp, Homo sapiens; identical to SEQ ID NO: 7415
  chr5:134880614-134880687
  hyper

SEQ ID NO: 12800 - DNA, 240 bp, Homo sapiens
  chr5:138923037-138923277
  hyper
cgtagatcctggattgcacgtcagtaggcgggctgcagaggaagggcgctgttctggttggtcctggccttaccccgccggagggcgccagctgccccggcgacgacacgggggaccggacggagcctcgggccgccagggaggggcctggctgcagaggcagctttctcactagcgactcgggcctctcaaaaccagcctttaggcatttaaaaagtgatacggttcacgccggtcttc

SEQ ID NO: 12801 - DNA, 202 bp, Homo sapiens
  chr5:139047738-139047940
  hyper
cgcctcccagacctctggggccatgaatcatttatgaggcaaaaatgaaaccaattaaggacaaactttgaaagcctctaattgctgcgcctggtggcaccgtggaatgaggggaggccagccttctcggtgcggaatctccttggcccaggccttcccaggctgcccgtcccgccgcggctcagggcgcctcccggctccc

SEQ ID NO: 12802 - DNA, 156 bp, Homo sapiens; identical to SEQ ID NO: 7419
  chr5:141931151-141931307
  hyper

SEQ ID NO: 12803 - DNA, 98 bp, Homo sapiens; identical to SEQ ID NO: 8567
  chr5:151066500-151066598
  hyper

SEQ ID NO: 12804 - DNA, 240 bp, Homo sapiens
  chr5:157098032-157098272
  hyper
cggtgtcaagaccccgcaggagatggcggattcattcaggaagcagccgctccgggaagccttagccaagggtcttccggaaagacaccagtcttgatcctggagcctcaatccccgctgacccagcactttggtttccatagcaattgtctcgtcgcagaaaggaatcgcctgtgctgggtcttcagacctcagctccatgccgctgagcagccccaccctggctcaacccgttacccg

SEQ ID NO: 12805 - DNA, 214 bp, Homo sapiens
  chr5:168189525-168189739
  hypo
cgccgaggttggacttacaggtcggtgacatattcagggaggtggcttgggatgcggaccagcttctggttggagcagtccacaatcgtgccctcacagcgacacttctcggggcacacgaggtccatgaagcactcgctgctgaacctgctgcggtaatcctcggagcctgggaggggccaaagaggggacgtcagcgtcacccgagttccac

SEQ ID NO: 12806 - DNA, 129 bp, Homo sapiens
  chr5:168195266-168195395
  hypo
aaggtcaggaagcagcgtcagagagaggacaggagcgctcagaggaagcagcgtggagaagcggaagccggagcaggcccccactgagcgtgattagtatcaggagtggggttccactggaacacttcc

SEQ ID NO: 12807 - DNA, 277 bp, Homo sapiens
  chr5:1702104-1702381
  hypo
cgtctggggccgggtgagtcctgacgcacctaaaccagcccacagcccctcagcgactcccgggcacggctcacactcactcagaatggaaggatgtggctgcttaggggcctggctgccacgctgagagctttctggtcaagccacgctagcattgagctctgaactcaagcctggagcccgatggggagctcgaacccattgtgccgatgcgtcattgaaagttacacgcgtgcccaggactggacaacaggttgaagcgatgtccgatttcttc

SEQ ID NO: 12808 - DNA, 303 bp, Homo sapiens
  chr5:17216361-17216664
  hyper
cgcaggcgagcatgaaagcgatccaaacacagccagagggcgccaaaatgccgcaaataaaagttccaaaggcgtcaactggcttttgcgggaaggtaaaattggcttttgtgtaatcaaagagctaccgttgtcaacgatgtcacgttacgttatttttgtatgtccctcttgccaacaggtaagcaaagtgaacgcatcttcctaccccggtggctattctgtgtcccggtgctaaaccaagtgtccgcccccttagggcacccggacaagccgcggttggccctagctttgactcgagcg

SEQ ID NO: 12809 - DNA, 53 bp, Homo sapiens
  chr5:17217629-17217682
  binary
cgggaggagggaggctgggcgggcggacgcgcggggggagggcactgggcagg

SEQ ID NO: 12810 - DNA, 337 bp, Homo sapiens
  chr5:17354400-17354737
  hypo
cgcggtcaaagtagtaagacatggacaggtaaacgcaggaggcgtagagctccaggttgatctggcggttgatggcggcctttagtcctggtggtagtcctggcgcacctgtgaggtggacgcggtcgtcatggcggcgactaaggagaggcggctgcgttcgcggtggtgactgcgcagtgctggagcggcggcgggggccttggggcagtccgagggcgcggtgaggaggtgacggagggctggctatgggcagccggccggtgtgggggacgagcgccaggttctgtccaagcactgttgaagcaggaaaccccgacgactctcgtggaagaac

SEQ ID NO: 12811 - DNA, 111 bp, Homo sapiens
  chr5:175084709-175084820
  binary
cggttgcccggtcaagggcgggctcacaatctgcggggcggggagagggaaggagccagggagaaaagggagagaaagagggggcagtgtggcagaaaggaagaggaaggg

SEQ ID NO: 12812 - DNA, 117 bp, Homo sapiens; identical to SEQ ID NO: 10679
  chr5:178016455-178016572
  hyper

SEQ ID NO: 12813 - DNA, 317 bp, Homo sapiens
  chr5:178220780-178221097
  hypo
cgttcagaacagcgcctggccccagcaggatgagggaagcaattaagcagccatgaaacagaatgaggtctgggctgacgcggaaccgcctccaaagaaggaggtctgggctgacgcggaaccgtctccaaagaaggaggtctgggctgacgcggaaccgtctccaaagaaggaggtctgggctgacgcggaaccgtctccaagacattgttcatacaaagcaagcatgcagcataaccctgtcagtccagaggaaaggacagatatgtaaacacacacgctcacacacacatgcccatacatatgcacacacacac

SEQ ID NO: 12814 - DNA, 93 bp, Homo sapiens
  chr5:178411761-178411854
  hypo
cccgaggcacgtggcgtgtgtggaacgaatagagaaggggctcgccgggagtggacagcaccgggagtgctccaaacgggtgagcaggtgttc

SEQ ID NO: 12815 - DNA, 149 bp, Homo sapiens
  chr5:178650433-178650582
  hypo
cgaacgcactcacacacgcacactcacacacgaatgcactcacacacaaatggactcacactcacatgcacactcatacgaatgcactcacacacatgcactcacactcacacgaatgcactcacacacacgcgaatgcactcgcacac

SEQ ID NO: 12816 - DNA, 128 bp, Homo sapiens
  chr5:178651199-178651327
  hypo
cgcttactgcagccatgcggtgggtgcacgctaccaccgtcttctcctctttttcttgggagctgtcgccatggctcccggcacaccctgacatccgtaggcgccatcctgacaacacgctgccggcc

SEQ ID NO: 12817 - DNA, 102 bp, Homo sapiens
  chr5:178652545-178652647
  hypo
cggctggacgtcgagaggagcgcatgaggggaggaacacacaggcggctggacgtcgagaggaacgcaccaacgagcaccagcacgctgcaggccaccgacc

SEQ ID NO: 12818 - DNA, 54 bp, Homo sapiens
  chr5:1787325-1787379
  hypo
cgcccaggctgctgggcaggctgaggctgggggaagcagagctcctgggcaggt

SEQ ID NO: 12819 - DNA, 174 bp, Homo sapiens
  chr5:1787418-1787592
  hypo
tgcctgcattccccacgcagcccatggctttcccaggtgaggccgaggtaaacacaaggaaactcgctgtgcggcagtttcctttgccacgcactcttccatcagagatggcctccagcctacccccagccacctcccatcttccatatccctgtcctggagggctgcctcgcc

SEQ ID NO: 12820 - DNA, 365 bp, Homo sapiens; identical to SEQ ID NO: 11741
  chr5:180046947-180047312
  binary

SEQ ID NO: 12821 - DNA, 595 bp, Homo sapiens
  chr5:180479644-180480239
  binary
cggcgctgcccccggccacgtcctgcctgcgggcgggtcctccctggggagccgggagggacgtgggagctgcgaggccgcgcgcacgtggttcggttctcacttcttccaaaagcgtggtaagaaccgagggagaagccggatgtttgcaaacaagcgaggagacgacttgcggaccagacggcgcgggtgcgagcaggagctccccggacatccgccgccagccaagcccctgggaccctcccgcctgcggacgcggggcgagggcgggaagacgcggggcgagggcggcgctgcggccgcagaagcctcgagccgggctggggcgcggttccctcccgcacgccccgcggcgcgcccccgccccctccgccgcgcgcgcccccgccccctccgccgcgcgcgctcccgctccacgcccgtttcccaggcggctgcggtggcgcccggagaaggtcccgcgggaggtttcccggcacgcggcgggcaggccggtctcgcctctcggtgctcagcggcgcctggaccgacacggcccccgcgggtgttttccagacgtgttcgtacccggagcctctgcgtggaagagcgcgtt

SEQ ID NO: 12822 - DNA, 829 bp, Homo sapiens
  chr5:180480302-180481131
  binary
gcggagaagccgaggtaccggcgcgggcggcggggcggggaggggcaccggccggtgctgaaccccggggccgcggaggcgcctccccccaggacgcggcgcgggaaggcggcctggaaggggcgggggcgcgcactcagccctctccgctcccgtttcccttcagaaaagctgaggaagcaggcggagaagagacaaggtgagcggggacagggcgttctgcacgcacctgcccaagtgccaaaacccgccgtcatctaaaggctgtgggtcccgttacgagggtttattccagcgcgaggtgtcagggcggccaccggggaacggggatcggtgaccccggtggggaagggggaagatcgttcatatggacaaaagcggaggtgcggaacggctgcattttccacggaggctagtgcacagatgtcagggttgaccggctgctgtcgttacgccctcggagcttcacatcacactgtacagagggagcggtgaccagggtctctgctgccagcgccacctcgtccaggttttcatagcgcacagggagtcgggcggatgcgcaacatctccgcacagggtcaggaagcggcggtcaggcaccgagaaaacagcccagttacgtgaggcagtgtccggggcttaacgtttccgccgagctaatagatttgggaggctccgaccctgattttcacactagcaggagggagggcgctgggtcaccctcctatgcagaagggcagccaagggtgcgcacttccccatcccctgcctggagcctcacttccagcccagcctgggcccgcagaccaccgcgggtgggagtgcc

SEQ ID NO: 12823 - DNA, 608 bp, Homo sapiens
  chr5:180630981-180631589
  hyper
cgcccgagcctccccgccccgccctcacccctgcacacaccctcgctgaggctcagcgagaaaatagcaaagaaagggcccccagaatcgacagcgttggcacagtcagacggctctaggtgcgcggcttaacccgggagccccctccctggacatcttggcgaggtcctctcactcagttccacgaggtggggactttgagcagagcccgcttcggggaaagagataagagtgggggcagcggctgcgtggctgtgccggagacttcccgcgggcagagagctgcggagacgcagaccaggctagaggctccgaacagacaggaagaacatcgccaagtccgtgggggacgtcgcgcaggcggcccagtatctggcccagagggaaacgcagtgggggtggggtgggggtattggtgatgttgggggtgacagagaaccgcgctcagcccgggaaccagcgctgggcttcctggaatggagaaagaagggaggggctcacccgggcctcctgatcgacaggctgttctctgcaccccgtgcgcgggagcgcgggaccaagtcagggggtcccggggacccacggggtgggtgggggctgcgctcacc

SEQ ID NO: 12824 - DNA, 64 bp, Homo sapiens; identical to SEQ ID NO: 8579
  chr5:180632796-180632860
  hyper

SEQ ID NO: 12825 - DNA, 244 bp, Homo sapiens; identical to SEQ ID NO: 8580
  chr5:180633225-180633469
  hyper

SEQ ID NO: 12826 - DNA, 161 bp, Homo sapiens
  chr5:1922827-1922988
  hypo
cgctgctgctcagggacccctcctcccattctggaaaccatcggcaaaacctcagcagaccacggggccattactgtgggctccggtttccagccactgcacttccagacttttctcttcggagccagtgggaatttagcaaatgactggatggggtctgg

SEQ ID NO: 12827 - DNA, 48 bp, Homo sapiens
  chr5:1923074-1923122
  hypo
cctgccagggcggccatgcctgctgctagagcctctgagaaaacagcc

SEQ ID NO: 12828 - DNA, 130 bp, Homo sapiens
  chr5:1951382-1951512
  hypo
cgccgtctgctgtgcgtgcgccgtctgctgtgcgtgagtcgtctgctgtgcgtgtgccgtctgctgtgcgtgagtcgtctgctgtgcgtgtgtcgtttgctgtgcgtgtgccgtctgctgtgcgtgtgtc

SEQ ID NO: 12829 - DNA, 146 bp, Homo sapiens
  chr5:1951710-1951856
  hypo
tgttgtctgctgtgcatgcatgcgccgtctgctgtgcgtgcatgtgttgtctgttgtgcatgtgtcatctgctgtgcatgcatgcattgtcttctatgggcacaggcgtcatctgctatgggtgtgtgcgtcgtctgctgtgggcc

SEQ ID NO: 12830 - DNA, 298 bp, Homo sapiens
  chr5:2261313-2261611
  hypo
cctccagtgaggactcccaggggaccgagttttccacctgcgttctagatgttctccgtgaaagcatcacgtggtgtcccggtgaggggcctggctgagtgggcatcggcttgagcgcctggagcttgctggagaagagactcatgggcaccaccgggcccaccatgcagacttcagggaaagagagcagccggaatgcgttttaaatcctgcctgagagcgtggatgctacaggactcctggcgtggggaacccggcatctgtgtatgtgcccgtgggcatgtggtcagcgaggcaa

SEQ ID NO: 12831 - DNA, 418 bp, Homo sapiens
  chr5:2371462-2371880
  hypo
cgggactgcgctgagccatggtgacctgctatgccaggttccttttctgcacagcgtcgctccctctgcttggcttggtcgccaccagtttactcctcctggaggtgactgggcgagagggtctcactggactctggagccacatgccgaacaccggcttctttccccgcagggaggccgagtttcctgttcctcgaactctaaatctcctctccaccgcgagcttggatgtgcagttgagtttcccactttcacctcggcagagaccacctgtgcacacgcggccttctagccaacccttccccagcaagcgtgacctccaaccttccccaggccccgcctatccctccccatcagtgatggtgcgtttggctgttagctaggagcccgattacgtaatttaccatccaggtcggac

SEQ ID NO: 12832 - DNA, 133 bp, Homo sapiens
  chr5:2412076-2412209
  hypo
cgctctggccggattcggccattctcatggaaaccaggggcccttcccagggcgcctcctcacttcatctccaagctgagaggcaattagtaggagtccgtctcagagtttctggagcctcagccatgatggc

SEQ ID NO: 12833 - DNA, 51 bp, Homo sapiens
  chr5:2412238-2412289
  hypo
gggagcacagtcagaagtgaggagcagccgtggtaacaaatctcatctgtc

SEQ ID NO: 12834 - DNA, 37 bp, Homo sapiens
  chr5:3221011-3221048
  hypo
cggcgcactgtgctcctggtcctggcgcgagcatctc

SEQ ID NO: 12835 - DNA, 142 bp, Homo sapiens
  chr5:3221181-3221323
  hypo
ttccagatgtcacttccaatgccagcccttccgcatgatagctctgtcaccaggagcgctcgggcgccttcactctgcttgcgcctctaaagcacacctgccccgcccacctggatctgctgtcaatagctgtcgggcgtgc

SEQ ID NO: 12836 - DNA, 317 bp, Homo sapiens
  chr5:3282952-3283269
  hypo
cgcacacatgggcacagacacgcacaggcgcacacacgggcacagacacgcacaggtgcacacacgggcacagacacgcacaggcgcacacacatgaacacaggcacagacacgcacaggcggacacacaggcacagacacgcacaggcggacacacaggcacagacacacacaggcgcacacacatgaacacaggcacagacacccacaggtgcacacacaggcacagacatgcacaggcgcacacacgggcacagacacgcacaggtggacacacaggcacagacacacacaggcgcacacacgggcacagacac

SEQ ID NO: 12837 - DNA, 216 bp, Homo sapiens
  chr5:3627893-3628109
  hypo
cgggtgctgcactcctggcctgtccgccggacctggacctgcagccgccatgctcaccgagaccttcatttctgcagatccgacggtgtgtggcgcctcttctcctgactcagcttctccatcgcatctggcacacttggcctctctggccccgtagcgggaaagcatgatttagatgtggcttctgggcttgcctacaccctagctgtccttccc

SEQ ID NO: 12838 - DNA, 114 bp, Homo sapiens
  chr5:3740590-3740704
  hypo
cggtgtgaggtgaccgcgtgctgtgctctgcagggccaggcctagaccccgacgtcccagtcccagtctctgtctgcccaagtgggcgggagaatctgggggagggagggagag

SEQ ID NO: 12839 - DNA, 328 bp, Homo sapiens
  chr5:3761240-3761568
  hypo
gaaaagctgtgtggaaaaacccgactgcgactttcaagcttgtgcttcacaacccaggagccgtgcattatgtccatgtgttcagatgcaagatgctcagaccccaggaaaaagggaattcggtgtaaagaaaaaaggactcttagcatggtccagtattaggacagtaacaccctgtgtgtgtgcacgtgccctccctccatctccctggcctttgcgtctctgtgtgggtgcacatgccctccctcctccctccatctccctggcctttgcgtctctgagtgggtgcacatgcgctccctccatctccgtggcctttgcgcctctg

SEQ ID NO: 12840 - DNA, 301 bp, Homo sapiens
  chr5:3761623-3761924
  hypo
gcacatgccctccctcctccctccatctccgtggcctttgcgtctctgtgtgggtgcacatgcgctccctccatctccgtggcctttgcgtctctgtgtgggtgcacatgcgctccctccatctccgtggcctttgcgtctctgtgtgggtgcacatgcgctccctccatctctgtggcctttgcgtctctgagcgggtgcacatgccctccctccatctctgtggcctttgcgtctctgagtgggtgcacatgcgctccctccatctctgtggcctttgcgtctctgagtgggtgcacac

SEQ ID NO: 12841 - DNA, 130 bp, Homo sapiens
  chr5:3781386-3781516
  hypo
cgcgcctagagtgagatgcatgatgcacacataggccaacccaccctggcagggcgatgatgtcgtgctccgtggcgtgattgccatggctttcagctgcaggcagagcccaggccaggaggaaaggagc

SEQ ID NO: 12842 - DNA, 147 bp, Homo sapiens
  chr5:3865172-3865319
  hypo
cgtgactggagaaggcggtatttacaagtctactgtgggcccatattaaacttcactttgacataggctcacttctttggcagtgagagtgaaaggggtggagtgagtgtgccacgctagttggctccgggacacaatggggctggc

SEQ ID NO: 12843 - DNA, 208 bp, Homo sapiens
  chr5:3932149-3932357
  hypo
cgcccggggaaagttcgtaggcaacattcatttgcacaacgagcgcactttgaaagactccagcgcaggcctgtgttcctggccgcaacaaaacacctgcttgaagcggagacaaaatgccaagctggagagagttcaaaagaacagggtgacaatcacacagtgttgaacaacagcaacggcaacccatcactacagccttttgtcc

SEQ ID NO: 12844 - DNA, 337 bp, Homo sapiens; identical to SEQ ID NO: 8583
  chr5:40680627-40680964
  hyper

SEQ ID NO: 12845 - DNA, 521 bp, Homo sapiens
  chr5:4144516-4145037
  hypo
acacagctaagtgtgttctgtgtggcatgctctagtgtgcgcatggaatgctgactgcacagcttactacgtgtgttctgtgttccgtgctctcacatgcatgcggaattctgacggcacagcttactaagtgtgttcggtatgccacacacttgtgtgcatgcggaatgctgactgcatagcttactatacgtgttctgtgtgccccactctcctgtgcatgtggaatgctgactgcatagcttactatgtatgctctgtgggctgtgctctcatgtgcacgtggaatgctgaccgcacagcttactaagggcgtcctacgtgcggtgctctcatgcacatgcacaatgccgatggcacagcttactaagtgtgtactgtgtgctctgctctcgtgtgcacgtggaatgctgactgcacagcttactacatgtgttctttgtgccacgctctcatgtgcgtgcacaatgatgactgcacagcttactacgtgtgttctgtgtgccgtgctcttgtgtgca

SEQ ID NO: 12846 - DNA, 146 bp, Homo sapiens
  chr5:4145066-4145212
  hypo
gtatgttctgtgtgccacactcttgcctgcacgtggaatgctgactgcacagcttactacctgtgttctgtgtgtgacgctcttgtgtgcatgtggaatgctgatggcacaacttactctgtgtgttatgtttgccacactctcgc

SEQ ID NO: 12847 - DNA, 799 bp, Homo sapiens
  chr5:41870076-41870875
  binary
cgagcgccaaagggctcgggagcgctgccaggagtcctcccgccccttctcagcctctccgcgcgcttctttatcgcgtctcgctccatcagggaagcgactgcagaaccaagcaaaggcggtcatccgaggggccggcgaggccaggaacgcgtcgccgcgtgtccgtgaccagggcaccgcgccacggatgccagatcccaggctggagagagcgggtaggggcagagaagaaaacgcgggcaccactcagggtttggtccacgttcttcctgcccatggccttcctcttcccccgcactttaccttgtaccaggttgccccagatccgcgggcagaggcgcagagccgaagcccggaggagaggagtttgagagccgccatcttcgggcggtgaggcaggaggaggctgcgggttggagcgcgcgtttgagcgtcggtgcgcgactgcgaaggaaacccgggcgggctggaggctcgacagcgcgtcgatgacgtcctcccggcctttcgagccgcacgccaccggcgcgctgctggctgctgcttttaaaagaagtgaggctgggcggggccccggcggggagaagaggctctgtgcagccggggcggatcgcggggaagttcctctcagcgcctcaggtgtctgggcgtgtgcagctgtgttggcgcacacttgccgctacagcccttctgtcagccctttagcttcgatggggcgctggtggccgcctccccctaggttgtggatgagtcttggcctagggttcagggccctccggccgcgggaggatctccc

SEQ ID NO: 12848 - DNA, 99 bp, Homo sapiens; identical to SEQ ID NO: 6210
  chr5:42950747-42950846
  hyper

SEQ ID NO: 12849 - DNA, 175 bp, Homo sapiens; identical to SEQ ID NO: 7436
  chr5:42995428-42995603
  hyper

SEQ ID NO: 12850 - DNA, 48 bp, Homo sapiens
  chr5:43007771-43007819
  hyper
cgactggtgttttgtgcagataagggaacttgcacaagggacttgcct

SEQ ID NO: 12851 - DNA, 388 bp, Homo sapiens; identical to SEQ ID NO: 8587
  chr5:43017314-43017702
  hyper

SEQ ID NO: 12852 - DNA, 304 bp, Homo sapiens; identical to SEQ ID NO: 8588
  chr5:43019347-43019651
  hyper

SEQ ID NO: 12853 - DNA, 76 bp, Homo sapiens; identical to SEQ ID NO: 7437
  chr5:54518558-54518634
  hyper

SEQ ID NO: 12854 - DNA, 86 bp, Homo sapiens
  chr5:72742484-72742570
  hyper
cgtcaagggagcctctagtgcctggacagggcggactcccttccccggcaccctcttcctccctaccccaggtcgggggttggggg

SEQ ID NO: 12855 - DNA, 217 bp, Homo sapiens
  chr5:72744481-72744698
  binary
cccgtcagctgaggagggggtggcggggcccgggcgggcgaatcagaacgccaggcgcccaggaacgtgcgggacgggtgagagtctaagaacagagctcggcgaggccagggctgagtccaggagagggcggaccttcctcggcttatagcagaagggggcctgtcacatggtgtgcacgtcagagcgctgccgagggaaggaaagcaagcctagg

SEQ ID NO: 12856 - DNA, 177 bp, Homo sapiens
  chr5:72745196-72745373
  hyper
tctgcgattgaatgccctagagacttgacagttaaactaagccactctaatgagacgatctgacaaatgtcatgggaataaagaacgtaataattgaattcggagaagaaattgaaatttttagtgaaaacccaaatacacgcacaaaaattgcacctagaaactactaaaaagttc

SEQ ID NO: 12857 - DNA, 345 bp, Homo sapiens; identical to SEQ ID NO: 6215
  chr5:76926856-76927201
  hyper

SEQ ID NO: 12858 - DNA, 192 bp, Homo sapiens; identical to SEQ ID NO: 6216
  chr5:77148195-77148387
  hyper

SEQ ID NO: 12859 - DNA, 38 bp, Homo sapiens; identical to SEQ ID NO: 8593
  chr5:77268330-77268368
  binary

SEQ ID NO: 12860 - DNA, 42 bp, Homo sapiens
  chr5:79865662-79865704
  binary
aaggcaggaggcgcgagggtgagctcgcgtggagcgcgcccc

SEQ ID NO: 12861 - DNA, 91 bp, Homo sapiens
  chr5:79865744-79865835
  binary
cggcggccctcggctggccctgggtctctcatcctgctcggggcactgcaatgtcagggtgagcgggaggtgcgggcttcaggggcttgcg

SEQ ID NO: 12862 - DNA, 80 bp, Homo sapiens; identical to SEQ ID NO: 6218
  chr5:87957200-87957280
  hyper

SEQ ID NO: 12863 - DNA, 157 bp, Homo sapiens; identical to SEQ ID NO: 6219
  chr5:87969885-87970042
  hyper

SEQ ID NO: 12864 - DNA, 600 bp, Homo sapiens; identical to SEQ ID NO: 6220
  chr5:87970918-87971518
  hyper

SEQ ID NO: 12865 - DNA, 454 bp, Homo sapiens; identical to SEQ ID NO: 9832
  chr5:88178399-88178853
  hyper

SEQ ID NO: 12866 - DNA, 423 bp, Homo sapiens; identical to SEQ ID NO: 6225
  chr5:88179429-88179852
  hyper

SEQ ID NO: 12867 - DNA, 42 bp, Homo sapiens; identical to SEQ ID NO: 6226
  chr5:88180346-88180388
  hyper

SEQ ID NO: 12868 - DNA, 451 bp, Homo sapiens
  chr6:10319622-10320073
  hypo
cgtggggatagagggacgtgggggttttccgtggggatggagggatgtgggcaggttttcggtggggatggcgggacgtgggcagttttccgtggggatggcgggacgtgggcagttttccgtggggatggcgggacgtgggcggttttccatggagatgacgggacgtgggcggttttccttggggatggcgggacgtgggcggttttccgtggagatgacgggacgtgggcggttttccgtagggatggtgggacgtgggtgagttttccgtggggatggagggacgtggagtgttttccatggggatggaggaacgtgggcggttttccgtggggatggagggatgtggcgggttttccgtggggatggagggacgtgggcggttttccgtggggatggagggacgtgggcggggtttcgaggcattcagaaggtgttaagagaagac

SEQ ID NO: 12869 - DNA, 127 bp, Homo sapiens
  chr6:105627242-105627369
  hyper
cggcgctggcatgacttccccaggactgacaagggcccctaggaacggcttttctcccttgcaaaactggcctgtttatttcggctccagggtgcctggggccagagtaggacctgcaggaaaagat

SEQ ID NO: 12870 - DNA, 134 bp, Homo sapiens
  chr6:105628083-105628217
  binary
cctagtattcacagtcacactaggcaggagcgatgggctggctgctgaaccaaggcaactgcacgcctgctctctcacccccgctccacacacaccgtaaacaaaatgaagaggtaaatcaccatagtggggac

SEQ ID NO: 12871 - DNA, 353 bp, Homo sapiens
  chr6:106533693-106534046
  binary
cgttagcaggagaaacggaatgttacaacttttggggcggggggcggggaaacgtgcgttacatacacaacagcttgaggaccagacagctccactgtattacactagctgcaaaaacaatttaacttgctcttttgaagtaagatttgtgtcttttgtacctggggatttgagctgagaaatcagaaactgtgtaggtaaattttaagtttccttaatttaaggaacgtgcgccccctaattctgccgcgccaggaaggagggcgatctggagtgtttagaatacaatagagcccaagtaagcgttgaggttaagtgccttcaaagggaagtaagaagattccaagtcaatg

SEQ ID NO: 12872 - DNA, 388 bp, Homo sapiens
  chr6:106534075-106534463
  hyper
ctcggcggctgtgctagcaatctgggggaaagccctgggctcggccaggtggtgttggccacgttggccacgcccccacttcgcgcagccgagtggctaaggaaatcttaagcagggaggggaagccagacggttaacacagacaaagtgctgccgtgacactcggccctccagtgttgcggagaggcaagagcagcgaccgcggcacctgtccgcccggagctgggacgcgggcgcccgggcggccggacgaagcgaggagggaccgccgaggtgcgcgtctgtgcggctcagcctggcgggggacgcggggagaatgtggactgggtagagatgaacgagacttttctcagatgttggatatttgcttggaaaaacgtgtgggtac

SEQ ID NO: 12873 - DNA, 945 bp, Homo sapiens; identical to SEQ ID NO: 9837
  chr6:112193858-112194803
  hyper

SEQ ID NO: 12874 - DNA, 440 bp, Homo sapiens; identical to SEQ ID NO: 5838
  chr6:127836226-127836666
  binary

SEQ ID NO: 12875 - DNA, 31 bp, Homo sapiens; identical to SEQ ID NO: 5839
  chr6:127837749-127837780
  binary

SEQ ID NO: 12876 - DNA, 49 bp, Homo sapiens
  chr6:137243410-137243459
  binary
gcctggccggagctgccctctgcagccgagccggcgccccctgcccttc

SEQ ID NO: 12877 - DNA, 259 bp, Homo sapiens
  chr6:149068930-149069189
  hyper
ctccaggtgctaagcccgtgagcatctgtgccgcggtcgggagcgccttcttcctcccgcgcgtccgactgtcctcaccgaggcgggggcgccgctgggttgcgctgccggcaggtaccccggggcgaggcaccgctcaccttccccccgccccacctccgccacccggatccggactggggcggagtggatgggtgtgtggggtgtgccggagtgtgtgtatcttcaggcctggcggcgcggggagtggcgaagggaa

SEQ ID NO: 12878 - DNA, 224 bp, Homo sapiens
  chr6:149069508-149069732
  hyper
tgtgcgtctcaagctcaagtcaaaacttgtgtgtgtgtgtgtgtgtgtgtgtgtgtgtgtgtgtgtgtgtgtgtgtgtgtggtttattaggagagaggccgcctgtctttagcagaagtaaggaaggggtttgacgggagggaaagagccgctccagcgagaaggcgtgaccccgcagctccctcgtctcggctgcgggagccaggggtgccagggacaggcga

SEQ ID NO: 12879 - DNA, 59 bp, Homo sapiens
  chr6:149069769-149069828
  hyper
cgttcgagccaagggaggatgcagatccctcccaagtctgtggccagaagaggtcgtgc

SEQ ID NO: 12880 - DNA, 40 bp, Homo sapiens
  chr6:158957708-158957748
  binary
cgcaggcggcgacacaaagggtggagcggcgggaccggga

SEQ ID NO: 12881 - DNA, 207 bp, Homo sapiens
  chr6:158957988-158958195
  binary
cccgccgacggccgcctccgccggccgggcgcggagcctacggatggggacggggtcggggcggggatctgggagggaccaggaaggggacggggagcagggatactggcagcggcgggcaggttcctggattcagggcagcccggcgcccccgggcgaagggccgatttccgttcagctgaaacccaagccgaggctcccgcctcc

SEQ ID NO: 12882 - DNA, 166 bp, Homo sapiens
  chr6:1624812-1624978
  hyper
cgtgggggtgggggcagcaggtcccgagccccgggaactcccaccgttccgctccctctgggcgcacaaggctccgggtttccctgctttcggtccctgctgtgcgcgttcagttgcggctctcggcgccgtaaatcactaggtcgcggttaagaatgtgctgtgc

SEQ ID NO: 12883 - DNA, 52 bp, Homo sapiens; identical to SEQ ID NO: 10706
  chr6:1625068-1625120
  hyper

SEQ ID NO: 12884 - DNA, 385 bp, Homo sapiens
  chr6:169567224-169567609
  hypo
cggcccaaggcctcacactggacggaggctgagctccactgcggccccggcaggcgggcttcctaagagcagcgtggaatcccggggctctgcgcaccgtgcccggccccgggctccctgacgcgaggcaatgcctgggcacagcgtacggccaccggcaccttcactcctcacctgtgcacgcgagtgtgggggatgaagcgacatcggtgtgtggcgtctcagtgcagcgccggcacacacagccctaagcagatgcggagcagagatgacggtggagtcaccccgcgggtgcaaccccatcttagcaggagggccgggttttgggcagctcgggccttcagaaaaaggatcatgtcagcgtgcatgccacgctgcacgtccc

SEQ ID NO: 12885 - DNA, 115 bp, Homo sapiens; identical to SEQ ID NO: 8620
  chr6:26233864-26233979
  hyper

SEQ ID NO: 12886 - DNA, 113 bp, Homo sapiens
  chr6:26250001-26250114
  hyper
gcctcccaggtccaagcgattctccttcctcagcccccgatatagctgggactgcaggagggcgccaccacacccgtatttttgttttttggttttgtacttttagtgaagac

SEQ ID NO: 12887 - DNA, 130 bp, Homo sapiens; identical to SEQ ID NO: 7461
  chr6:26271217-26271347
  hyper

SEQ ID NO: 12888 - DNA, 327 bp, Homo sapiens; identical to SEQ ID NO: 7462
  chr6:26272105-26272432
  hyper

SEQ ID NO: 12889 - DNA, 228 bp, Homo sapiens
  chr6:26272853-26273081
  hyper
cttataatctatattcggcaaagtagactgtgctatctcctgaacacagatttcagccaatcgaaaagcaggtgtttaaaaaaatttaaaaaaaaaaaaaaaaaaaaaaccacttctgacttacatacttatagttgaaaggtcaaattatgcaaggttgagcttctgggagagccgatgagatttaggagttcagaaatggcctatcatatattcagacactaaaag

SEQ ID NO: 12890 - DNA, 278 bp, Homo sapiens
  chr6:26522013-26522291
  hyper
cggccccgggtcggcgggtgagctagggggcgccccgggacaggccgcgccctctgccctgcagataccggaggcctctgctgtggctgcccactggctgggcccaggccttgaagcggtggcgaacgtctcttccctaccctacctcggtgactgatggcggcggcggcctctcccagtccggaccctgccggccgtcgggtctcccggcccaagcctgccgggcctggacgaaacccccgccgagcagcctggacgcagcgcctttgggtggcggc

SEQ ID NO: 12891 - DNA, 248 bp, Homo sapiens; identical to SEQ ID NO: 6241
  chr6:26577475-26577723
  hyper

SEQ ID NO: 12892 - DNA, 61 bp, Homo sapiens
  chr6:27100389-27100450
  hyper
ttcagaaccttgtacacatagatggaatagctctccttgcggctgcgcttgcgcttcttgc

SEQ ID NO: 12893 - DNA, 61 bp, Homo sapiens
  chr6:27101049-27101110
  hyper
cgggcaacgcggcccgcgacaacaagaagacccgcatcatcccgcgtcatctccaactggc

SEQ ID NO: 12894 - DNA, 87 bp, Homo sapiens
  chr6:27101206-27101293
  hyper
aaagactgagagccaccacaaggcgaagggcaagtaactatctgtactagtttgtggcagctcaagtaaaatcgagtccaaaccaac

SEQ ID NO: 12895 - DNA, 71 bp, Homo sapiens
  chr6:27782642-27782713
  hyper
tagaccaataggactcgagtatgcaggatacctattttgattgggcaaaactggcatctgacgtcatccac

SEQ ID NO: 12896 - DNA, 51 bp, Homo sapiens; identical to SEQ ID NO: 7471
  chr6:27858740-27858791
  hyper

SEQ ID NO: 12897 - DNA, 441 bp, Homo sapiens
  chr6:35744202-35744643
  hyper
agggcccctacagtctggaatcccgcccgtgcgagcctgagcgcctttcctccctccttcccttccgcaggcgtcctcgccctccacgtccctcctccgccggggtggcctggggcgccgggtcacgtggccggggaagaggttttatcccgcggcccctcggaaccccgccgctgctctgccgcccaggcccatggccgcagccctggcgctcgtggcgggggtcctgtcgggggcggtgctgcccctctggagcgcgcttccgcaatataaaaaggtgagccggggagcgcgcccagccggccgcgaccgcaggagagggtggccccgccgccggggcactggagcccgaaggcgccgggcagcctgaaagggagaggtgggtccggaaccacacccaggcgggtagcctggggcatcctcagacggacttcaaaagcc

SEQ ID NO: 12898 - DNA, 108 bp, Homo sapiens; identical to SEQ ID NO: 7481
  chr6:36238212-36238320
  hypo

SEQ ID NO: 12899 - DNA, 61 bp, Homo sapiens; identical to SEQ ID NO: 6255
  chr6:391113-391174
  hyper

SEQ ID NO: 12900 - DNA, 55 bp, Homo sapiens; identical to SEQ ID NO: 5841
  chr6:393764-393819
  binary

SEQ ID NO: 12901 - DNA, 321 bp, Homo sapiens
  chr6:45390544-45390865
  binary
cggttgcggccgccccacgacaaccgcaccatggtggagatcatcgccgaccacccggccgaactcgtccgcaccgacagccccaacttcctgtgctcggtgctgccctcgcactggcgctgcaacaagaccctgcccgtggccttcaaggtaagaggctacaccgccccccgcccccggccgggagcggcggaacctgcccgccggtgtcttcctgcccacggggctgggccccggacgtcctccaagacctcctgccttggcggctctaaccccagaaacccccggccgggcctccctccggatgccctggcgggctcg

SEQ ID NO: 12902 - DNA, 406 bp, Homo sapiens
  chr6:4559591-4559997
  hypo
cgcacatgctcacttccactctcacactcatgctcactcacgcacactcacgttcacacgcacacacgcatattcacactctcgtgcactcacactcatgcacactcccattcatacacagttttgcgagtgtacttctggagtgctttgctggcagctctaggaaggaaagagagacgctccaattaggtctggagaagaacgagggggcatggcgagagggcccagcgggccgccactccattccagaaaggagtgcccctgctttccctggggctccctgcaccagctggtatgtggcgtggcatggcacggtatggtgtggcagggtgtggtatggtatagtctagtgtggcatgcgctggtatggcatagtctagggtagtgtggcctgatgtcgttcggc

SEQ ID NO: 12903 - DNA, 637 bp, Homo sapiens; identical to SEQ ID NO: 8644
  chr6:52227115-52227752
  binary

SEQ ID NO: 12904 - DNA, 133 bp, Homo sapiens; identical to SEQ ID NO: 8645
  chr6:52227876-52228009
  hyper

SEQ ID NO: 12905 - DNA, 249 bp, Homo sapiens; identical to SEQ ID NO: 8647
  chr6:56818408-56818657
  hyper

SEQ ID NO: 12906 - DNA, 291 bp, Homo sapiens
  chr6:74405623-74405914
  binary
gctctgttctccgcggccagctgggacgccgggccaggtggggccgcctgcgtttagcaactgctttctcaccccctggatttgcgatgtttgccacagcagcgagaagcgccattgtaatggggatgggaggggtggagcctccaagtcctgtctcaatttagatctctcactctgctgttaggcgcgcccatttcagattactaaactcgaattaagagggaaaaaaaatcagggaggaggtggcaagccacaccccacggtgcccgcgaacttccccggcagcggact

SEQ ID NO: 12907 - DNA, 174 bp, Homo sapiens
  chr6:74406015-74406189
  binary
ggaacgtgggcgcgcggggggcgcgcgggcgcgcgggcctgggccgctctgcggctctgggccagggcttcggggaggtggcggctgctgtgcagcagcgggtgggaaatgccctcgcggctgcagtccccagcctggtactggcctggaggtttgaccatatgtagcttcagc

SEQ ID NO: 12908 - DNA, 83 bp, Homo sapiens; identical to SEQ ID NO: 9887
  chr6:80657600-80657683
  binary

SEQ ID NO: 12909 - DNA, 42 bp, Homo sapiens; identical to SEQ ID NO: 10742
  chr6:91320244-91320286
  hyper

SEQ ID NO: 12910 - DNA, 379 bp, Homo sapiens
  chr7:100224197-100224576
  hyper
cgctcgggtcctccagcctgaccgatctatgagcactgcgtgtccaggactgggaagagagcatccagaggaccgggactgtgtaggcggggagagagaggagcgcgcagacggggccaggtccaggaggtggagccccaggggaggggcgggacactgggggcggggcgaggagggcggggcctcacccgcattatgcgcacgttgtacatgcgtgtcagtcgctcgtctctctcctccgagctgtagatctcctgccgcagcttttccgccgcccggatgtagtccccccgcgccgagtacacccactgcagggtcagcccgcgggcctggggtggggaggcgcgggctggggctggcggcaggggccaggaccccc

SEQ ID NO: 12911 - DNA, 1058 bp, Homo sapiens
  chr7:100806337-100807395
  hyper
cggcgctcctccgcctccgcctcctcctgcgcgcgccgcgcctgggcctcccggccgggatagtggcgcgaaggcggcaaggcgtggtggtagtggcggcggcgcaaggccgagggcggctgcagtgtccgcggccggatgtagttggggaaagggtggtacggccctggcgggtacacctcgtcctcctcccgatcccagggcgggagcacctcgttccagtccggcagctcgtctcgtgcgggagcgggggcggggggcgggggctgcggggagcggacgtgggtgggggcgggggcggcacgggggggcggcacgggctcgggaggggcgttcttcttccgcttccgcttctcctccacctcctcgatgatgctgaccacgtcgtccgctggcaggtggagtttggtggacagctcaatgaggctgtcgatcgtctgcggatccatctcctcgtcgtcctcctcctccccgccctcctctgtcccctcggcctccttccgccggtggcccggcgtctcctcctgggagcgcttgtcctcggcgccggcttccccgtcctcctcctccgcgaacaggagcgcgttctgccgcgccctctccgcctcctccgcctctgcctccgcctcggccgcctcctcatcctcttcccccaccctctcctccccgccgcgtctctcctgctccgcctcctcctcctcccttgcactctctcgctcctccgccgcctcctgcagcccccgacccccgaggccgcgctgccgggccccgccctgcagcaaatactggagcagcaggtccgaggcgaggtcggccagccgctcttcctgcgccgcggcctgccgcgtggcctccgcctgccgccgcccggcctccacctgcgccagcccttgctggagaaggcgctcgcccgcctcggagccgcccaggagtgcgctctccggccggcgcgccttggggaacggggcggccacgccttggtacgccttggacaggggtgccaatgcctcgcctaggtgtgttttgggggaggacactccttccccgaacttgtgggt

SEQ ID NO: 12912 - DNA, 86 bp, Homo sapiens
  chr7:103085746-103085832
  hyper
cggggcccggcccaggtgcgcactagatgaggcagtcaaccaagtcaattggttcccgatcaactaaatctctcctaaaaataaac

SEQ ID NO: 12913 - DNA, 148 bp, Homo sapiens
  chr7:106622687-106622835
  hypo
cgcaccggaacaatgtgcggcacatattagacactcaatacatgtttgccaaatgaatacgtgaatgattgtagtcttggacaagtcaaatggcccttagggactatttgttcattgattattttcccacctgcgtcacagcatggct

SEQ ID NO: 12914 - DNA, 252 bp, Homo sapiens
  chr7:106684920-106685172
  binary
cgcctctcccggcccgggcgcgcagccctgcggtggtctgacaggcgggtgcgcggcgccagccagcggaggttgccatggtttccgggggtcacgtgggcgcgctctcctgcgccccctcccgcgcaccgcggcggggcgggggcggggcgcccgggcgggggagaggcgcggccgcggctggagcgggaggagcaggagatgctgccagccctcccggggccgcgctcgctcagccgccgccaccacacg

SEQ ID NO: 12915 - DNA, 221 bp, Homo sapiens; identical to SEQ ID NO: 9899
  chr7:106685920-106686141
  hyper

SEQ ID NO: 12916 - DNA, 91 bp, Homo sapiens
  chr7:1276567-1276658
  hyper
ggccggacccagcccgccggagggcgaggagctggacatggactgaggccgcggcggccgggagaggcgcgtagccggcccgcggccgctc

SEQ ID NO: 12917 - DNA, 124 bp, Homo sapiens; identical to SEQ ID NO: 7499
  chr7:1308164-1308288
  hypo

SEQ ID NO: 12918 - DNA, 92 bp, Homo sapiens
  chr7:137531067-137531159
  hyper
cgggaggagagggggaaagggggaaggagaggcgtggaaacagagaggtgcccaactccgcggaagcgccccttgctgggtagaagagtggg

SEQ ID NO: 12919 - DNA, 269 bp, Homo sapiens
  chr7:139168725-139168994
  hyper
tcttctttgtctctgacctcacccattttcccctccagccctatgccggggtgttggttttgagagttacagtttgggcggggaaggattggccaagcctgtctggatcctgggacctcagagaaatcagaatccaaaggaattggggcgacctgtggaaaagtagcccagttggttgtcctgacaatccagcagggtttcgaaaggactctccatcatacttgggaggactcccccactgagtaacgctaagagaaaagaaacagggc

SEQ ID NO: 12920 - DNA, 198 bp, Homo sapiens
  chr7:139929854-139930052
  hyper
cggctgttttgactcctgggcttccgccctttagtttacacatttgatgattccgtttgaaaatcgcaacctgaaatactcctcttctaggctggaggcggggttgggggcgggggcggtgggtggcggaaggagggccctcaaacaaagatccgctttctcctgaacaggtgtcaggagaccaagctttgacctcca

SEQ ID NO: 12921 - DNA, 362 bp, Homo sapiens
  chr7:139930346-139930708
  binary
ccggggtccgaagcaccgcgcactccaccccgcgacgcgcgcatccctcgaccctcgcgcgtccacaccgccgctgcgcctcgcgcccccgcacccccgcaaccccacaccacgccggccgggcggggccggatgcgcagacgtgcagcacgtgcgctgcgcagcgattggcagcgccgcccccacgccgccccgccagggaaagggtgtcccgtgccctgccgcggctgctggtcccgcgggcgggggctgtcggggcgcgcgggccgggccgtgggggtcgccgcccgaagtgaccggggaacaatgacagcccgatggggaagggcggcggcttccctagagggccggttctctggctc

SEQ ID NO: 12922 - DNA, 184 bp, Homo sapiens
  chr7:140340368-140340552
  binary
cggctggcggcgcggctcgggggcgggcggcggcgggtgccggggacgccatggccctccgccctccgcccctttgtccgccgagcctcccccggccgcccgcaagcccctgggggtccccgccgcgcgcgctcccgtggggtccccgccgcccccggccccagcggcgcgcttccctcggccg

SEQ ID NO: 12923 - DNA, 273 bp, Homo sapiens
  chr7:154540240-154540513
  hypo
ttagtaataatgagataataacttaatgaaaaacccctgcgagccctgcggggcggggagggagacctggtgtgtggtgctggacgcttcctgagcacctccctgcacagcctgcctctggagtttctcgcgcatggcggtaagcagggccaggcctcactctttccccttcacagtggagggtgtgagcagggcttcgatgccttttgctcacggtgtccagcagtggatgcgctggttggaacggacgtgcctataaccatgactcccacc

SEQ ID NO: 12924 - DNA, 128 bp, Homo sapiens
  chr7:154541944-154542072
  hypo
cgtagatgaacaccctcgctctccagaagacaagaagcgggagtcgcagcctattgaagtgtagacatgatgtctacacagccaccctgtgtcctgcaagagcccaggctcagagcgtgtgcaccgtg

SEQ ID NO: 12925 - DNA, 135 bp, Homo sapiens
  chr7:154542290-154542425
  hypo
agagctgaagggtggcgggggtcggcttcctcctctctgcctcttcccttccgccacgcttcctacccacaccagccagtctccagtaacagatatagaatgccttcatttggaacacggagagacaagcgtgcc

SEQ ID NO: 12926 - DNA, 219 bp, Homo sapiens; identical to SEQ ID NO: 8685
  chr7:157334647-157334866
  hypo

SEQ ID NO: 12927 - DNA, 262 bp, Homo sapiens
  chr7:157341254-157341516
  hypo
cgcaggccccggagaggccgggcagcgctcagagagctcagaacatcctcctgagggttctgggatttatcgtcaacctctttctacaaaaatgcagcgttctccccccacccccaaatctagtgaatggaaagagccagtggatcgagttcctaggacttgagatgtggctgcatctggaggtgttgcaggaaacgccagtggacctttgggggcccagaagtgaccccgcccatgcaaggccggcatggacgaggccggt

SEQ ID NO: 12928 - DNA, 120 bp, Homo sapiens
  chr7:157341671-157341791
  hypo
tcaagtgctccagggtcgctgcgatatcaatctctttagcacctgcaacaaaccacaaattgggctgagttcagagcacaagataatccatgccacatctgtcaatctcctgctagccac

SEQ ID NO: 12929 - DNA, 476 bp, Homo sapiens
  chr7:157347322-157347798
  hypo
cgaaagttaaattccagggaaacagaaaggcccagtggtgtgacgctgacatcgaaaagcctgcaaacagtcgaggagtcagcgcacacacaaagaaaatccagatggaaggaaagaaaggaaccttaacgatgtctaccggggacagagcgtggggtccacggagaagtcccaggcgttttccacctaagaagcatcatggtgattcaaacaccagggaaatgaatggactcagtggagccactttctgctacttgaccaggtttaattcgagttgtccatgtcgggaatctacagggaagtgacgcaggctgccatcttgctcagcaccccagtgtggcgggcgccccagtgtggcgggcgtcccagtgtggtgagcaccggccaagtcagtttgggttgggctgcaccctcgtgcctgggacacccaggaagacccacctctctcgtgttagtggaccagggaggcagccaca

SEQ ID NO: 12930 - DNA, 159 bp, Homo sapiens
  chr7:157404210-157404369
  hypo
cgtaccctcccccaaaaagacacactggagtcccagccctgggaacatgaccttatttggaaatagggtctttacagaggtaagcgagcggagggcatttgggcggccctaatgcaatatgactggcgtgctgttaggaagaaggactctgcacaccca

SEQ ID NO: 12931 - DNA, 46 bp, Homo sapiens
  chr7:157404566-157404612
  hypo
gaagacagccgcagtcatgctggggacacgcggagggagagcgccc

SEQ ID NO: 12932 - DNA, 152 bp, Homo sapiens
  chr7:157414227-157414379
  hypo
cgcacctaggtggtgagcccagaccggcagatgcacaaaaggcagcggaggcctttgcactcgccgcgtgggccatgcccaccttgctcacgagcctgggccatggtgcgacgttgtgctacggtgcacaatgcatatcataccatgcaacc

SEQ ID NO: 12933 - DNA, 297 bp, Homo sapiens
  chr7:157445780-157446077
  hypo
cgctcttggtgctgagcctgccccccagacggtgcagccggcctctcccacctgctggggctcctcacatctagcttggcctccagacatcaccaacctctgctgtttatttcatcggatcgtggggttcagatgccacgttttgtccaacgtgccccaggagtggctgcatgtcaggaacatgtcgctgggaatctctgtggcttatctgaccatcctgccatcctcaggtgaggggcactgaggtggccggttgggtgtctggcggaaacgaggctttgcgcacagagggctggg

SEQ ID NO: 12934 - DNA, 69 bp, Homo sapiens
  chr7:157446148-157446217
  hypo
cctgcggcaccaacctgcatgtgctttctacagcctgtgtgtgccagggagggtggcggtcagtgcccc

SEQ ID NO: 12935 - DNA, 232 bp, Homo sapiens
  chr7:157507378-157507610
  hypo
cgatgcccagtccgacgtgcttctcctgagccgattttgggtttcccgttttctaaagccagctccccagggaacggcgcccagtccgacatgcttctgaaaggattctaggtctcccgctttctgaagccaactccctggggaacggcactgagcttgaggcgcttctcctgagcagattctaggtctcccgctttctgaggccatttccccagggaatggctccaagccc

SEQ ID NO: 12936 - DNA, 284 bp, Homo sapiens
  chr7:157510178-157510462
  hypo
cgagcctgcaattgaccgcggaagccagtgccctccctagttggcaacgttgttcagctgagctacagagaaagagctcggaggtctatggactccttcatggaaatcgctcccttgcgtctcctcatgtggacacagctccacgcctcacctctcaggccaggcagcggccaacccagcctcttcaccaggtatgggcaccggctgctccttgctgcaggaccgctggctggggtggccggggcacgcagcaggcacatcccgacctgcgggccagcacctgc

SEQ ID NO: 12937 - DNA, 115 bp, Homo sapiens
  chr7:157511495-157511610
  hypo
cactcttggtttctcagctgccgcaatcggtccttccagtgtccgacctctggggccctcagacccccaaacccaccttgtcgctgtggcctctccgcctcctgcaggtggcagc

SEQ ID NO: 12938 - DNA, 408 bp, Homo sapiens
  chr7:157513007-157513415
  hypo
cggctgccgcaatcggtcattccaatgtccgacctctggggccctcagacccccaaacccaccttgtcactctggcttctccgcctcctgcagctcctgctctgtgtttgggaacgcgtgcggcccacaggacaaagccttgttgcacacccgggtcaagggcaaatcccagctgcacagccgggtgatccagcggccgaccctgcttccctgcgtaggaggcctgagccaaggacactgcggccccggctgcaccgatgcatgggtgtgcacgcggggaccgagggagtcacgtgaatcatgtggcttccacgagctacctcttcccacaccaggagcaggtgccctcgtctccatcaagcgctttctggggagaaactccttcaaggataacggcaaatggtgagc

SEQ ID NO: 12939 - DNA, 45 bp, Homo sapiens
  chr7:157550880-157550925
  hypo
cggtgtcgtaattgactggacaggtactaatgccgaccacatcca

SEQ ID NO: 12940 - DNA, 263 bp, Homo sapiens
  chr7:157550958-157551221
  hypo
agtccaggcctgtccaggcgccattccccgtggcctgcacgctcctgggtcatgctccgctcaggcggctccttcagtgaagttgcacagcagtcagggtaacctccatgtccccaaagggcaagaccggctcagaggcgaggtaggtggcacgaggccacacagctggtcagctcagccgggctgggacgcgggccccagaccgtggcccccgtgcagctctgggtccagctggccaaggtggactttgcacaaggtttggg

SEQ ID NO: 12941 - DNA, 242 bp, Homo sapiens
  chr7:157594777-157595019
  binary
cgtgtgctaagaacgtgtagcgaggcccaccgtgttgacacttccctgagtgtgcagcgtggtactgttggctctcaaccgtacggcagatgtcgagaccgcgttgaggccgcgtcgctgaaaccttgtgcccttggaacggccccttcccgtgcttcccccagcgccagacccggcagcctccatcctcctctcttcttcggtgcgttcaattgtcatagattccacgcttcagcgacgtc

SEQ ID NO: 12942 - DNA, 332 bp, Homo sapiens
  chr7:157621949-157622281
  hypo
cgtcttgctgcgagtgttggggcaggtgctatctgaacacggtggcgcaaaagagatgaggcctcgccactgatcaaacactcggctggtaagtagaagtccttaaaaaagacgaacatcaaacaggtcctcatctggggcgctctttttgtggggtcaccctgaccgtgaggccacagatgcgggcccgtgtgcaccgcaggccatacgtggggttaggtaagtttgaaagtctggacaaggctgtcattaaagcgtaggtgatgctaaacggcgtgaaagcctctgctttctagaggctccagcaagactgacacggaaaagctgaggac

SEQ ID NO: 12943 - DNA, 469 bp, Homo sapiens
  chr7:157625840-157626309
  hypo
cgtaaactcgttcaggaagtatgcgacgtggccagcgcccatccatcctgtatgatggtgaacttatccaggagcgagatgtggccggtgcccatctatcccatatgattgtaaactcgtccaggaagtgtgtgatgtggccggtgcccatccatcctgtatgacggtgaactcgtccaggagcgagatgtggctggtgcccatccatcccatatgatggtaaactcgtccaggaagtgtgtgacgtggggggcgcccatccatcctgtatgatggtgaacttgtccaggagcgagatgtggccggtgcccatccatcccatatgatggtaaactcgtccaggaagtatgcgacgtggccggcgcccatccatcctgtatgacggtgaatttgtccaggagcgagatgtggccggtgcccatctatcccatatgattgtaaactcgttcaggaagtgtgtgacgtggcc

SEQ ID NO: 12944 - DNA, 203 bp, Homo sapiens; identical to SEQ ID NO: 8687
  chr7:157642963-157643166
  hypo

SEQ ID NO: 12945 - DNA, 239 bp, Homo sapiens
  chr7:157730053-157730292
  hypo
cgtctaactgagcacgtggggactggagcaattcactgaagaaatgaaaggtgcgggaataggcaagcccttgatgtctggagcagatcgcatcagctactactaagccgctgttgtcaggcacagagaagacactcagcatcggatgagagaataaagccgtgtgcggtgtggcttcatgtctctcacaatagcgctcccgagtgcggccgctccacctttcccacccaggagaagcc

SEQ ID NO: 12946 - DNA, 227 bp, Homo sapiens
  chr7:157736806-157737033
  hypo
cgagcccaggacaggctccagatgcccggccttcatgcagcaaacaccttcacagggaaggaaggcggaactctctttccttgccacagaaaaggattctaacggcatttgacaaagattgagcatggttcgtcgcgaacgccagcctgcccccacggtcatgtccagcttaaccaacacacggcccagcagtctcggtcagtggagcccaccacccaagcgggggc

SEQ ID NO: 12947 - DNA, 273 bp, Homo sapiens
  chr7:157738113-157738386
  hypo
cgtctgacaaatcaatgtatctttccccgtggatgtttctccaacccattcactcttctcccgctcagtgacctggcccctgaacctgccgttcccaactcagacaaagccgtctccaactcggacaatggcgcctccaactcgaacaatgccacctccaacttggacaatgtcgcctccacctcagacaatggcgcctccagcttggacgatgccgcctccaagtcagacgatgccgcctccagcttggacgatgccgcctccagcttggac

SEQ ID NO: 12948 - DNA, 145 bp, Homo sapiens
  chr7:157744287-157744432
  hypo
cgggtgaaaagggaaacgccttactaaacgatgttcccgtgatcagaatcacgggctaacgtccctccgcttccgcagtcttcaggcctcaggcactgccagtgacattagctgctgtgcgtccctcctgccggactgcaacacc

SEQ ID NO: 12949 - DNA, 410 bp, Homo sapiens
  chr7:157853839-157854249
  hypo
cgccgtcgggcggtgactgattacaatcatttgttgtgatgcatcgcaaattaaagggacaagcccagccaagctgctccgctcagagagtgcgcgtcccgcctctgcaattactgatgtgcacaaaggacccagggaccacttaaaacaaggggaggactgagtccacgcagggatgaagccacaggcacagtccccacgtgcttgacagtggccccgcaacccacctgctccagacacctgttccgagggaatctctcccatccacctgccgctgtggctcagaccccaggcacaacacaagcgctcggcagagaaatggaccgtgccgccaatgcactcggcgctgaaccatcattgaggagagaccagctgctgctgtggcccctggggctgcagcataaacagtc

SEQ ID NO: 12950 - DNA, 337 bp, Homo sapiens
  chr7:157860325-157860662
  hypo
cgggcagtccaccgtgaccacgcagctctgcctgtggcgaaagctgccagagacaaggcgtgaaggagtgagcgagtgacagagtgagtgagtgagcactgttcccaccaggcttccttcccagagcagcacaccgggtcaggccgggccgcgggcagcacaccgggtcgggtcaggctgggccgtgggcagcacactgggtcacgctgggccatgggcagcacactgggtcacgccgggccatgggcagcacaccagggcaggccgggtcatggtgtgcttagaatttggtgaggcggcagggtcggggcagacagggtggggtctgaggacagcc

SEQ ID NO: 12951 - DNA, 218 bp, Homo sapiens; identical to SEQ ID NO: 7517
  chr7:157916520-157916738
  hypo

SEQ ID NO: 12952 - DNA, 241 bp, Homo sapiens
  chr7:157919964-157920205
  hypo
cgtgcacctgtgccctgcgtcctcctctgcgtgcaccctgcgtcctcctctgcttgcgccctgcatcctctgcacgtggcccgggctctgctccacctgagccccgttcatctctccacagtccaggagccacacactgcggctgccactccagagaccaggaaacccaagcacaggggcgtttgccacattctaggtctcggggctgccgtgggaccctgaccctggatgccggacttcc

SEQ ID NO: 12953 - DNA, 234 bp, Homo sapiens
  chr7:157929571-157929805
  hypo
cgcgagagcggaggggactgaggagctaaatggtagacgtgaaggcagccacaatgacctcacccagctctgggggtctcacgtgatcgacaaagttaactcacggcaaaaaaaaaccccatcgtaccgagcagttcacgtcatgaaaaagcaaagtgaagccttcgccaaaaccacctcacaattaagatggcttcagaatccactgacttaggttatttcactgtggtcagc

SEQ ID NO: 12954 - DNA, 111 bp, Homo sapiens
  chr7:157934031-157934142
  hypo
cgttcactcagccgcacgtcccgtcctctctccacagcgcaggctgtgtctagtccatgccgaggcagcggggccggcacccggtccccacgtgccccgttcactgcatac

SEQ ID NO: 12955 - DNA, 39 bp, Homo sapiens
  chr7:157934555-157934594
  hypo
cggacagagtcctttaaagtcaatctgtacacgaaatgt

SEQ ID NO: 12956 - DNA, 92 bp, Homo sapiens
  chr7:157934659-157934751
  hypo
gggtggccgagtgccccgctctggccgacgttgaggcctctgaattgttcggcagacagtggcggcttctttaccttcgggttgaagtgtcc

SEQ ID NO: 12957 - DNA, 119 bp, Homo sapiens
  chr7:157935699-157935818
  hypo
cgcaaccgagccaccgagccacgagcccagagcaaccttttcattctcattcactgcagtctcctcccaccacagatctttttctttcccagcgattatcatcgcgacagtcttatctc

SEQ ID NO: 12958 - DNA, 264 bp, Homo sapiens
  chr7:157936035-157936299
  hypo
cggcaggaaccggcacagctgcagggagacctgaagggccctcggcattgggcatggctgtccccagcagtcggcgtcctccgtgcttaggaggcgagggatgtctccacacatgcctgcactagccaagatgtgtgtcagagtcggcccggccatagctcacggtggacaccagtccccgtgatggaatttcatcggagggaaagaaacagggaggtgaggaatgagtggtggttgctaaggaaaggtccttcctgtggacac

SEQ ID NO: 12959 - DNA, 224 bp, Homo sapiens
  chr7:157949173-157949397
  hypo
cggagctgcccacattcgctaaatgagctaagccgacatctgcagaaacgccctcgtaatgggaacagttacctcgaaaagttctagaaatgccggtggagagggcaggtgaacacacagctgcagtcagacgctcggcatgatcagacccaaagcaaaccaactgctgcatagaacgccctggggcttcgagcccccagttccagcctgtgacgcactcaccc

SEQ ID NO: 12960 - DNA, 105 bp, Homo sapiens
  chr7:157959868-157959973
  hypo
cgagggtccgcggcaggaggtcctcgcggagctgggtccgggacccgggagggtaggtcagcgcagacgtgtgggccacataggtcaggatgctctcggagaagc

SEQ ID NO: 12961 - DNA, 392 bp, Homo sapiens
  chr7:158037726-158038118
  hypo
ctcgtgaggcggcggtgggcatgaaatgagatgaggcgtccagccctgcatctgcagcgtggtcagcacagaggctgacatccatggtcatgccggaatccgtggtcatgccagaatccgtggccatgccggaatccatggccatgccggaatccgtggtcatgctggaatccacggtcatgccggaacccatggccatgccggaatccgtggtcatgctggaatccacggtcatgccggaacccatggccatgccagaatccgtggtcatgccagaatccgtggtcatgccggaatccactgatggtgcacgtgacccacgatgggaaaagtcacaagacagcttcagagctggtcaaacgggactgagaggggctgcaccaggaatgcgc

SEQ ID NO: 12962 - DNA, 143 bp, Homo sapiens
  chr7:158039908-158040051
  hypo
cgaggcgcacgctgggctctgagacgccccctggccaagaggggtggaggaagggggcaggcgccaggatctggaaggagatttccaacccacgtggggtctcacaggagaaggccgtgatgggaggtggggaagtggggagg

SEQ ID NO: 12963 - DNA, 127 bp, Homo sapiens
  chr7:158087705-158087832
  hypo
cgcgcatggttcacccacctttctgagggtccaagcccatggcgcccgctgaccctgcctgtctgcccagacattgcaccacatcatggttcacccgcctttccgagggtcagagcccatggcaccc

SEQ ID NO: 12964 - DNA, 338 bp, Homo sapiens
  chr7:158136094-158136432
  hypo
cgaaaataacgcgtgtgggtgagaacatggagaaaatagggccctgtgctccgcgggcaggaacgtaacctgatgcagtcgccgtggaaagcacacgggaaaagttcaatgtggaagtagcagatgatccgacagccccatttgattttacacccaatacctgcaagcagggctcgcgcagaggctcaggcagccatgctggtggcacatgggctgtcgcgactgctcccggtggaatcagccccatttctgattttacacccaacacctgcaagcagagctcgcgcagaggctcaggcagccatgctcgtggcacgtgggctgtcgcggctgctccc

SEQ ID NO: 12965 - DNA, 118 bp, Homo sapiens
  chr7:158198545-158198663
  hypo
cgcagtggctcatccgtgagacacgtgtccgcacactgagatcccgcagtggctcatccgtgagacacgtggccgcacactgagatcccgcagtggctcatccgtgagacacgtgtcc

SEQ ID NO: 12966 - DNA, 479 bp, Homo sapiens
  chr7:158270795-158271274
  hypo
cgtgggacaggcacggcggcaaagagagtgggctgagtgggtcatcacacagcacgggagccgcggccccaggtgctgcttgaatgaagaaggctcagcccatgactgctacgtctggtccccaggacccaaactgtccagaaatcagccagcactcctgcaggtgcactgcagtggacggctagaggagggaaagcagcgccgtacagacactcggaaaactgcagactggaaggggcgtgaaagcacaaggtcttgatcattctcctggcattcggtgctgtgcgtagggtgagcaatggacgccactggggaagagtgggaaaggaaggctcagcacgtcggtaacgaatgaggaggcagaggcccgctctgcgtctcaaagaacgggtgggatgcggagccgtgacaagggcatgggaaagaaagtggagtgggaataacgccaaaattaacctgataaggaagctgctttcaac

SEQ ID NO: 12967 - DNA, 515 bp, Homo sapiens
  chr7:158282327-158282842
  hypo
cagctccaggccagcggcggggctcaccaggctgggcgctgcgcacggcgggcaggagaggggcagaccagggcgcagcagccaggaccccacactcaccgttcacacaggcctcggacgctccgcagaggccctcctcgagcaggcagcctgcggggaaacagagaagagacgcggtcagctggaggggaggaggggggtgcccccgaggctgccttcctggccccctggtgaatttcagagaaaccgccggtcaagcaggctcctccgacccggcttttccgagatggggccgattattctgaagccagaacgctgcgcccctgacccggccacgtgcgaggcctcctggcctagtcccggagcccagctctcacctggaccaggcccacagctctgggctgagggtcaagccggcgtcatcacaggagactctctggccgcgggagcagcagcggggccggggcctccccttgaggcctcccctgggcccggcgcctcccctggaccgggtg

SEQ ID NO: 12968 - DNA, 162 bp, Homo sapiens
  chr7:158282873-158283035
  hypo
ggctgccgggcgccggggagcggaggcttccagggaggtaacgagctccgcggggagcccggctgcgtgggaagcaaaccgtggcgtccgtggccacagacaagagacgcaggagagggtcgggagaggaaaggaggcagcggaggcagcagagacgaagac

SEQ ID NO: 12969 - DNA, 70 bp, Homo sapiens; identical to SEQ ID NO: 7518
  chr7:158349387-158349457
  hypo

SEQ ID NO: 12970 - DNA, 361 bp, Homo sapiens; identical to SEQ ID NO: 7519
  chr7:158349747-158350108
  hypo

SEQ ID NO: 12971 - DNA, 94 bp, Homo sapiens
  chr7:158380396-158380490
  hyper
cgcgcgggaggcggcgggaggcggccgagtccgggcccagggaggcgcgcgccgccggctcctcccgccgcgcctctcgcgctcttgcggcgac

SEQ ID NO: 12972 - DNA, 126 bp, Homo sapiens
  chr7:158380510-158380636
  hyper
cggacagcgcccggccccgccccggccccgcccccggcggcagggccccgcccccggacgcgcgtccgccctcaggccacgcccccggccagccccgctcgccccggccacgccccccgcccgccc

SEQ ID NO: 12973 - DNA, 845 bp, Homo sapiens
  chr7:158962544-158963389
  hypo
cgagggcataaccgggctccatcccaatgctgcctcatccctgcagtcaccccgcacaggtgacgcaggcttcagagggccccggacctcgcctgagggtgaagaaaatcacggcatcactgacaaggccgccatgaggatcgcgtgagcagaaacacgatgatcatggctcactgatggggcagctctgaggatcgcgtgagcagaaacacacagataatcacagaatcactgacggggcagctctgaggatcacgtgagcagaaacacacagataatcacagaatcactgacggggctgctgtgaggatcccgtgagcagaaacatggatgatcacggctcactgacggggcagctctgaggatcgcgtgagcagaaacacacagataatcacagaatcactgacggggccgctgtgaggatcccgtgagcagaaacatggatgatcacggctcactgacggggcagctctgaggatcacgtgagcagaaacacacagataatcacagaatcactgacgaggcctctgtgaggatcccgtgagcagaaacatggatgatcgcggcctgactggcggggctgctgtgaggatcatatgaccagaaacacgtggaagatcatggctcactgacggggctgctgtgactattgcgtgagcagaaacacgatgatcatggctcactgaatgggcagctctgaggatcgcgtgagcagaaacatggatgatcatggctcactgacagggaggtctgaggattgcgtgagcagaaacacagataatcacagaatcactgagggggccactgtgaggatcgcatgagcagaaacacacagatgatcacgg

SEQ ID NO: 12974 - DNA, 105 bp, Homo sapiens
  chr7:18125868-18125973
  binary
cgttccaggtaccgccccacaatgctacctcctctttaaaagaagtcgttcagctggggcgggctggcgctgcgtggcgcgcacctgagcggccggggctccccg

SEQ ID NO: 12975 - DNA, 219 bp, Homo sapiens
  chr7:18126225-18126444
  binary
gcgtcggccgcgcgcccaggtgttcccgcgtccgtaatcccctccggcccgcgcctcccggcccgccctgcgggtctccagcgcctgggcccgcgctctcgccgcgggtccttcctcctatccccacccagccccgcccagcctccgcggcgctggggctcccggccgagcctctcctcccacctccgtcccctacttccctccccaagaagtgctatt

SEQ ID NO: 12976 - DNA, 60 bp, Homo sapiens; identical to SEQ ID NO: 7522
  chr7:19156644-19156704
  binary

SEQ ID NO: 12977 - DNA, 107 bp, Homo sapiens
  chr7:23287654-23287761
  hyper
ctgcccgggtttggggttggacaggctcgggctccccgccagcctaggggctgggtctccagtggctttgctccatttcctcatttccttcaaaacgaggagttttc

SEQ ID NO: 12978 - DNA, 196 bp, Homo sapiens; identical to SEQ ID NO: 8703
  chr7:25896938-25897134
  hyper

SEQ ID NO: 12979 - DNA, 109 bp, Homo sapiens; identical to SEQ ID NO: 8704
  chr7:25897246-25897355
  hyper

SEQ ID NO: 12980 - DNA, 296 bp, Homo sapiens; identical to SEQ ID NO: 9926
  chr7:25901811-25902107
  hyper

SEQ ID NO: 12981 - DNA, 208 bp, Homo sapiens; identical to SEQ ID NO: 9927
  chr7:25902138-25902346
  hyper

SEQ ID NO: 12982 - DNA, 225 bp, Homo sapiens; identical to SEQ ID NO: 8705
  chr7:26192423-26192648
  hyper

SEQ ID NO: 12983 - DNA, 112 bp, Homo sapiens; identical to SEQ ID NO: 8706
  chr7:26192748-26192860
  hyper

SEQ ID NO: 12984 - DNA, 91 bp, Homo sapiens; identical to SEQ ID NO: 8708
  chr7:27135176-27135267
  hyper

SEQ ID NO: 12985 - DNA, 142 bp, Homo sapiens; identical to SEQ ID NO: 8709
  chr7:27136790-27136932
  binary

SEQ ID NO: 12986 - DNA, 244 bp, Homo sapiens
  chr7:27223331-27223575
  hyper
cgaagctgcgggcaggctctacttgctccccctttaaaaaaaaaaaaaaaaaaaaaaaaaagacccacaagacaaaaaaaaaatcgcttttgacagattgaataacaattgtgaataacatgcagttgggcagaaggaggcacgtaattgccaccacgccagaggaaaatggcttcctttggacaaaaaggccaactttgggttaatttgttcttttaatatattgctagagctaagcgggcta

SEQ ID NO: 12987 - DNA, 158 bp, Homo sapiens
  chr7:27238984-27239142
  hyper
cggctgcgtagccctggtggtagaaggcgaactccttagcgcgggagctgaactcctcggcagctgggccggcggtatccatgtacttgtccgcgaaggcggcggcggcggcggccgaggcgggctgcgcgcacgacttgatggcgttggggtgcggg

SEQ ID NO: 12988 - DNA, 71 bp, Homo sapiens
  chr7:27245310-27245381
  hyper
caggaccccttcaagtacacactgaggtgtgatcagagttttatgggcactttatatgctgtaatcataac

SEQ ID NO: 12989 - DNA, 78 bp, Homo sapiens; identical to SEQ ID NO: 8710
  chr7:27281871-27281949
  hyper

SEQ ID NO: 12990 - DNA, 157 bp, Homo sapiens
  chr7:2959057-2959214
  hypo
cgacccgcgcgcacagccactcgtgcctgtcctggtacatggtgtcacggacgtgcacaacatcgtcacacttcagggacatggtgcaggcgtccagctggctggagatgttcaggttcagccggatgtagaacgagtcccccgatgtgatcaggcc

SEQ ID NO: 12991 - DNA, 44 bp, Homo sapiens
  chr7:3283455-3283499
  hypo
cgtgagccaccgcgcccagcctcagaagtgctccttttttacca

SEQ ID NO: 12992 - DNA, 257 bp, Homo sapiens
  chr7:38725412-38725669
  hypo
cgtctgcgggttcctccaggttatcatgccaagacataggcttcctcgtaatcctgtgaaccttgcgcaggggattcacatggtactgcgtgtggagtttctgggttcgtaactctttgaggtacagctcccgcaagatctggttctgatggacctcatctgtgaccaccctctctttcgggtgtcccgccatagccttggggctgctccgtgggtccggggctctctcggcgtcctcttaccactcgcttggctgc

SEQ ID NO: 12993 - DNA, 761 bp, Homo sapiens
  chr7:4219149-4219910
  hypo
cggattttttccggaatggtcaagcggtatttgcatacaaatgaggatgcgtggagagaggcatcaagagcatacggtatttctgcctctctttgcacgaaaatatgttcaaaggggtcactcagagccaccgaggtacggctcagctttccctcagggatggacctggctgtagaggagcccattgagggccatggtggggccaccaagggtgctgtcagagaggggtgccagggtgccgtcagtaaagggtgggtgccactgcggacggcggccatggcagattctgtgctctccagttgtattcgggtgactgggccccagttggcccccatggctgggggtgggtcagcctgtggcatcgggggagcacaggaaaggagggccgggaactacagtgtctgaactgcaagcagaaggtgtgggtgtcagagctctgcctgagggtctgcctgcgcctgggcataggacaccaggaaccagggggctcagggcacttgggcaggccctgagaccgaggcagacgtccagagaaaagagcttcagcaagcggtagggaagccaggggtggtgcgggaaactggggagtcgcgccagggccagccaagcggcaacaggactggatgcccagcaaacagctccagctctatgcccagcgcccagctccagctctatgcccagcgcccggctccagctctatgcccagcgcccagctccagctctatgcccagtgcccggctccagctctatgcccagtaccc

SEQ ID NO: 12994 - DNA, 203 bp, Homo sapiens
  chr7:4243576-4243779
  hypo
cgtctccaccccagagaaaggggcatgcgggcccctaatttatgggggttcacctggcgctcacagacccaccagttcctacaggcggatatccaagtccagagctgtcgtgggcgcgctgagttgggccatctttggaaagaaaccctggggctgtcgcggggggagggcgatgtctcaccgactaccagggtaatggccgc

SEQ ID NO: 12995 - DNA, 180 bp, Homo sapiens
  chr7:42834387-42834567
  hypo
cgctcgggttcgctccacgctgtcgcagccaccgctgtggtcgccagtcagccgaggggctgcgatactggttgcccgcggtgtgagcagaattcaacgtgtaccgctgccgtgaaaatggagaggcctttgtccgtgtttggggaccgcagcactggggaggcgatctgctcccagaac

SEQ ID NO: 12996 - DNA, 304 bp, Homo sapiens
  chr7:4349444-4349748
  hypo
cgccctcacttttgacgccaattgcgagttcagaggccctcgagaccacccttaggttcgacgatttgctggaaagactcggaactcgctggaagctgtgatagtcccagctatggtttatcacagggaaaagacaccgattaaaatcagcatgcaggggcagagcccacgagggttccacacactgagcgtctgctgtcctctcctgtggagctgcggacagcgttacccctctgacaatgtgcgatcatacgcacaaaacacggtcagccaggaaggttcctccacaccagggcttccctgc

SEQ ID NO: 12997 - DNA, 316 bp, Homo sapiens
  chr7:4410656-4410972
  hypo
cgctgtgcctctagacccacagccaagggtctgcatgtggagtcagtgggaggtgccggccgtcaatggagctgaaggcctgtgcacccccaggtggagtgggggtcggcggggacagctggacccacaagcacgttaggtccatccttcccttcaccagactaggatgctcagggaatagtggttgctctttcctcttccaaatcccctgtgaactcctctttccagaaacgctaaccagaagcttatggggcagggtcctctcggacatgcagtttttggtctcagcgacattgcgcagataatcccgcccatc

SEQ ID NO: 12998 - DNA, 527 bp, Homo sapiens
  chr7:4917102-4917629
  hypo
cgggctccgactgcctcctgcagagcgagcccgccccacgcatgtcccctgcaccactccttctccgcctacctcggctggccttctcagcgctcagacccacggctcttcctgaacctgtggcccccctcacctgccgtgatggtgtccacctccttggctgccagctcctccacgtccgacctcttcctcagctcaaacctccgggataaaccttctcggggtttccataattcctggatcaagaggggcttctcactgtccccaaacacccgaaagcaccgggcctgccaccgctgcccagcatcgccggcttggcccaccacgtcacacagcacgtactggccggcctgcctggggtccagggcgtaccgctccagcgcctccttcaccagctcacgggcgctggaggtgccggtggccaggacgctcttgtagtgggttcctgtgcagacactgtccccaaacaccttcaggacaccaggggccgacagctgggtggagagctcggcggggtcatcgctggc

SEQ ID NO: 12999 - DNA, 95 bp, Homo sapiens; identical to SEQ ID NO: 11868
  chr7:50251628-50251723
  hypo

SEQ ID NO: 13000 - DNA, 102 bp, Homo sapiens; identical to SEQ ID NO: 7551
  chr7:50344738-50344840
  binary

SEQ ID NO: 13001 - DNA, 588 bp, Homo sapiens
  chr7:53103586-53104174
  hypo
acccacctcatcgaggtgcggcccacccaggaccccgccaagccgcagcgggtggtctccgagggctggaggcgccctgcccttcccggggagaccgctctggggcgagacctctcctgtgcctgggagggttgcatgaaaggggggctgtgtcgtgcctggaacccaggacggacctggagcccggtgaccatcgggatcgcgccccctgagcgtcaggagagcccctggagatcccctggacagagagcccgccccgcaggccgccccgccgcccaggagctcctggacccctgcacccgggagactctgctgggggcgctcagccagtgccccaagggaagcgctaggttcgacgggccgttgtggttcgaggtctcagacagcaagggtggcaggcggaacctgcagccccggccctctgccttcaagcccctgagcaaaaatggagcggttgcttccttcgtgcccaggccagggcctctgaagccgagcctcggcccctggagcctcagtttttgtgatgatgcttggccttccgtgctggtccagcccgccccatccgccatctgggacttctgggaggcg

SEQ ID NO: 13002 - DNA, 64 bp, Homo sapiens
  chr7:53104233-53104297
  hypo
tgctggcccctttggctcctaagaatctgggctctgctacccacctccggagacacaagcccac

SEQ ID NO: 13003 - DNA, 636 bp, Homo sapiens
  chr7:5632268-5632904
  binary
cggcgaggacaccggtggggtgagagcaccggcggggcagcagcgggggccgcagcgccgggtccctcggcccggggcccctcccgcgcggagccaggggcgggacaggggggcgtggcctggtggcgctgacgtcacctcgcctataaaatgtccggggcgccgctagctgggctttgtggagcgctgcggagggtgcgtgcgggccgcggcagccgaacaaaggagcaggggcgccgccgcagggacccgccacccacctcccggggccgcgcagcggcctctcgtctactgccaccatgaccgccaacggcacagccgaggcggtgcagatccagttcggcctcatcaactgcggcaacaagtacctgacggccgaggcgttcgggttcaaggtgaacgcgtccgccagcagcctgaagaagaagcagatctggacgctggagcagccccctgacgaggcgggcagcgcggccgtgtgcctgcgcagccacctgggccgctacctggcggcggacaaggacggcaacgtgacctgcgagcgcgaggtgcccggtcccgactgccgtttcctcatcgtggcgcacgacgacggtcgctggtcgctgcagtccgaggcgcaccggcgctacttcg

SEQ ID NO: 13004 - DNA, 123 bp, Homo sapiens
  chr7:5633472-5633595
  binary
ccgccctttctcgctcgcggcgccgctgcggtccggagcactgcccattgcgcccccgctaggcacgcgggctaccccgcctggagggggcgaggagtggggctttgcccatcctcgggtgcc

SEQ ID NO: 13005 - DNA, 294 bp, Homo sapiens
  chr7:57324312-57324606
  hypo
cggcacctcgagttgggattctcccctgaagattccccagaggtcccgcacaacttggggaaatgcggggctgtgggcgtggagctgtcccgggagggctggagcgagccaaagtcaccgaccagggaccaggcgatactggacgcccgggctcccggcggccgccttgctaccatcttgcaccttagcagactgagggcggagctgcgccgaagaggactcgaatcctggtccctgcaccgaccgcgaggaggcccgggttccccccacagccggttccgaccaggcgcctcc

SEQ ID NO: 13006 - DNA, 188 bp, Homo sapiens
  chr7:57706384-57706572
  hypo
cgtggagcggcggctgcgggagtagggcggcggcgggtgaagtgaagattgggagagaggcctcgtcaactctccccgaatccaggcctgaggctgggatctcgcgctgccgcccaggtgatccgcctgaggtttcttccttgtgaggtttcttcctggtggtcgaccctccgagaatcccaggctcc

SEQ ID NO: 13007 - DNA, 118 bp, Homo sapiens
  chr7:63569143-63569261
  hypo
cgttactgctgttagggaaataaatgagcctacgaatgaaatagtatctcatgcggtgtatgcaccgggataattggagtaatggcgaggcatactggataggctgcggaaatgctgc

SEQ ID NO: 13008 - DNA, 54 bp, Homo sapiens
  chr7:63652630-63652684
  hypo
cgccttgggcacctcggcctgcgtcattgcgctctgcctggctgcggccgctgt

SEQ ID NO: 13009 - DNA, 122 bp, Homo sapiens
  chr7:63652839-63652961
  hypo
cagttttgctgcccccgcttcctgaagatcgcagctggagccacctgggcgcagcgtttgatgtggcacctgcagtggccaaagtgacacccaaccgtgaggacgctgcagggagtcggcac

SEQ ID NO: 13010 - DNA, 494 bp, Homo sapiens
  chr7:64332690-64333184
  hypo
cgggaattgaatcagaagagcagtttccagcgcccacctcacagtctcaaagcgcctcctactccagcagggtcgaccaccgagacgccccaaagaggctgtacggtcaagactttaagggtccctcggtgtttgtcataggcagccttttccccgagaccaggccggctctgcttgtaccattttcctctgcttaggcaggctgacagccctgacagccaggtgccccagcctacctcgcgaatgcccatgctccagtcgcaggacacctggcggaagcggggagccctggctcgcatcacagtgaaggccacctttgcctggtgacgagtccctgcggcttggcggagcaggagacctctgtgaacatgcgtcggtgttggactcacacctgtcttcactggggaatccaccggatagtcccgcgttcctagaagtggtcagtgccgacccagcctgaagaaacgtcaagcggagccccggggatgcagcac

SEQ ID NO: 13011 - DNA, 237 bp, Homo sapiens
  chr7:6543240-6543477
  hyper
ccaggcgccggggctccatgctcatcagcacctggcgcagctccgcggggctcagcttcaggtgtgccaagaggatggctgcgggcggggcggggcggtgagctgggcggggccggagcggggccggatgggacccaagacggagagggcagggcagaggcggggagagggcggacacggggcggggcctaggggagaggacggggccttgaggctggaaggacaagaaacgcggac

SEQ ID NO: 13012 - DNA, 62 bp, Homo sapiens
  chr7:6570393-6570455
  binary
cgaccagcccaattgtaggaaggaaagtgggctttcaatcccagccttttatcccaacaccg

SEQ ID NO: 13013 - DNA, 113 bp, Homo sapiens
  chr7:70543004-70543117
  hypo
cgcggcggcactcgcaagccagtgcagttccgggtgggcatgggcttggccgccccacactgggagcagcaggccggcgtcaccagccccgggcagtgaggggcttagcaccc

SEQ ID NO: 13014 - DNA, 164 bp, Homo sapiens
  chr7:77324199-77324363
  hypo
cgcgcccggccacattccttatcttttaagctaaaacccatctccccaaattgcttattttcgaagcaaaaatcaaagcacatgcttacaaaacatcgaacacgcagtgtgcttactaaacgctaaaatacagaaacctaaaaaaacaattcttgcttttcaaa

SEQ ID NO: 13015 - DNA, 352 bp, Homo sapiens
  chr7:82072703-82073055
  hyper
ctccgacgaggggccgatgagcaaagattggaaaagtgtcagagtcaaggccagcaggcagccagcagccatcttcgcgatcgaagatcaatgccccctccctgcccaagcgggggaaggagcggcgctggaaaccgcgggcggaggaagagcagcacacgccgccgggaccgcgggcgtctggagggctggctgcgcccggggcccgaggcgcggagccgcgcgggggacggcaagggcgggagcggacgccgaggaaggggcggtggcgggcggacccactagcgtgcgtcggctgctccgcgccgcggccgccttgcctccgccgccatcaagggcgactttggaaaca

SEQ ID NO: 13016 - DNA, 493 bp, Homo sapiens
  chr7:86415591-86416084
  hypo
cggctcttccagatccctcagatcagctacgcatccaccagcgccaaactcagtgataagtcgcgctatgattactttgccaggaccgtgccccccgacttctaccaggccaaagccatggctgagatcttgcgcttcttcaactggacctacgtgtccacagtagcctccgagggtgattacggggagacagggatcgaggccttcgagcaggaagcccgcctgcgcaacatctgcatcgctacggcggagaaggtgggccgctccaacatccgcaagtcctacgacagcgtgatccgagaactgttgcagaagcccaacgcgcgcgtcgtggtcctcttcatgcgcagcgacgactcgcgggagctcattgcagccgccagccgcgccaatgcctccttcacctgggtggccagcgacggctggggcgcgcaggagagcatcatcaagggcagcgagcatgtggcctacggcgccatcaccctggagctgg

SEQ ID NO: 13017 - DNA, 37 bp, Homo sapiens
  chr7:86416125-86416162
  hypo
ctcaacccctacaacaaccaccgcaacccctggttcc

SEQ ID NO: 13018 - DNA, 191 bp, Homo sapiens
  chr7:87563639-87563830
  binary
cgccacggccgccgcagcaccggccggggctgggtggaggtggccgcggggaccccgggggcgcggagcgagggaaacggactcggcggcgccggcatgaggagctgagcgtctcgggcgaggcgggctgacggcagcaccatgcaggcggcagtggctgtgtccgtgcccttcttgctgctctgtgtcct

SEQ ID NO: 13019 - DNA, 440 bp, Homo sapiens; identical to SEQ ID NO: 9952
  chr7:87563890-87564330
  binary

SEQ ID NO: 13020 - DNA, 207 bp, Homo sapiens; identical to SEQ ID NO: 9953
  chr7:87564359-87564566
  binary

SEQ ID NO: 13021 - DNA, 320 bp, Homo sapiens
  chr7:96634326-96634646
  hyper
tctgatttttctttttctgtaccaccccccagtggggtggagcccaggtgtgagggttcgtcttccttctgtggtttcaataaaatacgtctagaaaaatccacggtgacaaggagctcccacaagagtgtagtaggaccagagtggcagggacgtcaagaaaggggggcctggatttaatgcgggggtggggtcactgcttctaagcacaggcaacctacaagggtgcaaagggattgaaagagagcagcccccagttggctgtttcaaggctgagatattggcaactggggctccgggatttggggcacgagctgcgg

SEQ ID NO: 13022 - DNA, 31 bp, Homo sapiens
  chr7:96636807-96636838
  hyper
aagagaggtcggggcatcatagggatttttc

SEQ ID NO: 13023 - DNA, 298 bp, Homo sapiens
  chr8:1026288-1026586
  hypo
cgccggctgtccgcagctcacacggcactgacacagacactgagctgcaagtcccagctcactacgtggcagtgagtcgcagctccccgtctccgagcctcagtttccatgcaggagacgtacggtattttgcggaaagtcggatgggttagagggcaggatgctttcgaagttcttgtggaacaggaggcagatctgccgctcatggcccacacctgggttggtctcggaagatggcctctgggctgtgatgctccggccagggccacggctcagcccctctcttgagccgccttcc

SEQ ID NO: 13024 - DNA, 430 bp, Homo sapiens
  chr8:104511554-104511984
  binary
tgggcctccagctctctgcccctttcctggcccccatccctgacaccccagggacccttcctccctcctcacgttctccctccttccaggatcccgccccgacacttcggggccctcccgctacgcgcactctttctcctcaggtcctgacacctgggcgccccctccctgtcacccaccttcagctccagccctgactctcgggcgccttgccacccttacgctccccgccccgccccggtccctcgggcgcccccactcgccgcctctacctccctacctgctacacctggcacccctgcccccacccctgctcatactcttcccccgcccccgacacctcgggcgccccctcacacgctcctattctccacacttccgtccccgaaaactcgggcgccctctcccttcacgctcagtctctcctccc

SEQ ID NO: 13025 - DNA, 233 bp, Homo sapiens
  chr8:1078113-1078346
  hypo
cgtgaggacctgctccccgtgttgtgttcggtgaggacctgctcccggtgttgtgttccgtgaggacctgctccccgtgttgtgttcggtgaggacctgctccccatgttgtgttcggtgaggacctgctcccggtgttgtgttcggtgaggacctgctcccggtgttgtgttccatgaggacctgctcctggtgttgtgttcggtgaggacctgcccccggtgttgtgttcc

SEQ ID NO: 13026 - DNA, 439 bp, Homo sapiens
  chr8:1132651-1133090
  hypo
cgtggtgagttgggcattgagctgccgtaggtcactgagtctgccctgccatcacgtctgcgctgccctgagacacggagctccagcacattctgcagagctcacactatcgagtccagcgcgcatgtgagaggcaggaagggagagtccacgggtcggcaactctgggcagtggcgcgtgggggacggactccgcagcctgtgggatcggcagcatccagtgaggtggagcggggctcaggggcactcaggatgcagtgagcgcacagccctgcggtggcatgggtgggagacgcgcaccatggagccggtggaaggtagacattcgagcgagctggggccagttcctggaagtgtgtcactgccagtgcggggaacgtgagatttactcacccagcagcgggacctactggagtgctttcggtaagagctgggatga

SEQ ID NO: 13027 - DNA, 155 bp, Homo sapiens
  chr8:11554731-11554886
  hyper
cggagagcccctgtccttctgtcaaacacacgcacaggactaacgagggggatgagtggaaaccagccgcaaagaaatggagtgggaggttcttctttaaaatccattccgttcagaacacagtgaacaccctttgacagaacaaggactatcta

SEQ ID NO: 13028 - DNA, 55 bp, Homo sapiens
  chr8:11554915-11554970
  hyper
ttgagactgttgttacaagaaaccgatgatttctaacaataggaacctcccagct

SEQ ID NO: 13029 - DNA, 141 bp, Homo sapiens
  chr8:11555521-11555662
  hyper
aggagccctggactctgggttgacctcgtcccggtcgggttctctctcctcccacccaggcccggccgctttctggcgtccgtcctctcccaggaggtcctggcctctctctgcgtcgccaagtctcttgactcccagctc

SEQ ID NO: 13030 - DNA, 117 bp, Homo sapiens
  chr8:1326617-1326734
  hypo
cgcacacctgacttcgcctgtccatcctgcacacacctggcctcacctgtctttcctgcgcacacctgacctcacctgtccctgacacacacagctgacttcgcctgtctgtcctgc

SEQ ID NO: 13031 - DNA, 1301 bp, Homo sapiens
  chr8:142138208-142139509
  binary
cggcagcgggcggcgcgtccggcctttgtccccccacgctctccagggtaggtccagggactgccagatcaggggaccctttgcgtcctggagccttgggggctggatgacgtcgccgggcacctgaggaccccgcccattcctccctcggttccccagggagcgggcggccggcggggctgggcggggccgaaggaaggggccgcttgctccgacgccgcgcacgcgccagggcccgcaggcgggttaggaaatgacgaccgcgcgcgggtctccagcagcacccgccctaggaccggccccgcccccaagtcccggtccctagggccgggcacgccactccaggccccgcccagaacctccccgcccagtcaagccccgcccccaaactctgtctccccgcggtatcctctggggctctccaggccccgcctcggctcgggccccgcccctccaggccccgcctccagccccgccccgcagacggcgctcgcagcgcccccggcccccaggcggcgcggctggtccccaggggtctgcgggcgactgcgcggctgaggcgcccgagtgcggtactggcggcgggcggcgggcagccatggcggaggccgcgtcgccgcacttgtcgctgccctcggggctgctggagctctgcgcgctgctgggcgccccccgggacagtctccgaagtctcgagcaggtgaggggcggggaaactgaggcggacgtgggccacgagtcggcagccgggacagcagtcggagagcgggcgcccgggtgccctgtgggttggcgcggactttccgagggctgagtcccggtcccccggcggtgaccccgcgcgcctgtggccggggatcgcgcccgagctcaggcaggtgccctggagcagcgccctgctcccctcccctcttctctcctctccccgcccggggcccttggtgtgagacatgtcttttgagagctgcgaacttggtccgccggccgggaatctgggggtgccgcccctcggagagtctctggggcctctctcttcagtcgctcccatcttgggcaggtgcttctgaaggtggggtgcaccagacaacgggcggaagccgccggagcctcacggtctagcgggcccagccctcgctgctgaaatgatttcattctttatgctgggatgtgttgtcccctgagtagtgggttttgcaccaggcacagaataacgagagagcaatcttagagttagccgccggcctcgcgtattctgcatgaacccctttgcgatgaagcctatagctatttttctcccttgc

SEQ ID NO: 13032 - DNA, 89 bp, Homo sapiens; identical to SEQ ID NO: 10806
  chr8:142243860-142243949
  hypo

SEQ ID NO: 13033 - DNA, 66 bp, Homo sapiens; identical to SEQ ID NO: 10807
  chr8:142244214-142244280
  hypo

SEQ ID NO: 13034 - DNA, 593 bp, Homo sapiens
  chr8:142262690-142263283
  hypo
cgtgttttcatgcccacctgtgcatctgtgaatttccgtgttttcatgcccacctgcgtctgtgaatttccgttttcacgcccacctgtgcgtctgtgaatttccgtgttttcacgcccacctgcgtgtctgtgaatttccgtgttttcatgcccacctgcgtctgtgaatttccgttttcacgcccacctgtgcgtctgtgaatttccgtgttttcacgcccacctgcgtgtctgtgaatttccgtgttttcatgcccacctgcccgtgtctgtgaatttctgttttcatatccacctgtgtgtctgtgaattttcgtgttttcatgcccacctgcgtgtctgtgaatttccgtgttttcacgcccacctgtgcgtgtccgcgaatttccgtgttttcacacccacctgtgcgtctgtgaatttccgtgttttcacacccacctgtgtctgtgaatttccgtgttttcacgcccacctgcgagtgtctgtgaatttccgtgttttcacgcccacctgcgagtgtctgtgaatttccgtgttttcacgcccacctgcaagtctatgaatttccgtgttttcatgcccacctgc

SEQ ID NO: 13035 - DNA, 450 bp, Homo sapiens
  chr8:142317706-142318156
  binary
cgcgagtggtgtatcgctggttgaattctcataagttagagatagcaggcaggggttagaaggacaagacagggtcaggaccaggagttagaggcgccaggctcctctctgggtagagaaaccgaggaactgggggcggggaggactgatgggtgcgaaagcgggccgggtccaaatgaaggcgcgcgccccggggtgggggccggggtggggggaatgagggaggctgcagggctggggaccagggcaggtgcaatccggaaagaggaggcgggaaggaattggggggccctgaggagccagcgcaagccgggtgggggcacgtcccctcccccggagaaggtgcggggctggggctgcggcgcggacccgacctggaggccgaggctgtgcgggaggtgggggtggggaggctgcaggtgcccggcgcccaggtgcgaggtgcagggg

SEQ ID NO: 13036 - DNA, 415 bp, Homo sapiens
  chr8:142318184-142318599
  binary
ggccactcacctgtctcctccggccggggccgcgggggcggcggggcggccgggccgggccgggcaggggctacgggggcgcggagccccgggcgcaccggggtcgggaggcggctgcgggtccgggcgggggctgctccctcggccggccggccgggcggtcagtcagcgacgcgggcgcggagagagcgctgcgaggctgcggccggcgcgcggagacaacgccgctttatcgggtcggaaacagccgctccgcgccgcttccgctgacgcagcgccggcccctgcgcctcatgactatgcagcacccgccgccgcgggacggggattcggggggcggggtctgcgccgcgcgcgctcattggcctccgctgccgcccaccccgcccccgaacggccgccccgcccccgccgc

SEQ ID NO: 13037 - DNA, 77 bp, Homo sapiens
  chr8:142630171-142630248
  hypo
cgagggtggtgggcgccccggagcgctggtggggattgggcaaagacgtcaacaccagggctgtggaaggaggcgag

SEQ ID NO: 13038 - DNA, 337 bp, Homo sapiens
  chr8:142630288-142630625
  hypo
tggtggggattgggcaaagacgtcaacaccagggctgtggaaggaggcgagggccttcaggtgccgagggtggtgggcgccccggagcgctggtggggattgggcaaagacgtcaacaccagggctgtggaaggaggcgaggggccttcaggtgccgagggtggtgggcgccccggagcgctggtggggattgggcaaagacgtcaacaccagggctgtggaaggaggcgaggggccttcaggtgccgagggtggtgcgcacccagggatgctggtggggattgggcaaagacgtcaactccagggctgtggaaggaggcgagggccttcaggtgcc

SEQ ID NO: 13039 - DNA, 70 bp, Homo sapiens
  chr8:142984443-142984513
  hypo
cgcaggtccgctctatcgcaggccgggcacgctttgctcagaggcccacactgcagaagtccagtctcag

SEQ ID NO: 13040 - DNA, 260 bp, Homo sapiens
  chr8:143662794-143663054
  hypo
cgtctgcccgtccacccgcaaacagcagaagctttgctagggagactgatcagccccagccgtgggtgaccgccccgtctgcccgtccgtgagtgaccgccccgtctgcccgtccgtgggtgaccgccccgtctgcccgtccgtgggtgaccgccccgtctgcccatccaccccaaaacagaaattgcttgctaggctcctagacgtcatccgaccaaggagaagggaccaggcggcaggcaggggagcgcctcgaccgc

SEQ ID NO: 13041 - DNA, 220 bp, Homo sapiens
  chr8:144240980-144241200
  hyper
cgcgggccccctactcaccgggcgccgagcacagcaggacggccagcagcgccaggccgaggcccttcatggctgcaggcagcatgctccgggtgggcctgggggcggcgcgggggcttggggcgcgggtcctctggggcgcaagcctggaggggagaagcatcggtcaggagaccccaaagaccctctcctttcccagcctcaggatgcaaccttctcc

SEQ ID NO: 13042 - DNA, 56 bp, Homo sapiens
  chr8:144328118-144328174
  hyper
cgcggggctctggcgggcctggcggctcagtgcgatctgggcaggcaggaagtgga

SEQ ID NO: 13043 - DNA, 132 bp, Homo sapiens
  chr8:1471350-1471482
  hypo
cgggcccatggtcctgccaggggcccacagcatgaagatgtagctccctcacacacacgttgaatttggatttgcttgtctggcttctgctggggcgcaggatgtggggatggaaggaccaagacacacgac

SEQ ID NO: 13044 - DNA, 49 bp, Homo sapiens
  chr8:1471664-1471713
  hypo
agctgtgccttagacgggggggaaggactccctgccccaggccggcacc

SEQ ID NO: 13045 - DNA, 283 bp, Homo sapiens; identical to SEQ ID NO: 11932
  chr8:29387050-29387333
  hyper

SEQ ID NO: 13046 - DNA, 270 bp, Homo sapiens; identical to SEQ ID NO: 11933
  chr8:29387367-29387637
  hyper

SEQ ID NO: 13047 - DNA, 169 bp, Homo sapiens
  chr8:3509598-3509767
  hypo
cgcttaccaccatcagagcacctaccaccatcagcacgcttaccatcagagcgcttaccaccatcagagcgcttaccaccatcagagcgcttaccaccatcagaacacctaccaccttcagcgggcctaccaccatcagagcgccatcaccaccagagcgcctaccaac

SEQ ID NO: 13048 - DNA, 50 bp, Homo sapiens
  chr8:41553941-41553991
  hypo
cggccagtgggggcggcgtgctgagcttctggggcttgaccaggcggcag

SEQ ID NO: 13049 - DNA, 152 bp, Homo sapiens
  chr8:55379013-55379165
  hyper
cgctagaggtcaccggagcgcgctcccctcgccagggacctacactcttcccgctgctacattaggccgcattaacaaggatctggattcactttaatttaaaaggtaaaagatcttaggtctgatgggggagtgcggcgaggagagctcgg

SEQ ID NO: 13050 - DNA, 206 bp, Homo sapiens
  chr8:56364032-56364238
  hypo
cgagtctgcctggaactggcctggagaaggtgcgttctgggccttaaagagtccgactacacctatgccgtacaggcccccagaatgcagcagtactgccttggaccgccggatgcgccagcagacaacggtgaagcggttctggcggtagcagtaggacacgcgctgcagggcgttgtcctggacactctggggcacgatcagca

SEQ ID NO: 13051 - DNA, 159 bp, Homo sapiens
  chr8:56364333-56364492
  hypo
cccaggccaaggcactgatagtcgcggcagcaagccctttccaccaggaggctgctcatggtcatgccgtccgagggcttcaaggctgaggacggggtcagtgtgctgggctccagctcttccgacactgagatctcctcctcctggtcctcagagggc

SEQ ID NO: 13052 - DNA, 157 bp, Homo sapiens
  chr8:56602062-56602219
  hypo
cgcccttcccggactccatccggctgcgcggggcagagttctgcattgcagaggccgggctgtggggacccaggccagcaccactcagggagcagcttggtgggccccgttcccgggtgtgagggcaggaaaactggctgaggagtcggcactagaa

SEQ ID NO: 13053 - DNA, 72 bp, Homo sapiens
  chr8:56602280-56602352
  hypo
gagatgaggaagaaggacccagaaggtcccgggcgggcacagaggcagcgcccagggaggtacgcgctggcc

SEQ ID NO: 13054 - DNA, 114 bp, Homo sapiens
  chr8:61156160-61156274
  hypo
cgtctacggccataccaccctgaacgcgcccgatctcgtctgaaacttctcaccatgttccccactaaatcacgttttcgcctgggagaccagatcacctgctctgcagcagcc

SEQ ID NO: 13055 - DNA, 120 bp, Homo sapiens
  chr8:61822259-61822379
  hyper
cgaaacagagtggaggctcctttaatcttgacagcccgaatgctacaggggtcacagcacatctgctccggaggaaagacaaagggcaaggtggggccacggtagcccgcgcggggctct

SEQ ID NO: 13056 - DNA, 144 bp, Homo sapiens
  chr8:61822883-61823027
  binary
ccacctggcggggcgctgcggccgggccgggcggggacatctgaggcccgacagacccgcgctcatggacaagtgtcgcccgcgccgggcagggccgtggagacagaccacgcagtgacaggccggaggcggctcgagggatcc

SEQ ID NO: 13057 - DNA, 85 bp, Homo sapiens; identical to SEQ ID NO: 11941
  chr8:65499649-65499734
  hyper

SEQ ID NO: 13058 - DNA, 181 bp, Homo sapiens; identical to SEQ ID NO: 10818
  chr8:73449197-73449378
  binary

SEQ ID NO: 13059 - DNA, 208 bp, Homo sapiens; identical to SEQ ID NO: 10819
  chr8:73449432-73449640
  binary

SEQ ID NO: 13060 - DNA, 99 bp, Homo sapiens; identical to SEQ ID NO: 8777
  chr8:82193698-82193797
  binary

SEQ ID NO: 13061 - DNA, 66 bp, Homo sapiens; identical to SEQ ID NO: 8782
  chr8:91996920-91996986
  hyper

SEQ ID NO: 13062 - DNA, 827 bp, Homo sapiens
  chr8:99956460-99957287
  binary
cggctgcgtctctataacagggaaacctcgagcaaacctgtgcctttaagactcagttgctatccaaacagaagtaaacagagtggaccattagcagacgccgggcgcggaggcggagccagggcgctgagggccccgcgcggcggcgggacgcccgcccgaaggggaggcggggccgctactaaagcccaagactcccggcctggggcagcctggggagggacgcgggcggggacggagctcggcgtgcttgctgctggagggtgatggccctgcaaggctgtgggctccgacctcaccgggagtcgacagcgagaggttcgccgaagagcgaggttctgggcgagcgctgaacgccggccccaagcaccccgggtctttacacagtccgcgtccacagactctgacgaagacgtggatctgctctcgctttagctgctcgcggtcctccagatcatgtccgcgactcctgcgactccgcgcggaaaaaaaagtttgccaggcgtggactcaatgacctttccaagctgtgcgcctcgctgcctggaccgggtctgagcgcggctgcccaggttgacctttctgcgggaggtgagtgttcgctctgggaaggggctgtagctgccctttggaaggaagggtttgggggtgtaagaggcgttcagattctcggtctggtgtgccccaaattcagatgtgaaaatagatcatggggatgcaatcccagggcactgtatttctcacttccttgggtccctggcacgcgactcccagctaacacccaaccacacacatttctacatactgtttcttaattttgttttggg

SEQ ID NO: 13063 - DNA, 51 bp, Homo sapiens
  chr8:99957709-99957760
  hyper
acctgttagccgagaacaaaagggggctggcgtttcccgaagcgaaagggc

SEQ ID NO: 13064 - DNA, 94 bp, Homo sapiens; identical to SEQ ID NO: 7606
  chr9:100503340-100503434
  hyper

SEQ ID NO: 13065 - DNA, 703 bp, Homo sapiens
  chr9:101569830-101570533
  binary
cgcttgggctggcgcggggctggacggaaagggggcggcgcgcaggtggggcgggccgggggcggggcggcacggcggttccgggatccgggtcctggcctccaccgccgccttggggcgcgcagatcgctggctgcagttggcgggcgcatgtgggggcgcacggcgcggcggcgctgcccgcgggaactgcggcgcggccgggaggcgctgttggtgctcctggcgctactggcgttggccgggctgggctcggtgctgcgggcgcagcgtggggccggggccggggctgccgagccgggacccccgcgcaccccgcgccccgggcggcgcgagccggtcatgccgcggccgccggtgccggcgaacgcgctgggcgcgcggggcgaggcggtgcggctgcagctgcagggcgaggagctgcggctgcaggaggagagcgtgcggctgcaccagattaacatctacctcagcgaccgcatctcactgcaccgccgcctgcccgagcgctggaacccgctgtgagtgcacagctctggggaggaagcccgccctcagagccccgggcctcagtttctccatcagagcagtggcagggcggggagctggggtctccaggatggcgcgtcttattgagtctttctccgaagacgatagtgtaagagctcacatgggggcggggaggcaagaaagtaaaaaagac

SEQ ID NO: 13066 - DNA, 37 bp, Homo sapiens
  chr9:118139-118176
  hyper
cgcaggggatgtggcggccggatcacctggccccggc

SEQ ID NO: 13067 - DNA, 88 bp, Homo sapiens
  chr9:119976921-119977009
  hypo
cgctcttctgggggatgcggcgacgcttctgccaacgtcgctgggcgtacagcgccacggtgaacaccagcagcagcagcagcagcgc

SEQ ID NO: 13068 - DNA, 83 bp, Homo sapiens
  chr9:124990438-124990521
  binary
cggattcaggcgcctttcgagggccagtcggagggaaacccggagcaaaaagagagcgagatcggggcgaaacgggaccaaaa

SEQ ID NO: 13069 - DNA, 142 bp, Homo sapiens
  chr9:124991012-124991154
  binary
agtacatgggccggggaacctcgggctcagcgggcgcgcagcgcggagagctgcgccgagggggaccacagccgcagtgggagcagaggctgctgcaggagcaggaggagagccgaggcgccggccccgccgccccgggccc

SEQ ID NO: 13070 - DNA, 168 bp, Homo sapiens; identical to SEQ ID NO: 10830
  chr9:129485513-129485681
  hyper

SEQ ID NO: 13071 - DNA, 351 bp, Homo sapiens
  chr9:137620493-137620844
  hypo
cggggccgcaattcgctttcagtacacggaaggagacggcgagggtgagacctattactacgaatacccctactacgaagaccccgaagacctagggaaggagcccacccccagcaagaagcccgtggaagctgccaaagaaaccacagaggtccccgaggtctgggctgagcgggggactgggttgggctgggcccctcgaggccatggtgcaggggagggcgaggccaggagaggttgtgtcagggtagagggttgggggctgtctggtgaaggttgcgggggcagctcagtgagggagccggctgttgccatccgagctttgctgtcacggggcgtatcgggctttcc

SEQ ID NO: 13072 - DNA, 51 bp, Homo sapiens
  chr9:137623301-137623352
  hypo
cgtttgcgaggcaaccctgcgccttcctctccctctgcagccagctccgcc

SEQ ID NO: 13073 - DNA, 153 bp, Homo sapiens
  chr9:137623543-137623696
  hypo
tggggggctggtggggcatcatgggggctcctgcccaagagcctcctcaggggtgggcctctacgggcagctcaagtgttacaccctattcccaaaactttatttttaaagagacctcggtgcctcgaatttgctctgaataacgtgtgtatc

SEQ ID NO: 13074 - DNA, 473 bp, Homo sapiens
  chr9:137642188-137642661
  hypo
cgatcctcagcccacagccgtgcccctcccttctccgggtgggggtttctgaaacattcctgccacggggtctcacagcttctgtgcgtgtccagtgcatttcccgggtgggccgcttctccgacgccctcattctcgctgcagcccagccctggcctggttgcactctgacttgtctctcttggccccttgtcttcagggcccccctggacgcccaggccttcctggggccgatggcctgcccggtcctccaggaaccatgctcatgctgcccgtgagtacccttatcagtcggaggtggggaggcagctggggcaggtgggatccaaaccagaccctctgaggctgcgctgtcactggagaggcctgtgggccccgtctcagtctgtggtcttgcctgggtgccacgtcactgctcccagagtgacccttgtcttacacttgcagttccggtttggaggtggcggcgatgc

SEQ ID NO: 13075 - DNA, 305 bp, Homo sapiens
  chr9:137645508-137645813
  hypo
cggctcctggaaagtcatcgttcttccccccggttctgttcgaggcagacaggtcgcgctttgtgtgctgagcaccgtggccgaagccctgtcccctccccctgcccctcccctgccacccccagcccttcctgtgttctcgagtccccacctcgagcagacattaacacacaccatgtctccctagggtccccctgggagcggaggtttgaagggcgagccgggagacgtggggcctcaggtatgtgggatccttgccttcgctgtctggtgggcgcctcccgttctccggcggcagcgacggc

SEQ ID NO: 13076 - DNA, 323 bp, Homo sapiens
  chr9:138662685-138663008
  hypo
ccggtgcctctgcccaggtatggcgtgtgcctcatcgggctgaagcgggaggacaacaagagcatcctgctgaacccggggccccggcacatcctggccgcctctgacacctgcttctacatcaacatcaccaaggaggagaactcggccttcatcttcaagcaggaggagaagcggaagaagagggccttctcggggcaggggctgcacgagggtccggcccgcctgcccgtgcacagcatcatcgcctccatgggtgagccgggacaggcgcgcgggactccctgggcctgctcctttggcgggagaccaggcgggacacc

SEQ ID NO: 13077 - DNA, 200 bp, Homo sapiens
  chr9:2876419-2876619
  hypo
cgggcatggtgctgccgtgggcgctcgggccttgggcgtctggctctgtctctgactccagacctcaaacagggaccgccttctctgtgctttctccgtgtctcctgtgcgccctggcctctgcgtcacagcccgcggctgggccgaatccttccagagtcccacaatgctattataacagccgggaatcatttgaaaac

SEQ ID NO: 13078 - DNA, 715 bp, Homo sapiens
  chr9:2933129-2933844
  hypo
cgctgccatgacgccggctgcagtggggtacaggagtaggtcgcgggtcctcaggtacagactctgaggtgtgcagcccctggagcctgcacctaggagcgcccccggaacctgctgccctgagaactcacccctgggagccccgggaatagggctgggcccagccaccccctggagggagagtagggaggtgaggcacagaaaatgggcagagagggtccccaagacagaactgggcccagggcggtgccgcgcttgcacgcggagcatgggggccgggcccgagacatggaactggggccccgcttcaggggcccagggcaagaagtgggagcggcacccacttcgaggacctgcccagtggcatgaccactgcgcccaacccgccgatggcgccaagttcctgcgcctcaggaagaggctccgtatggggccgcctgaggccgtatccccaggacctgccccacattaaggtgaccgctaagccagacaatcctgatggtgaggccccgtgcctgccatctgctcctggagacgccccccaaccccaggcatggccgtcagccggcgaggcggtactgaggcagggggcgcgtcctggtcattggagagtttcagcccagtgggtgaaccagacacactgttcaagggggcagcggttagtaagcaggacgagggggagccccaggccgcagggagaactcgtgacaacgtc

SEQ ID NO: 13079 - DNA, 98 bp, Homo sapiens
  chr9:2933873-2933971
  hypo
agtgaggacatgaagcccccgcctcaggctgcaaggaggcgccaccagggctgcaagctccacggagctggtgggacctggagacaggcgagaacccc

SEQ ID NO: 13080 - DNA, 63 bp, Homo sapiens; identical to SEQ ID NO: 8817
  chr9:37034135-37034198
  hyper

SEQ ID NO: 13081 - DNA, 238 bp, Homo sapiens
  chr9:37035890-37036128
  binary
cgggctgggggcggggggtgttggtgttttgttgttgttgttgtttccatttagagggcttgttttgtttttgtttgttttctgtgagttttcatttttccatgggatattcttttgtttcgggtgttttgcgtgttgttttttcgtgggattgattttagcgggttttgctctgtaagtcctggtctttggggtgagttttgattttgtgtaattttgtactttgtccttgtaggct

SEQ ID NO: 13082 - DNA, 878 bp, Homo sapiens
  chr9:503936-504814
  binary
cgcatcctcccctttccgccgaggactctgtcctgcagccgagccagggcgaatgcacggaggtcacaagggaggtgcccttggaggcgggaggtttctggccgccggggcgaccgtgctgacgaggcacctgcaggaaacagagctctgcacgctccggtccccctcacccggggagggagaggaggtacagaggcgctgggggaggacgtcgagcaggccagcctcgttgccagaacccccgccccagccggagatgggagcaccgcaccgtctcacgggggctggatttcttctccccttgcgggtgtgtgtgcgaggatggacgtggtaaatacgggttggcagaaggagcgaaccgcggtggaggaagttcttctgcttagttctcgccgcggcgaggcccgcgggccaggcgcggcgacgaaggtgcacgaaggtgccccgcgggcctggtggagttgcagcggcgcgcaggcgcactgagggccgcccgcggccggctccgcggtacaaagagcgcccccgcggggagccgggcgtcctctgggcggagggagcagccggggcttcgccggcccgcgccgttcttctcacgcgccgctccggggcgcagccacagctgtcgcccaccgcgggtgagaggcttgctggtccgccccggcttccccgccccggcggcggccgtgcggttcgggctttaattctggcgcttgccagccggggccgactccgccccctgcgccccgcccttccccgagctccgggtccgcggcggagcgagcgagcggccggcaggttgggaggagcggccgaaggtgagtgacgcggcggggccgtgccgcgccccgtgccgcggcgaggttgtcccggagcgc

SEQ ID NO: 13083 - DNA, 772 bp, Homo sapiens
  chr9:504833-505605
  binary
cgggctggccccgcgcggagccgacttggcgcgcgccggggttgcgcggcggccgtggcggtggcggagggcagcccccgcgggctcccgctcgtgcgggtgaacccggcggcctcggggcggtcctgggggggggtccgagaggtggcgtcggccccgcggccgtcggagtttggcgcgctctgcagcggcggcgctcggccggtctggaggagggagaggcgcgccgggcacggagcagcgagaaagttcgggccgggccggccggcgggagggtgcgggcgcctggctaccccggcccggcgctctgtccctcggatgcctctgggcccttccctagcccggggcggaacgggggaccctctctgaagcggctctccgtggagttggatgttgcccttcgcgggagggagtggcggtcaagacccctttatcctcggccccagaggggcaggtggcctcgggtcgccctccgccaactccgaggtggcttcggccggggctggagggcggggaggcgggggaggggcgtgggcgctgcggcctctggggcggcccaacccggcgcgggcagcgtgggtttccgaggtcccgcggttccaggtcgagggaaggtgtaggggccctgaagcgggctggtccccgaatgttgcgttttctgtgccgctttgggcaacacgcagtggcgctcgcggcagccacggctccttgaccgttcatctccttcacccgggtcccgtggaactttcagaggcaactgttcttggtggct

SEQ ID NO: 13084 - DNA, 82 bp, Homo sapiens
  chr9:505639-505721
  binary
tgacctagtgaaggccttgggcgagttggcgttaacaatttatggcgtccgccagcgctcgctttccgcacgtggcctctgc

SEQ ID NO: 13085 - DNA, 156 bp, Homo sapiens; identical to SEQ ID NO: 11990
  chr9:96720648-96720804
  hyper

SEQ ID NO: 13086 - DNA, 257 bp, Homo sapiens
  chrX:34149228-34149485
  hypo
cgggctgagatgggacactccagtcttggaaggctccgcgtggagactggacccccgacgagtcttgggaggcgctaggcggagacgggacactccagtctcggaaggctccgagcggagactggacccccgacgagtcttggaatgctctaggcggagatgggactctccagtctccggaggctccgggcggagactggacaccggagtcttgggaggctcctggcggagatgggacagtggagtctcgaaaggcc

SEQ ID NO: 13087 - DNA, 191 bp, Homo sapiens
  NW_001838286.2_1380778-1470498:80846-81037
  hypo
cgggggcaaaaagccatggcagcgggaggcaaaaagccgcaaaaacagcggcagccagaacaaacaccaaggcggcaaaaagcctcagtggcgggggctaaaagccaaggcggcggggagtaaaatgcctcaaaaagccgtggtggcgagggcagaaagctgtggcttcggggacaagaagccatagcggc

SEQ ID NO: 13088 - DNA, 1229 bp, Homo sapiens
  NW_001838286.2_1380778-1470498:81101-82330
  hypo
cggggcaaaaagccacggcggcaagggcaaaaagttgtggcttcgggggcaaaaaaccatagcagcggggcaaaaagcagtggtggcggcggggccagaaaaaccacaaaatcccgcggcgatggggggaaaagctgcaggggcaaaaagccgcagcagcagggggaaaaaagccgtaaaaagcagcagcggcgggggggcaaaaaccgtggcggcaaaaagcctcagcggcaggagcaaaaagccatggcggcaggggcaaaaaccgcagtggaaagaagactcagtggcaggagcaaaaacgatggctgtggggggcaaaaagccatgactgcaaaaactgcggagtgtgagcccaaaaagccatggcggtggggataaaaagccacagctgcaaaaagcagcggtggtggggataaaaagccgtggcggcaaaaacccgcagcagcacaggcaaaaagccgtggcagcaggggcaaaaagccacggtggcaggggcaaaaagccgcggcggtgagggcagaaagctgtggcttcgggggcaaataaacacggcggccaaaagccgtagtggcagggcaaaaagctgcagcagtgggggcaaaaagcagcgggagcgggtgcaaaaacccacaaaaacccatggcaacgggaggaaaaagccatggtggcaaaaagccacagtggcggggggtaaaaagccatggcggtgagggggcaaaaagccacaaaaagcagcgtcggcggggacaaaaaccacggcggcaaaaagcctcagtggcaggagcaaaaagccatggcggcggaggcaaaaagccgtggcagcaaaaacccgtggtggcaaaaacccgtggtggcaggggcaaaaagccgtggctttggaggcaaagagccgtggctgtaaaaagccatagtggcgggagcaaaaagccacaaaaagccacggtggcgggggcaaaagccacggcgccgagggcaaaaagccgtggcttcgggggcaaagagccgcagtggcaaaaagctgcaaaaagccaaggtgacggggcaaaatgccacggcggcggggttaagaagccacggcggcggggcaaaaagccgtggcgggagaaacccgcagcagcgagggcaaaaatccatggcagcagtgacgaaaagccacagcagcggtggcagaaagccgtgaggcgggggaaaaatccgcagcagcggggtcaaaatggcactgcagc

SEQ ID NO: 13089 - DNA, 133 bp, Homo sapiens
  NW_001840306.1_6328-82586:33382-33515
  hypo
cgcaacgaaaccccagacaacatcctccgttttcacaagagcggtgcctcccctggtcaccactgcgacccctgcttccagctggcacgagccacacacactgctcatttttctcagcgcctgattgtctgtc

SEQ ID NO: 13090 - DNA, 124 bp, Homo sapiens
  NW_001842432.1_1-179261:102996-103120
  hypo
cgttcctgatggaggccgtgggcctctttgtcctcgcttaccaggcagcagctccagccattctcagccccaccggtgggtgccgccttccatcaggccaaagactttccgaaactgcccttct

SEQ ID NO: 13091 - DNA, 62 bp, Homo sapiens
  NW_001842432.1_1-179261:103214-103276
  hypo
ctggaggtccctgagccgggggttgggaggccaatccatcggtgcagtgccgggtgcaggcc

SEQ ID NO: 13092 - DNA, 185 bp, Homo sapiens; identical to SEQ ID NO: 7634
  chr1:101774910-101775095
  hyper

SEQ ID NO: 13093 - DNA, 306 bp, Homo sapiens; identical to SEQ ID NO: 5867
  chr1:108506290-108506596
  hyper

SEQ ID NO: 13094 - DNA, 87 bp, Homo sapiens
  chr1:110167965-110168052
  hypo
cgatccctgccgggccccgccccctgcctcaagcacttcccgctcgacctgcgcacgtctatggatggcaaatgcaaggagatcgcc

SEQ ID NO: 13095 - DNA, 66 bp, Homo sapiens; identical to SEQ ID NO: 7639
  chr1:110672768-110672834
  hyper

SEQ ID NO: 13096 - DNA, 162 bp, Homo sapiens; identical to SEQ ID NO: 7640
  chr1:11131899-11132061
  hypo

SEQ ID NO: 13097 - DNA, 818 bp, Homo sapiens; identical to SEQ ID NO: 6654
  chr1:113498720-113499538
  binary

SEQ ID NO: 13098 - DNA, 118 bp, Homo sapiens
  chr1:116219361-116219479
  hypo
cgatgccgacctcagccagcacctggtatacttggatctcgcaggctgctgctggaggttccgagtagctgcctgtaccaggcctgccccagtcaattcattagcctttcagtaagac

SEQ ID NO: 13099 - DNA, 109 bp, Homo sapiens
  chr1:118172998-118173107
  hypo
cgtcgttgccacccgggacctctagggttccagaagtacacttctaaacgagcggggattctttttctccttcactgtccgagtagtcgcctgggcgggatagtaatgc

SEQ ID NO: 13100 - DNA, 209 bp, Homo sapiens
  chr1:118173578-118173787
  hypo
cgcccagaatctagggagctggagcctgtcgggaggcttggtttcataccattcctcacccagctcagagcaacgcaggctacctgttctggccatgactggatcacaggtctcccagctcagggcattttcaccacagcaggccatcccagggccaccttttacttaggaagtttccgaaaatgggaaatgtccctaagggaaaggca

SEQ ID NO: 13101 - DNA, 63 bp, Homo sapiens
  chr1:118173816-118173879
  hypo
gggtgcttccctggaaaaaaggtatccgaggctatagtgttcgagagagagagagatggagac

SEQ ID NO: 13102 - DNA, 142 bp, Homo sapiens
  chr1:119548917-119549059
  hyper
tcttctaaggatgaagaggacattataaaactgcacactacctccctaatggcccattcgtcctagctctgtctagtgaagtagagagcagaaaaaaacatctagctctatcaagttgaaaacattttcacattcaccttaa

SEQ ID NO: 13103 - DNA, 64 bp, Homo sapiens; identical to SEQ ID NO: 5719
  chr1:12123950-12124014
  binary

SEQ ID NO: 13104 - DNA, 93 bp, Homo sapiens
  chr1:12251958-12252051
  hypo
ggcttcggcgtggccagaccaggtacggggtggggctcaggtccttggggacgcccatgggcctctcctttgtagacatccttgcagtgtcac

SEQ ID NO: 13105 - DNA, 77 bp, Homo sapiens; identical to SEQ ID NO: 6657
  chr1:14125492-14125569
  hypo

SEQ ID NO: 13106 - DNA, 54 bp, Homo sapiens; identical to SEQ ID NO: 6658
  chr1:14125622-14125676
  hypo

SEQ ID NO: 13107 - DNA, 34 bp, Homo sapiens
  chr1:150947664-150947698
  hyper
cggcccccggtccccgccagggtgggcacattcc

SEQ ID NO: 13108 - DNA, 322 bp, Homo sapiens
  chr1:152080641-152080963
  hyper
agctgctgttcctccccttcctggagcagctgttcctcttcacggaattttctgtcgcggtcgtgacgcagctgttgttcgcgctcctggcggcgcagctgcggttcctcctcgaggaattttctgtcacgctcttggcggtgcagctgctgttcttccctttcctggagcagctgttcgtcttcgcggaattttctgtcgcgctcctggcgcagctgttgttggccctcctggcggcgcagctgctgttcgtcctccatgaattttctctcttgttcctggcggcgcactttctgttcctctaaacggaattttctgtcac

SEQ ID NO: 13109 - DNA, 369 bp, Homo sapiens
  chr1:152192964-152193333
  hypo
cgtagatccatgttgtccctggctagaggagtgacctgagccagaaccatgcttactatagccagaggactgtcctgagccagactcatgttgcccaaagccagaagtctggcctgagccagactcataatggccacggctgtaagagtaacttgagccagacccgtgttggccgtggctggaggagtgccccgaaccggacccatgtcggacgtggctaggagactggcgagatccagacccttgtcggccgtggcccaaagactgacgggaaccagacccatgctgaccatagctggaagacgaacctgagctagatctgtgtcgttcacccctagatgactgtcctgacctagagccgtgttgtcc

SEQ ID NO: 13110 - DNA, 253 bp, Homo sapiens; identical to SEQ ID NO: 6660
  chr1:153540242-153540495
  hypo

SEQ ID NO: 13111 - DNA, 193 bp, Homo sapiens
  chr1:154179803-154179996
  hypo
cgggaacttggatggatacagtctgggcctgctgggccagatgttccgagggcggcccggcaagcagcctgtcttgcacattgcaactgactggcttaatctacggcaagagtccttcagctccgtcacagagtactctccaatgtgttatagttatccttaaagctcttcaattcaaggaagtgcttggcac

SEQ ID NO: 13112 - DNA, 54 bp, Homo sapiens
  chr1:156010548-156010602
  hypo
cagaatttaacttgggttgcacctggactggacaccacctagtttagctctctc

SEQ ID NO: 13113 - DNA, 59 bp, Homo sapiens
  chr1:1566482-1566541
  hyper
cgccagctgcttggcgctgaccccgttggccgggctgccgtcaccctgggcccgacgcc

SEQ ID NO: 13114 - DNA, 97 bp, Homo sapiens; identical to SEQ ID NO: 6661
  chr1:1566979-1567076
  hyper

SEQ ID NO: 13115 - DNA, 58 bp, Homo sapiens; identical to SEQ ID NO: 12026
  chr1:158710986-158711044
  hypo

SEQ ID NO: 13116 - DNA, 59 bp, Homo sapiens
  chr1:161450487-161450546
  hypo
cctccttacactcggggcacgtgagcttgtcctgcactggctgcgctcccacgcatgac

SEQ ID NO: 13117 - DNA, 629 bp, Homo sapiens; identical to SEQ ID NO: 8856
  chr1:166135586-166136215
  binary

SEQ ID NO: 13118 - DNA, 136 bp, Homo sapiens
  chr1:170637507-170637643
  hyper
cgaaaccagattgtcctaataagaccttttgttggaaacacatgtagtcataaaaaggtagacggaaagtcaattagacacgcgcgcacacacgcacacattcacaagccggtgctaagtgtgcacccggcgcagc

SEQ ID NO: 13119 - DNA, 70 bp, Homo sapiens; identical to SEQ ID NO: 6355
  chr1:171554936-171555006
  hypo

SEQ ID NO: 13120 - DNA, 122 bp, Homo sapiens; identical to SEQ ID NO: 6356
  chr1:171555061-171555183
  hypo

SEQ ID NO: 13121 - DNA, 181 bp, Homo sapiens; identical to SEQ ID NO: 6670
  chr1:175372314-175372495
  hypo

SEQ ID NO: 13122 - DNA, 145 bp, Homo sapiens; identical to SEQ ID NO: 6671
  chr1:175372572-175372717
  hypo

SEQ ID NO: 13123 - DNA, 153 bp, Homo sapiens; identical to SEQ ID NO: 6672
  chr1:175375048-175375201
  hypo

SEQ ID NO: 13124 - DNA, 78 bp, Homo sapiens
  chr1:182911469-182911547
  hyper
cgccccgatctcctgttgggctcttccttggcggccccttcggcggagctgaccttcctcttgggtatcctggcggca

SEQ ID NO: 13125 - DNA, 57 bp, Homo sapiens
  chr1:18960805-18960862
  hyper
cgcttggccaaggccgggtcaatcagctgggaggggtcttcatcaatgggcgacccc

SEQ ID NO: 13126 - DNA, 125 bp, Homo sapiens
  chr1:18963947-18964072
  hyper
catgggaacccgcagactgatggctttggaaaaagtggcgagtgccctggaacctgaaagcttgcaaaaagccagtgttgtttcagtctcccttcagaggtttctcccagcacccctctcctcac

SEQ ID NO: 13127 - DNA, 334 bp, Homo sapiens; identical to SEQ ID NO: 6357
  chr1:19676386-19676720
  hypo

SEQ ID NO: 13128 - DNA, 51 bp, Homo sapiens; identical to SEQ ID NO: 6358
  chr1:19676822-19676873
  hypo

SEQ ID NO: 13129 - DNA, 72 bp, Homo sapiens
  chr1:1974777-1974849
  hypo
cgcagcgcaggagtggcagggcccgtctgcagtgcaggagtggcagggcgtgtccgcggtgctgaccggttg

SEQ ID NO: 13130 - DNA, 162 bp, Homo sapiens
  chr1:1974925-1975087
  hypo
gaaggggacgcgcggcgtgttccccagtggtctggaccctggggtcccgccccatccctgccctgcccaggccctgccccctgctggtgtgtgtccctggaccaggcatggagcgaccccggccctggtgtctcatccacagaatagggtcatgattctcac

SEQ ID NO: 13131 - DNA, 51 bp, Homo sapiens; identical to SEQ ID NO: 12044
  chr1:197882002-197882053
  hyper

SEQ ID NO: 13132 - DNA, 220 bp, Homo sapiens; identical to SEQ ID NO: 12045
  chr1:197882208-197882428
  hyper

SEQ ID NO: 13133 - DNA, 261 bp, Homo sapiens; identical to SEQ ID NO: 12046
  chr1:197882611-197882872
  hyper

SEQ ID NO: 13134 - DNA, 93 bp, Homo sapiens; identical to SEQ ID NO: 8867
  chr1:200012227-200012320
  hyper

SEQ ID NO: 13135 - DNA, 160 bp, Homo sapiens
  chr1:202112280-202112440
  hyper
cgagaaagggcagaggtcatttgcagagcatgtttgggaaaggaagccagtgttcaattgtgtaaccacaggatgcccgcccctcgagctttccatctgccttcatgcctcaggtccaatgaagtgacgtcccctgccttctaggacgctgagaactgtc

SEQ ID NO: 13136 - DNA, 131 bp, Homo sapiens
  chr1:202995171-202995302
  hypo
cgacacaattcactgaagagcatactacagatgtagtatccggatatcaagtttccccacttaaaaaatgggtgcgatcaaaggaaaagcaaggaacgggcaggagagcaagcgtgaaaggtgacaaactt

SEQ ID NO: 13137 - DNA, 201 bp, Homo sapiens; identical to SEQ ID NO: 5872
  chr1:20512799-20513000
  hyper

SEQ ID NO: 13138 - DNA, 70 bp, Homo sapiens; identical to SEQ ID NO: 5874
  chr1:214387777-214387847
  hyper

SEQ ID NO: 13139 - DNA, 84 bp, Homo sapiens; identical to SEQ ID NO: 5875
  chr1:221051890-221051974
  hyper

SEQ ID NO: 13140 - DNA, 38 bp, Homo sapiens; identical to SEQ ID NO: 5876
  chr1:223936543-223936581
  hyper

SEQ ID NO: 13141 - DNA, 142 bp, Homo sapiens
  chr1:228652629-228652771
  hyper
attgaggtcttctctggctgtgaggcacatacatgggggcattttttttttctgaggcccacagctagggaggggtagttagtgcttatttagaaggggaggtggcggtgggaatggcagtttgcaacgaccttaacccttc

SEQ ID NO: 13142 - DNA, 109 bp, Homo sapiens; identical to SEQ ID NO: 8884
  chr1:229606426-229606535
  hypo

SEQ ID NO: 13143 - DNA, 464 bp, Homo sapiens; identical to SEQ ID NO: 7698
  chr1:231038126-231038590
  hypo

SEQ ID NO: 13144 - DNA, 175 bp, Homo sapiens
  chr1:234736252-234736427
  binary
cgatacaaagtgaaaaaataaattttttaaaaaagaaagggaaaaactacaatttgaccattctgaccagcctccttgttccaactggcctcttgatttgtataaagataatggggtccggcggcccccttgatgcatgaattgcacgctgggcataatgaacttattgtgcgaa

SEQ ID NO: 13145 - DNA, 157 bp, Homo sapiens
  chr1:243646223-243646380
  hyper
cgtgtgtggttcgcaggctgtggggggcttcttgcagcgggggctgctgcctaaacagactccgcgggccccatgatggcaaaccccctcgccccgttcatgacttaatgcctcctagaagaaaaggctaaaaacaagacacacagaacaagaaatt

SEQ ID NO: 13146 - DNA, 131 bp, Homo sapiens
  chr1:2437299-2437430
  hypo
gcccagaagacaccccaagaaaagacctggcctgtcctcagagggctgagctggacaggctcccagggtaggctgcaaagcctgctcctcaggacgcaggccctaaccccgggccacaggccccccaaccc

SEQ ID NO: 13147 - DNA, 318 bp, Homo sapiens
  chr1:245032200-245032518
  hypo
tatcgtataccaattatacctccataaagctggggaggttgggggaggaagacaaaagaattcaggcctgcggggaatgatgggagtgggtaggagaggagagaggggagagaggaaaacacagatcaccagcagcctcgtgggtggttttgtaaaggactttggcttttgctttctgctatggactgaacgtttgtgtccccacaaaagtcctgtgttgaaacctaatcccccatgatattaggagctgaggcctttggaggcaacgaggtcatgagcgtggagccctcatcaatgggattagaaaatttatacaga

SEQ ID NO: 13148 - DNA, 69 bp, Homo sapiens
  chr1:245032603-245032672
  hypo
cactgaggcgctgggcttcttagcttccagaactgcgaccaataagtgtctgttgtttataagctactc

SEQ ID NO: 13149 - DNA, 82 bp, Homo sapiens
  chr1:245986537-245986619
  hypo
cgattgcaaaatccatttctccttctctgtccctgcttctctgcccttcccccaagctttcttgctctctgccacacgtgcg

SEQ ID NO: 13150 - DNA, 186 bp, Homo sapiens; identical to SEQ ID NO: 6363
  chr1:246324319-246324505
  hypo

SEQ ID NO: 13151 - DNA, 97 bp, Homo sapiens; identical to SEQ ID NO: 6365
  chr1:246330213-246330310
  hypo

SEQ ID NO: 13152 - DNA, 124 bp, Homo sapiens; identical to SEQ ID NO: 12064
  chr1:248074927-248075051
  hypo

SEQ ID NO: 13153 - DNA, 332 bp, Homo sapiens; identical to SEQ ID NO: 12065
  chr1:248099374-248099706
  hypo

SEQ ID NO: 13154 - DNA, 33 bp, Homo sapiens; identical to SEQ ID NO: 6699
  chr1:25255579-25255612
  binary

SEQ ID NO: 13155 - DNA, 234 bp, Homo sapiens; identical to SEQ ID NO: 10916
  chr1:27189675-27189909
  hypo

SEQ ID NO: 13156 - DNA, 196 bp, Homo sapiens
  chr1:27844793-27844989
  hypo
cgtcgactggactctggccaagggcagggactgtgtggcactgctcactgctgtatccacaaggccctaaggcataatgcctggagcctcaatccatgatcggtagggaacgaatgaatggctaagcctgttggggcaggtgtgatagtttgagtgaaagtgacagggtctgcggtggcagcgaggagagaagaga

SEQ ID NO: 13157 - DNA, 149 bp, Homo sapiens; identical to SEQ ID NO: 6702
  chr1:29585852-29586001
  hyper

SEQ ID NO: 13158 - DNA, 80 bp, Homo sapiens; identical to SEQ ID NO: 6706
  chr1:31863055-31863135
  hypo

SEQ ID NO: 13159 - DNA, 130 bp, Homo sapiens; identical to SEQ ID NO: 6707
  chr1:32410105-32410235
  hyper

SEQ ID NO: 13160 - DNA, 644 bp, Homo sapiens; identical to SEQ ID NO: 6712
  chr1:3328625-3329269
  hypo

SEQ ID NO: 13161 - DNA, 91 bp, Homo sapiens
  chr1:33772615-33772706
  hyper
gaacaccgccgcgtggttatagaagtcgccctggccccacgccatcgcggcggccgaatgcgcgtcgcgttcgaagggcagcagccacgac

SEQ ID NO: 13162 - DNA, 83 bp, Homo sapiens
  chr1:36640437-36640520
  hypo
cggtgccccccactggctcctgccgggcccggccctaatgccgtgtcttttccccctccaggtgggagcaggtgctccgtgtc

SEQ ID NO: 13163 - DNA, 79 bp, Homo sapiens
  chr1:37721195-37721274
  hyper
gagggggctgtccgtggtgctgaacccaagctatcctaggattgccaggcagtacgaatgaacgctggttaatggaacc

SEQ ID NO: 13164 - DNA, 144 bp, Homo sapiens
  chr1:38953154-38953298
  hypo
agatttcacagacaccctctccaagtacaaacacacactcacacacacacagacacatgcgcgcgcctactccatcgcgggctgcgtggtgtgtgcagtcagcagccgtgtggagaatgtgaaatcacacctcgctctccttcc

SEQ ID NO: 13165 - DNA, 183 bp, Homo sapiens
  chr1:40149563-40149746
  binary
cgaagcgctggcctcgggaacagcagcgcccgcgcggccccgcacctcgatgatctccagcatctccaggcgcgtgatgcgcccgtcgccgtccaggtcgtacatctcaaaggcccagttgagcttctgctcgaagctgccgcgggaggtgaccgacagggcgcagatgaactcccggaagtc

SEQ ID NO: 13166 - DNA, 100 bp, Homo sapiens
  chr1:41485949-41486049
  hypo
cgggctgccagctccttgaggattaggtgctcctccagggccgtctgcaggcgccaggggagggaggccagggtgtccctgtggacagtcacctgcacca

SEQ ID NO: 13167 - DNA, 91 bp, Homo sapiens
  chr1:41486164-41486255
  hypo
ggggttcagatggcccacatagagagtgtgcgccgagggagcctcctcgaggtcagagtactccgtcagggactgctctgcgggtagctcc

SEQ ID NO: 13168 - DNA, 38 bp, Homo sapiens
  chr1:43842627-43842665
  hypo
cgtagagtatgccatgacaaaacaaagtctgaaggact

SEQ ID NO: 13169 - DNA, 60 bp, Homo sapiens; identical to SEQ ID NO: 6369
  chr1:44351032-44351092
  hypo

SEQ ID NO: 13170 - DNA, 141 bp, Homo sapiens; identical to SEQ ID NO: 10139
  chr1:44717932-44718073
  hypo

SEQ ID NO: 13171 - DNA, 138 bp, Homo sapiens; identical to SEQ ID NO: 10140
  chr1:44718164-44718302
  hypo

SEQ ID NO: 13172 - DNA, 560 bp, Homo sapiens
  chr1:45106068-45106628
  hypo
cgcctgttgggaggggtgaggagaggtggcaaggagcaaggcaccttctgtcccccgtggcaactgatgggatttaatcgccttttggaacacaattgttaagctaggacagagggagtgcaggcagaaggagcaagtatcaatggttttaaacggcgtctgtctctctgcgtctctcctgacgtgaggcagtgaaacgcgttatcgaggaggcccggaaagtggctaagtgcgtttgacacacgccaactccctgcctccacactggataattgcattgtcaactgttcagcgaggtggcaggtgacactgcaggccgattgattgtcccgcatcgcagctccccagactgtcagctccccaatcgatggcgtttacacaagacaccgtaactgcatctgtaactaattccagtgtaaaactcgccggaagctgctgcccctgccctccgtgttggagagcacaggcccctggagggccccgagacgtttcctttctccctgggctctggttttgttgggagcagcaggtgaggaaatcgatgcctccttttttgtggt

SEQ ID NO: 13173 - DNA, 339 bp, Homo sapiens; identical to SEQ ID NO: 12086
  chr1:4673912-4674251
  hypo

SEQ ID NO: 13174 - DNA, 255 bp, Homo sapiens; identical to SEQ ID NO: 7727
  chr1:46957171-46957426
  hyper

SEQ ID NO: 13175 - DNA, 114 bp, Homo sapiens; identical to SEQ ID NO: 5882
  chr1:50893877-50893991
  hyper

SEQ ID NO: 13176 - DNA, 121 bp, Homo sapiens; identical to SEQ ID NO: 7733
  chr1:6046277-6046398
  hypo

SEQ ID NO: 13177 - DNA, 266 bp, Homo sapiens
  chr1:61519704-61519970
  hyper
cgcggtcgtgaccttgccgagcagctcctgcgcctcaggctcggtccctgcacccgccctcactccagtccctctcagggcctgcagtggaagatccccgtggtccgggtgggtggcgatggagagcagaattgaatttatttgctctcaaattcccctaaaagctctgaaactgggaaagtccgcgggctgccagggacagtaatcactgtgtccccacccggacgcaggaggtctcgggaggagctccgaggccaagcgcccgc

SEQ ID NO: 13178 - DNA, 67 bp, Homo sapiens
  chr1:6171947-6172014
  hypo
gaaacaagccaaggtgagcagggtgagaagtgccccagctctcacgcacaggcaggcttggagagcc

SEQ ID NO: 13179 - DNA, 101 bp, Homo sapiens
  chr1:6281676-6281777
  hypo
cggctaacgcagcttcctggtttaggaacattttccccggtcgtatcaatcccccaggttggtaaatgaacagaagggatgaataaagcctactttttagg

SEQ ID NO: 13180 - DNA, 75 bp, Homo sapiens
  chr1:6281825-6281900
  hypo
ttctgtcctgctaagaggctcaccccgcgacctcttctgtaaactgccactcagcagcggcctgcaagccctcac

SEQ ID NO: 13181 - DNA, 56 bp, Homo sapiens
  chr1:6302010-6302066
  hyper
tgcttaagaaacactaagctatccacgtgagcgtccccccgcccccggcccgatgc

SEQ ID NO: 13182 - DNA, 103 bp, Homo sapiens; identical to SEQ ID NO: 10930
  chr1:63791875-63791978
  hyper

SEQ ID NO: 13183 - DNA, 164 bp, Homo sapiens; identical to SEQ ID NO: 10931
  chr1:63792016-63792180
  hyper

SEQ ID NO: 13184 - DNA, 50 bp, Homo sapiens; identical to SEQ ID NO: 10932
  chr1:63792231-63792281
  hyper

SEQ ID NO: 13185 - DNA, 260 bp, Homo sapiens; identical to SEQ ID NO: 5884
  chr1:63793072-63793332
  hyper

SEQ ID NO: 13186 - DNA, 220 bp, Homo sapiens; identical to SEQ ID NO: 7736
  chr1:6479997-6480217
  hyper

SEQ ID NO: 13187 - DNA, 47 bp, Homo sapiens
  chr1:75603159-75603206
  hyper
aatgtgtgacacatcctggtctggacgcgccggatgtgtgtggatgc

SEQ ID NO: 13188 - DNA, 78 bp, Homo sapiens; identical to SEQ ID NO: 7741
  chr1:85773944-85774022
  hyper

SEQ ID NO: 13189 - DNA, 112 bp, Homo sapiens; identical to SEQ ID NO: 7742
  chr1:85774083-85774195
  hyper

SEQ ID NO: 13190 - DNA, 438 bp, Homo sapiens
  chr1:90308855-90309293
  binary
cggcggaggaagcgtggagtccattgatctaggtacttgtggggaggggagaacccgagcagcagctgcaaacggaagggctgtgagcgagcgggcgggcgggtggctggcagcgaggccaccagcagggggggcccgggccgaggccgcgccacctcggcaccacgcgggcagccggtgcggcggggtcgccacggccaggggagcgctgggtgcccaccatggcagttatgcaagcggtgaccccctggtcttgcctccccgccgccctgcactccttcctccccgctgccgacacttggatctctctagctctttctctcccctgtgttttcaaacaggaagtgcacggctgtctataacgtgctgccgggtctcaggatggaggagtgaagtctcctgtcgccgtggttccagcctccggagctcgcccaagcc

SEQ ID NO: 13191 - DNA, 115 bp, Homo sapiens
  chr1:90309490-90309605
  hyper
actctggctgctgccgccctgggttcgggccggcggaaggccctgggcgtgcgctgcggagccgcctgcgaggactccactagggcgctttccaggctggactgccccgggctgc

SEQ ID NO: 13192 - DNA, 171 bp, Homo sapiens; identical to SEQ ID NO: 7743
  chr1:91170461-91170632
  hyper

SEQ ID NO: 13193 - DNA, 61 bp, Homo sapiens; identical to SEQ ID NO: 7744
  chr1:91185065-91185126
  hyper

SEQ ID NO: 13194 - DNA, 142 bp, Homo sapiens; identical to SEQ ID NO: 7746
  chr1:92949466-92949608
  hyper

SEQ ID NO: 13195 - DNA, 228 bp, Homo sapiens; identical to SEQ ID NO: 5892
  chr1:92950207-92950435
  hyper

SEQ ID NO: 13196 - DNA, 148 bp, Homo sapiens; identical to SEQ ID NO: 7750
  chr1:95428574-95428722
  hyper

SEQ ID NO: 13197 - DNA, 124 bp, Homo sapiens; identical to SEQ ID NO: 5893
  chr10:100994695-100994819
  hyper

SEQ ID NO: 13198 - DNA, 313 bp, Homo sapiens
  chr10:101279860-101280173
  hyper
cggggccaatcagcagccataaatcttagagaaccttcaccgttttacaagggagttcgcaggggctgcccttctccctcacgcggtctatttacaacgccgaaatctccgtgttaatggacctaggataatggtgtttactttaccgcgataaagcgctgggcttcctgggggagcggctgtaaaatgtcctggaggtagggatggaacgggcgccgtaaaagcgggcgctggaagggcgggggcaccaggttctccttcaggccggcgcccccgccctccaccctctaggccaggctgagcagcccaggcc

SEQ ID NO: 13199 - DNA, 34 bp, Homo sapiens; identical to SEQ ID NO: 7753
  chr10:102995986-102996020
  hyper

SEQ ID NO: 13200 - DNA, 50 bp, Homo sapiens
  chr10:1120729-1120779
  hypo
cgtgttaggtttaactttatacatctcagatttgccagtctgaagtagtt

SEQ ID NO: 13201 - DNA, 101 bp, Homo sapiens; identical to SEQ ID NO: 8932
  chr10:11207330-11207431
  hyper

SEQ ID NO: 13202 - DNA, 156 bp, Homo sapiens; identical to SEQ ID NO: 10158
  chr10:11207724-11207880
  hyper

SEQ ID NO: 13203 - DNA, 233 bp, Homo sapiens
  chr10:112403994-112404227
  binary
ggcccccgcccccgcgtggccggccgggacgagctggagcagcgggaggaggcggcgccgccaggactgcctcctccccgcccctcgcgtctcctccccgcgccaccgggaaggacaaggggactgggcacggggaccccggccagtgagcgcccgtggcccgggaccgcccctcccttgagctctctcgccgcgatcccgggcgggtctcgccccgcatggtgctggcagca

SEQ ID NO: 13204 - DNA, 654 bp, Homo sapiens
  chr10:114708972-114709626
  hyper
cggggatttcatttcagacccccttcgagaaacactgtagcccaactgatcccaggggttggtgaactttcagttttattttccctgacggtgttaacgcccaaacttttcacctcctaagtcaaaaaggactttgactctagctcatttcctactacctccaacgtcagttaaaaaaaaaaaaaaaaaagcaaaacaccactctacatttaaaagaatcatatatttttccttaaggatacttttaatgtttctgacatttagcatttgttttttgcataaaaagtcgttttggcatatccatcctagtgggacttaacatttcatgaaatgattcactactaataaacaaaaaagggaggagggaggcctcatgggttaatagtttctttcattgtagatgaccaggaactttgaccagccccttcacttccccaagctctctgaaagtggagggttgatctttccttttgaccacttttgtcgcatcccgtctaagggtggctgatttcactgctgaattaaccaccaagcacccccccaccccctcccccagccaccactttctcaaatactacccttccttttccccctcccttaagacttatttctaatatttctaaagtgcactgttttgggcctctccccatcccc

SEQ ID NO: 13205 - DNA, 240 bp, Homo sapiens; identical to SEQ ID NO: 6731
  chr10:118891774-118892014
  hyper

SEQ ID NO: 13206 - DNA, 93 bp, Homo sapiens
  chr10:119807131-119807224
  hypo
tgtggtggactgtgcaaatcatgtggagaccatgccccaaacacgggtttcgagtttcaggggataatacatgtgcctttcctagcacaatgc

SEQ ID NO: 13207 - DNA, 138 bp, Homo sapiens; identical to SEQ ID NO: 7761
  chr10:122708760-122708898
  hyper

SEQ ID NO: 13208 - DNA, 368 bp, Homo sapiens
  chr10:124899187-124899555
  hyper
cttaggcttatctagtttgcgaaattgagcaaagcgacagcgcgcgaggcgagataccagagacagctggtatttccgaacactggtctgcagcctcccgttctgttcttaaacctgggttccttcgggagccgagagcttttgggcagggcatccctgggcattcgtcagctggttaacttcggtgggctctggttggagggaagaagggagtgagttcagagtttagctgcagccgtaggccgattgccaagtcaggctaggaaaggctgggccacaagaggacaaccccagggacagccagctcttgggacagcggctcccactaccaggagaggggaacttcctcaggtcttgcagagctgaga

SEQ ID NO: 13209 - DNA, 185 bp, Homo sapiens
  chr10:126332086-126332271
  hypo
gccgcccaaacagagccccgggagggccagcgggggggtgcagggctgggaggacagtgccaattaaaaatctgagcctgtgggcctttctctctcttgttttcattcctacagctacattgtgtccactggcagcggattccaaaggcgaagaggctgcattcacggcccggagctttagagcc

SEQ ID NO: 13210 - DNA, 142 bp, Homo sapiens
  chr10:127451818-127451960
  hypo
cggtaggcattgctggtcccttacctgtctctttttcttttttaaccctagcaataacatcgaagatgacacaattctcaaaaccaacaagcacatttactcccagcttttgagagcaactgcaaataaaaccgcgactctt

SEQ ID NO: 13211 - DNA, 38 bp, Homo sapiens
  chr10:127452067-127452105
  hypo
ctgtcagtgccttcaacacggagccggtttgttcattc

SEQ ID NO: 13212 - DNA, 243 bp, Homo sapiens
  chr10:134699406-134699649
  hypo
ggctgtggaagagcaggccgtagagcgcagcacggagcgccaggtcgtcctcagcccctgggagggagaaggaggggtgtccttggagccgcctgatccctcatcaaaggcgccctcggacctcccagactaagctgcccatcacagtgcccctgaggtggaaccgcggctacagaggtgcccaggccagcgcatgccccgcagggctgaagtgagctgtggacctgcatggcccctccagcc

SEQ ID NO: 13213 - DNA, 231 bp, Homo sapiens; identical to SEQ ID NO: 6735
  chr10:134733835-134734066
  hypo

SEQ ID NO: 13214 - DNA, 114 bp, Homo sapiens
  chr10:134787917-134788031
  hypo
cgctgcctgtgagatgaggccagatcctcgccgcccgcacctgcctctccccaactcgccctgcgcgggacaggtggacgccgcccacacctacctctcccccactcaccctgc

SEQ ID NO: 13215 - DNA, 51 bp, Homo sapiens
  chr10:134793882-134793933
  hypo
cgagtgcctggtgagagcccggtgagtgcccggtgagtgcctggtgagtgc

SEQ ID NO: 13216 - DNA, 144 bp, Homo sapiens
  chr10:134793968-134794112
  hypo
gtgagtgcccagcgagtgcccggtgaatgcccagcgagtgcccagtgagtgcccggtgaatgcccagtgagtgcccagagagtgcccagcgagtgcccggtgaatgcccagcgagtgcccggtgagtgcccgcaagtgcccaac

SEQ ID NO: 13217 - DNA, 203 bp, Homo sapiens; identical to SEQ ID NO: 6376
  chr10:134794144-134794347
  hypo

SEQ ID NO: 13218 - DNA, 558 bp, Homo sapiens
  chr10:134941895-134942453
  hypo
ggtcacctgtgtgtacttcctgggcacctacgtgcagctgcggcgccacccagggcgcaggtacgagctgcgcacacagcccgaggagcagcggcggctggcgacacccgagggcggccgtgggatccggccaggcaccccacccgcacacgatgcccccggcgcctccgtgctgcagaacgagcactcattccaggcacagctgcgcgccgccgccttcacgctgttcctgttcacggccacgtgggccttcggggcgctggcggtgtcacagggccacttcctggacatggtcttcagctgcctgtacggcgccttctgcgtgaccctgggactcttcgtgctcatccaccactgcgccaagcgtgaggacgtgtggcagtgctggtgggcatgctgcccgccccgcaaggacgcccaccccgcacttgacgccaacggggccgcgctgggccgcgccgcctgcctgcactcgccgggactgggccagccacggggcttcgcgcacccaccgggcccctgcaagatgaccaacctgcaggccgcgcagggccacgc

SEQ ID NO: 13219 - DNA, 201 bp, Homo sapiens
  chr10:135030373-135030574
  hypo
cgcctgcggcagcacgatgaacctcgagggactcaggctcagggaaacgagccagtcgcgaagcacggacagtggacggctccacgtacacgaggcgcctggaggcgcaagattcacggagacaaagtagcagggtgggcgccgggggctgggagtggggcacggggagctcgtgttgaacggggaccgagtttccgtttg

SEQ ID NO: 13220 - DNA, 107 bp, Homo sapiens
  chr10:135229000-135229107
  hypo
cgtggtgtctgatgagccgtctgcggtcatgtttgtttgttttagtgcttgagaggggttggtctccctttttcacctgcgtggtgtctgatgagccgtctgtggtc

SEQ ID NO: 13221 - DNA, 102 bp, Homo sapiens
  chr10:1506151-1506253
  hypo
cgcaaacgcaaacccccataagacgcctggacacacctgcgagagtggctgcaataaaacaaccacagagaagctgatgacagtgaatgctgacaaggatgt

SEQ ID NO: 13222 - DNA, 52 bp, Homo sapiens
  chr10:1558541-1558593
  hypo
cggctttccctgctccctttcccgaggtgcagctggattcagagcttcccac

SEQ ID NO: 13223 - DNA, 46 bp, Homo sapiens
  chr10:1558836-1558882
  hypo
taagggctagaaagaaaacattttcctcgagctgcatgcgaatatc

SEQ ID NO: 13224 - DNA, 313 bp, Homo sapiens
  chr10:16716483-16716796
  hypo
cgaatattcagagagtccactaggtgccaggcaatgtctgaagctcctgaggacagagcagtgtacaaaactacgtctcccgctcttgcaggagactccattctaagcataagagagacgataaaattggaggcaggagtgggtggtgggcgatggggtccactttagatacagtgataatggaaaaaactttgctgagatggcatttgaactgaaacttgaatgagataagacagcaagcctaaggtcatttagaaactgaatataagtgtaaagccggccagaagctgtaatcccagcactgtgggaggcc

SEQ ID NO: 13225 - DNA, 150 bp, Homo sapiens
  chr10:22869787-22869937
  hypo
cgatggtaatgtctcgctttacagactcgacaggtgcagtgctctaatgcggcccgggaggctcctttgtagaatggatgagtctgccaactcctgtctgcagacactttgaagtcccaaggcagatgaggctgcaaatggaccaaacac

SEQ ID NO: 13226 - DNA, 223 bp, Homo sapiens; identical to SEQ ID NO: 6743
  chr10:24863037-24863260
  hypo

SEQ ID NO: 13227 - DNA, 297 bp, Homo sapiens
  chr10:3678862-3679159
  hypo
agatcagccctagaatgaaagcaaaaccgagatgatggacggcgcaggctccttggagatccgtgttcatgacacctgcaaggactgtgggcaagctgccaaccagacatgaaattagcaattagttgcatattcttccgagtgggtcatgtgctccttgcaatccaggcacatctctttccatctggcaggggtgtggcgtatttccagagggcttcaatgcgcaatccggcagcgcactgctgggagccccggcacaggacgcctgaccacactgacatacacatattcgcgtcc

SEQ ID NO: 13228 - DNA, 398 bp, Homo sapiens; identical to SEQ ID NO: 6745
  chr10:43892377-43892775
  hyper

SEQ ID NO: 13229 - DNA, 171 bp, Homo sapiens; identical to SEQ ID NO: 6746
  chr10:43892970-43893141
  hyper

SEQ ID NO: 13230 - DNA, 54 bp, Homo sapiens
  chr10:50815014-50815068
  hyper
cgttttctcctacaggattggacaggaagttctctgttgcctgcaagttatgct

SEQ ID NO: 13231 - DNA, 159 bp, Homo sapiens
  chr10:50815344-50815503
  hyper
tgaaagttagagaatgagggagtttagtgtctttggagcctccttagggagccagcccaggaccttcctcctcccatgggtcttgatctgctcctcacccctacactgccagcgtgcggccaccttggagatggagcagcaggagcacgacgccgtgcc

SEQ ID NO: 13232 - DNA, 86 bp, Homo sapiens; identical to SEQ ID NO: 10980
  chr10:72015065-72015151
  hyper

SEQ ID NO: 13233 - DNA, 147 bp, Homo sapiens; identical to SEQ ID NO: 7784
  chr10:73846836-73846983
  hyper

SEQ ID NO: 13234 - DNA, 164 bp, Homo sapiens; identical to SEQ ID NO: 7785
  chr10:73847427-73847591
  hyper

SEQ ID NO: 13235 - DNA, 62 bp, Homo sapiens; identical to SEQ ID NO: 7786
  chr10:74100516-74100578
  hypo

SEQ ID NO: 13236 - DNA, 75 bp, Homo sapiens
  chr10:76784656-76784731
  hypo
cgactcaaccatttaatttctcatgagctcttatgtgttatgtttggaattaatttcagaggccttttgtactaa

SEQ ID NO: 13237 - DNA, 52 bp, Homo sapiens; identical to SEQ ID NO: 12156
  chr10:8097537-8097589
  binary

SEQ ID NO: 13238 - DNA, 142 bp, Homo sapiens; identical to SEQ ID NO: 6386
  chr10:851108-851250
  hypo

SEQ ID NO: 13239 - DNA, 175 bp, Homo sapiens; identical to SEQ ID NO: 6387
  chr10:851504-851679
  hypo

SEQ ID NO: 13240 - DNA, 428 bp, Homo sapiens
  chr10:94450942-94451370
  hyper
cgccagttaggaagggaagcagggacacatagggcatatattccagaacttcggggcttgtcccctcaatgtgcggcctaacaaataagccgcccgtggtccgcgctgtgggtgacccttggcgccttcgaggtctggagccctagggtaaataaggaaacggggcgcctctagagttttaaatgaactctgttattggaagcttcagtagggaccctgaaaacaattaacgtcttaattagcattttaatgtctccattattacggcgcgggctctagctcagccctttaccttaccttctcaccgttaacaggggagggggattgtatttttagttcatctttttatgtttttgagttgttatcctgtctgtctgattccagcctcgagggtttgatgatgcggcccgagcctggctgtggtcgcc

SEQ ID NO: 13241 - DNA, 371 bp, Homo sapiens
  chr10:99206760-99207131
  hypo
cggccttttcccggttttttaaactgcagcttccagtcctgcggtccgatcctcttcgcggcccctcatccccacttcagtaagctttctctggttgaaaaagccgaactctggttgtgtgggcccgtcatcaaaagataagcagccccaaaataaagttgttactctttttcttctcagcgtgttagcccagaagggaggtctgcacatgaataaaatgctactctttattgatgttgggtatctcctacttgagattgcaaacatcctgagagcagcgtctttgtccagatgacattcgccacgactttgatctcagttcacctgacttctgatggctttgccgtctgtccttccctgtcccctcagtc

SEQ ID NO: 13242 - DNA, 43 bp, Homo sapiens
  chr11:1008033-1008076
  hypo
cgtggacccgaccgtggaggggggcgcgcaggtgcagcaggtg

SEQ ID NO: 13243 - DNA, 293 bp, Homo sapiens
  chr11:1008125-1008418
  hypo
ttcagttcaggtaagagccgcctgtgcgccccgggccaaggggtgtgtgggcgcctgagctgtgtgcctgggctccatgactgtgcctccgtgtccttcctgaggggacccggggcgtgcgggtgctcacggtgcatggatgcggcctgagctattgctgcccccggctctgcagagcgcaggaaacaaggggaggcggagccctgggctccgggacggcaggtggcagctcccacatggggccttgctaggatctttctgggcaccatggggcccacctcatggggtggcag

SEQ ID NO: 13244 - DNA, 152 bp, Homo sapiens; identical to SEQ ID NO: 6770
  chr11:121023460-121023612
  hypo

SEQ ID NO: 13245 - DNA, 67 bp, Homo sapiens
  chr11:124387399-124387466
  hypo
cgccgtggccctccccgctgtgtacttcattccctctacagcccttgatcaagtcggtaaaaccggc

SEQ ID NO: 13246 - DNA, 66 bp, Homo sapiens
  chr11:1254274-1254340
  hypo
cgctacgcctacgtggtggatgcctgccagcccacttgccgcggcctgagtgaggccgacgtcacc

SEQ ID NO: 13247 - DNA, 70 bp, Homo sapiens
  chr11:1254423-1254493
  hypo
ccaggagtgcccctgctacgctcacggcaccgtgctggctcctggagaggtggtgcacgacgagggcgcc

SEQ ID NO: 13248 - DNA, 182 bp, Homo sapiens
  chr11:129993371-129993553
  hypo
cggccaccgggcctccaggctccgtccagtctcaggcctcccccagcccatcccccagctcgccagcctgtagcattttgaagcatttgacgtcactgcctctgtcctgctgacactctgaccattttcacacagctgtctgctcccaggaggcgatgacggggccctgccgggccgtgatg

SEQ ID NO: 13249 - DNA, 176 bp, Homo sapiens
  chr11:129993759-129993935
  hypo
gtggtgtccctgcccactcgggtgtttgctgtcggtcgtcttcccctcatctttgtgctttctagatctaggctttgctctcctgccggcagtggtaagctcagttctcgtgtcctgtgctcaccgtgtgtctggtggtgcttggtggtgatggtgcgtacccaccttggtatagc

SEQ ID NO: 13250 - DNA, 38 bp, Homo sapiens
  chr11:130089793-130089831
  hypo
cgtctgtttgccaggccttgttctaggaaccaggagta

SEQ ID NO: 13251 - DNA, 112 bp, Homo sapiens
  chr11:130089881-130089993
  hypo
ggaagggacgcgcatggcaagctcctgcctcgcatccccacgcaccgagagccctcctgcctgcacgtctaccacaggcggaaggagggaaccttccagaggcagagggtac

SEQ ID NO: 13252 - DNA, 67 bp, Homo sapiens; identical to SEQ ID NO: 7807
  chr11:130785392-130785459
  hypo

SEQ ID NO: 13253 - DNA, 161 bp, Homo sapiens; identical to SEQ ID NO: 5733
  chr11:133939437-133939598
  binary

SEQ ID NO: 13254 - DNA, 138 bp, Homo sapiens
  chr11:134011321-134011459
  hypo
cggtacatggacagggagagagggaggagaggggggagaggggctggagaggttgcctggccaggcagactgcactgaatgccaggcgagcatgggcggtatctgagggcccgctgtgaggctctcaggggaggtgcc

SEQ ID NO: 13255 - DNA, 259 bp, Homo sapiens
  chr11:134458219-134458478
  hypo
cgagtgctgcatctgcgatgtgaacctgtgctggattccctgctgagagctgcacctgtgatgtgaacctgtgctggattccgtgccgagagctgcacctgcgatgtgaacctgtgctggattccctgctgagagctgcacctgcgatgtgaacctgtgctggattccctgccacgtgctgcacctgcgatgtgaacctctgctggattccctgccgagtgctgcacctgcgatgtgaacctgtgctggattccctgcc

SEQ ID NO: 13256 - DNA, 70 bp, Homo sapiens
  chr11:18512439-18512509
  hypo
atcatcatagcgctcagcctgctcagtgagttggctttctgtaccagctcacttttatccagtcgttccc

SEQ ID NO: 13257 - DNA, 87 bp, Homo sapiens
  chr11:20230312-20230399
  hyper
cgcattcccactccagacgccgcagttttgaggcgcaatggggcctttggcctgatcatactcaggaatccttttaggccctttggc

SEQ ID NO: 13258 - DNA, 53 bp, Homo sapiens
  chr11:20230510-20230563
  hyper
tttcagcacaaaaggtttgaggtgcattgctttctttggcgtaaagcccttgc

SEQ ID NO: 13259 - DNA, 306 bp, Homo sapiens
  chr11:2278017-2278323
  hypo
cgtgtgcgtttctgcgtgtgtgtgtgtgtgtgtgtccatgcatgtgtctctatgaatatatgtgctgtatttgcatgtgtgtgtgtgtctatgtgtgcatatgtctgtgtctgtgtgtctttctgtgtgtgcggtctgtgtctgtgggtctacacgtgtatatgtgcatgtgtctgtgtgtgtcgcagtgtgttactgtgtctgcgcgtgtgtgcatgcatatgtgcaggagggagggagggctcaggccttagcagagtccctggggctctgggagtggagggcagtgaggctgaggctggtgca

SEQ ID NO: 13260 - DNA, 98 bp, Homo sapiens
  chr11:2278839-2278937
  hypo
tggaatgcctccctgcctgcacagcaggagtgtttggctgaggtctgcagccccgacacaggtcacctcccacgcctatgggggcttcagaaagtccc

SEQ ID NO: 13261 - DNA, 225 bp, Homo sapiens
  chr11:31821778-31822003
  hyper
tgctcaccttttcatgtgcaccctactcatagtcacataatttgtcaattacagcaaaaagcaacaggatacaattatgttaacctcgcagtctgtcagtgcgttatcttgtcacacttctacaagggggctctccctgcattctaatgtcaaatttgaatagtgcaccacgcagctcgttcttatgcacacagtgctgcccacaaacacacacacgcacccacc

SEQ ID NO: 13262 - DNA, 100 bp, Homo sapiens
  chr11:31842276-31842376
  hyper
agtaggggaagtagtggagagagagaaagatagagaaatcggctcttggcttgaactgttgttcttgtcgaaggtatgttttcccctcccggcctctgtc

SEQ ID NO: 13263 - DNA, 48 bp, Homo sapiens; identical to SEQ ID NO: 6777
  chr11:34535248-34535296
  hypo

SEQ ID NO: 13264 - DNA, 117 bp, Homo sapiens
  chr11:46920042-46920159
  hypo
ggcctctttggctccacaagccttctccttagttcaagcccaacctaattccatttccccactcactgcagttgcgctcatcagactggtcatcacagtccgcgtcaccatcgcagc

SEQ ID NO: 13265 - DNA, 106 bp, Homo sapiens; identical to SEQ ID NO: 6390
  chr11:47359237-47359343
  hypo

SEQ ID NO: 13266 - DNA, 52 bp, Homo sapiens
  chr11:57056851-57056903
  hyper
cgaaaacaaagggctgggtcaataaatctgccgcagcagccgtggatcagtg

SEQ ID NO: 13267 - DNA, 46 bp, Homo sapiens; identical to SEQ ID NO: 7820
  chr11:57235458-57235504
  hypo

SEQ ID NO: 13268 - DNA, 198 bp, Homo sapiens
  chr11:60714083-60714281
  hypo
cgggggcttggtgatgaagacgggggtggcaaagaggaagatgaaaaatgccaggcccacacagcccacagggatgctgtagcccagcaggaagctgatgttctgctgaataaacgccaccaccagcagcgacagcacagcacccaggttgatgctccagtaaaaccagttgaagaagcggcgggtggcgtcgcggcc

SEQ ID NO: 13269 - DNA, 211 bp, Homo sapiens
  chr11:63849170-63849381
  hypo
cgtgtggctgaagcctgttcctgcttgggggttggccacacagcatcccaactccaggtccagagccgagcctgacagccctcctccactgcctcctggagctgccggagagaggtccgggtccgttctccccaattcacagacatgaagactgaggccgtggttccagtggctgctcggtggtggggctggagcttggcagcatcctgca

SEQ ID NO: 13270 - DNA, 61 bp, Homo sapiens
  chr11:63849634-63849695
  hypo
agccaggagcaggccagagccaggagcaggcgcgaaacatcccttaaatattggtgctctc

SEQ ID NO: 13271 - DNA, 298 bp, Homo sapiens
  chr11:64977165-64977463
  hypo
cggctgtgggctgactgtacatggcttttgctgcttctcctcacccagccccaagtcgacttgccggctcggcggccatctccccttctgcacagttgcccactctcccatgactggtctaagtgatggaatttccttcttaacggccacccagcgtgatggcaatgggaagctgggcctggtggagttcaacatcctgtggaaccgcatccggaattacctggtaggttgtccccactcacctcagtcatgcaggtgcgggccgggcaggtgggaagggccgggtgactcagcctgg

SEQ ID NO: 13272 - DNA, 52 bp, Homo sapiens
  chr11:64977534-64977586
  hypo
cctacgagatgcggatggccattgagtcggcaggtgagactccaaggctgac

SEQ ID NO: 13273 - DNA, 198 bp, Homo sapiens
  chr11:65185728-65185926
  hyper
agtgagaagccccctcctgagggtcctcccctgcctcgccttcctggtgggcggcctgctttccagcacatgtggtggaccagcccacattaggtcaaagtgttaaaaatagccggagggctcagtatgtttgggggtggggggggaatgggaggtgctgagggagggcccaggacagttgggaaggaggaagggccc

SEQ ID NO: 13274 - DNA, 141 bp, Homo sapiens; identical to SEQ ID NO: 7831
  chr11:66513646-66513787
  hypo

SEQ ID NO: 13275 - DNA, 285 bp, Homo sapiens
  chr11:66633455-66633740
  hypo
cgcccagcagtctcttcccctgggaggcgccgcccctcctctgggcactgcctgcctccgtgtactctatgtccacttcagagcccacatgcgggtcctccctaactgccgggctgtggcaacttggcactgcagccccaggcaccaggcagaacctgtgcacaggtgagctggcatctccctctgctcgagctccgcccacctcaatgcggccggtgtccggctggaagctgcgcgcggggtcctcggtggtgacccggcactggatggcacacccgttgatgc

SEQ ID NO: 13276 - DNA, 185 bp, Homo sapiens
  chr11:66633833-66634018
  hypo
gggggaggggggaaaggacgggagaaagggggaaacatgaggcgggggatagacgaggggcaccgcagccagtggggcgtccacacacagtgcgactcctgcccataggctctgggccagcctgaacagccggttcctcccaaccagtggctccaccagcccctgccctgctcccgccgggagcc

SEQ ID NO: 13277 - DNA, 113 bp, Homo sapiens
  chr11:67781084-67781197
  hypo
cgtgatgtcatttaatcctcacaatgacaccaggtgccattagcatccccatttcacagatgaggaaaccgaggcagagaaggtgagtgatttgcccaaggtcccacaaccag

SEQ ID NO: 13278 - DNA, 133 bp, Homo sapiens; identical to SEQ ID NO: 10214
  chr11:67895663-67895796
  binary

SEQ ID NO: 13279 - DNA, 270 bp, Homo sapiens
  chr11:68095765-68096035
  hyper
cgatgataaatttggcatgtctttattattattattttttcaacacttaaagaaaataaaagctggtacaaaggtatgtttgtttctgaaatgtgtttccttccccagatgttcttttctgccagttctaaaatgcgttctgagctcggtcctccagtttcctccctgtgaggaagaacaatgagacctttgtaaccacacaggggaaacggccgcttccctctgcagtgggcatgggggaggggctgggacgtcccacctcctcccacc

SEQ ID NO: 13280 - DNA, 139 bp, Homo sapiens
  chr11:72475539-72475678
  hypo
cgcaggtgaagaaactgaggcaggccgggtcgtgggggtcaggtaagtgtccacaggcctccctagcctggcctggctcgtgccctttccatagcccccagcaggcagcactgctgcgctaagcagaagaaattacacc

SEQ ID NO: 13281 - DNA, 317 bp, Homo sapiens
  chr11:72475723-72476040
  hypo
attctaagaggcttggggagggacaggtggcggggtagggctgagtctctggagagcaccaggtgggcgggccggtaccaggaacccccagctattaggccctggctgagtgagtgtccacaccagatgttgccgtcaggtgttgcctggtaggccatcttggctgcccccggagaaactccccctggaaacaggaacccaaggggtgttgctccaccaaggagccatgctgggcttgagtacgtttaaagcctggtgacagcagggaccccgacatgcagtggtattacatttgagaaaacaggccagccaggtgc

SEQ ID NO: 13282 - DNA, 111 bp, Homo sapiens
  chr11:763192-763303
  hypo
cgccctcacctgccccgccctcacctgcccccgccctcacccgcccccgccctcacccatccccgccctcaccgtccccgccctcacccgcccccgccctcacctgtcccc

SEQ ID NO: 13283 - DNA, 62 bp, Homo sapiens
  chr11:764018-764080
  hypo
gatccctcccacctgtggggcgagctcatcttgggagacatgagggtgaagtagacctcaac

SEQ ID NO: 13284 - DNA, 366 bp, Homo sapiens
  chr11:78534109-78534475
  hypo
cgtctcccagcggtgccccgtgagcacgtgccagagagatcactgagacacacaccaagtactggggagacagccaagtgccgcgctcttcaagagcactaggcccttctgaggagaggcgagcgctcccgggaaatgcctcgtcttccctccacccttaacccacagcagctccagtgcaatgccccggcctcagcgcctgcccagcggtggcccaggtgcaagagacaacacctcgccccgttcccactgcccacagctgattggacccggctgagcacctgacccaagccaagctcaggcacaggctgaacggtgctctgtgacacagcccactgggcagaggttccgggccaataagagccc

SEQ ID NO: 13285 - DNA, 103 bp, Homo sapiens
  chr11:850444-850547
  hypo
cggagtcgctgccccggccaggcgttgggtgcggttgtggggatggtcccgggaggacccaagaccgctgctccggctaggagcctggactgggcgggtgggg

SEQ ID NO: 13286 - DNA, 258 bp, Homo sapiens; identical to SEQ ID NO: 11019
  chr11:859386-859644
  hypo

SEQ ID NO: 13287 - DNA, 513 bp, Homo sapiens; identical to SEQ ID NO: 6394
  chr11:993208-993721
  hypo

SEQ ID NO: 13288 - DNA, 215 bp, Homo sapiens
  chr12:105392597-105392812
  hypo
cgtgtgcttacatgggtagcagtggccactcagggtaagggggcgggctgctggtctccatgcatagtttcacaccactggcagtgttgacacaggggcagggtactggtggctgcgggactggtgccaaatgtgcgcacgtttatgctggctgcagtggctgcacagggcgcagggcaggtccactggtcactgtgcctagttttgcagctggt

SEQ ID NO: 13289 - DNA, 50 bp, Homo sapiens
  chr12:105392841-105392891
  hypo
gtggtctccgtacctgcagatactccagtggcagtggcagcatggtggtc

SEQ ID NO: 13290 - DNA, 153 bp, Homo sapiens
  chr12:109488367-109488520
  hypo
cggagaaagcgattgaaagggagggaaaaatcttgctggctctaatgctttataaactgtgctgtccaatacggtagctgctggccacttggggctattgagcacatgaaaagtgggtactccaaactgagaggtacttagtaccaaaaaaca

SEQ ID NO: 13291 - DNA, 368 bp, Homo sapiens
  chr12:109873137-109873505
  hypo
cgccgtttcagttctcgtttggatcagattctgttgttcactactagggtgtaaaaccgtgagagaccagccccttgaaattaaagtttacaaaacttcacttgtctgcgtgtctgatgttggaaagtttagcttcaaagcctgcagcctgggtgtttgctgggaatggtcaatgagaaaagttagatggggaaatgcaaaaagtaaaaaatcaaaactgcggggggagggagcgtctcttttgaaatgtaaccggtctgtcaagaactacgcttgagtcatttgagggcctgctgtgcgccaggtgaacactaagtcctttaaaccatggtctcattctgttctgagaacagacctgtaagggaggt

SEQ ID NO: 13292 - DNA, 52 bp, Homo sapiens; identical to SEQ ID NO: 10238
  chr12:111725459-111725511
  hypo

SEQ ID NO: 13293 - DNA, 63 bp, Homo sapiens; identical to SEQ ID NO: 10239
  chr12:111725564-111725627
  hypo

SEQ ID NO: 13294 - DNA, 321 bp, Homo sapiens; identical to SEQ ID NO: 7856
  chr12:111844290-111844611
  binary

SEQ ID NO: 13295 - DNA, 99 bp, Homo sapiens; identical to SEQ ID NO: 7857
  chr12:111844690-111844789
  hyper

SEQ ID NO: 13296 - DNA, 183 bp, Homo sapiens
  chr12:112610173-112610356
  hypo
cggggcctccaggcagcggcctgggcattccccgcagccgtgcatttctgtatctgctccctggctttgttgtcactggcattaaaaaaggccccagactaattaggccacagtcctggctccctgccttgccctccctgtttcgtcagcccactcttccttgcacacctggcgcatagcagg

SEQ ID NO: 13297 - DNA, 215 bp, Homo sapiens
  chr12:112610446-112610661
  hypo
gggaggggataggcccagggccacatactcaggagacaggccactctggggtcagcagcatccgcggggtccaggtacacctcatggggatggagccgtgcgggtgtgatggcgaggtggcggcatagctggttgatgtactgcacaagtgccacgtccatctccagggtccactttcttgaggccttctgtgcatgtcggacatcgatgcatgc

SEQ ID NO: 13298 - DNA, 292 bp, Homo sapiens; identical to SEQ ID NO: 6398
  chr12:113725566-113725858
  hypo

SEQ ID NO: 13299 - DNA, 555 bp, Homo sapiens
  chr12:114273212-114273767
  hypo
cgtgagcacctgacggcaggctgtggtactcgaggaggaccaggggaggggcatgacaagggaatcacgaaaaggagaggtgtgggggaaaagctgcatctttgacactctggctgggaggcagtgggggccggggtcagtgggggctgccgggaccagggctctagcaagcaggctccttccctgctcctcgcgaggctgggagggtgactgtttgctggaggccggcgacccatggggacagccacccgtctgtgccggaagagcacttctccgggcactctgctcatagatctcccgccccagcccaacctggcttgggcaggcgggggaaggccccactgccagccactcgccatgctggtcatgtctgcgctcccagctctggaggtgaaaggtagagacgctaaccacagcccatcagtcctccccagctggaataagacaacatgggaagcagagccacgctcccagccaaataaaagcctgtttgcccagcctccctggctgtgagtgctgtaaaacacagggttctgcgcacggatttcttccata

SEQ ID NO: 13300 - DNA, 134 bp, Homo sapiens
  chr12:114273850-114273984
  hypo
ttgtaacacgctcaggaagaaaaggacacagccagcggcggactttcctctttcttccctccttgctctctcttttcaaactcccacatgcaaggcagtgaagaatagcacttcacctaccacggggctgctgc

SEQ ID NO: 13301 - DNA, 73 bp, Homo sapiens; identical to SEQ ID NO: 7860
  chr12:114290596-114290669
  hypo

SEQ ID NO: 13302 - DNA, 58 bp, Homo sapiens; identical to SEQ ID NO: 7864
  chr12:116946548-116946606
  hyper

SEQ ID NO: 13303 - DNA, 397 bp, Homo sapiens; identical to SEQ ID NO: 6399
  chr12:120147746-120148143
  hypo

SEQ ID NO: 13304 - DNA, 336 bp, Homo sapiens
  chr12:120148396-120148732
  hypo
agtttcagcagggagtttccaagcagtttcttttcataggtgaaagaaaagaaaaacagaagacatcgtgaggctgatctgtttatgaccaaaccatccagagaaaccaagagaaggttaaggccaagttattcctggaaatgctcagaaacgcacatatgctcttagctcagcccgtattttgatctgagctccaaatgcaaaatgcgagtgctattggtatctctggggcagctgttaattagcatctgagttataatttggctgggatgcagaaataagggagggtagtagacatggaaagctattctgtaataagaaataagctgaagctaa

SEQ ID NO: 13305 - DNA, 704 bp, Homo sapiens; identical to SEQ ID NO: 6401
  chr12:121687598-121688302
  hypo

SEQ ID NO: 13306 - DNA, 239 bp, Homo sapiens; identical to SEQ ID NO: 6402
  chr12:121688331-121688570
  hypo

SEQ ID NO: 13307 - DNA, 751 bp, Homo sapiens
  chr12:122231543-122232294
  binary
cggagcccgcagcactggcggcggcgcgccgggcactagcggagccaagaggtcgggggcggggcggggccggaaccagccccgcccactcggagcagcgccgcctccgccaggcagcctcccggccgacctcccagcctcagtttcctttctgctaaggtctcagccctgggtgtgggtattcagctctcagtcccagggatactgcagcaccggaaaaacggggctcagctgcgagcaaagctcccacccccaacccaccgccaccctccgcgcgtcacgtcgcgcccctcgccggcgagacccgatcgtggctgcccagcgactccaggtgcccctgattagcaggctccgccttcggcagggaccctctgattggctggcgcggccagacagggtctcccggattggctggctgtgcctccgcaccgggttcgagaagcccccggcctccagctccgggaagagcccctcaactttgcactgccccagcggtgtggcttggcacatgtccgcctctggcctcagcttccccacaggaggtagcggcggtggcaccagggaagatgctgacgcgagagtcatgtctgcccacctcgcctgggccagggacgccagcgtgcacgcgggttcggggtgagggactgggctccgcttacccgcaccccgaccctgggctgcagggtggacgtctgacgccctctgccgggcaatcgcctcggcgccggccgctccgggcgcaggttggccc

SEQ ID NO: 13308 - DNA, 251 bp, Homo sapiens
  chr12:124879871-124880122
  hypo
cgccccacccccgctccctcctgccatcgcctggaacacacagccattagcagccaccctgagcagtaattgtccagattgctgtaattcacggcagacgaacatgctgctgctcacgacattattacaaatgtcactgagcagggcctccgcgtgcacggcccccaggggacgctcactgccgtctccatgggcaggacccaggatgagctcactgtcatcactgaggacccaaccttgagatggtggga

SEQ ID NO: 13309 - DNA, 139 bp, Homo sapiens
  chr12:125102589-125102728
  hypo
gtctgtgcctatgcagttctgactgcgtttgtgccccttcgattcacgcccattgcacaaatggggacactgaggcaatgagaggcgaggagacttgcccaagacctgcaggctccgtcaggggcagggtcaccggtgc

SEQ ID NO: 13310 - DNA, 122 bp, Homo sapiens
  chr12:128247754-128247876
  hypo
cgtgcttaaacggagacagttagggacaaactgggacgatttgcgcaccttaattcgatgagctgatgccgtcatatcaacgcacactttacctagcatgcataagcctagagtcagcagtc

SEQ ID NO: 13311 - DNA, 150 bp, Homo sapiens; identical to SEQ ID NO: 12207
  chr12:128899867-128900017
  hypo

SEQ ID NO: 13312 - DNA, 237 bp, Homo sapiens; identical to SEQ ID NO: 6818
  chr12:131271740-131271977
  hypo

SEQ ID NO: 13313 - DNA, 299 bp, Homo sapiens; identical to SEQ ID NO: 6819
  chr12:131272032-131272331
  hypo

SEQ ID NO: 13314 - DNA, 212 bp, Homo sapiens; identical to SEQ ID NO: 6820
  chr12:131272367-131272579
  hypo

SEQ ID NO: 13315 - DNA, 186 bp, Homo sapiens
  chr12:131418203-131418389
  hypo
cggggcgtccccacgtcagatccctggggtcaagcctgtccccaggatgactccccaggttttgacctgatcgctgcacccatgaggctcccggtgtccgggcgctcctcaggtccccgacacggaggcaggcttgggatgactgcaacctgctctcatgagtcacagcaggtgcctgtcgagacc

SEQ ID NO: 13316 - DNA, 62 bp, Homo sapiens
  chr12:131418430-131418492
  hypo
tgtggggtcaggacctccttcctccaggttctgccgtctgaggccgcagcctgctcctcccc

SEQ ID NO: 13317 - DNA, 504 bp, Homo sapiens
  chr12:131478681-131479185
  hypo
cgcttccgggctccgaagggaaggacccgcggggtgttgggtggaaagagcgggtatagacaagctggaaggtccttatgcatgtatgcacaggaccgggcgtgaggccccgagacagggcttggtatgcagtaagtgctttattaatacgaacactcttgtttttgttgagatgggctacaaggggtgactgtggcaggcggtgccttctatgcagttagcacttagtaaacactcacactccgggcactagtgccctgcctgtagctaaggtatgcagtcggggcttcatgcccacttggcactggcaccctcccctctagccgtggtacacagtcggcgctcaataaacacccactctgggcacgggcgccctcccgtctgactagccatgggtaccctgcagcatcctcaggaatgtgcagcagacacttagcaggctccctctgtgtttccgggtgtctagggaaggagggagtccgagtgaggataaattaattagac

SEQ ID NO: 13318 - DNA, 129 bp, Homo sapiens; identical to SEQ ID NO: 6823
  chr12:132222124-132222253
  hypo

SEQ ID NO: 13319 - DNA, 173 bp, Homo sapiens; identical to SEQ ID NO: 10242
  chr12:132423854-132424027
  hypo

SEQ ID NO: 13320 - DNA, 160 bp, Homo sapiens; identical to SEQ ID NO: 9018
  chr12:132643296-132643456
  hypo

SEQ ID NO: 13321 - DNA, 321 bp, Homo sapiens; identical to SEQ ID NO: 9019
  chr12:132643525-132643846
  hypo

SEQ ID NO: 13322 - DNA, 92 bp, Homo sapiens; identical to SEQ ID NO: 9020
  chr12:132644008-132644100
  hypo

SEQ ID NO: 13323 - DNA, 425 bp, Homo sapiens; identical to SEQ ID NO: 6824
  chr12:132665953-132666378
  hypo

SEQ ID NO: 13324 - DNA, 86 bp, Homo sapiens; identical to SEQ ID NO: 6825
  chr12:132666502-132666588
  hypo

SEQ ID NO: 13325 - DNA, 107 bp, Homo sapiens; identical to SEQ ID NO: 5930
  chr12:14928211-14928318
  hyper

SEQ ID NO: 13326 - DNA, 454 bp, Homo sapiens; identical to SEQ ID NO: 6830
  chr12:1943616-1944070
  hypo

SEQ ID NO: 13327 - DNA, 155 bp, Homo sapiens; identical to SEQ ID NO: 11058
  chr12:1992067-1992222
  hypo

SEQ ID NO: 13328 - DNA, 669 bp, Homo sapiens
  chr12:29301988-29302657
  hyper
cgaatggaagcgcggggcgggcctgcgcgcgcggccgccctgcccacgatgctgtcgcccccgcgacctgtagggccttcgctggcccctcaccctcctcccgccccgggctgaggctgccgccggtttcgcgcccagtgccgaggcagcggcggagccggggaaggtcggagggagggtggtttcctcccgccccacacccagtctccgagccggatatatagagtgtcacgtttgggagccgaaagactggagccgtttccttgtggctggagcgcttcccgtagcctcggggaaggagcaggatttagaggaccactagttggaccccatcctcgtgctggaggaacaggtattccagggtccccagccctggcgctcgcagagcccacgcgctccaaaagcagagaccggactgggggtggcccaggagggagggctcggctgggttcgcagggcggggcggttcccggcgggacctcgaggagggtgggtgtgaggccgggtgggaggagagaagcatttgcggaggctctgccccctgaagctgcccccggctgcaccccaatcgtcaccggccgtttacgcgcggttggcgtcggcggagcccgccaaggtggggcgcgcgggggttgcaaagggcagaaagccgggaaggacccagcaagg

SEQ ID NO: 13329 - DNA, 669 bp, Homo sapiens; identical to SEQ ID NO: 13328
  chr12:29301988-29302657
  hypo

SEQ ID NO: 13330 - DNA, 86 bp, Homo sapiens
  chr12:29302688-29302774
  binary
ggacccgggaagagaggcgcggggccgagtcccacccaggcctcctgggcccttggggctattcctggagagagcgcgaaaatgcc

SEQ ID NO: 13331 - DNA, 84 bp, Homo sapiens; identical to SEQ ID NO: 6832
  chr12:29373882-29373966
  hypo

SEQ ID NO: 13332 - DNA, 86 bp, Homo sapiens; identical to SEQ ID NO: 5742
  chr12:4377809-4377895
  binary

SEQ ID NO: 13333 - DNA, 245 bp, Homo sapiens; identical to SEQ ID NO: 5743
  chr12:4378558-4378803
  binary

SEQ ID NO: 13334 - DNA, 247 bp, Homo sapiens; identical to SEQ ID NO: 7891
  chr12:4379920-4380167
  hyper

SEQ ID NO: 13335 - DNA, 202 bp, Homo sapiens; identical to SEQ ID NO: 6837
  chr12:4381232-4381434
  hyper

SEQ ID NO: 13336 - DNA, 167 bp, Homo sapiens; identical to SEQ ID NO: 9032
  chr12:4382439-4382606
  hyper

SEQ ID NO: 13337 - DNA, 113 bp, Homo sapiens
  chr12:4734902-4735015
  hypo
agaggagagagaagagaaggttgtagggatggtctttttaattcccgcacttcagtgtgaagcatctggggtaagtgtgcgtgttctccagactcaaaccctccctttggcgc

SEQ ID NO: 13338 - DNA, 54 bp, Homo sapiens; identical to SEQ ID NO: 6843
  chr12:52401605-52401659
  hyper

SEQ ID NO: 13339 - DNA, 295 bp, Homo sapiens
  chr12:53685907-53686202
  hypo
cgactggggaagacgtcaacaaagaagggcagagaaacctgagaagataggagagggtcctaggaatggctcagacatggaaaggggctgagattgttagagcttgggcctcttggtgagacaagcatcctaatcgccagtgtctcctcctcagtatggggcctcgccagtgctgagtcaaggggtggatccacgaagtaccttctatgtcctgaaccctcacaataacctgtcaagcacagaggagcaatttcgagccaatttcagcaggtcaggggcgcgaagacaagaagac

SEQ ID NO: 13340 - DNA, 114 bp, Homo sapiens
  chr12:54122178-54122292
  hypo
cgttccggtttttatttaggagaggtgaaagattgacacgtctcccacaccccaagtcacgttatagacttgggcatcctgtcccccctctcgctattctccatccctgtagtc

SEQ ID NO: 13341 - DNA, 394 bp, Homo sapiens
  chr12:54378327-54378721
  hyper
tttagtcctgtttggtattccttaactttttttcccctttctctgctcatcagatccccccaaacccccccccccacaaacctcaccccactcccatccccaaggtaagaagtgggagtcgggtccggggatatggaaaggggagatgaagagtggggagaagtacctgattcgtgtctcgaccttttaatttgaatttgactgttttgagccccgggttgcctcgctctctccctctctcccgcatttcccccctctccgcccccttctccccaggagttacaggctggttactggataaacaaaccccactcttcctagaacccccacccccacccccacccccctccacccctctacctcccctgccgcccggggggcgcttcctttgttc

SEQ ID NO: 13342 - DNA, 104 bp, Homo sapiens
  chr12:54393256-54393360
  binary
cgctccccttccctccttccctccctgtatctcagcttccccagtcccctcccaccctccctccctcaccgcccctgctgctcctgaaagaaatacatacatac

SEQ ID NO: 13343 - DNA, 189 bp, Homo sapiens; identical to SEQ ID NO: 7916
  chr12:57619157-57619346
  hyper

SEQ ID NO: 13344 - DNA, 185 bp, Homo sapiens
  chr12:58284105-58284290
  hypo
cgagtgctgtgaacgttatgagagggccttgttgggaacacgtgctcctgggaatcagcccttccctctgtcctgttcccactcctccccgacgatgctcctgctcagaacccactcctcacctcagtgaagcaacgcagcgggcaccctgtggacaaagctggatattggctctgaataaaagc

SEQ ID NO: 13345 - DNA, 184 bp, Homo sapiens; identical to SEQ ID NO: 5933
  chr12:63026256-63026440
  hyper

SEQ ID NO: 13346 - DNA, 267 bp, Homo sapiens; identical to SEQ ID NO: 7917
  chr12:6344323-6344590
  hypo

SEQ ID NO: 13347 - DNA, 95 bp, Homo sapiens
  chr12:6445038-6445133
  hyper
ccacacacagaaacacaacagcagcccccgcaggtggaggcgtgtgcccctgctcagaggacaacaaccttcccctgcccgcaccagccaacacc

SEQ ID NO: 13348 - DNA, 73 bp, Homo sapiens
  chr12:6483496-6483569
  hypo
cgcaggcaccagggaaggggcagagggactaaccgacctgtagggattgagggtgcagatggtcactgcgggg

SEQ ID NO: 13349 - DNA, 204 bp, Homo sapiens
  chr12:66122570-66122774
  hyper
aggagctgtcaggctaatctgaggacatttagggaaagccaataaactgtcacgaacttaaaacaagtgaggtttctcgtggtttggtcgaaattttaacacttctcctctcctacccttcacctcttctcctcaaaacacttttttttcttttacaataactgtaaatgccagctctaaatttccctccaatctgggaaagtc

SEQ ID NO: 13350 - DNA, 88 bp, Homo sapiens
  chr12:85674884-85674972
  hyper
acgcgttgaatgtttgttaaacactaaagcacactaaatagcttcgggcaaaccatccccggcctaatcactcattcccagattctac

SEQ ID NO: 13351 - DNA, 117 bp, Homo sapiens; identical to SEQ ID NO: 11072
  chr12:94145777-94145894
  hypo

SEQ ID NO: 13352 - DNA, 72 bp, Homo sapiens
  chr13:100650019-100650091
  hyper
ctagggtgggccgaggacagagcgcctcaggcatcgtcggcttcccacggctgcggcccaggcccagcctgc

SEQ ID NO: 13353 - DNA, 141 bp, Homo sapiens
  chr13:112786406-112786547
  hypo
cgaacccaagcagtgaggagcgggcagggatagagcctggtgcggaggaagccgaggatgggcaggagcagcccacagagcacccggcgaacggaggcatgtgcccagcgtggatgactccaagagcaacagcactccctc

SEQ ID NO: 13354 - DNA, 35 bp, Homo sapiens
  chr13:113350364-113350399
  hypo
cgtctcggctgacggctgcgtggccttggcaagtt

SEQ ID NO: 13355 - DNA, 647 bp, Homo sapiens
  chr13:113350643-113351290
  hypo
gtggagagtgggtgaccttgccctgctctcccggggagagcggtggtcactggtgggaacgcccctgccacgcccagcagcctttctgcctctgcgcttgcctcctccggttggagcgagtgacccgttctgccgaagtccagtcccgtgtgtgctgcggccccgtctctctccctctctgagtgacactgtctgccctgctgcttgccgtcccgctgttggcaccgctttagaccccatatttcccagcggtcaccgtgctcatttttggcttccagctaccgtttttcttaggttaccccgcgtagctggcccgtccttccttctcctgtctcttctgtgcctaccgcggggggttcccttaccaaggtctccatcacccccaggcccacctccctcgggcccctctctgcccttgccctccacctcagcgactccgtggggcttttgtgatcccagctgcagttagcgagcgcccctgtgtgctcagagacacgccagtgagccgggaaggacagagacccaagtcccatccctctggggcccccttggaatgggggaggcgaacaggaaaccaccacagtgagtgttggggtgccccgcaggcgacggtgctgagaaaaagagagtggggttgggggcagtgc

SEQ ID NO: 13356 - DNA, 234 bp, Homo sapiens; identical to SEQ ID NO: 7922
  chr13:113400167-113400401
  hypo

SEQ ID NO: 13357 - DNA, 101 bp, Homo sapiens; identical to SEQ ID NO: 7923
  chr13:113400733-113400834
  hypo

SEQ ID NO: 13358 - DNA, 134 bp, Homo sapiens
  chr13:113424750-113424884
  hypo
cgttaccatgagtgtgacgagagtggggagaaccagtggagcttctgatcctgtcccagcagatgccagtggctcggaccaaggaggacagagggatgggcgtgcccacgtgaagcctcaccccagaccccaga

SEQ ID NO: 13359 - DNA, 68 bp, Homo sapiens
  chr13:113424935-113425003
  hypo
ggcggtggaaacgtggtccacctgcggagggcctgtttgcgtttattacacccgagcaaggcccgcac

SEQ ID NO: 13360 - DNA, 288 bp, Homo sapiens; identical to SEQ ID NO: 7925
  chr13:113667314-113667602
  hypo

SEQ ID NO: 13361 - DNA, 45 bp, Homo sapiens; identical to SEQ ID NO: 6858
  chr13:113985425-113985470
  hypo

SEQ ID NO: 13362 - DNA, 131 bp, Homo sapiens
  chr13:114107410-114107541
  hypo
cggtatcaggtaacaccatccgctgaaggaccgcactgccttcaaagctctcggaggcttactgggagaactcgagcagccagtgttccctccagcccgcacaccggagcgcggtgggcccagcctacctg

SEQ ID NO: 13363 - DNA, 70 bp, Homo sapiens
  chr13:114108040-114108110
  hypo
ggggctcctctcgctgtccctggaaggagtgcgcacacttccccgtgtgtggcgtggggtgatgcgggag

SEQ ID NO: 13364 - DNA, 39 bp, Homo sapiens; identical to SEQ ID NO: 6859
  chr13:114188365-114188404
  hypo

SEQ ID NO: 13365 - DNA, 162 bp, Homo sapiens
  chr13:114271763-114271925
  hypo
cgctcacctgcagaaccgttcacctgcagagcccttcacctgcagaaccgttcacctgcagagcccttcacctgcagaaccattcacctgcagagccgctcacctgcagaacccttcacctgcagagccgctcacctgcagagcccttcacctgcagaaccc

SEQ ID NO: 13366 - DNA, 932 bp, Homo sapiens
  chr13:114283923-114284855
  hypo
cgactgggctaacatgcgtgatctgagcacgtgtaaggtaggctggctaagctgtgatgtgtggtaggagaggtggatgacgtgcatttcgacttagggtattttcagctcatgcgggtttatcgggatgttccttgtaagttcctcgttgtaagtcagttcctcgttgtaagtccactctttgtgagtaggtttgctcctgcctggaggacagcggcacggtgacggcatctgttttggggccaagatccagtgccttgcgtggtcctgggattcctggggaagggagtggacccatgaggtgggttagaatcgtgtgtgggattctccagccccctgtacctgtgcgtgtggtatgcgcggagccagccagcactgcctggcgtggagctggcgggttctcagtctgacatcaactcccggagaatggcatctgctgaactcaacgtaggaagccgtgcggggccagcgcgctctcaggcagcctgagtggcagggtccttttgtcagctgtttggatctcccacgtggcccagtgccccagcagcacacacacacacacacacacacacacgcgtattgaacaaaacaagtttcacaggacatttatccacgcccaggagatttatcttttgtatggcttcattttgcagaaaattcacttgtttgatttcatggcctggtgatccacagaaggccgcactctgatgagtctctgatcatcggagagatgagtgtcaatgaaaagatcagtccttgaaatgtttttcttctccggagctgacaggtgatctggcctagggataattggaaagtgtccccgtcagctgctcccagggccaccgcaggtgatgcatttatccccgtaagaaggggagctgggggggcccagcttagagtagctcagggcatcggccacatgaagccccccc

SEQ ID NO: 13367 - DNA, 206 bp, Homo sapiens
  chr13:114302352-114302558
  hypo
gccgcagctgtgtttccacctcatctccagcttgagtggcagccagcggcgccacctgcacacgagccccctccattcgagaagcacagactatgagtgtggccacgcgtcccatgacgtgaactcacgtctgcgccgagacctttgccggcggttttttactgacggagtaagcactggagatgcttggtacagcgtcttccatc

SEQ ID NO: 13368 - DNA, 115 bp, Homo sapiens
  chr13:114302660-114302775
  hypo
cggacttcgacgcgccagtcgcttgtgcttggggccctttgggtactaacagccacactgctgagcatgtgaaatcaggacccaggctgcacaccgccgtcggggtgagacgccc

SEQ ID NO: 13369 - DNA, 284 bp, Homo sapiens
  chr13:114303512-114303796
  hypo
cgcgagcaggtccttcagatgtgggcgcttctctggagttcgcacactgacaacaccgttgctccaaaccactttggggatgatttggcagggaactgacgggcaaggtaagcccaaccaggagggtgtccttgagcgaccccgcaggcgtgcccaggacccctgcgcaaaccgtttcacttctcaatcttgagtttgaactccactttcccttcatacgggtcgtggggattgttgaaggtcacgtgctccgccatgaccttgcacacgatggcgacctcagc

SEQ ID NO: 13370 - DNA, 308 bp, Homo sapiens
  chr13:114751053-114751361
  hypo
ccgtccagggcaggcacgggagtggcactcactggcttccatatttcgtcttcttgaacttgtccctcttatactgggcgtgctcctgctccaaagccccaaccccagcgatgacttgctttagcgtcttgtaggtctcctgggggtcgtcaatgacgaacgtcgaatactcctcctgctccgggccgtcatacacagatttgctcccacaggcctctgtggagggcggaggggtcagcgcagggcaggagcccaggccaccggccccgtctccacacagctgcgtcgctgcaggccccacccacagt

SEQ ID NO: 13371 - DNA, 261 bp, Homo sapiens; identical to SEQ ID NO: 6865
  chr13:20392445-20392706
  hypo

SEQ ID NO: 13372 - DNA, 168 bp, Homo sapiens; identical to SEQ ID NO: 12278
  chr13:20735265-20735433
  binary

SEQ ID NO: 13373 - DNA, 306 bp, Homo sapiens; identical to SEQ ID NO: 5936
  chr13:28491488-28491794
  hyper

SEQ ID NO: 13374 - DNA, 38 bp, Homo sapiens; identical to SEQ ID NO: 6869
  chr13:28527202-28527240
  hyper

SEQ ID NO: 13375 - DNA, 462 bp, Homo sapiens; identical to SEQ ID NO: 6870
  chr13:28527384-28527846
  hyper

SEQ ID NO: 13376 - DNA, 469 bp, Homo sapiens
  chr13:28534792-28535261
  hyper
cgttagaagcgcggtggcctcacttgccggagagggtcttggttttgcgcctttttccgtggcccgggaggcttgccaggcgctcgcagcagcgagccgggtgcttgcatctcagagagcagccgagctcccttccctggccccgtacccgcgtgcaaggggaccgagccccgggaaggggaagaacttgtaatcgcttgcagcgggacaatgtcgacttttgaacctctaaccactaagcaaacaacccatgtgctcttgctccactgtccaaacagggtttattgacaggcgtttcacggcaacgcatagcaaccccggcggctagggggcgggcctgtgggcgcggccggggcgcggggagacctgcggggcaccggggctcagaccggccctgacccaggacccctgacccaggacccctcgcccagcggacccggacacggcttcctcctctgcccggcacccc

SEQ ID NO: 13377 - DNA, 37 bp, Homo sapiens
  chr13:28535573-28535610
  hyper
aaaattttaaaggctgcagcccggtccccagtggatc

SEQ ID NO: 13378 - DNA, 58 bp, Homo sapiens; identical to SEQ ID NO: 9079
  chr13:28540416-28540474
  hyper

SEQ ID NO: 13379 - DNA, 112 bp, Homo sapiens; identical to SEQ ID NO: 9080
  chr13:28541283-28541395
  hyper

SEQ ID NO: 13380 - DNA, 116 bp, Homo sapiens
  chr13:32983242-32983358
  hypo
cgccacagtaataaacacatcggagcgcgcatgtcaagtagtccttgagatactgcggtgaattaagagggagatgaaagacaaaactaaagtaaaatgcttccattttcaaaaac

SEQ ID NO: 13381 - DNA, 81 bp, Homo sapiens
  chr13:50701609-50701690
  hyper
cgcgcttttcgcccctactttgttcttgcgcagtcttcccagctgcggagaggagggagcgaaagcaaaacgaaagcaccc

SEQ ID NO: 13382 - DNA, 280 bp, Homo sapiens
  chr13:50704210-50704490
  hyper
cgcggctggatgggcgtggggaatgttgccagtgttcggtcccgactcaggggagaaacggggtgggggtgtggggatcccggaaagggccggaaaagccgggagcaccgggaggtgtgaggccagagtttctgctactgggggctcttccagggaagacgctggcgggaataggatggggctggcagctggggagcctcgcggtggctattgcacgtctcggcccccctggacagggttatgtcaggagagcgccctggcaccgagctctggccgctgg

SEQ ID NO: 13383 - DNA, 248 bp, Homo sapiens
  chr13:50704800-50705048
  hyper
ccatttccccttccagaagaaaactgaaggcgtattcctccaaaggaaggctgcagtcaggcgccacacagaacacaggcagtcctctccggccgatctcgggctcgcctctcccagggccgtagggagcatcttttctgagcagccccgggagggcagctccgggcgctctccgcgctgggccctgccgcggccggtgcgttacatcaggaaacgcttggtccggttttctgtctgctagtcaaaac

SEQ ID NO: 13384 - DNA, 82 bp, Homo sapiens; identical to SEQ ID NO: 6873
  chr13:52493838-52493920
  hypo

SEQ ID NO: 13385 - DNA, 304 bp, Homo sapiens
  chr13:58207012-58207316
  hyper
cgacaaggagatctgcatgatcaaggtagagatccaggacatcaacgacaacgcgccctccttctcctcggaccagatcgaaatggacatctcggagaacgctgctccgggcacccgcttccccctcaccagcgcacatgaccccgacgccggcgagaatgggctccgcacctacctgctcacgcgcgacgatcacggcctctttggactggacgttaagtcccgcggcgacggcaccaagttcccagaactggtcatccagaaggctctggaccgcgagcaacagaatcaccatacgctcgtg

SEQ ID NO: 13386 - DNA, 174 bp, Homo sapiens
  chr13:72438297-72438471
  hyper
cgcgcgcgcgcacatacacacacacacacacacacacacacacacacacaacatttaccccaaaatagtcgaaggttcaaagcccaaacacacccaagtcccatggaaggaagaatacctaaacacggaaaagaatttctggctaggtcaggataggacatttgctggactgga

SEQ ID NO: 13387 - DNA, 207 bp, Homo sapiens
  chr13:72438563-72438770
  hyper
atgtccttctggtctccttgctacacttcctttccacctaagtttccctatctctgcgggagcacacactaactccgctccttctctcaatcttcaaacttatttggagggtaccgaagtttctgcgcaaattttgcgcgcagttcccacgtgcccgcttcaggtcttcaactttccctattttctttctcccggaatctcactctg

SEQ ID NO: 13388 - DNA, 73 bp, Homo sapiens; identical to SEQ ID NO: 6878
  chr13:96409644-96409717
  hypo

SEQ ID NO: 13389 - DNA, 64 bp, Homo sapiens
  chr14:100613205-100613269
  binary
cggcaggtggtcgtagtactcgggcgcgatcttccgcacctgtagagaggagggcggggctcag

SEQ ID NO: 13390 - DNA, 206 bp, Homo sapiens; identical to SEQ ID NO: 7940
  chr14:100749240-100749446
  hypo

SEQ ID NO: 13391 - DNA, 137 bp, Homo sapiens; identical to SEQ ID NO: 7941
  chr14:100749475-100749612
  hypo

SEQ ID NO: 13392 - DNA, 63 bp, Homo sapiens
  chr14:101034173-101034236
  hyper
tcccccgccttccccagcgccctcacccccgacccggcccccgcgagccgcggcacgggagac

SEQ ID NO: 13393 - DNA, 265 bp, Homo sapiens
  chr14:102467362-102467627
  hypo
tatgagtttgttcagaggcttctgaaaggttacatgaaggtaggtggccagtatcgcacggtgatgagtgtccattagaaacgcacctgcacagatcactttgtttactttctccacagataaatatgctggtgattgaactgaaatccgaagcacttaaagaccgccattggaaacagctcatgaaaaggcttcacgttaattgggttgtttctgagctaacccttggccaaatctgggatgttgacttgcagaaaaatgaagc

SEQ ID NO: 13394 - DNA, 43 bp, Homo sapiens
  chr14:103686664-103686707
  hyper
cgcgctcccgggccgaccctctgcggcctctgctctgcgcagt

SEQ ID NO: 13395 - DNA, 37 bp, Homo sapiens
  chr14:103977769-103977806
  hypo
cgggacgctcacagcccgcccccaggacctgtggggg

SEQ ID NO: 13396 - DNA, 89 bp, Homo sapiens
  chr14:103977835-103977924
  hypo
ctccgcgtgcacatgggcctccttaccaccctggcagtctcctcctcttggaagttttaactattcaagactcaatggccaggcgcggc

SEQ ID NO: 13397 - DNA, 281 bp, Homo sapiens
  chr14:104194172-104194453
  hypo
cggcagtgcgcggagtgcgccctcgtgtccctcaaggaggcggagttctacgacaagcagctcaaagtgctcctgagcggtaaggacgggtgtcctgcacagtcccgcgcgctccgccagccggctcctcgtgtctgtggcgatgctgtgggctgtgcacggggcgttctgcttctctgacgttctctcgccctccctcccttccccgttttcttctggattcgtttagaagcggttatagagccttcccttcttttcagaggcggaatgtcgtctaaaat

SEQ ID NO: 13398 - DNA, 205 bp, Homo sapiens
  chr14:104194491-104194696
  hypo
aggggaggccctgggcccaggcagcaccttcctccttcccccgggtggaacccggcgccggcgctcgggcgtttgcaaccactgtggctcctcggaggggccggagacctttgcccaatagcacgatgcagacccggttttgagccatctctggggacctggtgtgggagaagggcattctccaggggcatagggtgtgcctccc

SEQ ID NO: 13399 - DNA, 90 bp, Homo sapiens
  chr14:104194750-104194840
  hypo
actgccgtcccagcctcctgtcccctgcctgcccgccgtggggtctgggaccacctgccttcctgcccacagctccatcctgtgtgaaac

SEQ ID NO: 13400 - DNA, 140 bp, Homo sapiens; identical to SEQ ID NO: 6893
  chr14:104641166-104641306
  hypo

SEQ ID NO: 13401 - DNA, 423 bp, Homo sapiens
  chr14:105689521-105689944
  hypo
cgtctcaaaaacaacaaaaaaagacatacacacttgcctttcacataacccagcaatttcactcctcagcaattgacccaaaaggaaatcaacgtccacacaaggacttgtacacgagtgttcacgagcgcatctgaaacagcctcaaacgtgcaatgtcctctaacagatgaatggctacacaccctcagcgtgctgaaggactaccgactgccacacaatacaaacgaacaaaccattgatgcgtgactcaacacacaccctcagcgtgctgaaggactaccgactgccacgccacaacacaaatgagcaaaccattgatgcgtgactcaacataattacactgtgaaaaaagccgaagggaaaaacatatactatgtgatcctactcctacggaattctacagaatacaactaatttatc

SEQ ID NO: 13402 - DNA, 174 bp, Homo sapiens; identical to SEQ ID NO: 7953
  chr14:105739056-105739230
  hypo

SEQ ID NO: 13403 - DNA, 113 bp, Homo sapiens; identical to SEQ ID NO: 5950
  chr14:21101056-21101169
  hyper

SEQ ID NO: 13404 - DNA, 377 bp, Homo sapiens; identical to SEQ ID NO: 11097
  chr14:23291965-23292342
  hyper

SEQ ID NO: 13405 - DNA, 266 bp, Homo sapiens; identical to SEQ ID NO: 9116
  chr14:29225768-29226034
  hyper

SEQ ID NO: 13406 - DNA, 100 bp, Homo sapiens
  chr14:37129247-37129347
  hyper
gtctgtgaggggggaggaggattccttcctggtcaagttgccgggcatgttcattccctcccgcaagcctaaggcagagtcataagctcccctacgatgc

SEQ ID NO: 13407 - DNA, 203 bp, Homo sapiens; identical to SEQ ID NO: 6902
  chr14:37135434-37135637
  hyper

SEQ ID NO: 13408 - DNA, 55 bp, Homo sapiens
  chr14:38072497-38072552
  hyper
cggattctggcaatcgtcagttgtaggaacaaagtctggagtagtggctggcatg

SEQ ID NO: 13409 - DNA, 53 bp, Homo sapiens; identical to SEQ ID NO: 7954
  chr14:38725469-38725522
  hyper

SEQ ID NO: 13410 - DNA, 77 bp, Homo sapiens; identical to SEQ ID NO: 11102
  chr14:50511831-50511908
  hyper

SEQ ID NO: 13411 - DNA, 260 bp, Homo sapiens; identical to SEQ ID NO: 7958
  chr14:52327346-52327606
  hyper

SEQ ID NO: 13412 - DNA, 315 bp, Homo sapiens; identical to SEQ ID NO: 5958
  chr14:52781114-52781429
  hyper

SEQ ID NO: 13413 - DNA, 80 bp, Homo sapiens; identical to SEQ ID NO: 5959
  chr14:52782046-52782126
  hyper

SEQ ID NO: 13414 - DNA, 297 bp, Homo sapiens; identical to SEQ ID NO: 7959
  chr14:55765714-55766011
  hypo

SEQ ID NO: 13415 - DNA, 55 bp, Homo sapiens; identical to SEQ ID NO: 7960
  chr14:55766084-55766139
  hypo

SEQ ID NO: 13416 - DNA, 144 bp, Homo sapiens
  chr14:57265912-57266056
  binary
cgtcatttcagtaccaagtatcaccattattgggcttattaacttcattaaaaccggtcttgactaggagtggagatcggaactctctggatgtctttaagccagtgttcgctccccgcctccttccctccctccgttgccttc

SEQ ID NO: 13417 - DNA, 98 bp, Homo sapiens
  chr14:59014477-59014575
  hypo
atgagcttctcctttgtgcaggtgggaaagcagtgccactctccgcttcacagatgccccctgccaagatgtcagtgatgctgccgtcagtgaacctc

SEQ ID NO: 13418 - DNA, 277 bp, Homo sapiens; identical to SEQ ID NO: 11105
  chr14:60974092-60974369
  binary

SEQ ID NO: 13419 - DNA, 110 bp, Homo sapiens; identical to SEQ ID NO: 11106
  chr14:60974415-60974525
  hyper

SEQ ID NO: 13420 - DNA, 134 bp, Homo sapiens; identical to SEQ ID NO: 12311
  chr14:60982999-60983133
  hyper

SEQ ID NO: 13421 - DNA, 167 bp, Homo sapiens; identical to SEQ ID NO: 6904
  chr14:61104864-61105031
  hyper

SEQ ID NO: 13422 - DNA, 116 bp, Homo sapiens
  chr14:61108996-61109112
  hyper
gcgggaagcgcggggcctgggaggcagggagcgctcacacctgcggtcgggcaggaggcgcaacgcgctgccagggcggctttatcctgccgccacagggcggggaccagcccggc

SEQ ID NO: 13423 - DNA, 241 bp, Homo sapiens
  chr14:61110268-61110509
  hyper
gattcagttaaactgcgacgcccagaaggtaaactggaggtcccttaacagctggttctcgaagatttcctcgagggaagaaaaaaatatggttagtttcccctaatgatctctctgaaatgattgccaaaaaaactcaaagcaatatccagctttctcgcctcctcctgctcgccccttttacccagactgagccgaggatggcggaaggaggcacattgtgcaatttcttattaaacac

SEQ ID NO: 13424 - DNA, 130 bp, Homo sapiens
  chr14:61943723-61943853
  hyper
tgtgacctctttgacgtcagtaactgtttcctgtttatttgaactccctgctcaccctgtagatgactttgtctgagaaaaataataaagcaacggtacttaggagaagttcaacactgctatctgttac

SEQ ID NO: 13425 - DNA, 536 bp, Homo sapiens; identical to SEQ ID NO: 5961
  chr14:65006776-65007312
  hyper

SEQ ID NO: 13426 - DNA, 100 bp, Homo sapiens
  chr14:65008577-65008677
  hyper
cgtgctggtgggcggctccactcgtatccccaagatccagaagctgctgcaggatttcttcaacggcaaggagctgaacaagagcatcaaccccgacgag

SEQ ID NO: 13427 - DNA, 218 bp, Homo sapiens
  chr14:65008720-65008938
  hyper
gcgacaaatcagagaatgtgcaggacctgctgctactcgacgtgaccccgttgtcgctgggcatcgagacagctggcggtgtcatgaccccactcatcaagaggaacaccacgatccccaccaagcagacgcagaccttcaccacctactcggacaaccagagcagcgtactggtgcaggtatacgagggcgaacgggccatgaccaaggacaataac

SEQ ID NO: 13428 - DNA, 163 bp, Homo sapiens
  chr14:65009279-65009442
  hyper
caagatcctcgacaagtgtcaggaggtgatcaactggctcgaccgaaaccagatggcagagaaagatgagtatgaacacaagcagaaagagctcgaaagagtttgcaaccccatcatcagcaaactttaccaaggtggtcctggcggcggcagcggcggcggc

SEQ ID NO: 13429 - DNA, 72 bp, Homo sapiens
  chr14:69245863-69245935
  hypo
cgtgggctcttagaagctatgacacctgtaccaatagaaaaatcatccattcagtaggtaagtgcctgctga

SEQ ID NO: 13430 - DNA, 139 bp, Homo sapiens
  chr14:73146636-73146775
  hypo
cgacgtgccttccctgcagaatcaggagcaagcctcagctggaggccactgccacagcctgctacctcggcctagcctttaatgagggctgcgggaggagggagaggcgggctggggagacaaggcgcctgcgaggagc

SEQ ID NO: 13431 - DNA, 100 bp, Homo sapiens
  chr14:73147150-73147250
  hypo
cggggaagcagacagtagggcccgctccccacaggaccctccaatcgtcagagccctcgacggcagagaactcgctctccccacaggccatcttgccacc

SEQ ID NO: 13432 - DNA, 48 bp, Homo sapiens
  chr14:73167899-73167947
  hypo
cacctctgaagccaccacccctgggaccagtcagccctgcctgtgcac

SEQ ID NO: 13433 - DNA, 148 bp, Homo sapiens; identical to SEQ ID NO: 6907
  chr14:73238412-73238560
  hypo

SEQ ID NO: 13434 - DNA, 85 bp, Homo sapiens
  chr14:74254318-74254403
  hyper
cgtttggtgttggggctaaaagggtcatgtcagaaagcagtgtgctctatgtgttcttaatgcctaaagtgggccttaaaacaag

SEQ ID NO: 13435 - DNA, 242 bp, Homo sapiens
  chr14:74708533-74708775
  hyper
agcctcagtttcctcgtctgcaaaatggagtggtaggcgatgtagactggacggtcccaccagccgtagctggagtagggtggactgcatcggggtacagactagaaagggttttgttttgttttgttttgttttgtttttgtctttaaatggaaattacttgcacaaagttaaaactcagtagatgccgacaggtatatcttgaaaagtaacctacccttctcccacccccgccctcattc

SEQ ID NO: 13436 - DNA, 67 bp, Homo sapiens
  chr14:89657793-89657860
  hypo
ttcccttgcagattactgcctctgtgtccgccaaacccaatgactaatgatgggggacaaggggctc

SEQ ID NO: 13437 - DNA, 166 bp, Homo sapiens
  chr14:89895069-89895235
  hypo
cgcagcagacgtcagagagacctcagcgcaggggtccaagcacctggccaaggcaccctgcgcaggcctccacgccccacgagtgcctgcagaggctacctgaggaccaaggtgggcatgccacggtgtcctggacttctggatggaggccagtcccagggagtga

SEQ ID NO: 13438 - DNA, 486 bp, Homo sapiens; identical to SEQ ID NO: 9138
  chr14:90085312-90085798
  binary

SEQ ID NO: 13439 - DNA, 153 bp, Homo sapiens
  chr14:90754255-90754408
  hypo
cgtgacggcttctcagcattcccgtgatctgacagccaccacccatgcacacagaaacaacattcatactccccagaagcacacccaggcgacagccaccaacccccctcctgagaggcgccgctactttgtgtctcgcttgcctttcaatcc

SEQ ID NO: 13440 - DNA, 136 bp, Homo sapiens
  chr14:90871545-90871681
  hypo
cgtgcagaaaaatgggtgaaggataaaccgttgagacgtggccccactggtaggatggtcctcttgtacttcgtgtgctccgacccatggtgacgatgacacaccctggtggcatgcccgtgtatgttggtttagc

SEQ ID NO: 13441 - DNA, 98 bp, Homo sapiens
  chr14:91691066-91691164
  hypo
cggagtggcgtctcgggcatcgtgggcatggaggtggatgggctgcccttccacaacacccacgccgagatgatccagaagctggtggacgtcaccac

SEQ ID NO: 13442 - DNA, 160 bp, Homo sapiens; identical to SEQ ID NO: 6920
  chr14:93154728-93154888
  hypo

SEQ ID NO: 13443 - DNA, 70 bp, Homo sapiens
  chr14:94603670-94603740
  hypo
gtcatcgttaagtcgtgttacctgctgtccggccctggcacagtgaggctacactcccacaaataatgac

SEQ ID NO: 13444 - DNA, 102 bp, Homo sapiens; identical to SEQ ID NO: 5964
  chr14:94889915-94890017
  hyper

SEQ ID NO: 13445 - DNA, 247 bp, Homo sapiens; identical to SEQ ID NO: 6922
  chr15:101938625-101938872
  hypo

SEQ ID NO: 13446 - DNA, 418 bp, Homo sapiens
  chr15:22927774-22928192
  hypo
cgggcagggcgtctgccctgagcccttcctctgtgttcctaactgcaggtctcatggccagcaggttgttgagggctgggtggagccaaggtgtaacgcctgtggcacccctcagagatgcctgcgtgtcactgacacccctctcgcctgcagaagccatggggtgttttgggtggtcattgtggcccccagcgccgcacctcagtgtcactagcttctggcagccgtctcttggcacacaggccacagtgcttaggatagtttgtggcgctttgtctggattttagcaactggcatctgcttttcatgctagttcccccgcctgcctttgatttgccctgtgttccattgcagaacgagatgctggaggagggccaagaatatgctgtcatgctgtacacctggaggagctgctccc

SEQ ID NO: 13447 - DNA, 286 bp, Homo sapiens
  chr15:31220905-31221191
  hypo
cgtggctcacgcccacctgggcaccgtgtgtccacagccagcagaaaccatctctgttacggtcctttgggtcatccacaggtcaagatgataacttattttaaaaatctgagtaatagaatttaagatgtaagtatgtgaagttttaaactttaatttagcctccaccttacatttagacctttcgtataaagtaccatcagcatcagccctcccgagcacctgccgtgtcgcaggcactgtgccaaggagctcacagacatgggcacatctgcctgttcagagg

SEQ ID NO: 13448 - DNA, 94 bp, Homo sapiens
  chr15:31221220-31221314
  hypo
gcaaattattactctaaaaaacaagtttaataaattgcttttatatcaattaacttttacttatcttttgagagaaagaatgtatcggttggcc

SEQ ID NO: 13449 - DNA, 74 bp, Homo sapiens
  chr15:31731229-31731303
  hypo
cggtaagatactctctcgatgccggacaccagccacgtgatcacgatggtaaacgaccttataggggactgtgc

SEQ ID NO: 13450 - DNA, 61 bp, Homo sapiens
  chr15:37180043-37180104
  hyper
cgacaccccccttcctgcgttccccccagttatttactgggtgaccccgtcctttctcttc

SEQ ID NO: 13451 - DNA, 172 bp, Homo sapiens
  chr15:37180138-37180310
  hyper
tggattttgcgattgttcttgtcagggaaaaaaatctccacagaaccccacgttttcatctttcaactgttttatttaagccaatgggaaggtattgagggcagtaattgattcataatgatccataaatcgatgtcggaaagcggggggagagggtggaggtgtactaaga

SEQ ID NO: 13452 - DNA, 133 bp, Homo sapiens
  chr15:37403336-37403469
  hyper
gtggtttcatttacattttaaaaatcatttttgcgttcttcagcgtggatctcagcactttccctgtgtctcaggccgactaactttgcataaacaaagcaacaaccgaagctcatagtgggtgaaatcttgc

SEQ ID NO: 13453 - DNA, 385 bp, Homo sapiens; identical to SEQ ID NO: 11124
  chr15:41786420-41786805
  hyper

SEQ ID NO: 13454 - DNA, 43 bp, Homo sapiens
  chr15:41788242-41788285
  hyper
gcttccaggccttccccacccccaggcccgccggggcctcccc

SEQ ID NO: 13455 - DNA, 234 bp, Homo sapiens
  chr15:43020360-43020594
  hypo
aactgcctggcctgctagctgcaggcctccctcacacgtacggctgccggggtctcctctggaagcagcgcccgcacagccccagggctcttcctttgacagaacctaaaaggggacagatggggtcagtgatctctgggtatttcagcctggctgcagaagtaaatgccccgagtgcaccaagcccctgacctgggaggctgtaccttggaaggaggcaccgtttgccctccc

SEQ ID NO: 13456 - DNA, 205 bp, Homo sapiens; identical to SEQ ID NO: 6925
  chr15:45479833-45480038
  binary

SEQ ID NO: 13457 - DNA, 144 bp, Homo sapiens
  chr15:48666272-48666416
  hypo
cgccatgcttgcttttcccccactacctccctcctcctccccatttctccccagacagattgtgaagtctctttgcttggtccactccctgcctgtctccaatcctctgattgcttcaccttcccccggctgccattatctgtc

SEQ ID NO: 13458 - DNA, 228 bp, Homo sapiens; identical to SEQ ID NO: 9158
  chr15:53078992-53079220
  hyper

SEQ ID NO: 13459 - DNA, 108 bp, Homo sapiens
  chr15:53080082-53080190
  hyper
ccagctgaactcagaaacacctggggcttggggtttcgggcaggagacctctgctcctagacttgggggtcatttacacactctcatccccaaacccccctcccgcac

SEQ ID NO: 13460 - DNA, 99 bp, Homo sapiens; identical to SEQ ID NO: 5973
  chr15:53080201-53080300
  hyper

SEQ ID NO: 13461 - DNA, 35 bp, Homo sapiens
  chr15:60288752-60288787
  binary
cgtcgggccagtgaacgacgtcagccgcaactcta

SEQ ID NO: 13462 - DNA, 129 bp, Homo sapiens
  chr15:61931851-61931980
  hypo
cggatctgccggagactgacaggattcaagaggcagccactcctcatggcgctggctcacctgtgaggcacgaggcaagaataagacagaacattatttcttagcaagtctgggcagccgatcatttcc

SEQ ID NO: 13463 - DNA, 72 bp, Homo sapiens; identical to SEQ ID NO: 5974
  chr15:63795400-63795472
  hyper

SEQ ID NO: 13464 - DNA, 351 bp, Homo sapiens; identical to SEQ ID NO: 5757
  chr15:63795501-63795852
  binary

SEQ ID NO: 13465 - DNA, 338 bp, Homo sapiens; identical to SEQ ID NO: 5758
  chr15:63795894-63796232
  binary

SEQ ID NO: 13466 - DNA, 41 bp, Homo sapiens
  chr15:68125183-68125224
  hyper
cgagcccagcaaacggcttgcaggcatcattacatggagtg

SEQ ID NO: 13467 - DNA, 457 bp, Homo sapiens
  chr15:75075794-75076251
  hyper
cgcccattttgtacacccgggaaccgaggctcaaagggagaagttgctaccccaggcctctagtggagttaggctggctgtcctttcatccccagctatacagggctggatggctgtgggtggaaggaaaccaggcaggcaccttcacccactggggacacaggcccccagcccggccccagagggaccttgttggttgagcacgtgcttccctgcagagggctggagggagtgaaagggcttccggctccagctgtggctgggtcagctagcaggagatgtggggaatgtgtggtgtatggccatctgtgtggtgtggcaggaaggtccggtcctggccccggctctgagttgaaacaacctggtggtcagtcctgacccagcactcgccacacctatggcccagctggcacaggagcagccaagttcaggatataaatggggtcacatgggaacc

SEQ ID NO: 13468 - DNA, 50 bp, Homo sapiens; identical to SEQ ID NO: 7980
  chr15:75250996-75251046
  hyper

SEQ ID NO: 13469 - DNA, 86 bp, Homo sapiens; identical to SEQ ID NO: 7981
  chr15:75251811-75251897
  hyper

SEQ ID NO: 13470 - DNA, 135 bp, Homo sapiens
  chr15:76629531-76629666
  hyper
ttttgcgcaaaggcaattaggtttgatttagggatgtgggtttttttttttttggttgttgtttgtttgcctttcggtttttcaaagctaggaagctttctttcgcttgctctgggatatttaaactaagaaatg

SEQ ID NO: 13471 - DNA, 68 bp, Homo sapiens
  chr15:76638250-76638318
  hyper
cggttccccgttgggaaagagcgtgtttaagttaaggcgtggtttgagagtagctaaccagagatcag

SEQ ID NO: 13472 - DNA, 86 bp, Homo sapiens
  chr15:76639126-76639212
  hyper
cccgagccgcgcaggctcccggctgggtggggcctgggtttgcttcttacgcctcctcctctccgggacgagggggcaatgagacc

SEQ ID NO: 13473 - DNA, 137 bp, Homo sapiens
  chr15:89921803-89921940
  hyper
cgcggctgcttcccgcccgcgcaggatcaggccggcccccgcgggcctggagctggatccagagctagggaaactggaaaaacaggcacaaactcggaagccgcggtacggcaagagcctaagcaaagaatcctttc

SEQ ID NO: 13474 - DNA, 147 bp, Homo sapiens; identical to SEQ ID NO: 7989
  chr16:12132253-12132400
  hypo

SEQ ID NO: 13475 - DNA, 376 bp, Homo sapiens; identical to SEQ ID NO: 7990
  chr16:12132450-12132826
  hypo

SEQ ID NO: 13476 - DNA, 37 bp, Homo sapiens
  chr16:1407334-1407371
  hypo
cgggccagcaccccagaggtctcagtggcattagcct

SEQ ID NO: 13477 - DNA, 180 bp, Homo sapiens
  chr16:142447-142627
  hypo
cgtagcacttgcacggcaagcccccaaaaccaaggagaagcaggtggcagtgctgagggctctcagatcagaaccaacagccaggcaggtagtgcctatccactacacacctgccactctgggctccttgagcttctgtgactcacctcctgcacagcgggggccaggggattcctaaat

SEQ ID NO: 13478 - DNA, 195 bp, Homo sapiens; identical to SEQ ID NO: 7998
  chr16:1730112-1730307
  hypo

SEQ ID NO: 13479 - DNA, 105 bp, Homo sapiens; identical to SEQ ID NO: 7999
  chr16:1730761-1730866
  hypo

SEQ ID NO: 13480 - DNA, 97 bp, Homo sapiens; identical to SEQ ID NO: 12356
  chr16:2042503-2042600
  binary

SEQ ID NO: 13481 - DNA, 226 bp, Homo sapiens; identical to SEQ ID NO: 12357
  chr16:2042617-2042843
  binary

SEQ ID NO: 13482 - DNA, 68 bp, Homo sapiens
  chr16:2106533-2106601
  hypo
cggggagaggtggcagcgcaggctgaaggaggtgggaaggaagcctgggtgtcctctcctgtggggag

SEQ ID NO: 13483 - DNA, 63 bp, Homo sapiens
  chr16:2106641-2106704
  hypo
caggtctccctgcaggtgctggacgccgtggtctgctacaactgcctgccggctgagagcctc

SEQ ID NO: 13484 - DNA, 389 bp, Homo sapiens; identical to SEQ ID NO: 6435
  chr16:2280815-2281204
  hypo

SEQ ID NO: 13485 - DNA, 238 bp, Homo sapiens; identical to SEQ ID NO: 6436
  chr16:2281402-2281640
  hypo

SEQ ID NO: 13486 - DNA, 61 bp, Homo sapiens; identical to SEQ ID NO: 6437
  chr16:2281702-2281763
  hypo

SEQ ID NO: 13487 - DNA, 275 bp, Homo sapiens; identical to SEQ ID NO: 8008
  chr16:2391769-2392044
  hyper

SEQ ID NO: 13488 - DNA, 713 bp, Homo sapiens; identical to SEQ ID NO: 6438
  chr16:24837143-24837856
  hypo

SEQ ID NO: 13489 - DNA, 41 bp, Homo sapiens
  chr16:2497839-2497880
  hypo
cgctgggctctcattggccactgacatcttgtctttttggc

SEQ ID NO: 13490 - DNA, 76 bp, Homo sapiens
  chr16:2498053-2498129
  hypo
ttggcgctggttgacaacagagaacagggtgaccatcgcctagagacagtcaggattcctgcggccacacagtgcc

SEQ ID NO: 13491 - DNA, 39 bp, Homo sapiens
  chr16:2531031-2531070
  hypo
cgctgtctctatcccttctgaggctaaggcttcctcaca

SEQ ID NO: 13492 - DNA, 34 bp, Homo sapiens
  chr16:2531177-2531211
  hypo
ccatgcctctgtactcctctgcactcaggtacct

SEQ ID NO: 13493 - DNA, 42 bp, Homo sapiens
  chr16:2531240-2531282
  hypo
gaatgcctattaaaatgattaggaccgggcgtggtggctcac

SEQ ID NO: 13494 - DNA, 395 bp, Homo sapiens
  chr16:2540434-2540829
  hypo
cgagcagcgattcgctcggaccccagaggccacaggaagatggcttcccccacaggaggcaccctcacagggccctgctggcactgtctgccttgggctgcctgaacccggagagagagtgggatagactgttcatggggtgtcacccttatgtcacctgcaccccaccctgtcagtccagagtgaggctcaacccacaggggttgcttgggaactgttgcccgtgaggagttgggtgttattatcggctccgctctgcagacatggcaaccgcaggttagggaagatgcacggcttgtccgcatttcaagcaaacaagtggcagagctggactttgtggccaggcctgtctaactgcaaagctgccccgtttccacagtagcccctgcctcccc

SEQ ID NO: 13495 - DNA, 60 bp, Homo sapiens
  chr16:2540933-2540993
  hypo
ggcttatgatgtacagcagcagccagccagcagatagacaacagggaaagccactcggcc

SEQ ID NO: 13496 - DNA, 50 bp, Homo sapiens; identical to SEQ ID NO: 6954
  chr16:2770043-2770093
  hypo

SEQ ID NO: 13497 - DNA, 48 bp, Homo sapiens; identical to SEQ ID NO: 6955
  chr16:2849309-2849357
  hypo

SEQ ID NO: 13498 - DNA, 31 bp, Homo sapiens; identical to SEQ ID NO: 8014
  chr16:29153254-29153285
  hypo

SEQ ID NO: 13499 - DNA, 55 bp, Homo sapiens; identical to SEQ ID NO: 8015
  chr16:29153320-29153375
  hypo

SEQ ID NO: 13500 - DNA, 173 bp, Homo sapiens; identical to SEQ ID NO: 8016
  chr16:29857096-29857269
  hypo

SEQ ID NO: 13501 - DNA, 61 bp, Homo sapiens; identical to SEQ ID NO: 9193
  chr16:30017168-30017229
  hypo

SEQ ID NO: 13502 - DNA, 42 bp, Homo sapiens; identical to SEQ ID NO: 9194
  chr16:30017858-30017900
  hypo

SEQ ID NO: 13503 - DNA, 76 bp, Homo sapiens
  chr16:30354637-30354713
  hypo
cgatgccaccaaggcatcaggtgagtgccagctggggctcgaggactttctcctctccgctccctgttctgggagc

SEQ ID NO: 13504 - DNA, 70 bp, Homo sapiens
  chr16:30354742-30354812
  hypo
ggagagctggaaggtgctgctttccttgtgctgctggcgcgccactgcacttcagcctgggagacagagc

SEQ ID NO: 13505 - DNA, 240 bp, Homo sapiens
  chr16:30991726-30991966
  hypo
cggcgtgggccccgccctctcctttggctgggacgcaggtggccagagaggagccgttctcttccttaacaccctgcactcaccaacctgaccaccccaaaacgcaagcggcggccccaggatgggccccgggagcaccagacaggctcagcccgcagcgaaggctactaccccatcagcaagaaggagaaggacaagtacctggacgtgtgcccagtctcggcccggcagctggagggc

SEQ ID NO: 13506 - DNA, 201 bp, Homo sapiens; identical to SEQ ID NO: 8023
  chr16:31138407-31138608
  hypo

SEQ ID NO: 13507 - DNA, 53 bp, Homo sapiens
  chr16:3139033-3139086
  hypo
cgctgtggaggaccccgggtaggtggcgcagggcgcggctggcggaaggcggg

SEQ ID NO: 13508 - DNA, 608 bp, Homo sapiens
  chr16:3139367-3139975
  hypo
gggccgctcgcccgtgtggctgcggcgatggcgggccaggttggagctattgcggaaacggtggccgcaggtgtcgcaggcgtggggcttctcccctgtgtggatgcgctggtggcgcgccaggtgggcgctctggctgaagccctcaccgcactcgctgcagcggcagggcttctcgcccgtgtggctgcgctggtggcgggccagatcctgggtctggccgaaactcttcccgcactgggtgcagtggtggggccgagggccaccgtgggtcagcaggtggcgggcaaggctggcccggcgcacaaagcgcttcccgcactgcggacaggcgtagggcttctcgcccgtgtgcacccgttggtggctgaccagctgcgagctctgcgtgaagctgcggccgcaagcctggcaggagaagggccgctcgcccgtgtgcaccctccggtgggccaccaggtgctcgctgcgccggaaggccttgccgcagtcgctgcacacgaagggcctccggtcggagtcccggcggcggctgccggagccttcggaggaccggcggtccttgtccctggcgtggatccgcaggtggcgcttgaggctggagcggc

SEQ ID NO: 13509 - DNA, 212 bp, Homo sapiens; identical to SEQ ID NO: 5982
  chr16:3222239-3222451
  hyper

SEQ ID NO: 13510 - DNA, 204 bp, Homo sapiens
  chr16:3696491-3696695
  hypo
cgggtgtaggggttgggtggggagaggatgtcctctgaaaaggtgacatttaagctgaaactggaatgacaagaaggccccagctctgcaggcagagcggaaggctcagagcttagaatcacgtaggtcatggaaagcattggatttcgtgttagggacaatgagaaactggtgacagattttaagtaggggaataaagagatc

SEQ ID NO: 13511 - DNA, 62 bp, Homo sapiens
  chr16:3696802-3696864
  hypo
ctgcagaatctggaggacgtgcaggctcagggtgcatggtgcgggcggggctgagggggagc

SEQ ID NO: 13512 - DNA, 101 bp, Homo sapiens
  chr16:410895-410996
  hypo
cgcagctgcccttgcagggcctgtccctgaagtcccgagtaatgggatttggcgcttctgatccatcgggctggccgcttcccgtgtcataggtggacatt

SEQ ID NO: 13513 - DNA, 111 bp, Homo sapiens; identical to SEQ ID NO: 6962
  chr16:411606-411717
  hypo

SEQ ID NO: 13514 - DNA, 49 bp, Homo sapiens; identical to SEQ ID NO: 5984
  chr16:4363872-4363921
  hyper

SEQ ID NO: 13515 - DNA, 158 bp, Homo sapiens; identical to SEQ ID NO: 5985
  chr16:4364080-4364238
  hyper

SEQ ID NO: 13516 - DNA, 452 bp, Homo sapiens
  chr16:4421671-4422123
  hyper
cgcgcaggtcaggtggccgcagggtgagggccagggcaacccggcccacgagcccctcggtggggaaggggcgtgtctccacgcggctccgccccggccaatggggagaggccccgcccctgccgcggcgggcccgccccccgggactcttaaggcgcgacctgcctccagcgagccgactccggagcccgagcccggggcgggtggacgcggactcgaacgcagttgcttcgggacccaggaccccctcgggcccgacccgccaggaaagactgaggccgcggcctgccccgcccggctccctgcgccgccgccgcctcccggtgagtttctgtggggctggggggctgcgggcggggaagggggcgccacggccaggctgtgcacacgcgcggggaccgccgccgcgcgcacacacgcactctcgggcgggaccgcggccccagccccac

SEQ ID NO: 13517 - DNA, 50 bp, Homo sapiens
  chr16:4422253-4422303
  hyper
acaaaataaacaccccgtcccatgcttcctcctcccacggctgggcctcc

SEQ ID NO: 13518 - DNA, 161 bp, Homo sapiens; identical to SEQ ID NO: 8034
  chr16:4845976-4846137
  hypo

SEQ ID NO: 13519 - DNA, 167 bp, Homo sapiens
  chr16:4931957-4932124
  hypo
cgtaccattgcgcgtgcagctggagcagaataccctcatttttaggaatctagtgatgcctcttgcctcagggaaacgtttctttgatggggagtttgagatttcttttccttgtttatgctttatttgtggtaatgaaagagcgaatgactgaacagccatggcaa

SEQ ID NO: 13520 - DNA, 126 bp, Homo sapiens
  chr16:4932153-4932279
  hypo
gggtggggcagagcagcctcggggtctgggggctgcaggggtttccctggcgcagcgaaagtctctgagcacttaccgggcgtgaccgtttcttaggtgtgagaggggctgtggcttttgtgcagc

SEQ ID NO: 13521 - DNA, 257 bp, Homo sapiens
  chr16:53563654-53563911
  hypo
tacagaagcttgcagcaaagctcttgataatgttactcttgataaagttgcctggccaccctctctaagtaaataaaggggagaggaatatgacgcatattaattcacccagtttgcagcctactggaggacgagaggggaaaaaaaagttgcaatgggttcagcgcgtggcattttatatgaataccaaaattgcattcatgattcacatagactttacgataatatattaatattaaaactaaaggtcattccac

SEQ ID NO: 13522 - DNA, 124 bp, Homo sapiens
  chr16:54324470-54324594
  hyper
ggtgggctctttgctcctccgcttcgcccctgcgcctcccgcgacccgtctcacttccctgcgtctctgagcggcccgagaggcgcagcgctcagagtggccttgatggaagaacctggccctc

SEQ ID NO: 13523 - DNA, 58 bp, Homo sapiens
  chr16:55365468-55365526
  hyper
ttccaggccagcgcggaggccagactatcagtcactgaaatccaggcgagcatagtcc

SEQ ID NO: 13524 - DNA, 44 bp, Homo sapiens; identical to SEQ ID NO: 11189
  chr16:56659821-56659865
  hyper

SEQ ID NO: 13525 - DNA, 1300 bp, Homo sapiens
  chr16:58030214-58031514
  hypo
cgcccgcactgcccgctggtgccaggagtacgagcggcacaccctctccctgcctcatacccctgcgtcctcactcccgaggtctcagaacaccgagctgggtggggcccttggtgcaaggcagctgtgaggagctaggctgcgcgaggcctgctgggcccacggcgccgactcaggtcaggctggtaggggccacagccgcagagtcagggcaggcaggcggctacctggtaggcgccctccgctgccgcggcggcggcactgtgctgcgcgctgtgctcctgcaacaaggccacgtctaggaagcgctccccgcaccatacacacttgaactgctgctcgcgggcgtgcacgccctggtgcttgttgagatgctcccgctgcttgaaggccttgtcgcagttggggcacttgtagggcttctcgcctgtgtgtacccgccggtgccgctgcaggtctgacgcgtacttgaagcgtttctcgcagtctgggcacttgagtggcttctcgcgggccggatcgcagcggtgctgcacgaactcggaagaggagaagaagcggcgttcgcaaagcgtgcagcgcaggggcttctctgccgccgcacagtgggccagctggtgcttctgcagggccgacgcgcgcttgtaggccttgttgcacacagggcacttgaagggccgctcggccgcgccgggcaggcacttgtgccgcagcagctcggcagattggtcaaagcctttctggcacacggggcacttgaagagagtctcgagggtgtgcacgtgctggtggtagagcaggtggctgggctgcccaaagcccttctcacataggccgcatttgaagggctcctcggtcttgtgtgtgcgccggtggcgcatcagtgcgtactgctgcttgaagcccatggggcacaggtcgcacttgaagggccgctcggcgctgtgtgtgcgctcatgctgccgcaggtccgagggccgcttgaaggccttctggcactcgccgcagcggaagggccgctccccacttggcgtgcacgggtgctgcagcagctccgacgactccttgaaatgcaactcgcacacgttgcagcggaacaggtggtgctcgcccgagtgcgcgtacatgtggcgcaccaggtgagagcggtgcttgaaggtcttctcgcagactgcgcacttgtagggccgctcggagctgtgcgtgcgcttgtggtgcaccaggtgcgacgactggctgaagcttttgtcacacagcgtgcacttgtagggcttctcaccggtgtggatccgctcatgcc

SEQ ID NO: 13526 - DNA, 151 bp, Homo sapiens; identical to SEQ ID NO: 6965
  chr16:611800-611951
  hypo

SEQ ID NO: 13527 - DNA, 83 bp, Homo sapiens; identical to SEQ ID NO: 6966
  chr16:612320-612403
  hypo

SEQ ID NO: 13528 - DNA, 78 bp, Homo sapiens
  chr16:667407-667485
  hypo
agaatggattttactccaacaggaaaaagacagtctgggacactgtgtccctagagatcgcggctcccctcctgcccc

SEQ ID NO: 13529 - DNA, 200 bp, Homo sapiens
  chr16:668074-668274
  hypo
cattggcacctgtcctggccgccccgctcccctcaggacatccaggtgggtcggcagaggagggaaggaggtgagcctctcacagggaccacagtcccggcccctcccctccccgtatgtttcagggacacgtcgggccagggccggttctgcaccatcttcaggtcctactccaggggcgctcaggtaagaccagcacc

SEQ ID NO: 13530 - DNA, 300 bp, Homo sapiens; identical to SEQ ID NO: 10339
  chr16:67197294-67197594
  hyper

SEQ ID NO: 13531 - DNA, 271 bp, Homo sapiens; identical to SEQ ID NO: 6969
  chr16:67198282-67198553
  hyper

SEQ ID NO: 13532 - DNA, 60 bp, Homo sapiens
  chr16:67199532-67199592
  hyper
tgtgagtccctacggccgggcggggagcggggatgggggactcggtgccggggatggggc

SEQ ID NO: 13533 - DNA, 65 bp, Homo sapiens
  chr16:67241539-67241604
  hypo
cgaagcgggactggacacaggacacctggggcagctgggcttggaagcgtctgacggcggccatg

SEQ ID NO: 13534 - DNA, 35 bp, Homo sapiens
  chr16:677803-677838
  binary
cgggaggagggggcgcggctgggctgctggtgctt

SEQ ID NO: 13535 - DNA, 64 bp, Homo sapiens
  chr16:677909-677973
  hypo
gcctttcttatttatatagagaacacttcacttttttgtacatttttaaggggccttcagggaa

SEQ ID NO: 13536 - DNA, 106 bp, Homo sapiens
  chr16:678084-678190
  hypo
ctgtgaattcatgcgctgcgagtggcggggctgcccagaggccgggggagcagacagggccggtgctccctctggaagcttgggtgaccggggccctggctcccac

SEQ ID NO: 13537 - DNA, 218 bp, Homo sapiens
  chr16:69352349-69352567
  hypo
tttgctgggggggtcctgaagtgagctgctgagagcattggcccaaatgtccctgaagtacttgcttgagtcacacggcactgttaagccaggaaggcttcgttccttaaccagtgtgcaggcagcggagcctggacttgctgggagcacctctgtgctccaggctgaagggccagcttgtgactttccgtctcccttcccagcagtgacagtgacag

SEQ ID NO: 13538 - DNA, 378 bp, Homo sapiens
  chr16:69352596-69352974
  hypo
tgcaagaacagctgatgggtaagtggctcgcggccctgtggcagcggcaggggatgagagtgggtccgctgctgggttggctcatgccccttggccgggcccgggcccgggccggcctccctctcgcaggtgccgtcgtgatggagaagcccaacatacggtggaacgacgtggccgggctggagggggccaaggaggccctcaaagaagctgtcattttgccaatcaaattcccacacttgttcacaggtgagagttgagccatttcaaaccccaatgtaaaaattccaggcttccgcagggctggcactccgaggcacccgggagtcagtggcgactcagcccccggggcctgcagagggccaggcctggctgctc

SEQ ID NO: 13539 - DNA, 364 bp, Homo sapiens
  chr16:70754664-70755028
  hypo
cgatggccccatgttggggctatccgcccatgtggtctggagctggagctcaagactggggccggggcaggtcacaccccttctgagggaataaagagacacaaaacttagcacttaaggaagcagcttgcgaaaaaggaaagtgagagacggggctcaaaacagactggtggaggaccagaaaaaatgagcgctgacttgagtgcacttgaatcatctcagcttggcttcaaagaggccaaagtggatgatgcgagccactgcgataagccaggggaaaaacacatccctgagaagagggggtgacacatgtcctattgagcaagagtcaaaagggagattcagacctggagagatgttcacc

SEQ ID NO: 13540 - DNA, 50 bp, Homo sapiens
  chr16:73100590-73100640
  hyper
ctggaaaggagagggcgcggcgaggggcgcacctcgcgcccagggcccac

SEQ ID NO: 13541 - DNA, 234 bp, Homo sapiens
  chr16:74908874-74909108
  hypo
cgcatggaaacccagtgccctacagcagggggcagctgcgtctgatgcctcttcccaccccgacggctggcagggcctggcacgcaggaggtgttgaacaggtatcagctgaaagaactgaatgactcagcagtaacacttcagcagagggcagactggctttaccaacgcctgctactgcccactcgccactggcccaagtcaggacaccgggatgccgctccaccgccgggc

SEQ ID NO: 13542 - DNA, 205 bp, Homo sapiens; identical to SEQ ID NO: 9209
  chr16:77247511-77247716
  binary

SEQ ID NO: 13543 - DNA, 341 bp, Homo sapiens
  chr16:810054-810395
  hypo
ggtttcaggggcagggagggggcttctgtggccccaggtcaggaggagcagctcttccatcagcagcaggcagccagcccagatgcgtagggaagacagctcccacttcgccaggccagagagcgcccgggggcagctctgttccagtcgaccctgcgagaaaggggtgtgcgtgtgcctggagctgggccccgtcctgcctccctgacctgtgtgctcccacagccctgagacggacggctcacagccttgcgaggcccacactgcactgggggtcaggcttgtgctcccgggagtcctgtctgggctgcgtggccaccatccagagcctgctgacctgc

SEQ ID NO: 13544 - DNA, 78 bp, Homo sapiens; identical to SEQ ID NO: 8051
  chr16:81632835-81632913
  hypo

SEQ ID NO: 13545 - DNA, 108 bp, Homo sapiens
  chr16:81688971-81689079
  hypo
cgcaaaacagttccgagaaagaactgtccgtccaccagcaaagcaaagctggctgtccccaccctcccaggcctttgttgagttgcgtgtaaagtggccgcttagctc

SEQ ID NO: 13546 - DNA, 385 bp, Homo sapiens
  chr16:81703552-81703937
  hypo
cgcgggtgtcgcagtgctattctttgaagtagacgccacctgtgctttccagagggttggtgtctccccattgccttccacatcaacagctccaggcagagctcggtcccgcccttctttctggtgtcctggctgccctgggctcctgccctgcctagcaccgtcccgactcctgtcctctgctgtctccacaggactttgggaagtgcccgcgactgaggctgtttactcaggagtacatccttgccttgaacgagctcaacgcggggatggaagtggtgaagaagttcattcagaggtgggtctccggcgcgacgtccctctgtggcctaggagccactttcctctcggatcctgtttactcagatatccacggggggctgtc

SEQ ID NO: 13547 - DNA, 97 bp, Homo sapiens
  chr16:84483346-84483443
  hypo
cgtgggtggcagctgcttttgtcatggttgatacgaccaagccattcagtagctccctgttcttgtcacatcacgcctctgctgacgaaatggctca

SEQ ID NO: 13548 - DNA, 251 bp, Homo sapiens
  chr16:84483472-84483723
  hypo
atcccacgtggcactggcctctaaatctgcacctggcacttgggccccacttgtgtgctgggcaccaggttaagtgcctgtgtgaggccacgccctgaatccccaccgggcagaggagccggcccaggtgacacagccctgcctagtgcagccagcgccttcgcccggatgtctgctgcggagcgtaatgacgcgttccagggacttgctccaggccttgcgggagagcgtaatgagaacgggtcagtggc

SEQ ID NO: 13549 - DNA, 52 bp, Homo sapiens; identical to SEQ ID NO: 10342
  chr16:85485696-85485748
  hypo

SEQ ID NO: 13550 - DNA, 91 bp, Homo sapiens; identical to SEQ ID NO: 10343
  chr16:85485855-85485946
  hypo

SEQ ID NO: 13551 - DNA, 50 bp, Homo sapiens
  chr16:85517169-85517219
  hypo
cgatgcccaggcccccggccactgtctccgccctcttggtaggccctgtg

SEQ ID NO: 13552 - DNA, 137 bp, Homo sapiens
  chr16:85517620-85517757
  hypo
gatggggaaactgaggcagagctggggttaccccagaagaccctcagattcgcggtaggatgacgtcccacacttggtgactttatgtggctcccggaccagttatgccgtgcaggaatatgccccttcatagaacc

SEQ ID NO: 13553 - DNA, 67 bp, Homo sapiens
  chr16:85617682-85617749
  hypo
cgcatggggacggggacacaggctcgccagctgcacagcccgcagactggccttgggtctttgtgtg

SEQ ID NO: 13554 - DNA, 143 bp, Homo sapiens
  chr16:85618063-85618206
  hypo
cgggtactgatccatcaatagtgaatgtattacctgtctccgtgaggtttgggagatccaggatgctgctttgagaacgcctgcgaagcagtaggatcggggaggtggagcagtttcccccacccctccctctccccgcacgc

SEQ ID NO: 13555 - DNA, 357 bp, Homo sapiens; identical to SEQ ID NO: 6978
  chr16:85673482-85673839
  hypo

SEQ ID NO: 13556 - DNA, 238 bp, Homo sapiens; identical to SEQ ID NO: 6979
  chr16:85673886-85674124
  hypo

SEQ ID NO: 13557 - DNA, 140 bp, Homo sapiens; identical to SEQ ID NO: 6980
  chr16:85674334-85674474
  hypo

SEQ ID NO: 13558 - DNA, 178 bp, Homo sapiens; identical to SEQ ID NO: 5759
  chr16:85932121-85932299
  binary

SEQ ID NO: 13559 - DNA, 199 bp, Homo sapiens
  chr16:87776441-87776640
  hypo
cggcccctccagacgagttgccctaacgccttcctatcagggaagggaagactcattctgcaaggcgccgcagctgtagtccagtgtctgccacaggtatgaagtgacgacgagcacggagaacacttgaggaaaactgtgaaacaggagcacctgcacaggcatcacgccaagagtcagccctccacacgccagcacc

SEQ ID NO: 13560 - DNA, 184 bp, Homo sapiens; identical to SEQ ID NO: 6984
  chr16:88512691-88512875
  hypo

SEQ ID NO: 13561 - DNA, 518 bp, Homo sapiens
  chr16:88792758-88793276
  hypo
cgcggcgctgcagcagcaggaagaagaagcagacgctgtcccagatgatgccagcctcctccacaggcagcaggcagtcctggtctctgtccatcatctccttggctgcaaggcaggcaccggcaagggtcaggcccagggcccaggagcagggggcttccccacgccctcccccgccaccgtcctggccactcacggtcatagtagcccttgacggtgcatacaaggctgaagagctggatgacccagcagaagccggtctgcatctgctccacgaagacgcaggccaggagctgggggagagcagggtcagcggggccagcggggccccagggcggtgggtgcgggggggccggaggctcaccgacagcatgttcttggagatgatgacggtgacgttgtacagaatgaggcagtcccacagcacgaggcgggcccgtgtgtccctctgcagcagggccgtgccgaagagcagcaggtagaagcaggccagcaggtagcccagcccgaagatgctg

SEQ ID NO: 13562 - DNA, 340 bp, Homo sapiens
  chr16:88793673-88794013
  hypo
tcccaccccaggcctgtcggcgtgcagccgctgggagcggacacacgtctgcctgggtgagtggccgggtgtccctgggggagccccggtgtgagggcatctgcacaagggctgccgtgcacacaggctgaggtctgcgtgcgtgcgtgcgaggtcagggcctgcaggccgccatgtgcctgaccacacctccgcccgtgcacgcctgtgtgcacacttgtgagcagatttgggggcgtgaatgtactctgagggtcctctgcagaggcgggggtggtggggggcactcactgatgaggttggtggagttgggggcccggaagaaatcaggcaggtacag

SEQ ID NO: 13563 - DNA, 395 bp, Homo sapiens
  chr16:88797394-88797789
  hypo
cgcccctgagccggccacgtgcacaaatgtgactccccatctcagaccgcagggtgctgtgtgccttgagcagacctgcagcaccaggacagccacgcaaatccagtctcacggcgtcagcaacgctaccggcctccctccggaacttcccaagagacaggagaggcgggggcggcttagacccaagacaagagactagagcaaacatcagaccagatcccgtctgaaaaccaaatggccacaaagaagggtgctgaggccggggctgtttgaatgcagaggacacgtttgacgatggcactgccaggagacgggaccacgggtgtggggctgtgggctcagacaccctcacccaggagacgcatgctcgaggcagcacttgggtgtgaggcatc

SEQ ID NO: 13564 - DNA, 91 bp, Homo sapiens; identical to SEQ ID NO: 8074
  chr16:89220237-89220328
  hypo

SEQ ID NO: 13565 - DNA, 79 bp, Homo sapiens; identical to SEQ ID NO: 6989
  chr16:89254530-89254609
  hypo

SEQ ID NO: 13566 - DNA, 144 bp, Homo sapiens; identical to SEQ ID NO: 6990
  chr16:89254764-89254908
  hypo

SEQ ID NO: 13567 - DNA, 336 bp, Homo sapiens
  chr16:89260413-89260749
  hypo
cggcgcctgcatgcacttatgggccgtcccagagcaccgcagaggaagatggtgtgcgggcgggagtgtggaagccccgctgccaccgtccaaactgggccctcagcctccacccgcgacgcgggtctttgcacagatggagtggcgatggccacagacccatccactgccccgtgtccaccatggagggggtgggggagccccgggagcatcccctgggcttcggtggctgtcagcggaatcagggcctccatagaagaccctctggacacagcgttaatgattccctgccatccacaggatgaatgtgcacacggggaatctggggtgtggggc

SEQ ID NO: 13568 - DNA, 265 bp, Homo sapiens
  chr16:89357476-89357741
  hypo
cgctcggagagggggtagccggctcggattccagacagccccatgccaaacagcagcccggccttccgggtgacaggctccttcttaatcctcttccgctcagggccctgcttctctgtgaggcgggcgagggagagagggaggagagatttcatgccatggtgtcctccaaagctaggtccttacctaatgttacggagccccctgcgtccacctgacagctgacagagcagaaaggaaggtctgtgtatggggaaagcacagc

SEQ ID NO: 13569 - DNA, 46 bp, Homo sapiens
  chr16:89763790-89763836
  hypo
cgctgtagccacaagcgccgctgggcgtcgccaagcagcacacgca

SEQ ID NO: 13570 - DNA, 823 bp, Homo sapiens
  chr16:89763872-89764695
  hypo
agtgggcagcatgcagctggcgacaggtgtcgcagcagagggtgggcagggcgccaggggacaggcagctgtgtgcctggtagcctgggggctccgagacagacctataggctgaggctggtaccccctctgcccgaatacgcctcgggctggccgctgcagagctttcaggggtggccaggtccccaggcctactcagctcacggcgcagagagaggaaggagaaggcggaaggttcaggttccagcccctcctccaaggccccatatggtgggctgctggcctgcggcagctcctcagctgggggctcccaggcccggcccccagtgccccacagtttggcactctgctcccagagtggtggcctgtaggccagctccgccgggggcgagtcagggcctggtgacggctccccatacaggctggcgtcctccgacccctcgtcttcctgcaagtcccggtataagtccagtggggccctgtaagcagcaggggagcctcgggggggcaggggtggcggctcctcatcctgggccagccgctgctgcagccaggccacacaggaggccacgtccccgctggcacgccgtgcctgcagcagctcctcagctggcagcacactggtgcccagctgggccagcacctcacccaggatctcacactccagccggagggcgaagcagcccagggccacctgcaccagctggcaggcggggggcagggcggtcaccatgagccgatggctgtctctgcgtacgtagcccatcttctggaagctcttcaggaggaggtcgtctgagagcacacccttcagcacgtgcac

SEQ ID NO: 13571 - DNA, 394 bp, Homo sapiens
  chr16:89971731-89972125
  hypo
cgggtgcctcgggctggagtggtgccttcgggtcttgcagtgtttccacatgagctgtgagatgatgacgagtctctcacagcagcatcttgggagtaaagaaatctggcagagacgagaaagagtctcctgtcctgtgtgtgaacacttcggaggctcatgccctaatatgctgcaactgacaggcatccccttgctgttcttgtctcgtttgtctgcgcccttggccctgtgctagttctgtgcatcagcaccgtggctctgtgcagtggtgtggccaggctcaggaccgcctgggagtggtgcccatttgcatctccacagtgaagtctgtgtgccgcggacatgaggtgtgcccgggggtgcccaagaggcgctggtgcccccagccgct

SEQ ID NO: 13572 - DNA, 441 bp, Homo sapiens
  chr16:89972235-89972676
  hypo
accagtgcctgtgcctgtagccgtagcagtgacgatggtgacacacccaggtgtcccttcatggagatgaactcagtgacttcccacaagaagccactggctacggctctcatcgttcttgttctttggatgaagaggctgagtcactggccatgtggctgggattggtccccagaggctccccagccgcaggccagggaccagccatggtgcctctgctcgagagtaaagtgtacagtttttgcagccaccagagatgcagcgagatgcctcgtgctgggtgggggtgggggccgaggctccatggcggttaccatttcatttgctgtgctttatctgctgtgccttgtttctccccggccctaggcggaaggtgctctaccagcgtgcacccaggaatatccaccgccatgtgatcctctctgagatcaaggaagccgt

SEQ ID NO: 13573 - DNA, 482 bp, Homo sapiens
  chr16:89972802-89973284
  hypo
cccagccccgccacggcaggggcagggtctagtgcagagggctcctcctttcctggcagcccgggttcggatgcttgttgttttgagagagaaatcctttggggctcagagcacaagctgagtcgtcaccgtggtgagctgctccatccgtggtcttgtgagcgcgtggtgcggctgctgggggattctctgtagtcgtggggtgtagtcctgctctgacgcctcctgtgctggaggtgccgtttctgtctcaaaacctaaggagtttgtactgttgttaagggataagatagaacgagtgagaaaaccagcaagtcagagggtcgcaggaccgtggaccgtccactggggacagcttagtgcctcctggtttaacttcagctgctctgcgggcccttatgaccggcatggctggctttgtctggggctgtgagcttctgactctcctcagtagagtggcagcacgtggcactgtgcaaccc

SEQ ID NO: 13574 - DNA, 94 bp, Homo sapiens
  chr16:89992765-89992859
  hyper
cgggcgggaaccgcattcgggtcctggaggggcttggaggccccagtctcgcagccccttcatcggggacccccgctcccacctgccttggcca

SEQ ID NO: 13575 - DNA, 259 bp, Homo sapiens
  chr16:981471-981730
  hypo
cgcacacgcggctcggatgagctgaggaacgcacgcacaaactgcattctcccaggccgtcccgaacgaggccacaggaaaggagcctccccagaggtctcagatcaggaagcctgaccttccagtgcctttggtctaggtgttctgaggcccagcacccggagtcatacctcagtaactggcagctctatgttctccaagatcagggaagggaagacagttcaaagacgcatggctgctcggaaggcagggagagcac

SEQ ID NO: 13576 - DNA, 227 bp, Homo sapiens
  chr16:981843-982070
  hypo
ggaaaacattaacattaatgagtcaacaattcgcttctgagtccctacaattaccacctgctaccgaagaatcagttagaatgtatgacgctcacctgaaaacacccagggagacacaaacgcagaagactgacttccctgggctgggagcgcaagcgcagcccccgacggcggccacacaggctcacgtcccaccccccatgcagaccccgttgcttttgcttcag

SEQ ID NO: 13577 - DNA, 278 bp, Homo sapiens
  chr16:982099-982377
  hypo
ccagagtcacccggctcctcgactgcctctgccgctccagcactgcctctgggagtccactgccccaggcacttcccccccaccctacttagagtagagcctgtgttccccaggaggcctcacaggcgggggcacggggagggtgggctccaggccctctcatcctcagcgatgggtcctgtggccctggtgctgagacacggcagcaccgtggcctcgcaggcccatctctcacagggaacacacaagcctcagccgctgccccccgagcctgcccc

SEQ ID NO: 13578 - DNA, 104 bp, Homo sapiens; identical to SEQ ID NO: 6998
  chr17:16282523-16282627
  hypo

SEQ ID NO: 13579 - DNA, 209 bp, Homo sapiens; identical to SEQ ID NO: 6999
  chr17:16923475-16923684
  hypo

SEQ ID NO: 13580 - DNA, 203 bp, Homo sapiens
  chr17:17031200-17031403
  hypo
cgtccaggagccagtgctgggtcccgggggcgctctctgcgggggtgtgctctcccctagagtcctcccctggagagaggcaggtttgcatttctgagcacctggagccgagctggaggagcacttctgtctcccacaatcttaatccagaaccatatgatcaagaatgtcaagggcctctgaagaaccctcgtggtacagtc

SEQ ID NO: 13581 - DNA, 366 bp, Homo sapiens
  chr17:2291792-2292158
  hypo
cgccctcgccccatctcatctccaggactcgcctccctcctggctgctggtctgcacctgctccccgaccccctaggcgactctccactgtgcccgcctgtgacgcttctcgacgaggctccatttacatgctgctccccatcaccctgcccactcccctccagactccctgggctgaacaacccccaagcctaggaacgtgccccctgtacttgggctaaaccgatccatgagaaatggctgttgcgtcccatgacccagctcccctccacactcagtctttcccgtgctccaacccgacacttcatcaatcccaccctttcaagtctcacagacctccctgctggcagcttttcgcccaggcac

SEQ ID NO: 13582 - DNA, 288 bp, Homo sapiens
  chr17:26578647-26578935
  hyper
cggggagacacctctaaggtgtacgcacgaggacggcataaaaccattggtcagctccctaatctcaccgacctctctcccgcaaattccttatcgccctcctttctccctgcccttccctcaaagtgtcagtcaggttgtcctcagcccagaagactcttcctccagacatcctcatggccggctctgtcgccccctggaggcattagctcaaaatccaccttttaaatgggtcttatcctgacacccctgtttaaaattgcaacccggcagcgtgcggtagatgac

SEQ ID NO: 13583 - DNA, 356 bp, Homo sapiens; identical to SEQ ID NO: 8084
  chr17:27038294-27038650
  hyper

SEQ ID NO: 13584 - DNA, 53 bp, Homo sapiens; identical to SEQ ID NO: 7010
  chr17:27940911-27940964
  hyper

SEQ ID NO: 13585 - DNA, 122 bp, Homo sapiens; identical to SEQ ID NO: 8096
  chr17:37760007-37760129
  hyper

SEQ ID NO: 13586 - DNA, 125 bp, Homo sapiens; identical to SEQ ID NO: 6471
  chr17:38179119-38179244
  hypo

SEQ ID NO: 13587 - DNA, 125 bp, Homo sapiens; identical to SEQ ID NO: 6472
  chr17:38179273-38179398
  hypo

SEQ ID NO: 13588 - DNA, 133 bp, Homo sapiens; identical to SEQ ID NO: 6473
  chr17:38179430-38179563
  hypo

SEQ ID NO: 13589 - DNA, 37 bp, Homo sapiens; identical to SEQ ID NO: 8098
  chr17:40332770-40332807
  binary

SEQ ID NO: 13590 - DNA, 54 bp, Homo sapiens; identical to SEQ ID NO: 10370
  chr17:46620299-46620353
  hyper

SEQ ID NO: 13591 - DNA, 322 bp, Homo sapiens; identical to SEQ ID NO: 10371
  chr17:46621458-46621780
  hyper

SEQ ID NO: 13592 - DNA, 182 bp, Homo sapiens; identical to SEQ ID NO: 8110
  chr17:46659093-46659275
  binary

SEQ ID NO: 13593 - DNA, 46 bp, Homo sapiens; identical to SEQ ID NO: 8111
  chr17:46659384-46659430
  binary

SEQ ID NO: 13594 - DNA, 56 bp, Homo sapiens
  chr17:46663887-46663943
  hyper
cgtctgctgacctctgcatgatcccggactctatgaattattgatgagatatgagc

SEQ ID NO: 13595 - DNA, 89 bp, Homo sapiens
  chr17:46675757-46675846
  hyper
caaacctatcaacctttttttttttcctccttctccttcgcctttctcctctctccccccaacaacacaacgcgtcctgttccacctac

SEQ ID NO: 13596 - DNA, 64 bp, Homo sapiens; identical to SEQ ID NO: 11245
  chr17:46687527-46687591
  binary

SEQ ID NO: 13597 - DNA, 149 bp, Homo sapiens; identical to SEQ ID NO: 11247
  chr17:46690905-46691054
  hyper

SEQ ID NO: 13598 - DNA, 170 bp, Homo sapiens; identical to SEQ ID NO: 8112
  chr17:46724200-46724370
  binary

SEQ ID NO: 13599 - DNA, 325 bp, Homo sapiens; identical to SEQ ID NO: 8115
  chr17:46829655-46829980
  hyper

SEQ ID NO: 13600 - DNA, 170 bp, Homo sapiens; identical to SEQ ID NO: 11253
  chr17:53341536-53341706
  hyper

SEQ ID NO: 13601 - DNA, 446 bp, Homo sapiens
  chr17:55644506-55644952
  hypo
cgtttaaaacattgctatcaaccagttggaatataggcccggagtatcgcagggagtaatctaattagtatgaagtcaattcagtcgctccttttgtatctcgtgattaaataagtggggaaaatggcttgaaaattaggtgctagaacgacccaattacatttctgtagctttttgtattcaatttcataaacaattttgctcttcgctggttaatcagtgaatgcctttttccagtttgaaaagcacttttgaaattataatgcaattaaattgtgtgtggatgttctggcatagcgagtgtgaaagccaggggcttggcaggccgccatgttgtaccttgactgtaatgagtccctgggctggcagcttgcgagtgtcattcataatattgtccatgctgggttactgtaaagtgcagctgccttaaccggcagttaaccggc

SEQ ID NO: 13602 - DNA, 85 bp, Homo sapiens
  chr17:58228397-58228482
  hyper
tcctctaggtgggaggtggcaggaaaggcatgttaatatttgataagaagctaaaggcgcttcaagcggctgggcacagggatcc

SEQ ID NO: 13603 - DNA, 80 bp, Homo sapiens; identical to SEQ ID NO: 8121
  chr17:58498618-58498698
  hyper

SEQ ID NO: 13604 - DNA, 38 bp, Homo sapiens
  chr17:59478678-59478716
  hyper
tttcccctgaacgaatttcggggagattaaggagaagc

SEQ ID NO: 13605 - DNA, 132 bp, Homo sapiens; identical to SEQ ID NO: 8122
  chr17:59532387-59532519
  hyper

SEQ ID NO: 13606 - DNA, 48 bp, Homo sapiens; identical to SEQ ID NO: 5997
  chr17:59539943-59539991
  hyper

SEQ ID NO: 13607 - DNA, 112 bp, Homo sapiens; identical to SEQ ID NO: 7021
  chr17:61777761-61777873
  binary

SEQ ID NO: 13608 - DNA, 76 bp, Homo sapiens; identical to SEQ ID NO: 7022
  chr17:61778423-61778499
  binary

SEQ ID NO: 13609 - DNA, 416 bp, Homo sapiens
  chr17:64751203-64751619
  hypo
tcagctagccttaccgaagagctaaaaagagattcatcccaaacaagagcttccttggaagcattccatgaagacttgaaacggtgctgcctcccaccacctgacccagtattgtcagtgcctcctctgaggatcgcagaaaatcgcaccccacgcccccccagtgcacattccagacttggagaagcgcggcatggggtggcggtggggagaacacctttctgccagatcaaaagcccagcactttattcagagttttatttatggctccttcagaaggttagtccagtcacgcctccttaataaccgcctcatcacacatgattcaggtgtcctggggccacttcacgctcctggcttcctggcccaaagcccaggagaccgctgaaccccactgcctggcattatttgcgggc

SEQ ID NO: 13610 - DNA, 294 bp, Homo sapiens
  chr17:66420425-66420719
  hypo
cgctgcgaccgacccgcagagccgatgtgggaaatcacaaaacaacagccccagccctgcatgcagggccccaccgcagctttgttttctaagccaaatgtgctcactagagggttccacggatctgcgggagaaagaagccagacctgcactccatccttttacaattggaagctcaatggacacaaaacaatgatcaggagaagtttccataacaaagcctaatggacattgtttcagtgcccaagtggcagctcctctctggctctaggagctgatgctccaagtcttggc

SEQ ID NO: 13611 - DNA, 308 bp, Homo sapiens
  chr17:71548553-71548861
  hypo
cgaggacgcatgacatctgtgtcacgcattgaaactggagtggcgcaggggaccctcctgagggggtggccgtccacattgccagctgatggccgagcggtcagtggtcgaggcgcaggtctgagtgtactcggccggagtacccatcatgagccacttagattagcttctcggcactcaagaagtacgtacgagcatcacgcccacttgagctatgagaaactgaggcataaatgggttaagtcacttggcaggatacgggggaacaggatttgagcccggccaggctgactgcagagcttgaggac

SEQ ID NO: 13612 - DNA, 398 bp, Homo sapiens
  chr17:71744668-71745066
  hypo
cgtggaagatggctctgccgggacagctgtaaactctttaaccttgtgtggggcttcgtccttcagcagcccggtgagggatcagtggcaggtgtgatggcgggggaggtggaggtggcggcggaggcggccctgcactcactcactcacggcagaacagactctggataaacaattatagtctatttacctcagaccatatggtgttggggaacaggtgtgcgggtaatgaagagcccagctccaattaagcgtcggggaacccggccggattcccactgaatcttgcgcttgggttgaggcccacttacaaatgagagctaaaaggactgaggctcggggaggcaggagcgggagcctgaggggtgcgtggcagggccagccagcggcccccaccc

SEQ ID NO: 13613 - DNA, 193 bp, Homo sapiens; identical to SEQ ID NO: 7027
  chr17:73615737-73615930
  hypo

SEQ ID NO: 13614 - DNA, 109 bp, Homo sapiens; identical to SEQ ID NO: 7028
  chr17:73616587-73616696
  hypo

SEQ ID NO: 13615 - DNA, 156 bp, Homo sapiens
  chr17:7369222-7369378
  hypo
ccacgtgctcggggccccctcggaagcccactggtggaggcagggctgaggcgtccacccctgcaggaccaccagggccagcgcccccagctcccagccctgtagacccccgcgtgctggcccctcgtcggcactgggcctcatgggtctgcagcc

SEQ ID NO: 13616 - DNA, 119 bp, Homo sapiens
  chr17:74390245-74390364
  hypo
cgcttggctgctctcaggatcgcttggctgctctcaggatccctgctctttcttttcttactcccttccttccaggacagggccagaactggggcctcagactcagattcagagtctag

SEQ ID NO: 13617 - DNA, 182 bp, Homo sapiens
  chr17:74390459-74390641
  hypo
agcgctgcctcagtaaacatgactcagagacactaggccccgtccacgaacagaggagtgggaaaatggaatgtggtgtggccacatgctgtcatcctattttgcaggtaaaaaggaagaaactagatcattatgaatcaacacaggttggtcttaagcaaattagagatgatgtgtacgac

SEQ ID NO: 13618 - DNA, 148 bp, Homo sapiens; identical to SEQ ID NO: 5760
  chr17:76034983-76035131
  hypo

SEQ ID NO: 13619 - DNA, 478 bp, Homo sapiens; identical to SEQ ID NO: 11267
  chr17:76215753-76216231
  hypo

SEQ ID NO: 13620 - DNA, 40 bp, Homo sapiens
  chr17:76254688-76254728
  hyper
cgacataagccccaggtgggctgcctttcacggcgccccc

SEQ ID NO: 13621 - DNA, 62 bp, Homo sapiens
  chr17:76254854-76254916
  hyper
tgggaacccagggctggccccgctgagataaagggaggcagcagatcgcagctggagatagc

SEQ ID NO: 13622 - DNA, 123 bp, Homo sapiens
  chr17:77290660-77290783
  hyper
cgtgagccaccacgccccgctagatacctttgcttcttggagaaacaggaaagatgcggaatgggggaaggcaggagttcagcaccacggacagcgacctgcgggtgggagacgctgccagcc

SEQ ID NO: 13623 - DNA, 404 bp, Homo sapiens
  chr17:77778031-77778435
  binary
ggggctcggctggcgtcgaggctccgcggccagagcgcggcggctccgcgcacgcccagaagccgtgttgccggttccggggctgccggaaagcgtggggccaagctgctgctctgtgcccgcgcaagcgcctcgctacccgggcgggaccttgctctctccggccgccctgggccgaggggtggctcagcatcgtgggggcggacgcagacggccactcggccgggacaccgtcggcccgggagccgtgatgccttttctctctgcagctgaagcctccgatcggtttccccgcccttctgtaggaaatcaaattcagggaacatggtaccgtatttacccgcacaacttcctcccttgacattttgcactctcgaagttggggcagaagtaattatgcaaac

SEQ ID NO: 13624 - DNA, 42 bp, Homo sapiens
  chr17:77788305-77788347
  binary
cgatcgtatttcctggggacagctcgacccccaggggagcac

SEQ ID NO: 13625 - DNA, 234 bp, Homo sapiens
  chr17:77788400-77788634
  binary
cgtgccccagtctacctagactcccaggagcgtccggccggaagagacagtgggagatgaggaaactgagattgggagggggacgtgatggggtaaggccattcctaaggcttgtggcagagctgcctcttcaccccacccccatttctttcagatgcggagatcaaagcccaggctcactggtgggtcgggagctcactcctccaagtacacttggccaacctcggggagccc

SEQ ID NO: 13626 - DNA, 188 bp, Homo sapiens; identical to SEQ ID NO: 7037
  chr17:77825812-77826000
  hypo

SEQ ID NO: 13627 - DNA, 117 bp, Homo sapiens; identical to SEQ ID NO: 8139
  chr17:78143796-78143913
  hypo

SEQ ID NO: 13628 - DNA, 557 bp, Homo sapiens
  chr17:78611023-78611580
  hypo
cgtcatgtctgtgagcaaacaaggggcccatgcccagcgtggctctgggtgtcatggcctccctgctaggtcatccggatgaagcctggggctgtggagtcagctcgtgagaaatgggatccaggtcctgagcgtgctggaactggcgagacggggtcacagcacacacctgcgtttccagccctgcccctgctgacggccaagacctcttttcccacccctgctccgcccccctctggataataagttgctgttctagttcatagaagtgacacttgtcccttttcagagaagcaggggagaggctgttttgttttatggcccgacattaaatactacaacagtaatactaaaaacaatcctgctgaagagctgcgcgtgccccactcttggggaactctgctgtggcagcagagtgcggatgagctgcatgctgagcagggagtgtcatttagcggaaatggttttgtgtgccagctaatggtagctgtgtatcagaagaggtgagaatgcaaaggtttgtcagatgtgtggaaattctgtcatcccaagggaac

SEQ ID NO: 13629 - DNA, 273 bp, Homo sapiens; identical to SEQ ID NO: 7038
  chr17:78668243-78668516
  hypo

SEQ ID NO: 13630 - DNA, 45 bp, Homo sapiens
  chr17:79093912-79093957
  hypo
cggccgccaggagccgcggccgctcccaccccttcctgcgggagc

SEQ ID NO: 13631 - DNA, 279 bp, Homo sapiens; identical to SEQ ID NO: 7040
  chr17:79913166-79913445
  hypo

SEQ ID NO: 13632 - DNA, 520 bp, Homo sapiens; identical to SEQ ID NO: 9269
  chr17:80294473-80294993
  hypo

SEQ ID NO: 13633 - DNA, 33 bp, Homo sapiens; identical to SEQ ID NO: 6493
  chr17:80797632-80797665
  hypo

SEQ ID NO: 13634 - DNA, 57 bp, Homo sapiens
  chr17:9143010-9143067
  hyper
cggtgaacatcatctccgtgtataagcagggcacgagccgcatccgccgcggtgacc

SEQ ID NO: 13635 - DNA, 187 bp, Homo sapiens
  chr17:9143110-9143297
  hyper
caaaatcaagcccctcaagaagtacctgctgctgggcaacgcggaggactctccggaccagagcggcatcgtggccgataaaagcagcctggtgatccagtggcgggacacgtgggcgcggcggctgcgcaagttccagcagcgtgagaagaagggcaagtgcaagaaggcctagcgccgaggcagc

SEQ ID NO: 13636 - DNA, 90 bp, Homo sapiens
  chr17:9143376-9143466
  hyper
cgagggctttcccaggtggggggagggagggggcggggccgcacggcgcggggggcgggaccctcggcggcccctccccctacccccacc

SEQ ID NO: 13637 - DNA, 34 bp, Homo sapiens
  chr17:9143504-9143538
  hyper
gggtgcgccgccggccgggccctggagaaatgac

SEQ ID NO: 13638 - DNA, 184 bp, Homo sapiens
  chr17:9143607-9143791
  hyper
cgtggaggggctgggggcagcctgccctggggcccgggggcgggcgcagaatcgcacaactggggccccaggcgcggggcgtggatggcgcggagacgtggacgggaggagaactgtgaattctcaagcccgtagtgtgggcggggcgcggagcacccaccaaaccaccacccgacacgcagcc

SEQ ID NO: 13639 - DNA, 311 bp, Homo sapiens; identical to SEQ ID NO: 9277
  chr18:20911034-20911345
  hypo

SEQ ID NO: 13640 - DNA, 122 bp, Homo sapiens; identical to SEQ ID NO: 12437
  chr18:24130266-24130388
  hyper

SEQ ID NO: 13641 - DNA, 94 bp, Homo sapiens; identical to SEQ ID NO: 7055
  chr18:3119830-3119924
  hypo

SEQ ID NO: 13642 - DNA, 33 bp, Homo sapiens
  chr18:34823862-34823895
  hyper
cgaggatgacggcggcggcggcggcggcgaccc

SEQ ID NO: 13643 - DNA, 80 bp, Homo sapiens; identical to SEQ ID NO: 6007
  chr18:44335955-44336035
  hyper

SEQ ID NO: 13644 - DNA, 141 bp, Homo sapiens
  chr18:47285293-47285434
  hypo
cgcccggccagtggtatttgtttttaatcaccacacagagctattgtgaggaccaaataaagaaatggatgtgaaggcgtgctgcgaactgcgccatgtggggtgttttctcattgttcaggtagcattcagcgtgaggcc

SEQ ID NO: 13645 - DNA, 196 bp, Homo sapiens; identical to SEQ ID NO: 7061
  chr18:47339411-47339607
  hyper

SEQ ID NO: 13646 - DNA, 401 bp, Homo sapiens; identical to SEQ ID NO: 6009
  chr18:47339758-47340159
  hyper

SEQ ID NO: 13647 - DNA, 121 bp, Homo sapiens
  chr18:55103761-55103882
  hyper
cgcggtgagcaacacctgtcccgcggcctgggcaccccacctgcggccatgatgtcgcacctgaacggcctgcaccacccgggccacactcagtctcacgggccggtgctggcacccagtc

SEQ ID NO: 13648 - DNA, 166 bp, Homo sapiens
  chr18:55103897-55104063
  hyper
cgtcctcatcgggctcgcaggtggccacgtcgggccagctggaagaaatcaacaccaaagaggtggcccagcgcatcacagcggagctgaagcgctacagtatcccccaggcgatctttgcgcagagggtgctgtgccggtctcaggggactctctccgacctgct

SEQ ID NO: 13649 - DNA, 50 bp, Homo sapiens
  chr18:55104092-55104142
  hyper
aatctggcagggagaccttccgcaggatgtggaagtggcttcaggagccc

SEQ ID NO: 13650 - DNA, 182 bp, Homo sapiens
  chr18:55104166-55104348
  hyper
cgcctggcaggtaaggccggggctagccaggggccaggctgctgggaagagggctccgggtccggtgcttgtggcccaagtctgcgcgccgagtcacttctcttgattctttccttctctttcctatacacgtcctctttcttctcgtttttatttcttcttccattttctctttctcttcc

SEQ ID NO: 13651 - DNA, 255 bp, Homo sapiens
  chr18:55105210-55105465
  hyper
cgcgggttacattgttctggagccggctcggctctttgtgcctcctctagcggccaagctgcgaggtacagccctctattgttctaggagcacagaaacctcctgtgtgggcggcgggtgcgcgagctagagggaaagatgcagtagttactgcgactggcacgcagttgcgcgcttttgtgcgcacggaccccgcgcggtgtgcgtggcgactgcgctgcccctaggagcaagccacgggcccagaggggcaaa

SEQ ID NO: 13652 - DNA, 57 bp, Homo sapiens; identical to SEQ ID NO: 6012
  chr18:55106090-55106147
  hyper

SEQ ID NO: 13653 - DNA, 115 bp, Homo sapiens; identical to SEQ ID NO: 8162
  chr18:55850987-55851102
  hypo

SEQ ID NO: 13654 - DNA, 101 bp, Homo sapiens; identical to SEQ ID NO: 7067
  chr18:60985398-60985499
  hyper

SEQ ID NO: 13655 - DNA, 75 bp, Homo sapiens; identical to SEQ ID NO: 7068
  chr18:60985973-60986048
  hyper

SEQ ID NO: 13656 - DNA, 128 bp, Homo sapiens
  chr18:72347372-72347500
  hypo
cggccacatgagaaatgagcaggccagtgtggaggagcttccggagggaggggccacctttaaatgtgtcaagtgcacagagccctttgattctgaacagaatttatttttacatattaaaggacagc

SEQ ID NO: 13657 - DNA, 74 bp, Homo sapiens
  chr18:72347576-72347650
  hypo
ccagggaaacgtctgcaagtattgtgggaagatgtgtcgaagcagcaactcgatggccttcctggcacacattc

SEQ ID NO: 13658 - DNA, 133 bp, Homo sapiens; identical to SEQ ID NO: 7069
  chr18:74113780-74113913
  hypo

SEQ ID NO: 13659 - DNA, 61 bp, Homo sapiens; identical to SEQ ID NO: 7070
  chr18:74113942-74114003
  hypo

SEQ ID NO: 13660 - DNA, 162 bp, Homo sapiens
  chr18:77076178-77076340
  hypo
cggaaacaggattattagagagctcctgactgagtaaagaaaaatctaaatgacaaatggccggtcgtgcaggtggagattgcgttctgtggttgcctgcgccatccctgagagcatccagagaaaacagggaaaaatgtccactgcaaccttccacccgcc

SEQ ID NO: 13661 - DNA, 161 bp, Homo sapiens
  chr18:77508739-77508900
  hypo
cgacagagtcatgatcagaggcctttagagtcatcattatcatgtctgtgtgtgagccgtgactgcctgggagccgtgtctgcctgggagccgtgactgcacatgagccgtgtctgtgtgtgagccgttctgtgtgtttgccgtgtctgtgtgtttgccgt

SEQ ID NO: 13662 - DNA, 399 bp, Homo sapiens
  chr18:77508946-77509345
  hypo
gcacagggctctccagcgggagctgaggtggtcccttccgtgggctcggttcaggtcctgtggcaccctgccaagttatgctggcgtttctgaaggtgtgtcctgctgtcaacagcactctgggtgtttttgtcggccttgtgaggggaacatatttctaaacctcaaacagagagtcacagctggcatttcccattctttgccatcctcttgctgccattagaactctgccacggatggcttcctcgcttgattttagaaagaaaagaattgttggaactggttcttgcacctctcgccctccccctcctctccctgcttgccccagggtcccgcctggctctcgtctgccccgtcttcactttcggtcggggcccctgcccctgcccctgctctgct

SEQ ID NO: 13663 - DNA, 116 bp, Homo sapiens
  chr18:77509679-77509795
  hypo
tcccgtccacctgccagtgggttgagctcttccaggggttcgggacacccctcacggcagcaccttcacgtttacgagaactgtctctgtcttgttttgtttcaagttctcaaaac

SEQ ID NO: 13664 - DNA, 268 bp, Homo sapiens
  chr18:77535504-77535772
  hypo
cgatgggcgggtcccgtcctgggtggggcagagcgggatggattctatcgcctgctcagaacgctgcacgatgtaaaactggtacttgccagggacaagaaggaccattcagctttgggacgtgaccaggaggtctcagagagaagcaaacagctgcgtccctgtgctgaggccgctggcgtgggcgcctgtcctggagcccggggtattggcagcgcccagggggagcccagcgacccattgtggctccacatcccacaggttcacc

SEQ ID NO: 13665 - DNA, 113 bp, Homo sapiens; identical to SEQ ID NO: 8176
  chr18:77616298-77616411
  hypo

SEQ ID NO: 13666 - DNA, 789 bp, Homo sapiens
  chr18:8659297-8660086
  hypo
cgcgcagaacgcccgtgcctgggaagaggcctgcactccagcagacttccatgttcgctggaagcctcccttcctgactgtgaattgggacaatgcgcagacttccatgttcgttggaagcctcccttcctgactgtgaattgggacgatgcgcgggattttctgaaacctcagttcctccgtctgtaagatgagattgtggggaggagggcggacctgtaagtgcccagccacgagggctgagagattcgaactcctttgctgccgcgaagaagggcctgttccccggaggccaggtgggctccaggccaagctcgcagaggggccaggtgtgctctggcggtgagagggccgcgcgtcccggcacacaccccgcccatttcagcaccctctccaccctcctcagatgaccagagaaatccaagcaggcccttggctttcaagattcagcttcagccatgcataagtccttcactgaagtggcagaggaaggacgagcggctttgttggattggggctggagccccgtgcccggctgtgggtgctcgtgggagagcctcgcccggccctgcgcttcccgagagttcgccgggagcacaagccctggagagcccatgggcagagctcaccagccccacctcacagagagggaaactccgaagtggccgtggatttgcccagggtcacccagtgacagacagctcagactcctttcccagctccggccaccgaagcttgcaggcgcgtccgttccagctcagataagcacctccgccacgctttcctcac

SEQ ID NO: 13667 - DNA, 81 bp, Homo sapiens; identical to SEQ ID NO: 7073
  chr18:9514129-9514210
  hypo

SEQ ID NO: 13668 - DNA, 66 bp, Homo sapiens
  chr18:9547721-9547787
  hypo
cgtggcgaatgcccactgaacctcggctctcatggaagcaggaaagacaccgagattcaagccttc

SEQ ID NO: 13669 - DNA, 176 bp, Homo sapiens
  chr18:9547816-9547992
  hypo
atcttcggagattttggtactggcagggtggatgcttgcaaaatacttgacatcgctgtcacggtccatctgaagagccatgatggtctgctccacagcctcctggtggcagctggcagaggccaagaaatagtctggaaatgacatgtgcataggacagatgaaaccagtccaac

SEQ ID NO: 13670 - DNA, 229 bp, Homo sapiens; identical to SEQ ID NO: 8179
  chr19:1004547-1004776
  hypo

SEQ ID NO: 13671 - DNA, 279 bp, Homo sapiens; identical to SEQ ID NO: 7074
  chr19:1005441-1005720
  hypo

SEQ ID NO: 13672 - DNA, 128 bp, Homo sapiens; identical to SEQ ID NO: 8182
  chr19:1030225-1030353
  hypo

SEQ ID NO: 13673 - DNA, 61 bp, Homo sapiens; identical to SEQ ID NO: 11314
  chr19:10370250-10370311
  hypo

SEQ ID NO: 13674 - DNA, 88 bp, Homo sapiens; identical to SEQ ID NO: 11315
  chr19:10370575-10370663
  hypo

SEQ ID NO: 13675 - DNA, 264 bp, Homo sapiens
  chr19:10402631-10402895
  hyper
cgataagatagtgcatgtcaagtgcttaggacatattgagcgctcggagttagttcaaacttggttcttcgacccctagccctgtctccggatgccccgcgcctcgctgctccccggctcttggaagttggctcggaaaggcccgtgagctgcactctggacggactgtttccagcctcagaggccagggtctacctcgcactgggggaccagaatctgagtcctgatgtcaccctcgaaggggacgcattcgtggccactgcc

SEQ ID NO: 13676 - DNA, 341 bp, Homo sapiens
  chr19:10402960-10403301
  hyper
cgaaaaccgggagacccgggagaacgtgaccatctacagtaaggaaggaggcggggtctccgcggctccgaggtgggaccagaggaatgcgaaggcggggcgaagagtgggcgggacctcagtaccggaacaggcgtggcccgaggggcggggcaggtgggggcggagacgtaatcgctggggaggaggagcctgtacagcctgagaggcggggcgccgtaccctagttcgttctcagcaccccgaggattcgggcagataaggggcgggccttgaccggagggaggggtatggtcagtatactacgaccaaatgctccgcccccaggcttcccggcacca

SEQ ID NO: 13677 - DNA, 131 bp, Homo sapiens
  chr19:10403330-10403461
  hyper
cgaggggcagatggtgacagtaacctgcgcagctggggcccaagctctggtcacactggagggagttccagccgcggtcccggggcagcccgcccagcttcagctaaatgccaccgagaacgacgacagac

SEQ ID NO: 13678 - DNA, 39 bp, Homo sapiens; identical to SEQ ID NO: 5768
  chr19:10616220-10616259
  binary

SEQ ID NO: 13679 - DNA, 116 bp, Homo sapiens; identical to SEQ ID NO: 5769
  chr19:10691764-10691880
  binary

SEQ ID NO: 13680 - DNA, 109 bp, Homo sapiens
  chr19:10949233-10949342
  hypo
cggcctcgttgtcttgagtaacacccggggtcgttgtctcacagccacgaagaacaaggaccaggacacacaaaagaatgaggttgagaacgaacgtttaataggcaac

SEQ ID NO: 13681 - DNA, 177 bp, Homo sapiens; identical to SEQ ID NO: 6503
  chr19:11003087-11003264
  hypo

SEQ ID NO: 13682 - DNA, 385 bp, Homo sapiens
  chr19:11030249-11030634
  hypo
cacacctgtggtctctcccaggacacatttgacatccggatcctgatggccaagtctgtcaagtacacggtgaacttcttagaagccaaagaaggagatttgcacaggtactggcacccacactccatcctcccaggcctggctcaggccgaaggtcagggccacccctggctcccgccggcatcctgccgtcccagggcagatggtgggcgggggccccaggcctctgcacctggcaccccctcttctctctcggcagcgcctgtctggcttccccagcagccactgccctttgccttccaggatagaaatcccattcaaattccacatgctgcattcagggctggtccacggcctggctttctggtttgacgttgctttcatc

SEQ ID NO: 13683 - DNA, 348 bp, Homo sapiens
  chr19:11128636-11128984
  hypo
cgcaaggctgctgagcctctgctccccacgcttcttcaggaactctccccagccttcaccacagccatgcgtccttctgtctattggctgtgccgcctggttggctgtggcttccagcggggctggagatgggttcatggtggacacagcacctccctcgtggagctgcttgggggcaaaccacgagtagtccctgggactccagcttcgagccctgtctttacggaccaccccgtctagactttctgagtggcttccctcccccactgaaaactccctgccccagagttcctcccagagcccgtcccctttgggactcagctttattaccgcctccaccctctcctc

SEQ ID NO: 13684 - DNA, 59 bp, Homo sapiens
  chr19:11285272-11285331
  hypo
gaacgtgaccaggtgccgccgcaccagctcggggtgtgcgtcgctgcggcaggccaggc

SEQ ID NO: 13685 - DNA, 598 bp, Homo sapiens
  chr19:11491655-11492253
  hyper
cggggaggaggtcagggcggtgggcttgccccgtgattcgccctggctcctcctacacccccgcctggggcctcaccgctaggcgtcagcagcgacacaggctccgaccaggcgctccagaagccgccgaagctcggctcagccatacgcgcgcggacggcgaaggtgtagcgcgtccggccccgcaggttgctcagcacacactcggtgcggccctccaggatctccacctgggggcggaatcagggcgagggacgcgtagcagacaaaaatagatgacgtgggggcgggccctggtggaactgagccaatcaggggaaaggaaaacggtgccctagaattgcaatgggaccaataagagtagggggaggagcccaagaaagctcagggccaatcagagagagagtctctggtacgaaagggcgggacccgggcaatttaatatctgggctagcactcgtagagggacccgggcgctaaaggggtctagggttacgggccggagggagaagaagttggggttcaacaggcttgcgaggacattaggaaagggggtgtgtctgtgggcgtggaacggtcttcagcaccagggtaatgg

SEQ ID NO: 13686 - DNA, 135 bp, Homo sapiens
  chr19:11492528-11492663
  hyper
caggcatgggggttggtcaggtgggcgaggactgagaccctctcctccgaccactcctccattcccagagcacttacctacttcattgatgtggatgacacggtgatatcgcggagcgccggaggctgctgtgac

SEQ ID NO: 13687 - DNA, 339 bp, Homo sapiens; identical to SEQ ID NO: 8185
  chr19:1166870-1167209
  hypo

SEQ ID NO: 13688 - DNA, 59 bp, Homo sapiens
  chr19:1496674-1496733
  hypo
gtaaccgctgtggggagataggagctgtgtgtgtgtgtgtgtgcgcgcgcgcgcgcgtg

SEQ ID NO: 13689 - DNA, 228 bp, Homo sapiens
  chr19:1577427-1577655
  hypo
cgaggcaggggggccggctggcagtggagcattctggcagcgccgggcgaccaagtcccgactggcagcggctggagtttggttttcagaagcgaaggctggcgttggcacacagggaaggctgcccgatgacgtgcctcgactgtgttacatttactgaaggagagcggcctcctgggcatgccactcaggcacggtgaggctctgtggcaccaccagccgcatggc

SEQ ID NO: 13690 - DNA, 548 bp, Homo sapiens
  chr19:1577687-1578235
  hypo
ccacagcagaccagagtcccgtcctcacgctgcacagtgggtgatgtgagtttcaaaactacgcctccagaccgagaaaccctcccagctgtcagcaagccgtggcgccgagctgccgggcacctgctggctgctctccagtctcaaggagctgggacagcgggcatggggaggagctggcctcgagcccaaaggtcgtagggagccaggcagggcccaggagcacccggcacttcccgaagccggactctgtagaggacgagcgtggagggtctttcgggtgggggcagccccagctgtgtgccccgaggccccgggaagtggggacgggccgaggagggagccaggagcacggccttcctcctgggtgtctccaaggctgggcttcgccgccgagcctggttcacgtggggccgaggaccgcgtctgcaggcggctccagcaggcagcacgggctctcggcagggcctctggaaaggacagggagggctggctttagcgactccacgggacggggacgcttgggctcttctagggagatgggaagc

SEQ ID NO: 13691 - DNA, 31 bp, Homo sapiens; identical to SEQ ID NO: 8208
  chr19:17007056-17007087
  hyper

SEQ ID NO: 13692 - DNA, 215 bp, Homo sapiens; identical to SEQ ID NO: 8209
  chr19:17008145-17008360
  hyper

SEQ ID NO: 13693 - DNA, 31 bp, Homo sapiens; identical to SEQ ID NO: 8210
  chr19:17008820-17008851
  hyper

SEQ ID NO: 13694 - DNA, 163 bp, Homo sapiens
  chr19:17362459-17362622
  hypo
acctgttccagctccctgcgcagagactgcagctgctcctgcaggtccagtgtcctgttgcgaaggagaagagagggggctcacagccccagccgatcctgtttcccaggtctcctcctacccacctgcccacagtattgtcatgtaaacacacctgtacacc

SEQ ID NO: 13695 - DNA, 67 bp, Homo sapiens
  chr19:17397256-17397323
  hypo
cgtcgccggcgcttgggggtgcacctgctgcaccgtgccctccttgtcttcctggctgaaggcgagc

SEQ ID NO: 13696 - DNA, 240 bp, Homo sapiens; identical to SEQ ID NO: 12486
  chr19:17716539-17716779
  binary

SEQ ID NO: 13697 - DNA, 133 bp, Homo sapiens; identical to SEQ ID NO: 8212
  chr19:17958343-17958476
  hyper

SEQ ID NO: 13698 - DNA, 109 bp, Homo sapiens; identical to SEQ ID NO: 7091
  chr19:1857456-1857565
  hyper

SEQ ID NO: 13699 - DNA, 160 bp, Homo sapiens; identical to SEQ ID NO: 8219
  chr19:18808024-18808184
  hypo

SEQ ID NO: 13700 - DNA, 31 bp, Homo sapiens
  chr19:18811469-18811500
  hyper
cgcccggaaatctctgggaggaagtatcagc

SEQ ID NO: 13701 - DNA, 233 bp, Homo sapiens; identical to SEQ ID NO: 6516
  chr19:1978023-1978256
  hypo

SEQ ID NO: 13702 - DNA, 116 bp, Homo sapiens; identical to SEQ ID NO: 5770
  chr19:1979018-1979134
  binary

SEQ ID NO: 13703 - DNA, 728 bp, Homo sapiens
  chr19:2164931-2165659
  binary
cgatcttgagtgggcaggattgggctcacccccggagttagtaaattttgtcttcttcatcttggtgaccgttggaaaatgacaggccgggtggaatgttacagaggcaccccaccgggtggttccagaaacccgcgtgcggctcccggggtgcgagtcccggcgtggcccctgaggaggcggggcgcgtgcgtccgcgcttgggaccctctggccacgctccgggctgggcagggcgcgttttcggggaaaagtgaagcaggcgctgtcagcgagcgtgtccggggcgcgagttttggggggcgcgtctgcagggcccggccgggcatccccgcgcgccctgggactcccgcgcgcgctgggcttgtgtcagtttttggaaacgtgctcgctgggggcggggtcaggacgcggagagcgctggggagcccgggctggctcactgccccgggtcggtgcgagtggatgggagagggagcgcagcttccagcctggccgcacgtcccgcgcgcggggctggcggggtagggccctggggctctggcttctctggttgggcagctccgggtgtgcgcctgggcggcctgagccgggatcccgccaggagaggtcctaggacaaaaactgaaagcagaggccgcgcttcagcgccccgaccggtttcctccctcgaaagttcaaactccagaacccttccagcctccacttctctctgttgggctctcatc

SEQ ID NO: 13704 - DNA, 64 bp, Homo sapiens
  chr19:2360648-2360712
  hypo
cgcaggtgcggcgtgtagatgcggcaggggttgtgtggacgcaggtgtggtgtgtagatgcggc

SEQ ID NO: 13705 - DNA, 196 bp, Homo sapiens
  chr19:29993099-29993295
  hypo
cgcaggacacatctcagagctgggccacataagacgggaggaagctgcggcatttatccatccactccattcatccgtcactggctggagccactcctgggatgccgatgcccacacgcctccgtggctatagggagcccacaggctgagtcacaggaaccgagggtaaggtggctggtgtgcagggtggccgtgc

SEQ ID NO: 13706 - DNA, 132 bp, Homo sapiens
  chr19:30186010-30186142
  hypo
cgccacccagacaccgaacacccagacacctaacacacagacacctgacacccagacacctggacacctgacacccggacacccagactacctgacacccggacacctggacacccgatcacccagacacct

SEQ ID NO: 13707 - DNA, 75 bp, Homo sapiens
  chr19:30186240-30186315
  hypo
ctgacacccagacacctgacacccggacacctggacacccggacaccgagacacctgacacccagacactgagac

SEQ ID NO: 13708 - DNA, 66 bp, Homo sapiens
  chr19:31217770-31217836
  hypo
cgctgctgagcgcttaacgacaaccagccttctccccagaaccggctgtgagcacagctaagaata

SEQ ID NO: 13709 - DNA, 75 bp, Homo sapiens
  chr19:31217914-31217989
  hypo
tctgcctcagccttgccgagcagggggccaagcgtgtctgagtcagttcagctgctgtaacaaagcaccgtgatc

SEQ ID NO: 13710 - DNA, 184 bp, Homo sapiens
  chr19:31640397-31640581
  hypo
cggcgtgtggaggcgggaggggcacagccaggtgcgagggaaggctggcatctggcgcccactgcctgcccacccgcccgcccgcccgcccaagtaggtctgggcttccctgcctttaataaccatccccaccgcagaggaacggaagctagaaacacaccggctttggcatttcaggcgagtc

SEQ ID NO: 13711 - DNA, 137 bp, Homo sapiens
  chr19:32083463-32083600
  hypo
cgcttgccggggagtcctgctgccttccgaggtgtgaagggaaggcatgcactgtgcatatgctgtaccatacagttttgcctacaactgcttgtagcttcattgtagctgtgaatgctccgttcctctccttttca

SEQ ID NO: 13712 - DNA, 32 bp, Homo sapiens
  chr19:32083759-32083791
  hypo
catgtccatgcagccctcccgctggctgtgtc

SEQ ID NO: 13713 - DNA, 93 bp, Homo sapiens
  chr19:32198266-32198359
  hypo
cgagctggctggcacttcgaattaccctcaagagtccatgggcatcacgtcacatttgcgtgcccaatatcatacgtgacgagtcgtgccacc

SEQ ID NO: 13714 - DNA, 230 bp, Homo sapiens; identical to SEQ ID NO: 7104
  chr19:3360723-3360953
  hyper

SEQ ID NO: 13715 - DNA, 225 bp, Homo sapiens
  chr19:35531876-35532101
  hyper
gggcaggtgtctggcggtgaccctgcacgtctggtgtttacctggccctgggtctgacgtgggccgcgcctggctgctggcgggacagtgtgttatctgcctgcggacgcttccggccacttggcctgggcctctgcccttagcgctgtgttttcccggccaagccccccatcccccctatctagtgctaggactttctggctccagaggtcaccgcggccgggc

SEQ ID NO: 13716 - DNA, 58 bp, Homo sapiens; identical to SEQ ID NO: 8232
  chr19:36222534-36222592
  hypo

SEQ ID NO: 13717 - DNA, 32 bp, Homo sapiens; identical to SEQ ID NO: 10424
  chr19:37095634-37095666
  hyper

SEQ ID NO: 13718 - DNA, 105 bp, Homo sapiens; identical to SEQ ID NO: 6042
  chr19:37096594-37096699
  hyper

SEQ ID NO: 13719 - DNA, 42 bp, Homo sapiens; identical to SEQ ID NO: 6045
  chr19:37463952-37463994
  hyper

SEQ ID NO: 13720 - DNA, 61 bp, Homo sapiens
  chr19:3747832-3747893
  hypo
cggcctggccgacagctccgctgacctcagctgcgacagccgcgttaacagcgactacgag

SEQ ID NO: 13721 - DNA, 98 bp, Homo sapiens
  chr19:3748020-3748118
  hypo
cagatgagtcccagagcccgagggatcgtgggagaatctcggctcatcagggggcccaggtgcgtcggacatggggggcaggcctgggaagggtctcc

SEQ ID NO: 13722 - DNA, 93 bp, Homo sapiens
  chr19:3777982-3778075
  hypo
cgtctttatcgggcgatcatccttcgcaggtctggggtgtccacgggccgcccagagccccctacgtgggccagcccctgctgtgggcaccag

SEQ ID NO: 13723 - DNA, 109 bp, Homo sapiens
  chr19:3778417-3778526
  hypo
tgactgcggacagcaggcgtgggcaggggtcagggccacagcctctggacctgcccggaacccagtgcctccctgggacccccgctcaccattttagggtacggagccc

SEQ ID NO: 13724 - DNA, 38 bp, Homo sapiens; identical to SEQ ID NO: 6048
  chr19:38182720-38182758
  hyper

SEQ ID NO: 13725 - DNA, 73 bp, Homo sapiens
  chr19:38828044-38828117
  hypo
cgagagtggtgtgagcgacagcttctttgagcaagagcccgtggacacagtgagcagcttgtttcacatgctg

SEQ ID NO: 13726 - DNA, 57 bp, Homo sapiens; identical to SEQ ID NO: 6521
  chr19:39329516-39329573
  hypo

SEQ ID NO: 13727 - DNA, 54 bp, Homo sapiens; identical to SEQ ID NO: 8241
  chr19:403809-403863
  hypo

SEQ ID NO: 13728 - DNA, 423 bp, Homo sapiens
  chr19:40948768-40949191
  hyper
cgatcaagagttaattgccagttattcgctcaacagatttactgagtgcctactatattcgaaatctcctggagccctgttggggaacctatgttgagattcttcttcaacagtcgggatatttctatgtcctcttccttaaccgactgggagcgctcccaagagtaggaaaggggcctgtctcattccctctgcccacgctttcagattcccccaaagcgcgccccataggaaaacttgctagaactcagctcagaccaagccccgccccctcggaggtcccactcaatcagaccgcgacactgtaaggccccgcccccccatgggtccttacagagcatccaggaacgccccaatttggcccaggggcttctgggaaacgggggccaacagccgccaggtacacgaattgacgtcgagcac

SEQ ID NO: 13729 - DNA, 207 bp, Homo sapiens
  chr19:41921100-41921307
  hypo
cgccctgtggtgtttgtctaaggtctagtgtcatccgtgcggaaaaagatttccagacaccaggcagcaagctgggcccccgccagctgtgctgagcactgcacctgtttttgctgaagggttctcttgtgagggcaccaggcaggaccgagcaagcctcatgggaatcatgggagccgctgagctctccacatgggagagctggcc

SEQ ID NO: 13730 - DNA, 157 bp, Homo sapiens; identical to SEQ ID NO: 10439
  chr19:42408960-42409117
  hypo

SEQ ID NO: 13731 - DNA, 72 bp, Homo sapiens
  chr19:42906796-42906868
  hypo
cgggtgccagcagcggcgacatgaaggggttcttgactatgggtgaggagtagaggggcatctgtgtggcac

SEQ ID NO: 13732 - DNA, 157 bp, Homo sapiens
  chr19:42906913-42907070
  hypo
ggacgcccaggcctctgtccatggggctcagctcatttttggcctcagcctcttcccctgcatcctcaggtggtaataagaagttgacatcggagggtgtggaggggctaagtgtctcagctgacagcgacatctcgggggtgtccgacgacgtctc

SEQ ID NO: 13733 - DNA, 127 bp, Homo sapiens; identical to SEQ ID NO: 12517
  chr19:42927599-42927726
  binary

SEQ ID NO: 13734 - DNA, 166 bp, Homo sapiens
  chr19:44030452-44030618
  hyper
cggagcagccccgagcctgtaatgtggtccgcgtggcagtgggtattcactgggagagagaggagggacaggtccggagggtacagaaaggacctgggagtcccagcccagatccttctccctcagactcaggagttctgggccccagcttcccattccactgacg

SEQ ID NO: 13735 - DNA, 133 bp, Homo sapiens
  chr19:44030819-44030952
  hyper
gggggacccaggtgagggcgcagaaccggacttccacccactggaggccaagtagtccagactgaccctatcctcttcctaagatccagaagcagaaaccccagcccactctttccccgggagtcgggagtcc

SEQ ID NO: 13736 - DNA, 68 bp, Homo sapiens; identical to SEQ ID NO: 6053
  chr19:44711963-44712031
  hyper

SEQ ID NO: 13737 - DNA, 75 bp, Homo sapiens
  chr19:45810267-45810342
  hypo
agccgcatgtagtgagtgcctactgtgtaacaggttacctgcacacaggtaatgcctgttcattcgtgagctcac

SEQ ID NO: 13738 - DNA, 72 bp, Homo sapiens
  chr19:46996430-46996502
  hyper
cgcaggccccgagagcgccacgaagagccctgctcgcctctgcaggtgcccggcgtccacacacacaccccc

SEQ ID NO: 13739 - DNA, 35 bp, Homo sapiens
  chr19:46997221-46997256
  hyper
cgttggaccccatgttctcccgggcggccaggagc

SEQ ID NO: 13740 - DNA, 242 bp, Homo sapiens; identical to SEQ ID NO: 7124
  chr19:48229040-48229282
  binary

SEQ ID NO: 13741 - DNA, 57 bp, Homo sapiens
  chr19:49244884-49244941
  hyper
cggggccagaggccacgcccccggcaggaagccacaccccgtgccccgaaaccacac

SEQ ID NO: 13742 - DNA, 122 bp, Homo sapiens
  chr19:50129561-50129683
  hypo
cgttctcgcccccgccccaccccctgctcccactaccctttgtctcttgctctttcttgggcttctgtacaactcaacttgtatacactgtgtacacacaaccagccaaacgaaaacccaac

SEQ ID NO: 13743 - DNA, 81 bp, Homo sapiens
  chr19:50297054-50297135
  hypo
gacttagaatacacatgcgcatctcctgggcagtcaggaagaggcctggattcgcaggcaaagagaagaacacaccagctc

SEQ ID NO: 13744 - DNA, 78 bp, Homo sapiens; identical to SEQ ID NO: 7126
  chr19:50320125-50320203
  hypo

SEQ ID NO: 13745 - DNA, 159 bp, Homo sapiens
  chr19:50352994-50353153
  hypo
cgggagcccctgggcaggaaaacatggacaggcctacgggttcttctgccatttcactggccactcctccgtgtcctttgctggttgcttctcattgtcgtgactgctaaagggatgagtgtcccagtctctttgtgagctcatccagtctccattcaa

SEQ ID NO: 13746 - DNA, 67 bp, Homo sapiens; identical to SEQ ID NO: 8277
  chr19:50365162-50365229
  hypo

SEQ ID NO: 13747 - DNA, 371 bp, Homo sapiens; identical to SEQ ID NO: 8278
  chr19:5037624-5037995
  hypo

SEQ ID NO: 13748 - DNA, 77 bp, Homo sapiens; identical to SEQ ID NO: 11402
  chr19:51111319-51111396
  binary

SEQ ID NO: 13749 - DNA, 99 bp, Homo sapiens; identical to SEQ ID NO: 7131
  chr19:549193-549292
  hypo

SEQ ID NO: 13750 - DNA, 108 bp, Homo sapiens
  chr19:55976235-55976343
  hypo
cgtgcgtcggcggggggcagagaatggtgcctggagatggccaattaagggaacaaaggcctcgttcgggaggcgaggccgccagtaagtcaaatgcagcgattgagc

SEQ ID NO: 13751 - DNA, 146 bp, Homo sapiens; identical to SEQ ID NO: 7135
  chr19:56688223-56688369
  hypo

SEQ ID NO: 13752 - DNA, 461 bp, Homo sapiens
  chr19:57181884-57182345
  hypo
cgggcacacgtagctacacacacacccagccccacacgtagctccctgtgtgaagaggtgcacagagacgcacaaggtcacacatgccacctgctccacacaggccggccattactgggacacacccacaggggatggctggacacatgtgcagtcacactcggtggatagagctccagcatagccaaagcccacatgtgcagcgtctccatcatgtgcagatgcacacacttcagacagcacggcactctacaggctcgcacagccaggtcacccatcattgtgctggcaggcacacgggccgagccagcctacacggcggcacacccagacatgcacacgtggggtcacacacctcacatccaggagaactttcagacttgcccaaaggcagccacacgtgtatgtgacatgctgtgatatgcagacaccgcttcacatgaacgagcacataacacacc

SEQ ID NO: 13753 - DNA, 54 bp, Homo sapiens; identical to SEQ ID NO: 8287
  chr19:58964127-58964181
  hypo

SEQ ID NO: 13754 - DNA, 165 bp, Homo sapiens
  chr19:660994-661159
  hyper
cgtccatgattaaatatttgtcaatcactgttccatgctggctccctggccagcctgtaaattctgtgagggcaaagaccacagcggcctgtcaccacagagttcctttcactacaggaaggccctccccaggcccagtgacagtcggaggaggtcaaggtcctc

SEQ ID NO: 13755 - DNA, 156 bp, Homo sapiens
  chr19:661431-661587
  hyper
cgagacccctgggagacagaggagtaaggcaaggctcagtctcagctccccaaccttcgccccacacccgagatttcactttatttgttcctcctgctggggaggggaagccctgtggcttcagtagagaggaaaccacacctctctctttccact

SEQ ID NO: 13756 - DNA, 296 bp, Homo sapiens
  chr19:661720-662016
  hyper
cttctggggggcttggacttctcttacgggtcaaagcgtagcaacagccgggcggctacgtacacagcacagtaaatcctcaatgcctgcagcctcttcccctgggcacagggtggggagtccagacccctccacctcctgcggctgctcccctcaagctggccaagcggctcccgactgagccggctctgccactttcccgctgagccaccacgcgcctcagtttccccatctataaagcacgggtggctcgactaaatcaccactttgcacgtcagcctggcgaagggcaacac

SEQ ID NO: 13757 - DNA, 764 bp, Homo sapiens; identical to SEQ ID NO: 11446
  chr19:8576026-8576790
  hypo

SEQ ID NO: 13758 - DNA, 413 bp, Homo sapiens
  chr19:871003-871416
  hypo
tgtgtttggggaccaatgcagggacacacgcacctggcgaggccgtcgagctgcagggtggcagcactgccaggcagcgtgggcgcccggccaaactgcagacgaaggggctgcttgggctgcaggcggctaaccaggccgtcgctggctggcagccagtccaggctggggataagcagctggctgggcagcaggcagcattcatccaccagcgcctcgtccggctcgctcgctgggccctcatcgcgacctgcggagagaggtggcggaagtctcagcacccctgactggggcaccgcccggccacccgggacgtgctgggagcccctccagttcaggagcaccaggtcagggccccagctctgtctgcctggctgggtgaccccggggttctctcaccaggtcggggcccc

SEQ ID NO: 13759 - DNA, 159 bp, Homo sapiens; identical to SEQ ID NO: 6528
  chr19:883424-883583
  hypo

SEQ ID NO: 13760 - DNA, 544 bp, Homo sapiens; identical to SEQ ID NO: 7154
  chr19:884311-884855
  hypo

SEQ ID NO: 13761 - DNA, 62 bp, Homo sapiens
  chr19:891455-891517
  hypo
cgggagacgcagcggagggtctgcgctggcccaggtgagtgatgatgggggcagcaagtgga

SEQ ID NO: 13762 - DNA, 327 bp, Homo sapiens; identical to SEQ ID NO: 7163
  chr2:10153562-10153889
  hypo

SEQ ID NO: 13763 - DNA, 63 bp, Homo sapiens; identical to SEQ ID NO: 7165
  chr2:10156251-10156314
  hypo

SEQ ID NO: 13764 - DNA, 158 bp, Homo sapiens; identical to SEQ ID NO: 7166
  chr2:10306915-10307073
  hypo

SEQ ID NO: 13765 - DNA, 97 bp, Homo sapiens; identical to SEQ ID NO: 5789
  chr2:105468467-105468564
  binary

SEQ ID NO: 13766 - DNA, 297 bp, Homo sapiens; identical to SEQ ID NO: 8300
  chr2:10588876-10589173
  binary

SEQ ID NO: 13767 - DNA, 197 bp, Homo sapiens; identical to SEQ ID NO: 8301
  chr2:10589298-10589495
  hyper

SEQ ID NO: 13768 - DNA, 387 bp, Homo sapiens
  chr2:107459644-107460031
  hypo
cgtccgcacgcgcgcgcggctccgcagctggcacagcagctgtgccctgctcagcccggcctcccgcttcccgcggaagcgcaccccgtgcttgttggcggtcaggtaatccttcatcgccttctgcaggcgcgggttcagcattttggaagagacgttccccttccagagccggtacaggaaggccctggacatggaggagtacagcctgtcgccgtcgtcgccctcctccaacacgtggctccttctctgcctccggtgcctcttcttcacccgcctcctctggacctgtgcagccggaaaagccccctcccgtgggcctggctccccgggggaagggaatcccaatgtcccctgagtgtggctgtgccaccctggctgaccagc

SEQ ID NO: 13769 - DNA, 265 bp, Homo sapiens; identical to SEQ ID NO: 7169
  chr2:111874622-111874887
  hyper

SEQ ID NO: 13770 - DNA, 205 bp, Homo sapiens; identical to SEQ ID NO: 6082
  chr2:111874987-111875192
  hyper

SEQ ID NO: 13771 - DNA, 138 bp, Homo sapiens; identical to SEQ ID NO: 6083
  chr2:111875611-111875749
  hyper

SEQ ID NO: 13772 - DNA, 34 bp, Homo sapiens; identical to SEQ ID NO: 11453
  chr2:114035443-114035477
  hyper

SEQ ID NO: 13773 - DNA, 88 bp, Homo sapiens
  chr2:114035830-114035918
  hyper
cgcgggtgggtcccgcgaatcccgtgctgacgctctcgagatccaaccacccgagcgcacgcacggacgctcagcggcgcgggggctc

SEQ ID NO: 13774 - DNA, 31 bp, Homo sapiens; identical to SEQ ID NO: 6084
  chr2:118981062-118981093
  hyper

SEQ ID NO: 13775 - DNA, 61 bp, Homo sapiens
  chr2:119605299-119605360
  hyper
ctgtttttttttttttttttttttttttttttttcaaatctctgacagctcggatctttgc

SEQ ID NO: 13776 - DNA, 85 bp, Homo sapiens
  chr2:119605386-119605471
  hyper
tcacccaggcacactttttgccttcaaaccggaagcacgtgagtcagggccgcacgtgtgcggagccaatggcgagccgggactc

SEQ ID NO: 13777 - DNA, 118 bp, Homo sapiens
  chr2:119605501-119605619
  hyper
cgcgcgcgggactttgcggataaataatccgggggcgtcaaccgctggcggagagggggcgcctcggcgctggccctgtgcgtcgggtccgccctcccccacccgcgcccgcacccgc

SEQ ID NO: 13778 - DNA, 140 bp, Homo sapiens
  chr2:119913874-119914014
  hyper
cggtgtggagaggtgaattttctgtttgctggaattctgctgtgggtggggttttggctgatggacagggaaatctgcacaagtatttcgggtcacaaagaaggacgccccaggaagcccgcgctccctctggcctacct

SEQ ID NO: 13779 - DNA, 148 bp, Homo sapiens
  chr2:119914053-119914201
  hyper
ggaggaggctgtctgaggagggcaggctcccggccctgcctgtccagtctaatcaggtttgcaaagtctgtgccgccgcctcaagggctcgggcgtcccttcctcccttgccgggatggggatggagaccaggagcacagccctgagc

SEQ ID NO: 13780 - DNA, 34 bp, Homo sapiens
  chr2:119914247-119914281
  hyper
cgcagggatttgtcttttccaaaggagatgtcag

SEQ ID NO: 13781 - DNA, 382 bp, Homo sapiens; identical to SEQ ID NO: 10487
  chr2:127413347-127413729
  binary

SEQ ID NO: 13782 - DNA, 255 bp, Homo sapiens; identical to SEQ ID NO: 10488
  chr2:127414108-127414363
  binary

SEQ ID NO: 13783 - DNA, 98 bp, Homo sapiens; identical to SEQ ID NO: 7176
  chr2:127428888-127428986
  hypo

SEQ ID NO: 13784 - DNA, 244 bp, Homo sapiens; identical to SEQ ID NO: 12559
  chr2:127435291-127435535
  hypo

SEQ ID NO: 13785 - DNA, 108 bp, Homo sapiens
  chr2:127438526-127438634
  hypo
cgggcaggtcagggcggcgggaagggaccttaacagaccttctagtcggcgactttgaagattcttcaagacaatagccagttctgaagattcatccccgtttcttca

SEQ ID NO: 13786 - DNA, 199 bp, Homo sapiens
  chr2:128583664-128583863
  hypo
cgaaagtgctgggattacaggtgtgagccgctgcgcgtcaccaccaatccattttctccaggacctctctctgtgcagagagctcttctctttcacctattaaacttccactctgaacctcactctttgtatatccgcatcctagtgttctgtggctttagacaaggaacctcgagtatttacccaagacgatgatatc

SEQ ID NO: 13787 - DNA, 51 bp, Homo sapiens; identical to SEQ ID NO: 6089
  chr2:149632592-149632643
  binary

SEQ ID NO: 13788 - DNA, 50 bp, Homo sapiens
  chr2:162284276-162284326
  hyper
cggcgattcctctccgtaaactcagatttcctcagtttttaacagtgtat

SEQ ID NO: 13789 - DNA, 362 bp, Homo sapiens
  chr2:171567970-171568332
  hyper
cgattcagtgccgcattagcaccggggaaattctgtccccaccctcccagaacctttagtatagcaacgatttaactaggcagatatgggcaactgcaaaattgagtctccttggcaaggagtggggagatccagccgattaagcaacatcttactgtgaaaggccaaagcattaagaatttgctgaaatgatctaaataatatctagatttttaaaaaatctagcttgagaggggtgactctctggttggatttatgccagaggcatgcgtcccttctagctgcaagaaaatgcccgaggcgaggtaccaagcttgggctggaagtagcaacccctgacttaatcccagagcgcgcagagc

SEQ ID NO: 13790 - DNA, 273 bp, Homo sapiens
  chr2:171568711-171568984
  hyper
actgacccccgcccccgcagcccccgcgctgtctggggcgcgcctggccctcccgggcttactctctcccccacagctgcgcacttttgcagcgcgctcggtctttgatgtctctttacattatggcagagcagccacacgctcttcccgggcgcggggctttgtgtaatggaactgacatttggccttgatacctgtatctcttggtgattacaacaaatttctaaaataaatattgtactttgatctcccagcattgcatttttaatggac

SEQ ID NO: 13791 - DNA, 51 bp, Homo sapiens
  chr2:172411075-172411126
  hypo
cgtaaatacgcttggccttctgatcctggtgttcggggccctcattttttg

SEQ ID NO: 13792 - DNA, 128 bp, Homo sapiens
  chr2:172947590-172947718
  hyper
cgccagcggctcggcatcagagggcccgcgctcagtgctcctccctagacctttctgagctaagaaataattccggagtgtagccatctcttgctcacacacaacccgcttctaaattaagcaaggct

SEQ ID NO: 13793 - DNA, 86 bp, Homo sapiens; identical to SEQ ID NO: 6097
  chr2:173099596-173099682
  hyper

SEQ ID NO: 13794 - DNA, 42 bp, Homo sapiens; identical to SEQ ID NO: 7183
  chr2:175190730-175190772
  hyper

SEQ ID NO: 13795 - DNA, 50 bp, Homo sapiens
  chr2:175197866-175197916
  hyper
cgacccacatagccctccccacccacggagtgcgccaagacgcacccagg

SEQ ID NO: 13796 - DNA, 455 bp, Homo sapiens
  chr2:175198064-175198519
  hyper
gtttggggttggtagtttaattttttttttttcctaagaagcagggtgtgggtttagtggggagtgtgctatattaaaaccagtgcccaggtctgcccgagggcgctggtatttctggttcaaaaacagcttctggctaccctggagaagaaagagaaagcggggcccagaaagagaaaaacaagcaggtcagcggttgctgggggactcgaagacgcaccctggtctgcttgaggacgcctcttttcacactgacaaggtccagggaggacttcaggatgcttccagcctgcaaaatgtggaagcgcccacgtgtggcctggtcctccgccctcccgggtgaaagtcctggagagatttctcgggcgcgtccgtgaaagcagggcactaatggggagcctacctcttaaaacagcgcacttgccctacggacgagcctctaggccctggtggtc

SEQ ID NO: 13797 - DNA, 351 bp, Homo sapiens; identical to SEQ ID NO: 7184
  chr2:175199018-175199369
  hyper

SEQ ID NO: 13798 - DNA, 206 bp, Homo sapiens; identical to SEQ ID NO: 12581
  chr2:175199935-175200141
  hyper

SEQ ID NO: 13799 - DNA, 207 bp, Homo sapiens
  chr2:176965522-176965729
  hyper
cttttggacagaggccttgtttggggagggggatctggggctaaggctaaggcttttccttcggttccttctctgctggccccagaagccaccaagagatttacagaccaggccagttgggcctccttgctttcctcagtccctgagaagcccgtgagaaacgtgcggaagtaccagtgcaactctggctggccttaaggcttccac

SEQ ID NO: 13800 - DNA, 173 bp, Homo sapiens
  chr2:176969908-176970081
  hyper
tgggcctgggatggagatggggaggcagataagtgtgctgggggtctgggttgaggagaagaatgtcagctggaatctgggcgggggtgccagctgcggggagggagcacacaagatgggcagttctagttgggggaggctcgatgccctccagtcgccacagacctatttgc

SEQ ID NO: 13801 - DNA, 62 bp, Homo sapiens
  chr2:176980657-176980719
  hyper
cgagggacgctttcgcggatagtgaactgctggcaaagaattgtctctgggctgaaagctcc

SEQ ID NO: 13802 - DNA, 126 bp, Homo sapiens
  chr2:176993339-176993465
  hyper
gacagctttggagagagctgctaaaatcgggaatattttgtcgattcacactcgactgggccacatgactcgggcaacttttcttcatctctgctcacaaactaggctgagccttctctttctctg

SEQ ID NO: 13803 - DNA, 61 bp, Homo sapiens; identical to SEQ ID NO: 12583
  chr2:176995668-176995729
  hyper

SEQ ID NO: 13804 - DNA, 34 bp, Homo sapiens; identical to SEQ ID NO: 6099
  chr2:182323095-182323129
  hyper

SEQ ID NO: 13805 - DNA, 138 bp, Homo sapiens; identical to SEQ ID NO: 6102
  chr2:19550409-19550547
  hyper

SEQ ID NO: 13806 - DNA, 274 bp, Homo sapiens; identical to SEQ ID NO: 6103
  chr2:19550611-19550885
  hyper

SEQ ID NO: 13807 - DNA, 297 bp, Homo sapiens
  chr2:19551656-19551953
  hyper
aagcttatatggtcaaagacaaaaataaaaaagaaaacgtataaaataacaatagaaaaagtaatacttctgggagaggcgccgctgcggctccgcggagctttcgttctttttttaatgcagtttcccttccgccacgtgagtaccgccttttggccaagagtttagccgcgtcctaggggagcagcagggacggtcggggtcgcggccccgggcggggctctgaagtgccgcgtgcgccagggacccaggggacaatgttggagaggtggaaggtcccgagcgagcgcctctccc

SEQ ID NO: 13808 - DNA, 41 bp, Homo sapiens
  chr2:19557098-19557139
  hyper
gggtgaaatttaccaaattgtggcaacaaagaaacccttgc

SEQ ID NO: 13809 - DNA, 286 bp, Homo sapiens
  chr2:19561707-19561993
  hyper
tcggagtgaaaattgagcagcttccagaaaattaactagaatgtggtctatattgctttgagttgttttggattcaaaaaaaaatgaaccccacctctccgcaccccatagcctaaaaaaaaaaaaaaaagtcctcattttttcaaatgaagtttgctcagcacttgcgaatttttgcttccaacgcaactacttcctgtaactactttgcagacaattgggggtctgctcgttagaaacccccttacgcatgtacagggctttcaaataacctggagatttaggc

SEQ ID NO: 13810 - DNA, 51 bp, Homo sapiens
  chr2:200331873-200331924
  hyper
cggccagactcaggcctttctaatacaggcgtgaagggcgggacgcccaga

SEQ ID NO: 13811 - DNA, 427 bp, Homo sapiens
  chr2:200331953-200332380
  hyper
caggtggataacttctgcggattcggctttcaggctgctggagctctccccagcccgaggccttagcccagcgcaatcccttgtccagaccggccagtttccgcgtggcgaaaaagggggaggcaagtgtgtcttttccaaggagcttttatccaacagcctcccctccccccaactctcagccttaggtgccgggcttcagccgaagcgtttttcaaatttgtcatcattggaaacctcggacaagtggagtgtaaaattttgagggtttccaggtaggctctgacttcaggcattcaatgaaaggggaagagggctgagggcgggggagagagacaagcacagagggctccctgtagtcggcaggaattccctccctctgcagcccagctgcacccactagcacacactagtcttgccttctccc

SEQ ID NO: 13812 - DNA, 173 bp, Homo sapiens
  chr2:206750391-206750564
  hyper
cggggaaggcaaacgtctcctcctccctcccacaccctctgccggttttcccgctctgcctcctggcgcccttttccgcccagaaagcaggagcccgcctagtccttcatggcgggagaacagcgccctcgtgtggactgccgggttcttggtgctagaggcagtttgggtcc

SEQ ID NO: 13813 - DNA, 325 bp, Homo sapiens; identical to SEQ ID NO: 5797
  chr2:219232221-219232546
  binary

SEQ ID NO: 13814 - DNA, 32 bp, Homo sapiens; identical to SEQ ID NO: 5798
  chr2:219232859-219232891
  binary

SEQ ID NO: 13815 - DNA, 116 bp, Homo sapiens
  chr2:2193566-2193682
  hypo
cgttctcaggaccgcacggggagaagcagggttctcaggacggcacggggagaagcagcgttctcaggaccgcacggggagaagctcgttctcaggaccgcacggggagaaggagc

SEQ ID NO: 13816 - DNA, 133 bp, Homo sapiens
  chr2:223104742-223104875
  hyper
cgtctcacagcacgaggtcattagaaggaaaataagctcctgccaggttggggctaatcaaaatagcacaaataaaccctgacactcaacaactccccgagtgcctgctgccctgggaggagagtacagattg

SEQ ID NO: 13817 - DNA, 305 bp, Homo sapiens
  chr2:223166850-223167155
  hyper
tttcagagacactacaggtgaaaataacagcgggctggctgtccaggcctgagtggagcgtgcccttgttagcttgaaagttctccctcgcagcccgtttggatgcgtgcgtctacagcccagtcgcactttggtgaccggcctgggctgtgaagcaccctttagcgaacagcctccgcacttggggacactggcacaagggtttcatggcccgtggacttctcagggcctctgagggttgacttcatactcagccagacacaggtcttaagaggaaattatgatctatgcaaaataatgtccct

SEQ ID NO: 13818 - DNA, 61 bp, Homo sapiens; identical to SEQ ID NO: 9506
  chr2:223170211-223170272
  hyper

SEQ ID NO: 13819 - DNA, 337 bp, Homo sapiens
  chr2:227841945-227842282
  hypo
cggcaagctccccctccctttagttttgcatttaacacagtcttgccttcatgactgccgcctcctttttttctgtaaacacaaatatgaagtgtatttgctttgcttttcagccttgtctgccccactgagtgtccgaaatagccggctggaattcatgagaatgttacgtcttcagatgtttataatccaaaagaatcccttatggtttttaataataaaacaacttagatgtcggtattttgtgttggaaaggcgagcaaagttcacaatgcagcaattacaatgcagtgcattatgtataatttgtagcctgccccaggagcaatggtgaacc

SEQ ID NO: 13820 - DNA, 92 bp, Homo sapiens
  chr2:230795444-230795536
  hypo
cgacagtgagatgccgtctcaaaacaaaaacaaaagagagatgctttaccccttcgccactgcacctgagaacctcagcccagctcagctgt

SEQ ID NO: 13821 - DNA, 157 bp, Homo sapiens
  chr2:231902837-231902994
  hyper
cggcctcccggcctcctgcctggccgtccaggcggccgcctgcagggccctgcaagccgccggagccgggcaaccaggtgagactgcgcggggcccggctgggcgcgggcgggcggtggctcgggcacgtcccccaagttggacccctttggccatt

SEQ ID NO: 13822 - DNA, 105 bp, Homo sapiens
  chr2:232479181-232479286
  binary
cgagccgcctccccgcccccagcctcccctgccccggctgcccccgagtcctgtttcagggatcctagccctctctccagacgcgctgctctgtccactgtcccc

SEQ ID NO: 13823 - DNA, 227 bp, Homo sapiens
  chr2:232479454-232479681
  binary
cttcacgttttcaccaaggggcagatggggcagtaggggccctgggaggcctggtccaccaaggagggggaacccgcgcgcgcgcgcgcacgcacgtggcccggcgcgcccgggagacctccgtgtgatcaccgcgcgcagcagctcccgggcggaaacacctcccccctccacgggaaagtgggctcaaccgggggcggaaagcgacacggctgggggacgactac

SEQ ID NO: 13824 - DNA, 285 bp, Homo sapiens
  chr2:23547040-23547325
  hypo
gcaaacacgcggagtgccagatctcccaacacaaacatggtcccaagcctggcgcacctggattgggcttgggatttttaagccaacaaatggggtgggagacagggaaagagagggccgggaagaaaaaccacaggctcccagaatccaaaggaaagtggcatcctcacccgatgagcagggtctggcacagggctgagcacatgacagccagtaagtctctgctgaaggatgcctgaaatctgcgcggttctaccaccgaaactaatcccgactatgtctccc

SEQ ID NO: 13825 - DNA, 216 bp, Homo sapiens; identical to SEQ ID NO: 8324
  chr2:236452983-236453199
  hypo

SEQ ID NO: 13826 - DNA, 49 bp, Homo sapiens
  chr2:240169135-240169184
  hypo
aacgaggcacacagtacgtgcggggcgagagactccctttgctcctccc

SEQ ID NO: 13827 - DNA, 142 bp, Homo sapiens
  chr2:240213554-240213696
  hypo
cgggagccgccgattacatttgcatgaaaatagaacctttgtttgcaagagttcccgctccagtggatccctcctttgtctgcagcacagcaactgatggggcaggatgctggtgtgtgcacacagcccagctcaggacagc

SEQ ID NO: 13828 - DNA, 31 bp, Homo sapiens
  chr2:240213811-240213842
  hypo
ttgcccatcgtggcaaggcaggcaaggggac

SEQ ID NO: 13829 - DNA, 209 bp, Homo sapiens; identical to SEQ ID NO: 10512
  chr2:241157300-241157509
  hypo

SEQ ID NO: 13830 - DNA, 131 bp, Homo sapiens; identical to SEQ ID NO: 6539
  chr2:242277184-242277315
  hypo

SEQ ID NO: 13831 - DNA, 241 bp, Homo sapiens; identical to SEQ ID NO: 10514
  chr2:242436503-242436744
  hypo

SEQ ID NO: 13832 - DNA, 146 bp, Homo sapiens
  chr2:242523762-242523908
  hypo
cgctttggaaaacaaacatcagcagataaaaaaaaaatgtacagcctacgcaagtgataatattcaaaatcctcagccataaaaataaaggccttttatttggtttttctatgccagtacagaaacatctggacaacactcttgag

SEQ ID NO: 13833 - DNA, 223 bp, Homo sapiens
  chr2:242524147-242524370
  hypo
ggagaatggaacaaagatagcttagttttatcttcaaaagattcaatcaatgcctgtgcgcccactgcatgccacacactcatcacgggctgtgagccaggcagtggccctgccagaggagggtagacacacagcccagggcccctgggcatgtcacaatccaggtgcccttcagctgcctccagaagaccaccaggggaacacagggattgtttatttagaa

SEQ ID NO: 13834 - DNA, 47 bp, Homo sapiens; identical to SEQ ID NO: 11478
  chr2:242554503-242554550
  hypo

SEQ ID NO: 13835 - DNA, 54 bp, Homo sapiens; identical to SEQ ID NO: 11479
  chr2:242554624-242554678
  hypo

SEQ ID NO: 13836 - DNA, 373 bp, Homo sapiens
  chr2:242572260-242572633
  hypo
cgctggccaccttgcagagaaacccctcctaacgggaagggaacatgggtacgcgaggctccggtactgaccgcggctgggcgacagcaggctacttggataggggacgctcactctcctcagctcatccagcttctcctgtagcttccgcacctggctgtcggagcggctgaccctctgccgcaggctcttcagctcgccgttcttcttctccacctgctcccgcaggcagcacacctggctcttgttctgccgggaggagaagcagtaggagtgcagtgagtcgatgagcttgcaggcccctgacgccgacaggatgacctcgttgatggacatggggctggcgtcgctgtgctcgctctgcacggcttcc

SEQ ID NO: 13837 - DNA, 73 bp, Homo sapiens
  chr2:242713983-242714056
  hypo
cgcccgcctgcagtgtcggctgaagagggtaacgtgcgtgcgccccggctgctcccggctgctcccggctgct

SEQ ID NO: 13838 - DNA, 57 bp, Homo sapiens
  chr2:242714085-242714142
  hypo
ctccccggctgctccccggctgctccccgctgctcccggctgctctcggctgctccc

SEQ ID NO: 13839 - DNA, 288 bp, Homo sapiens; identical to SEQ ID NO: 8334
  chr2:25354461-25354749
  hyper

SEQ ID NO: 13840 - DNA, 44 bp, Homo sapiens; identical to SEQ ID NO: 8335
  chr2:25354957-25355001
  hyper

SEQ ID NO: 13841 - DNA, 80 bp, Homo sapiens
  chr2:26521880-26521960
  hyper
cgatgaggagtcctggggtaggggaggtgtgtgaaagtgtgtgaaagagatggtctcgggagaggccaacgcggggagtg

SEQ ID NO: 13842 - DNA, 374 bp, Homo sapiens
  chr2:26522127-26522501
  hyper
taggacccagtctggtggacccgagagtaaaagtgagagtgaaagtgcgccgcaagggaggaaatgggaggaaaagcgtcgaaaccaactcctttggagtgcatgataaaaaaatttttaaaaaggatttagaggtgattatgggatgaaactggatgctcaaaatttaaggacatactgtgaattagaatagccctcttttagtgttggacgactggccgaaggcactacagagaaattggccgtgtgttttaaggtggtgactagggttggaggaccaccagggcattcagacctagtctttgtattgattcatggctaaatgaatgcagccctgcctagcagtttattgtagaacgctcgcagctcatggc

SEQ ID NO: 13843 - DNA, 98 bp, Homo sapiens; identical to SEQ ID NO: 12614
  chr2:2854244-2854342
  hypo

SEQ ID NO: 13844 - DNA, 160 bp, Homo sapiens; identical to SEQ ID NO: 12615
  chr2:2854463-2854623
  hypo

SEQ ID NO: 13845 - DNA, 38 bp, Homo sapiens; identical to SEQ ID NO: 7206
  chr2:30453530-30453568
  binary

SEQ ID NO: 13846 - DNA, 93 bp, Homo sapiens
  chr2:3372645-3372738
  hypo
cgatcttaacgaccctccgtgttggtcttttatttgcagttgcagtactgccctttatctttcaagtgtcattaccttcactcagcggtcaac

SEQ ID NO: 13847 - DNA, 295 bp, Homo sapiens; identical to SEQ ID NO: 12622
  chr2:364121-364416
  hypo

SEQ ID NO: 13848 - DNA, 64 bp, Homo sapiens; identical to SEQ ID NO: 7212
  chr2:43019535-43019599
  hyper

SEQ ID NO: 13849 - DNA, 395 bp, Homo sapiens; identical to SEQ ID NO: 5801
  chr2:43452443-43452838
  binary

SEQ ID NO: 13850 - DNA, 42 bp, Homo sapiens
  chr2:55289053-55289095
  hypo
cgagaccctagcaaggcaaacacacaaaaacggctggacgtt

SEQ ID NO: 13851 - DNA, 90 bp, Homo sapiens
  chr2:63284469-63284559
  hyper
cgcgggatatccgaagtgtggaggaaacagacaagtcagggtacagaggtgggggttgggcaggggcgcagggctgaccccctcacccgg

SEQ ID NO: 13852 - DNA, 54 bp, Homo sapiens
  chr2:63287368-63287422
  hyper
ccttgtattctctgcttatactgtaggggcaaaaaagtctactcttagacaaac

SEQ ID NO: 13853 - DNA, 354 bp, Homo sapiens
  chr2:64994400-64994754
  hyper
cgttaaaaaaattccccgttttaattactgcaaatgttaacgtgactaggtaagaactatttttaatcacctataattacacggttagtgtacagctaaaagcacgaagtcagtatccaaaagccacaattaaaaaaaacaacaacactaagacaaactttgcttttgtttgaaatgtgcaatatttttcctttacatgctctctcttcccgaataaatgctacgtttagaattgctagggttccgcagatacagaaagccagctagaaacatcccttccctgaattcgatgggcttacgtcttacccagcttgagcaaattcttggcgaatatttcatgaactcacaagagac

SEQ ID NO: 13854 - DNA, 121 bp, Homo sapiens; identical to SEQ ID NO: 7222
  chr2:73147029-73147150
  hyper

SEQ ID NO: 13855 - DNA, 84 bp, Homo sapiens
  chr2:73493671-73493755
  hypo
gctgctgatgacctgcagctgccgctcggcacggtcagcccgctcaaggagctcctcaatgaactgctgcagccgcagcttggc

SEQ ID NO: 13856 - DNA, 236 bp, Homo sapiens; identical to SEQ ID NO: 5803
  chr2:74781700-74781936
  binary

SEQ ID NO: 13857 - DNA, 123 bp, Homo sapiens; identical to SEQ ID NO: 6112
  chr2:74782349-74782472
  hyper

SEQ ID NO: 13858 - DNA, 161 bp, Homo sapiens; identical to SEQ ID NO: 12639
  chr2:817641-817802
  hypo

SEQ ID NO: 13859 - DNA, 75 bp, Homo sapiens; identical to SEQ ID NO: 7227
  chr2:85819578-85819653
  hypo

SEQ ID NO: 13860 - DNA, 147 bp, Homo sapiens
  chr2:8870193-8870340
  hypo
cgcatctactctcctaacagctcaggacagccccgtcacactactgccagccctggtgactcactttgttggcaatttttaaagccctcttcattatgtacttcctactcttcagaacctctgtgataagcaatacccctgccatac

SEQ ID NO: 13861 - DNA, 60 bp, Homo sapiens; identical to SEQ ID NO: 9532
  chr2:8978298-8978358
  hypo

SEQ ID NO: 13862 - DNA, 59 bp, Homo sapiens; identical to SEQ ID NO: 7233
  chr2:96991316-96991375
  hyper

SEQ ID NO: 13863 - DNA, 275 bp, Homo sapiens
  chr2:99136317-99136592
  hypo
cgcccccggtaggtcacgttctttctaaatgagagcatgatttctctccatcaccgtccccatggtttcttacaagtgctccttttctcagggctactgccactttagtggactagggctcggtgccagcacttcccgggtaatcaggcgtggtctgaccgaggatcaagaagcacatcatcaccaatgacatcatgacagcaagagagcacagccctcgccatggtgccagggcccgtgcaatgcagcgggcttccaccatcgacgtggcggcc

SEQ ID NO: 13864 - DNA, 226 bp, Homo sapiens; identical to SEQ ID NO: 6543
  chr20:20376606-20376832
  hypo

SEQ ID NO: 13865 - DNA, 219 bp, Homo sapiens; identical to SEQ ID NO: 6544
  chr20:20376973-20377192
  hypo

SEQ ID NO: 13866 - DNA, 206 bp, Homo sapiens; identical to SEQ ID NO: 6114
  chr20:21080357-21080563
  hyper

SEQ ID NO: 13867 - DNA, 118 bp, Homo sapiens
  chr20:21084470-21084588
  hyper
gtgtccgaaatcattagacttgagtgatcttgtggacgggggtataagactaactgtttttcctttcgcaactttgggaattgttagtctcctggcatcagtcacgcagcagactgac

SEQ ID NO: 13868 - DNA, 185 bp, Homo sapiens; identical to SEQ ID NO: 9536
  chr20:21086682-21086867
  hyper

SEQ ID NO: 13869 - DNA, 107 bp, Homo sapiens; identical to SEQ ID NO: 10534
  chr20:21087188-21087295
  hyper

SEQ ID NO: 13870 - DNA, 68 bp, Homo sapiens
  chr20:25223074-25223142
  hypo
cgaaattgaccagcacagatctgccagtggcgttgctgggatcccagagagattttccctccgcacct

SEQ ID NO: 13871 - DNA, 116 bp, Homo sapiens; identical to SEQ ID NO: 12655
  chr20:29873935-29874051
  hypo

SEQ ID NO: 13872 - DNA, 78 bp, Homo sapiens; identical to SEQ ID NO: 6546
  chr20:30153987-30154065
  hypo

SEQ ID NO: 13873 - DNA, 68 bp, Homo sapiens; identical to SEQ ID NO: 9542
  chr20:3052452-3052520
  hyper

SEQ ID NO: 13874 - DNA, 62 bp, Homo sapiens; identical to SEQ ID NO: 6121
  chr20:30639044-30639106
  hyper

SEQ ID NO: 13875 - DNA, 139 bp, Homo sapiens; identical to SEQ ID NO: 6122
  chr20:30639494-30639633
  hyper

SEQ ID NO: 13876 - DNA, 32 bp, Homo sapiens
  chr20:32677630-32677662
  hypo
cgcactgtaggaaatagagtcgtgtgtccttc

SEQ ID NO: 13877 - DNA, 205 bp, Homo sapiens
  chr20:32677691-32677896
  hypo
gtgacaagtgacatattcctctgcaaataaagcaacacacagaattacctggtggctgcagtgaggtagagaagtttctgccttcttaaatacatctacaaagaactccacaagcccaggctgagaatttagctgggcacccagaccagggaagcgcagctattcgaggggtaagaaaacacaagctgtctgctgtggcgcttcc

SEQ ID NO: 13878 - DNA, 142 bp, Homo sapiens
  chr20:35201323-35201465
  hyper
cgaggatgagacgggatgacacacacgaagtgccccgcacagcgtcgttgtaaagcgttggctgttttcacctctggccgccccctgtgagcccgatcatgtgctttttgggcttaggtcggaggcggcctcccagattcta

SEQ ID NO: 13879 - DNA, 38 bp, Homo sapiens
  chr20:35201548-35201586
  hyper
cagtttcccctcgaagcaacgggaccaatcgcaccgcc

SEQ ID NO: 13880 - DNA, 120 bp, Homo sapiens
  chr20:35201647-35201767
  hyper
cggtaacgacccccaccccggcaaggagcacagtaggcgctccggaaacgccctccacgaggagggccgggccacttcctgcccccgagcgggctctccccggcggaggctcccaccgcc

SEQ ID NO: 13881 - DNA, 100 bp, Homo sapiens; identical to SEQ ID NO: 10544
  chr20:37303401-37303501
  binary

SEQ ID NO: 13882 - DNA, 93 bp, Homo sapiens; identical to SEQ ID NO: 10547
  chr20:400189-400282
  hypo

SEQ ID NO: 13883 - DNA, 102 bp, Homo sapiens
  chr20:400915-401017
  hypo
cgccttagccctaccccgcccccatcgtgacacacgcactaatgacacagacattgatccccgagtgctccccattctgatctcacccctggccccacctgc

SEQ ID NO: 13884 - DNA, 55 bp, Homo sapiens; identical to SEQ ID NO: 7245
  chr20:42833281-42833336
  hypo

SEQ ID NO: 13885 - DNA, 48 bp, Homo sapiens; identical to SEQ ID NO: 11528
  chr20:43729515-43729563
  hyper

SEQ ID NO: 13886 - DNA, 71 bp, Homo sapiens
  chr20:44453063-44453134
  hyper
agactgagcctgagcccagccgctgccgcctctccccaccatcccctgcctccgagggacacccgctcacc

SEQ ID NO: 13887 - DNA, 455 bp, Homo sapiens
  chr20:46234984-46235439
  hypo
cgtgtggtgcgtggactcccggtagtctctgagaaccttttaagggttctacatggttaagactattctcataataatgctaatgtgttatttgctattttcatcccgttggtgtttgcaccgatggtggaaatgcggtgatgcataaaattgctgacaccttaccatgaattaaggcagtggcgccagactccgctcctaggtagacattgcattcttcactgccaggagctcataaagaaaaaaaaaaatcagttttccactgaggattgtccatgatgaagcagcaacactacacctggccctcattcccttttttccttaagtacctttcactgtacccttaagtactgtcgttttaatgttctgtgtgatgagaatggaaaatgtgcacaaagacttctgcctgccaaagtatgatggctgtctccgggaaaagcacttgcgcagtttgc

SEQ ID NO: 13888 - DNA, 167 bp, Homo sapiens; identical to SEQ ID NO: 7247
  chr20:46365433-46365600
  hypo

SEQ ID NO: 13889 - DNA, 125 bp, Homo sapiens; identical to SEQ ID NO: 7248
  chr20:46365635-46365760
  hypo

SEQ ID NO: 13890 - DNA, 93 bp, Homo sapiens; identical to SEQ ID NO: 8386
  chr20:46823583-46823676
  hypo

SEQ ID NO: 13891 - DNA, 158 bp, Homo sapiens
  chr20:49178954-49179112
  hypo
cgtgtgcctcttggcctgccaccatggttccctgcctggttttgtgtgtcagctctgccgcttaagaactgagtggcttcgggcaagttgttctctctcataggagtgtgtgaagatgaagcaacataagctgcttagcccagcgcccagtacctcac

SEQ ID NO: 13892 - DNA, 242 bp, Homo sapiens
  chr20:49206898-49207140
  hypo
cgcagtggagtccagcgtctgcggctgcaaagggaaacccaggagtgggtttgccctcactcagtcgagtggctgcaccttcaactgcacgggtggggcgatggaggggcccaggtgtagagttggctccagggacctgggcccagagccaaaagagaatggccgcctttccatctgcaggtggctctccaaagtgtctgctgctttgggaagacagactgggagtaggatcgggtcctccc

SEQ ID NO: 13893 - DNA, 174 bp, Homo sapiens; identical to SEQ ID NO: 7251
  chr20:52374073-52374247
  hypo

SEQ ID NO: 13894 - DNA, 226 bp, Homo sapiens
  chr20:56001391-56001617
  hypo
cgcttcgagcacaggccatttgctctgcacggcacctgtctctttcccactaaatgcatcttgaccaggccccttagcacacacggggcttgctctttctttgccgtcagctgcgtgctatctgtggcgtgcatggggcaggtggggtgggcgttcccatccccagcgatggaggcaggagctctttcaggctcacctggaacacagtcacatgtgctggtctgtc

SEQ ID NO: 13895 - DNA, 91 bp, Homo sapiens; identical to SEQ ID NO: 9560
  chr20:56772299-56772390
  hypo

SEQ ID NO: 13896 - DNA, 242 bp, Homo sapiens; identical to SEQ ID NO: 12679
  chr20:60485425-60485667
  hypo

SEQ ID NO: 13897 - DNA, 128 bp, Homo sapiens
  chr20:60756218-60756346
  hypo
agaagtgtttattttgtaggcactaagggtttctaaaacccttaacactggtaagggctcaaaaataaacgtatgtgttcatattcgatcaccgaaatgagagttcttaattgctaattgacaaacgc

SEQ ID NO: 13898 - DNA, 579 bp, Homo sapiens
  chr20:60855793-60856372
  hypo
cgtgtgtgtttcgtgaggtggcctttcttttgacgacttcacaggaaagccatttgtctttgttcagtcttctttgattgcttattaacttgtcttgacatttaagtagaaagctttgtagatgctacaaaggaaagaagaagtacatttcaaacgcatgctaaatacacagcctccgtcgcaggggcttcaaagcagcgtgctgctctcccgcgggtgccggttgctgtgacccagccccgcctggtcgttgcgtcttgggtcacgtcgtgtcttggcttttctggactctcactgcttgttttctggtgtcttcacagacataatgaagcctacacctggaccaaccccacctgctgcgtccacaacgtcatcatcgggaagctgtggatagagcagtatgggacagtggagattttaaaccacaggtgacagcaccccaccgttgggtgagagcgcgaggctccgggtggggatgggcgagccggggagcgtgagcatccgtgctcctggtgggttttagctcagcctcacgagctgctgccgtgtccccgccagcccaggcatagcagctgccta

SEQ ID NO: 13899 - DNA, 462 bp, Homo sapiens
  chr20:60856401-60856863
  hypo
atgctcctcgttcaagacctcgtttttcgtcacggttgttactttaaggctttgagctatgctgaagagctgtgtcattgccaggtgcagcgcagtggccgtccacggccgttggccactgtctaggcttgaatgccctattcctggaagctcatgactggtgggctttgccttttcaccactttagtgaggtataatcgatgcatcataagactcgcccattctgaatggacacttaagtgatttttagtaaattgaccgaatcatggagccgtccccacagcccatttcaaacacttccatcgccccaaaggcccaccacacccatttgcagtcaccccccgcctgccccaggggcctccaccgcgcttctcctgttacagagttaccctttccggctgtttgctgtcttgcagcagaaacctgtgtttgtttttctcacagaactggacataagtgtgt

SEQ ID NO: 13900 - DNA, 148 bp, Homo sapiens
  chr20:60856892-60857040
  hypo
gaaaagaacttcacaaggtggaaggacacattcaagacaaaaagtaggtccttgccaagtgttcatggggcaccactacagcctgtgtgtccacgttagaagggctcaggtgctcctgggcctgcgtgtgcctacgtgcatgagacgc

SEQ ID NO: 13901 - DNA, 105 bp, Homo sapiens
  chr20:60976568-60976673
  hypo
cgccccgggccccacagagaggtgtcggtgtgtccggcagacatggagaggatcacgcatgtgcagatgtaccaccttacgcctagctggaagcagcacacacgc

SEQ ID NO: 13902 - DNA, 121 bp, Homo sapiens
  chr20:60976778-60976899
  hypo
caggtcccctcagtgtgggggaggggctgaggaggggcaccagggagctgggggattggcctgtgtctccgcaggggagtggctccgtggggtgtgcccaggcaaatgcactgagctgcac

SEQ ID NO: 13903 - DNA, 212 bp, Homo sapiens; identical to SEQ ID NO: 8407
  chr20:60984130-60984342
  hypo

SEQ ID NO: 13904 - DNA, 62 bp, Homo sapiens
  chr20:61527423-61527485
  hypo
cgccagtgcaacaatacgtgggcggcagaaggatcacagaggagaaagaaacgtcttagctt

SEQ ID NO: 13905 - DNA, 54 bp, Homo sapiens
  chr20:61527514-61527568
  hypo
attggttgatccctttagcacccagcgaacagaacaggaatactccaatgcacc

SEQ ID NO: 13906 - DNA, 56 bp, Homo sapiens
  chr20:61527972-61528028
  hypo
cgtcctggggctggcgaggccattggaacagaaggtaccactggcttccttacggc

SEQ ID NO: 13907 - DNA, 124 bp, Homo sapiens
  chr20:61528147-61528271
  hypo
tcttggggatggtgcccttgaaacctgagggtggctttttaatggctggtgtggctgctgccacattagcaaaagaagacttctttggcacgaggtttctaggtgcaggctgcttgcccaccgc

SEQ ID NO: 13908 - DNA, 46 bp, Homo sapiens; identical to SEQ ID NO: 8410
  chr20:61974409-61974455
  hypo

SEQ ID NO: 13909 - DNA, 234 bp, Homo sapiens; identical to SEQ ID NO: 8411
  chr20:62031374-62031608
  hypo

SEQ ID NO: 13910 - DNA, 54 bp, Homo sapiens; identical to SEQ ID NO: 6123
  chr20:9496982-9497036
  hyper

SEQ ID NO: 13911 - DNA, 240 bp, Homo sapiens; identical to SEQ ID NO: 6124
  chr20:9497109-9497349
  hyper

SEQ ID NO: 13912 - DNA, 118 bp, Homo sapiens; identical to SEQ ID NO: 6125
  chr20:9497378-9497496
  hyper

SEQ ID NO: 13913 - DNA, 58 bp, Homo sapiens; identical to SEQ ID NO: 7264
  chr21:19274771-19274829
  hypo

SEQ ID NO: 13914 - DNA, 234 bp, Homo sapiens
  chr21:38073877-38074111
  hyper
tctcgggcgcagcggtccttcagcccagggcaggttcctccctttcctactcggaacgtggcaaagataccccagtcccagcccctccagctgagagctgttgcccaaggtcgtcgctacttgtccgctcaatggtgaccccttggcagagaactagggatgattccactccggttgatgttttaggggaaattaaaagaacattcggttttctgagtctccttccggggaggc

SEQ ID NO: 13915 - DNA, 146 bp, Homo sapiens
  chr21:38080753-38080899
  hyper
atgtgacaggagaccctttccagttcggcctgtggcccatccctctctcaccgccggcagattggagtctgctctcggggagcccccaggtaaacccctcacagggagaaggtttcggattggaaggaggaccgcgctcgtggggc

SEQ ID NO: 13916 - DNA, 214 bp, Homo sapiens
  chr21:43546440-43546654
  hypo
cgctttgtgctcagaacatgacgaacaccgtggtgaggaccacgctgaggaacgacctgtcccaggagggcatcatccaccacctgaagatcctgagccccatctactgcgccttccagaatgacctgctgacatcctccggcttcaccctggagtgggggtaagggagaaatgccccggctgccccacagccacgtgcctccagaccacctgc

SEQ ID NO: 13917 - DNA, 166 bp, Homo sapiens
  chr21:44837213-44837379
  hypo
tcacccacccagggactttaaaggacacgcccgcctgctgcacccccatggctcagcacctaggacctacgccccacacatctccctggctgggagcgggggtgtgcactgggctacagagaggagggaaccacttagcagatgaggttcctcgaggagataacct

SEQ ID NO: 13918 - DNA, 52 bp, Homo sapiens
  chr21:45352895-45352947
  hypo
cgctctctctccctcacagcgtgccaggtgccttttctctgcgttctcgtca

SEQ ID NO: 13919 - DNA, 501 bp, Homo sapiens
  chr21:45353002-45353503
  hypo
cctccctgtggcttcgatttgcttctccctgatggttaataatgccgaacagctcttcgttaacctgctggctgtcggtgtggctccttctgaggcacagccgttcgggtcctttgctgtttgctttcttgctattgagtctgagcccctttaccctgtggatgctgggcctgcatcgggcatgtggtctgcagggttttctctcccttgcgggtcgtctctttaccctgtcgttccctttgtcatgcagaagctgtttagtttgccgtaatcccagtggtctatgtttgcttttgtcgtgtatcttttttaaagctctgccatctgttttctccatggggaaaggtttgggaatatcgatgatgtcatcatactcctggctgcttcttgacattttccatgcccagcattgttctcagtgcgccccgggggtctttggttctccatagcctgctggcgtccatgtgtttttattctttctttatggttgaggaaactgag

SEQ ID NO: 13920 - DNA, 85 bp, Homo sapiens
  chr21:45353564-45353649
  hypo
aatgtgggaggggcagcacaggggaaaggtgaggggagagtcaggagagaaggacgccgcataccagatgcccagaggccccggc

SEQ ID NO: 13921 - DNA, 105 bp, Homo sapiens
  chr21:45499846-45499951
  hypo
cgcactcctaagtatgagcctctccacgctccttacctctccgctccagctacctgcagaccagcagcctcttagccagtgaccaccacctcactgaagaggagc

SEQ ID NO: 13922 - DNA, 97 bp, Homo sapiens; identical to SEQ ID NO: 8428
  chr21:46206226-46206323
  hypo

SEQ ID NO: 13923 - DNA, 384 bp, Homo sapiens; identical to SEQ ID NO: 7300
  chr21:47602705-47603089
  hypo

SEQ ID NO: 13924 - DNA, 276 bp, Homo sapiens
  chr21:47640150-47640426
  hypo
cgttccttcaccaggcaggcgccaggagtgtggtgggaaccggacagcagccttggggacgcagcatcaacgacaccaaaggctgacagtgaactgaggacaatagtgacaagctcaccaagaaagaaggcaggatctcatgagaatgcgtaacaggacactccacctggcacggtaggtcaggaagaggtcctcaaagaaggaacacgtaaagtgtgagccagcggggcaggagtggaaggtaagaggctccaggcgaaggaggcagtgcatggc

SEQ ID NO: 13925 - DNA, 45 bp, Homo sapiens; identical to SEQ ID NO: 11562
  chr22:18328049-18328094
  hypo

SEQ ID NO: 13926 - DNA, 426 bp, Homo sapiens
  chr22:18619428-18619854
  hypo
cgaacacatgttctgatccacctgaggcaaaaggcgcccctgtggagcccagcacgtctgtgtgggaggaaccgcctggaggagcagagagcaaagcaaaggggcttggggcggaacacgacgggagtggcaggagcagccagcgggaagccagggagagggtttggagatcagccagtcgcgggcaggggtaggcaaaacctgtaggttcctgtggacgccctggaattgtgcagttacttctgagtgaggcatgaaaccagtgagttctgaggagacaactaacgctgcaatttaatttccagttaacctgtggagcttcagaagctctcactcacaactgggatattaacaaggtcggatccggagggaagtccctcagcacatagagcatgaagtgtgcacccccccgtgcagcaagtccac

SEQ ID NO: 13927 - DNA, 130 bp, Homo sapiens; identical to SEQ ID NO: 7302
  chr22:19706042-19706172
  binary

SEQ ID NO: 13928 - DNA, 176 bp, Homo sapiens; identical to SEQ ID NO: 11563
  chr22:19771495-19771671
  hypo

SEQ ID NO: 13929 - DNA, 218 bp, Homo sapiens; identical to SEQ ID NO: 11564
  chr22:19771889-19772107
  hypo

SEQ ID NO: 13930 - DNA, 98 bp, Homo sapiens
  chr22:22057979-22058077
  hypo
cgcgtttcagaaactcccggcggggggatggtgggttctttcaggacccctaaagacccaggtgattctacacagggcactgtgtaggtgccatccag

SEQ ID NO: 13931 - DNA, 117 bp, Homo sapiens
  chr22:23437460-23437577
  hypo
cggaggcggggggctgcagggagcacaccagcgaccggccctccaaccctccagccactcagcaacatcgccacagcaaccagcaaccagacggcagcagccgaggcaaacacaagc

SEQ ID NO: 13932 - DNA, 74 bp, Homo sapiens
  chr22:23437631-23437705
  hypo
ctttgccaactagggaggtggagtgtcactagtggggaggggcggccaccgcccgctgcacagagcgccatgcc

SEQ ID NO: 13933 - DNA, 90 bp, Homo sapiens
  chr22:23453477-23453567
  hypo
cgtggctggctctgtaccgagcagggggtgcggccacaaatctccaagcccaggccaggggagagaggcaagcgcactggactcggttcc

SEQ ID NO: 13934 - DNA, 124 bp, Homo sapiens; identical to SEQ ID NO: 6129
  chr22:28838056-28838180
  hyper

SEQ ID NO: 13935 - DNA, 61 bp, Homo sapiens; identical to SEQ ID NO: 6130
  chr22:28838449-28838510
  hyper

SEQ ID NO: 13936 - DNA, 244 bp, Homo sapiens; identical to SEQ ID NO: 6131
  chr22:28838551-28838795
  hyper

SEQ ID NO: 13937 - DNA, 279 bp, Homo sapiens; identical to SEQ ID NO: 6132
  chr22:28838844-28839123
  hyper

SEQ ID NO: 13938 - DNA, 129 bp, Homo sapiens; identical to SEQ ID NO: 6133
  chr22:28839263-28839392
  hyper

SEQ ID NO: 13939 - DNA, 199 bp, Homo sapiens
  chr22:29876679-29876878
  binary
cgagctgtacgagcgcgaggtccgcgagatgcgcggcgcggtgctgcgcctgggcgcggcgcgcggtcagctacgcctggagcaggagcacctgctcgaggacatcgcgcacgtgcgccagcgcctagacgacgaggcccggcagcgagaggaggccgaggcggcggcccgcgcgctggcgcgcttcgcgcaggaggcc

SEQ ID NO: 13940 - DNA, 149 bp, Homo sapiens
  chr22:30642437-30642586
  hyper
cggcgccccctccctcgccgccaacctgccgcggggcgtgcggtgcttgggaccatgtgcccgcgctcgctccgggccgccacccagcgcctccggtggctgcgcgggcgccccaagtgttcgtgtgtctgcggcgggtgggcgtccgg

SEQ ID NO: 13941 - DNA, 44 bp, Homo sapiens
  chr22:30642684-30642728
  hyper
tatgggctgcacttcagagggccttggaggaaacctcagatgcc

SEQ ID NO: 13942 - DNA, 224 bp, Homo sapiens; identical to SEQ ID NO: 9607
  chr22:33192959-33193183
  hyper

SEQ ID NO: 13943 - DNA, 269 bp, Homo sapiens
  chr22:35848670-35848939
  hypo
tcctggttagccctgtgtgtgagtttgtgttaaataatcagtccgactcctccgctggggtggtggtgccagtgtggccagttcttgtgcaaatagaacattttcaagatagttctgccacttgtacagcactctacgtgctgtagagttcagccctgagagagagggacaggatcctgtgtgtcccgtccgccttgcatgtgggtctcaccagcggcttccttcatgtcactctggagcactctcacccaccccgagaggaaagtgcc

SEQ ID NO: 13944 - DNA, 127 bp, Homo sapiens
  chr22:36519474-36519601
  hypo
cgcctttctcatctggacccagacccagacagaccccggggccattccgttctgcaggcaaacaagccagtcccgctagaatgtggcagtcacaggctttcaacatggaaggtggagctgcctggac

SEQ ID NO: 13945 - DNA, 180 bp, Homo sapiens
  chr22:39941870-39942050
  hyper
cgcagcctcttccctcaatcctactgaactccttcctgggagaggttagggcgggaatcgccaccttccagggcacggagaggcgaagcggaattcagcaccacggacagcagcccggcgcgcagttggcgtgcggttggctcaggaagttattctgtaggttttgtaggtttatgaccc

SEQ ID NO: 13946 - DNA, 59 bp, Homo sapiens
  chr22:42033751-42033810
  hypo
cggaaggttcgcgccaaggagaccaggaagcgagcactcagcaggtgtgcactcagccc

SEQ ID NO: 13947 - DNA, 54 bp, Homo sapiens
  chr22:42896458-42896512
  hyper
cggcggccctcgggatgggtcctgccagggcgcagagatggcggtggaaaggcg

SEQ ID NO: 13948 - DNA, 107 bp, Homo sapiens; identical to SEQ ID NO: 9619
  chr22:42995599-42995706
  hypo

SEQ ID NO: 13949 - DNA, 151 bp, Homo sapiens
  chr22:43000061-43000212
  hypo
cgctggagatcctccccaaggtctttgggcttcttctgtcgcctcccaccctcaggcctctctacaatagctaccctcaacggccactcatgcggcagacgctctgcctgcggactcctatgtcaaggggtgctctttgggaaaccctccc

SEQ ID NO: 13950 - DNA, 39 bp, Homo sapiens; identical to SEQ ID NO: 7313
  chr22:43434578-43434617
  hypo

SEQ ID NO: 13951 - DNA, 734 bp, Homo sapiens; identical to SEQ ID NO: 8464
  chr22:45592910-45593644
  hypo

SEQ ID NO: 13952 - DNA, 258 bp, Homo sapiens; identical to SEQ ID NO: 6571
  chr22:45593715-45593973
  hypo

SEQ ID NO: 13953 - DNA, 237 bp, Homo sapiens
  chr22:46367124-46367361
  hyper
gagggggaagggaagagaaggggagggagagcaggctctgaggtttaatcagtagcatccagcttaaattcccccaaacggcggttccataaatgaaacttctttttaagtcagaggccagagcatatgcgtcccattaggaattcggcgaagccaccactgcgcgccccctgggctcactgggctggactcggccctgcccggagcttctcagagccccgtgggctctgccttgcc

SEQ ID NO: 13954 - DNA, 121 bp, Homo sapiens; identical to SEQ ID NO: 12710
  chr22:46367867-46367988
  hyper

SEQ ID NO: 13955 - DNA, 114 bp, Homo sapiens
  chr22:46929512-46929626
  hypo
cggccactcaccagacacagacacctccatgagcgcctccagcggccggttgttgtccaggtcgcggctgagctgcagttcgcccgtggcggggtccagcagcaacaggcgcag

SEQ ID NO: 13956 - DNA, 204 bp, Homo sapiens; identical to SEQ ID NO: 9629
  chr22:46929718-46929922
  hypo

SEQ ID NO: 13957 - DNA, 228 bp, Homo sapiens
  chr22:46930034-46930262
  hypo
gttctcctcaacaaacagctccagttcgtccttctcaaacatgggggcattgtcattaatgtccaagatggtcacctggatttctaccgaggcgctaaggggagtgggactgccccgatccacagccagagcccaaaggttgtacacggccacattctcccggtccagccggcgctgggtgcgaatcacaccggacgtgggctcgatgtagaagtccccatcgccgtc

SEQ ID NO: 13958 - DNA, 850 bp, Homo sapiens
  chr22:47197347-47198197
  hypo
cgctctgttatgagcctggggatgaaagtagcaaatagaacttaatagctcattttactcttagcattggctcaatatttactcacacaaagactgcctgctttgaagccccggaaaatgacactcaagttggtcacatgtatctggtgaatggtagtgcgatttggtaacatgtagaacacgcagtttcctgaggaccgtctagggcctgcctcgcagcagtggggcctcggagggcaaactgtgtgtggagctcagctctggccctcaaggctttcgaacggtaggacagaaggcacgacgacccgtccgtcaaggagtggggccaggccacggctgtgttccacttcccctgaggggtgaccatccagtctaggctttatgagagcgtgctgatagatggaggtcagcgggagagggtgttttgggggttgggagggcatgaacagaagtttggagccgtacaccttggcagcactaatacgagtagatgcccccttggtgtccgtggctctagggcagccgtgaaggggcctgggcccttggtgacaggaggaagcaggtgcggccttggagtaggccctcagtgtgatggctggccgtgtccttactcatgaagtggctcaacctacctgtttcgtcagctgtagagggagcatgagacctgccctgcagggtcctcgtgaaggtcagtgggaatttatgtagagtcactcatccaggctctgttgagcacctgctgtggttgtaggcactggggaggaatcggcggcgaggcttgcgagggccctgccctcaaggagctgacattctcgtgtgaggagacagagggagctcgctcagtaccccc

SEQ ID NO: 13959 - DNA, 183 bp, Homo sapiens
  chr22:47525924-47526107
  hypo
ccatcccttctaggcccctcctcaggacaccccctcctgccgggctccccccaagcgcagcccccttcccaaacccacgtttgcctcactgtcttccttgtccggtagagcacacccctcagcacttctctgtgtgaatgagcctggcagggacctaccttgagatctacatgtctggatacc

SEQ ID NO: 13960 - DNA, 235 bp, Homo sapiens; identical to SEQ ID NO: 8471
  chr22:48027392-48027627
  hypo

SEQ ID NO: 13961 - DNA, 41 bp, Homo sapiens; identical to SEQ ID NO: 8472
  chr22:48027786-48027827
  hypo

SEQ ID NO: 13962 - DNA, 59 bp, Homo sapiens; identical to SEQ ID NO: 5814
  chr22:50170525-50170584
  binary

SEQ ID NO: 13963 - DNA, 160 bp, Homo sapiens; identical to SEQ ID NO: 6576
  chr22:50170790-50170950
  hypo

SEQ ID NO: 13964 - DNA, 153 bp, Homo sapiens; identical to SEQ ID NO: 7319
  chr22:50899708-50899861
  hypo

SEQ ID NO: 13965 - DNA, 210 bp, Homo sapiens
  chr22:50944156-50944366
  hypo
cgtccagcagcgcagtggtaagcaccagcgtcatcaggttgaagaagttgtagttgccggtgatgataatcaggacctgcagcagcacctgggggcggcccgctctcagtgctcccggagactgacgcctggccccgtggcaggcacccacctccaccctgcagggtgcatccctctgctacaaggccttcccaacagcggttgccagct

SEQ ID NO: 13966 - DNA, 103 bp, Homo sapiens
  chr22:50944716-50944819
  hypo
tgagcccccaccacgcagggcagcggctggtcagcttgaccacgcctgaggcgaacatgaggcggaacagcagccatcgcaccagccagaaggggaggtcttc

SEQ ID NO: 13967 - DNA, 79 bp, Homo sapiens; identical to SEQ ID NO: 12726
  chr22:51042182-51042261
  hyper

SEQ ID NO: 13968 - DNA, 58 bp, Homo sapiens; identical to SEQ ID NO: 8478
  chr3:10011425-10011483
  hypo

SEQ ID NO: 13969 - DNA, 413 bp, Homo sapiens; identical to SEQ ID NO: 8479
  chr3:10206343-10206756
  hyper

SEQ ID NO: 13970 - DNA, 166 bp, Homo sapiens; identical to SEQ ID NO: 7322
  chr3:11581157-11581323
  hypo

SEQ ID NO: 13971 - DNA, 438 bp, Homo sapiens; identical to SEQ ID NO: 8480
  chr3:124773932-124774370
  binary

SEQ ID NO: 13972 - DNA, 216 bp, Homo sapiens; identical to SEQ ID NO: 7334
  chr3:130424529-130424745
  hypo

SEQ ID NO: 13973 - DNA, 197 bp, Homo sapiens
  chr3:132756116-132756313
  binary
cgctgaacgacaaaggttctagctggccagtccgaaaacactgagtccttaggtcaaatttgagaaatgacagggccagtgggagtcctaacttctagactctggaattactgacagaagaatatttggacagtttttaagaccctcaaggcatattattttacaacctctttagcttatgcctgaatttgtgctgt

SEQ ID NO: 13974 - DNA, 39 bp, Homo sapiens
  chr3:132756477-132756516
  binary
gattaacgtagacacagtgttctcttccatggccattcc

SEQ ID NO: 13975 - DNA, 79 bp, Homo sapiens
  chr3:15123770-15123849
  hypo
cgaacaacttcccaaagcattctccagaatctgcaggagtgtacataacaaacagccaaatctgcctaagaaattagac

SEQ ID NO: 13976 - DNA, 42 bp, Homo sapiens
  chr3:15123992-15124034
  hypo
ggaccgagctgacactgctcatgctgctgatgctgcctcggc

SEQ ID NO: 13977 - DNA, 194 bp, Homo sapiens; identical to SEQ ID NO: 11619
  chr3:157821711-157821905
  hyper

SEQ ID NO: 13978 - DNA, 271 bp, Homo sapiens; identical to SEQ ID NO: 9675
  chr3:169379645-169379916
  hyper

SEQ ID NO: 13979 - DNA, 54 bp, Homo sapiens; identical to SEQ ID NO: 7349
  chr3:169540679-169540733
  hypo

SEQ ID NO: 13980 - DNA, 98 bp, Homo sapiens; identical to SEQ ID NO: 6149
  chr3:181421152-181421250
  hyper

SEQ ID NO: 13981 - DNA, 140 bp, Homo sapiens; identical to SEQ ID NO: 9688
  chr3:183419820-183419960
  hypo

SEQ ID NO: 13982 - DNA, 131 bp, Homo sapiens
  chr3:184059893-184060024
  hypo
cgccatggcccagggccgagtggctcacctcattgagtggaagggctggagcaagccgagtgactcacctgctgccctggaatcagccttttcctcctattcagacctcagcgagggcgaacaagaggctc

SEQ ID NO: 13983 - DNA, 393 bp, Homo sapiens; identical to SEQ ID NO: 11631
  chr3:185360808-185361201
  hypo

SEQ ID NO: 13984 - DNA, 380 bp, Homo sapiens
  chr3:187456733-187457113
  binary
cgtggttccgggagctcaaaccgaatggtgtttttaccgctgcctaacgctagagagagccctccatcaaggtttgaaaccgtcaacccctttctcgcccctcccctccttcccattgacctagtttggccagagcctcccgatttggagaatgccttccgcccttcccccctcctctccagccagagaggctacagaggctgttggattattggtaatctaataactccaataacccgctgaaaaatccaaagggaaatctgaaagtgtaaagcactgtttagggacaaggacaaggaattttaataaggctgcaactgccgtagtgaaccccgcatcaggggccctgccgtggggctcccggtctcagcagtgtttca

SEQ ID NO: 13985 - DNA, 509 bp, Homo sapiens; identical to SEQ ID NO: 7358
  chr3:187457654-187458163
  hyper

SEQ ID NO: 13986 - DNA, 154 bp, Homo sapiens; identical to SEQ ID NO: 7360
  chr3:193922622-193922776
  hypo

SEQ ID NO: 13987 - DNA, 324 bp, Homo sapiens
  chr3:194048948-194049272
  hypo
agtcacccctggataactgaggacttgcctgtcaagtatgaaacatttagcacgtacagtcctttgagtggaattagagtggaagagtgtaactcagcgtgtaagagttgcctgctgctgctttgaacagagggtaattgcagcagatgccttcagcccctgctcttttcagcagccactgtacagggcggttccaccccatctcccacctcccggcccagctctctgatgtctctgcccggtggcgttccccgatgcccctttgcctgagcgccgaagcgtggggagtggaagctggcggtgggagccggtggaggcatgcgc

SEQ ID NO: 13988 - DNA, 363 bp, Homo sapiens
  chr3:195536308-195536671
  hypo
cgcccttggtgactgcttttcctgccaaggccctggtcatgcccggtcagatgtgtgggtgccatctcccagccacgaccatctcctctcctggcccagctccacttggtccccttagcgacgcaaaggactcagcgctccacgacatgcctagcttcttcgggtcgtcatggagacgcccttgcacaccaacagtccttcactccttctccgggtcacgcccccgtgcttttccacgcccaccccaggtcttgcccctctgcgctcctctccacagaccccacttcctggctccacatggagctgagtgtccagctggtacccagcacatttgggctcagctttaaatcacagatttggaaa

SEQ ID NO: 13989 - DNA, 284 bp, Homo sapiens; identical to SEQ ID NO: 6587
  chr3:196728448-196728732
  hypo

SEQ ID NO: 13990 - DNA, 222 bp, Homo sapiens; identical to SEQ ID NO: 10628
  chr3:25469458-25469680
  hyper

SEQ ID NO: 13991 - DNA, 130 bp, Homo sapiens; identical to SEQ ID NO: 10629
  chr3:25469874-25470004
  hyper

SEQ ID NO: 13992 - DNA, 243 bp, Homo sapiens
  chr3:30648808-30649051
  binary
cggcccggagcggcagcctgagctgccaaagcagccagcgcacctgggccactccgcccatggcgatgccgcgtgcccacccagctctttctgagccacccgttcaaaaggccagctcctcagtccttagctcctggagacggccacgctttccctcaggccggcttcttggcccggagtttttggaaacaagtttcaagaaaataatcgatttccaaaagaaagttagctggctccactgac

SEQ ID NO: 13993 - DNA, 42 bp, Homo sapiens
  chr3:44063232-44063274
  hyper
cgtaatgccacttgcaggttacagctttcaaagcaaagccag

SEQ ID NO: 13994 - DNA, 82 bp, Homo sapiens; identical to SEQ ID NO: 7369
  chr3:50377892-50377974
  hyper

SEQ ID NO: 13995 - DNA, 167 bp, Homo sapiens; identical to SEQ ID NO: 7370
  chr3:50378002-50378169
  hyper

SEQ ID NO: 13996 - DNA, 38 bp, Homo sapiens
  chr3:51989952-51989990
  hyper
cgccgctctgctgccggcctgcacgctcggggtggccg

SEQ ID NO: 13997 - DNA, 138 bp, Homo sapiens
  chr3:51990500-51990638
  binary
tcgcctactcggccttcgcggctcaccccttcctgtacgggctgctgcagcgccccgtgcgcttggcactgggccgcctctctcgccgtgcactgcctggacctgtgcgggcctgcactccgcaagcctggcacccgc

SEQ ID NO: 13998 - DNA, 552 bp, Homo sapiens
  chr3:52899918-52900470
  hypo
cggtggggggacacaaaccgtcacatgctttacacgttgtctaaccttcctgctctcacctactgtacacatggctccattttctttcattagaggctacatggcatcccacagtgtggctgtgccatctcatttactctatgagctgctgccgcgaatgtccctgccatgtgctacctctgcctgtgtgggcccatatctgaggggcagattcctagaggcacacttgctacatcaaaagctatgtgcggcttattctgtggcgccgctctccacagaggctgtgccaactcacactcccactaatagcacgagtacccattcccacattcttgccagcatggtgtactagcaaaccttctcactctgacaatttgatcgctgaagaggctgtctcagcacggctgcggcgtgcacccatcaggccacttgggtgccagggcacctgcggggcttgccaccgtctaccgccttgaggggcctggcagggctcccagtcccaccccatctcacctgctctctcctctcggacatgagcccagagcccctcct

SEQ ID NO: 13999 - DNA, 216 bp, Homo sapiens
  chr3:52900499-52900715
  hypo
ataccagggtgtggtggtgctcactctcccagaagtttgggcagtgctactggtgccacacaataggacagcaattatggatgactcaactctacctgtcgacttcacacagcacccaggtcaccgactgctcacttaacgctatgttgtttggttttccacacgccactctcacttggcatgtggagggcggggaccaggcacccagctcgactg

SEQ ID NO: 14000 - DNA, 135 bp, Homo sapiens; identical to SEQ ID NO: 9727
  chr4:100729543-100729678
  hyper

SEQ ID NO: 14001 - DNA, 233 bp, Homo sapiens; identical to SEQ ID NO: 11662
  chr4:111543735-111543968
  binary

SEQ ID NO: 14002 - DNA, 47 bp, Homo sapiens
  chr4:113432609-113432656
  hyper
gcaacactgagagtctgtgtctgtcaccggaagaaaatctccacagc

SEQ ID NO: 14003 - DNA, 229 bp, Homo sapiens
  chr4:113438278-113438507
  binary
gaggtcggataggggagcagttgatgagcttttagaggatgtgagaatgaaatcactcacatgttagagctgaaaggatccccctcattttacatacaggaaactgaggctccgggcactgatgcaggttttgctggggttaacccagtttatagcctggagggacagcaaggaggcttcctgcgtgggtggcagcgaaccgagcgggaggagcggcagagctgctgct

SEQ ID NO: 14004 - DNA, 157 bp, Homo sapiens; identical to SEQ ID NO: 6161
  chr4:113442552-113442709
  hyper

SEQ ID NO: 14005 - DNA, 132 bp, Homo sapiens
  chr4:130168471-130168603
  hypo
cgcagcaagtgttcgcgacacaaccatttatgccgatagagtttgcagacaccagctccaccttggcctgtgtgcaatggctgctcccttgtggaggggaccaacgcaaacatcggagcttggatcataatc

SEQ ID NO: 14006 - DNA, 53 bp, Homo sapiens; identical to SEQ ID NO: 8527
  chr4:1338812-1338865
  hypo

SEQ ID NO: 14007 - DNA, 88 bp, Homo sapiens
  chr4:141489128-141489216
  hyper
gacctggaaataagaaaggtgcagaacagaagggagcgaaattgagttcactcttaagccaagatttccccctgtgttcctattttcc

SEQ ID NO: 14008 - DNA, 373 bp, Homo sapiens
  chr4:153943334-153943707
  hypo
tgactgggacacgggagggctccagacagccgctatttgccacacggaaccaaagcatttcactgttttaacaagcggttcagctggtccggagtatccctgctggctctcagccctaaagtggcgtgagggctgggcacgtcgacagcacttgatccgctccttccctctggaaatgcatttccttccattaccagaacagcctctcacagtttggcctgcctcttctcatgctatgtcgaaacaaagccacctgcctcccatgaaagacggcattgtttttccacctgagccacccacacctgggcaggtagaacagcgggtccccactccagggagctctcccactcgggcctgtcatggctcacacccc

SEQ ID NO: 14009 - DNA, 473 bp, Homo sapiens
  chr4:1556847-1557320
  hypo
ggctccgagctgagggagaagcacacgccgcccctgccctgtgagctggcgttccaggacagaatcggatatcaaacgagcacacggataccaagtaaaggccccaccgtcacacagcagccgccgctggaaactgagtttggtgggggaggggcctctctgcccagggactgagaccctgggatggtgacaaaggccagcaccgggtcccacacggagatgacgccatttaaccctccccaagacgccagggaagaggcgtccttgttcgtccattttacagaagagtacactgaggcctccagacgctggtggggacctcccaagccaggctccccatgtctctttctgggcctccgaccaccgttgatcagagaagcaaatctgttgggagaaatctcggagccacagagccctggcagggtgctcctggtggggaccagtccgggctggcccgacacttcctgcacgcc

SEQ ID NO: 14010 - DNA, 43 bp, Homo sapiens
  chr4:174439755-174439798
  hyper
cgcagtcccccttctccccattccagaacctgccgagcccctg

SEQ ID NO: 14011 - DNA, 271 bp, Homo sapiens
  chr4:174440348-174440619
  hyper
ctttgggattggactttttcagtttcacacgaagagacttggagtatctggagaaggtttttgaagacgtttaggagggagggtgagttttctgctgagaaactcaatctgccatacagtagcggccccatctgggatctgtcactgctgacagcaccagagggcacagccgtgatcttctgcacagcctgcactccccgaaataccctccttaatcaaaggatgtctgcgcgcctgagctcagctgaccgcgccgggagcaccagggccg

SEQ ID NO: 14012 - DNA, 276 bp, Homo sapiens
  chr4:175138136-175138412
  hyper
cgtgcaatgtcactttaacctggatagcgtcaggtttcctcacgcataaaataagatcagatgatgccctcttggattctttgactgcaggacaatcattaggccatagtgaacagatgcgcttggttgccagaccgcgccctttgcgggtctatcaaaagggcaagcgcatattctggagctgtctcggagacttggacagaaagattcgaggcaaatattctaggctgggaaatttcgcgccgagcccccccctcagttagcctgtctaaaggc

SEQ ID NO: 14013 - DNA, 140 bp, Homo sapiens; identical to SEQ ID NO: 8530
  chr4:1807117-1807257
  hypo

SEQ ID NO: 14014 - DNA, 79 bp, Homo sapiens; identical to SEQ ID NO: 8532
  chr4:1827219-1827298
  hypo

SEQ ID NO: 14015 - DNA, 155 bp, Homo sapiens
  chr4:184278181-184278336
  hypo
cgccccgccccggcctgccccgccggcaccaaacgcaagcatcagactcacctgctctccggtgtgtgtgaccaagaaccctgcgggctcctctccaccctccactctcaggaaataacaggaaagatgtctccctggcatgcctggactcgtgc

SEQ ID NO: 14016 - DNA, 63 bp, Homo sapiens
  chr4:1960880-1960943
  hypo
cgctttttctctcttcatcttacaatggcctggctggatacgtgtcagctcttgttcatcagc

SEQ ID NO: 14017 - DNA, 300 bp, Homo sapiens
  chr4:1977126-1977426
  hypo
ggtaaggctgtggcgccctccttccccccaggctctgtgttggcattttgcactcctggagacctgtgtcccccgtgaacagcggcttcctccaggctggcttgttgccgggacaggtgggagcaagttccctgctgtgggctggggaggatggctctcaacaaaggccagtggttaagagttcctcactgaacgtgtttcctggggctgccagaacaatgcctcacagacgcgtggtttcgcagttctgggtgtgggcagggccgtgcgccctctgaaggttccttgggaggctctttc

SEQ ID NO: 14018 - DNA, 56 bp, Homo sapiens
  chr4:1977525-1977581
  hypo
acttgcccttcttataagagcactggtcctgttgacttagcgcctgccctgctacc

SEQ ID NO: 14019 - DNA, 82 bp, Homo sapiens
  chr4:2459899-2459981
  hypo
tttgctcattgtctggttgactgagacgggaatcttggtattttttggtgcccactttcttcacctcatatttctacacaac

SEQ ID NO: 14020 - DNA, 55 bp, Homo sapiens; identical to SEQ ID NO: 8541
  chr4:2926396-2926451
  hypo

SEQ ID NO: 14021 - DNA, 202 bp, Homo sapiens; identical to SEQ ID NO: 8542
  chr4:30723862-30724064
  hyper

SEQ ID NO: 14022 - DNA, 91 bp, Homo sapiens; identical to SEQ ID NO: 8543
  chr4:30724126-30724217
  hyper

SEQ ID NO: 14023 - DNA, 103 bp, Homo sapiens; identical to SEQ ID NO: 8544
  chr4:3217005-3217108
  hypo

SEQ ID NO: 14024 - DNA, 56 bp, Homo sapiens; identical to SEQ ID NO: 8545
  chr4:3217154-3217210
  hypo

SEQ ID NO: 14025 - DNA, 222 bp, Homo sapiens; identical to SEQ ID NO: 7397
  chr4:3446222-3446444
  hypo

SEQ ID NO: 14026 - DNA, 68 bp, Homo sapiens; identical to SEQ ID NO: 7398
  chr4:3447170-3447238
  hypo

SEQ ID NO: 14027 - DNA, 183 bp, Homo sapiens
  chr4:39047105-39047288
  hyper
cggattttttttttcctctccttattacttgcaggcaattttgacctaagtttttaagcttttcttttaaataataccctcgcccccggagtgtggagaataagacggggacttcattttcccgagacccggcgtgcctggtgaaacttttgcatttaggcatttatttcagtgcatgctctg

SEQ ID NO: 14028 - DNA, 81 bp, Homo sapiens
  chr4:40910486-40910567
  hypo
ctttcctgacggagagagggaggccggcatccccaggccacacctataatgcctctcaccccatacacgtgtgcacaacac

SEQ ID NO: 14029 - DNA, 59 bp, Homo sapiens
  chr4:41746763-41746822
  hyper
cgtggactgcaattgaccccaatccaaagcagtgccaaaaagttcagtaaaagctggtg

SEQ ID NO: 14030 - DNA, 66 bp, Homo sapiens; identical to SEQ ID NO: 11683
  chr4:41752247-41752313
  hyper

SEQ ID NO: 14031 - DNA, 44 bp, Homo sapiens; identical to SEQ ID NO: 7404
  chr4:628787-628831
  hypo

SEQ ID NO: 14032 - DNA, 421 bp, Homo sapiens; identical to SEQ ID NO: 7405
  chr4:628950-629371
  hypo

SEQ ID NO: 14033 - DNA, 102 bp, Homo sapiens
  chr4:7035978-7036080
  hypo
gcgtagacgcggacagtggtcagaactgggtttcagactccagccttgtgaatgactcccaagcccttgtcagaaacaccctctaggggagggggcctttgc

SEQ ID NO: 14034 - DNA, 89 bp, Homo sapiens
  chr4:8201024-8201113
  hyper
ggagacagccccgtggggccagccagcgctgggccaggagcggccacctggttcctgcgtgctacggccctgtgggcctgggagctgcc

SEQ ID NO: 14035 - DNA, 39 bp, Homo sapiens
  chr4:8201450-8201489
  hyper
gggagcagagccagcctgtcgctggattccaagtccagc

SEQ ID NO: 14036 - DNA, 49 bp, Homo sapiens
  chr4:85403425-85403474
  hyper
ttcataacattttaaaaatggtcaagtccggccgggcgcggtggctcac

SEQ ID NO: 14037 - DNA, 148 bp, Homo sapiens
  chr4:85404934-85405082
  hyper
cggccacggctgccttttcctgccctgaagtggtggagcttctgggaagatccggggcctgtagcgccctttccactgcgagtaggcgcagccgctttacaggttgtgcgatggatacaggtatcgtgtggcagacgtggtgccgtct

SEQ ID NO: 14038 - DNA, 93 bp, Homo sapiens
  chr4:85405111-85405204
  hyper
acaagccagccaatcccgagcgttctaattgccttagtcctgggatcacccacgcagcaagtccagccatgaagcccgcccccacagacacac

SEQ ID NO: 14039 - DNA, 48 bp, Homo sapiens
  chr4:94753232-94753280
  hyper
cgccaaaaagaaaaggaaagcgccacaaactgggtttgcagaaagagt

SEQ ID NO: 14040 - DNA, 33 bp, Homo sapiens
  chr4:94753547-94753580
  hyper
atcaagcgattgcttctaacacatttccatttc

SEQ ID NO: 14041 - DNA, 128 bp, Homo sapiens
  chr4:955057-955185
  hypo
cgggagaggccagccgagcagggaccagggacgcccaccctggacctggccctggggcgggagaggccagccgggctcagcggggaccggggacgcccaccctggacctggccctggggcgggagagg

SEQ ID NO: 14042 - DNA, 308 bp, Homo sapiens; identical to SEQ ID NO: 6598
  chr4:955544-955852
  hypo

SEQ ID NO: 14043 - DNA, 125 bp, Homo sapiens
  chr5:10479713-10479838
  hypo
cggctggcagctgcttcgggcgtctcaccttgtgactatttcctgggcactgtgggagaggaggcctcttgcctgagctcctgtccctactgtctcctctcactaaatgcacggcacggctttgc

SEQ ID NO: 14044 - DNA, 171 bp, Homo sapiens; identical to SEQ ID NO: 8556
  chr5:10564301-10564472
  binary

SEQ ID NO: 14045 - DNA, 431 bp, Homo sapiens; identical to SEQ ID NO: 6600
  chr5:1074389-1074820
  hypo

SEQ ID NO: 14046 - DNA, 470 bp, Homo sapiens; identical to SEQ ID NO: 9776
  chr5:112629778-112630248
  hyper

SEQ ID NO: 14047 - DNA, 58 bp, Homo sapiens; identical to SEQ ID NO: 6193
  chr5:114515671-114515729
  hyper

SEQ ID NO: 14048 - DNA, 68 bp, Homo sapiens
  chr5:114515769-114515837
  hyper
cgggtgtatcgaatttgtcctttcttttctctttttctgtttttagtctgagttttgccgagctcccc

SEQ ID NO: 14049 - DNA, 105 bp, Homo sapiens; identical to SEQ ID NO: 6197
  chr5:115911590-115911695
  hyper

SEQ ID NO: 14050 - DNA, 95 bp, Homo sapiens; identical to SEQ ID NO: 6201
  chr5:125930492-125930587
  hyper

SEQ ID NO: 14051 - DNA, 170 bp, Homo sapiens; identical to SEQ ID NO: 6202
  chr5:125931062-125931232
  hyper

SEQ ID NO: 14052 - DNA, 218 bp, Homo sapiens; identical to SEQ ID NO: 7414
  chr5:132082800-132083018
  hyper

SEQ ID NO: 14053 - DNA, 37 bp, Homo sapiens
  chr5:134364991-134365028
  hyper
cgccggttcttgaaccagacctgggggaggggacggg

SEQ ID NO: 14054 - DNA, 169 bp, Homo sapiens
  chr5:134365094-134365263
  hyper
gtcggcccgctgccctccgaacgtcgtttctctccttcgaccgatatttccgctcctgcattccctccacaatggttcctttcctgtccccagaaaatactaatttctttttccgatctttatcctctcccgaaattatatccgttttcttctccgaatacggattctc

SEQ ID NO: 14055 - DNA, 186 bp, Homo sapiens; identical to SEQ ID NO: 12797
  chr5:134366533-134366719
  hyper

SEQ ID NO: 14056 - DNA, 124 bp, Homo sapiens; identical to SEQ ID NO: 12798
  chr5:134367305-134367429
  hyper

SEQ ID NO: 14057 - DNA, 63 bp, Homo sapiens
  chr5:134374385-134374448
  hyper
cgatcccggctttggggccctgcctttgccgcgggagaataggctccaatttacgaagctggt

SEQ ID NO: 14058 - DNA, 84 bp, Homo sapiens
  chr5:134375851-134375935
  hyper
gagattggacctttcttctttctgctcagcctgcgggagggagctggtcttgcgtgttggcagggagagtccgctgcccagagc

SEQ ID NO: 14059 - DNA, 90 bp, Homo sapiens
  chr5:134879182-134879272
  hyper
cgagttaaagggggaggaaagcgcctcattttctatgcccccaagggacggaccgagcgggcagcctctaaacaatgtatttatcacttt

SEQ ID NO: 14060 - DNA, 73 bp, Homo sapiens; identical to SEQ ID NO: 7415
  chr5:134880614-134880687
  hyper

SEQ ID NO: 14061 - DNA, 156 bp, Homo sapiens; identical to SEQ ID NO: 7419
  chr5:141931151-141931307
  hyper

SEQ ID NO: 14062 - DNA, 32 bp, Homo sapiens
  chr5:142625544-142625576
  hypo
cggtcatgccaagtctcagtgccccctccgct

SEQ ID NO: 14063 - DNA, 173 bp, Homo sapiens; identical to SEQ ID NO: 8568
  chr5:152870319-152870492
  hyper

SEQ ID NO: 14064 - DNA, 194 bp, Homo sapiens; identical to SEQ ID NO: 9794
  chr5:153859808-153860002
  hyper

SEQ ID NO: 14065 - DNA, 240 bp, Homo sapiens; identical to SEQ ID NO: 12804
  chr5:157098032-157098272
  hyper

SEQ ID NO: 14066 - DNA, 143 bp, Homo sapiens
  chr5:172665306-172665449
  binary
cgagcgcattctccgtgaataaattattattaattgaaaagcgatcggcgcagccggagccggcccccctttcgtgcaatcagcagggctggtcgcaaaaggtatatatgattaattgaaagataagctggaactatcaccgg

SEQ ID NO: 14067 - DNA, 297 bp, Homo sapiens
  chr5:172665949-172666246
  binary
cggatttttcctgcctcgggactcgcctcattcaggtggctcagctggcaccaaatccttctcatttccacgcttgttcagtgcccacggggtgtgccaggcgctctcacggatctcgtcacggatcctcttattccgactgcaggcctgaggagaatgaggttcagagacgtggagtaagttgctcagggtcacacagatgggaaaggacagtgtcagggtgttaggattcgaacacacagctgactgcacagctgagactgttttcttttattacacgtcgctgcgcccaagacc

SEQ ID NO: 14068 - DNA, 769 bp, Homo sapiens; identical to SEQ ID NO: 11733
  chr5:174151999-174152768
  hyper

SEQ ID NO: 14069 - DNA, 60 bp, Homo sapiens
  chr5:176038454-176038514
  hyper
cgtgggactggcgtctccaggcagcacgccaggcaaggagaaaacctcagcgtgtcggac

SEQ ID NO: 14070 - DNA, 121 bp, Homo sapiens
  chr5:179023553-179023674
  hypo
cgcatccaggttgcagcactcggagcgggcgaggcagggggctgaggagcggagccacaagctgcagcaggagctgggcgggaggatcggcgccctgcagctgcagctctcccagctgcac

SEQ ID NO: 14071 - DNA, 87 bp, Homo sapiens; identical to SEQ ID NO: 8582
  chr5:1879747-1879834
  hyper

SEQ ID NO: 14072 - DNA, 62 bp, Homo sapiens
  chr5:2225378-2225440
  hypo
cgcaggtgcacagcaagggagccgagtttcctccagcgcttgaaaaaaaagtgtttactttg

SEQ ID NO: 14073 - DNA, 133 bp, Homo sapiens
  chr5:2225469-2225602
  hypo
acggcctggaagcgcacttgtgatctcagcaaactgctgaaatctgtactgattgaggaaaagtatccctgttaaaggacgcgtgttcatgtatgaaagaagtggcttgaaatggaagatcgttcttgttccc

SEQ ID NO: 14074 - DNA, 298 bp, Homo sapiens; identical to SEQ ID NO: 12830
  chr5:2261313-2261611
  hypo

SEQ ID NO: 14075 - DNA, 155 bp, Homo sapiens
  chr5:2524957-2525112
  hypo
cgggatcatccgggtggaaagtcctcagtgagagtgcagcgggcagctctcgattgtttaagcctggtttcctctcactaggatcctggagatgggcttacctagaaacccaggcactggagccatggctcgcactgtcccggtctcacattagc

SEQ ID NO: 14076 - DNA, 48 bp, Homo sapiens
  chr5:2547115-2547163
  hypo
cggtgttagtgcccaccagcctccccggtcaccctgttagcccagact

SEQ ID NO: 14077 - DNA, 128 bp, Homo sapiens
  chr5:2547192-2547320
  hypo
gataaatgcagagatgatgaatcgaaatgcaaatgacggtgaagtgcctcagccatcagcgctgaatatcattaataccttcccactgttaaatcgatcactgtcatccccggatgccggcgtgcggc

SEQ ID NO: 14078 - DNA, 37 bp, Homo sapiens; identical to SEQ ID NO: 12834
  chr5:3221011-3221048
  hypo

SEQ ID NO: 14079 - DNA, 142 bp, Homo sapiens; identical to SEQ ID NO: 12835
  chr5:3221181-3221323
  hypo

SEQ ID NO: 14080 - DNA, 52 bp, Homo sapiens
  chr5:3324702-3324754
  hypo
cggcgcggtggggctgggtcccaggctggctccccgccctccctcctactgt

SEQ ID NO: 14081 - DNA, 283 bp, Homo sapiens
  chr5:3325333-3325616
  hypo
gccctagctgttcggcgtgtgtgtgtgtgtgtgtgagcgcgcgcgtgcgtggggttaagtgtttccataattgcatctctcttgaaaatcaaaacagaacaaaccgtgctttatgtacgagtaagagtcatgattcaacaatggggcctgcctgaaggagctgcctatttagtcacataccacagcaacctactggcttgtcattttatgatctggcacggagccgacggcgcacacggtgtcttgggcagccttgggagcccgtgacagtgctgtgaccagc

SEQ ID NO: 14082 - DNA, 89 bp, Homo sapiens
  chr5:3602716-3602805
  hyper
cgcacccccagcctgtgacccgcccttcccggcttgctcgagacccactggcgccagtgctgcgcgtggggactccgtgcatggccgaa

SEQ ID NO: 14083 - DNA, 208 bp, Homo sapiens; identical to SEQ ID NO: 12843
  chr5:3932149-3932357
  hypo

SEQ ID NO: 14084 - DNA, 337 bp, Homo sapiens; identical to SEQ ID NO: 8583
  chr5:40680627-40680964
  hyper

SEQ ID NO: 14085 - DNA, 99 bp, Homo sapiens; identical to SEQ ID NO: 6210
  chr5:42950747-42950846
  hyper

SEQ ID NO: 14086 - DNA, 175 bp, Homo sapiens; identical to SEQ ID NO: 7436
  chr5:42995428-42995603
  hyper

SEQ ID NO: 14087 - DNA, 388 bp, Homo sapiens; identical to SEQ ID NO: 8587
  chr5:43017314-43017702
  hyper

SEQ ID NO: 14088 - DNA, 304 bp, Homo sapiens; identical to SEQ ID NO: 8588
  chr5:43019347-43019651
  hyper

SEQ ID NO: 14089 - DNA, 260 bp, Homo sapiens; identical to SEQ ID NO: 8589
  chr5:43019887-43020147
  hyper

SEQ ID NO: 14090 - DNA, 368 bp, Homo sapiens; identical to SEQ ID NO: 9813
  chr5:476496-476864
  hypo

SEQ ID NO: 14091 - DNA, 88 bp, Homo sapiens
  chr5:490615-490703
  hypo
cggggaccattgtgacgtggccacagagccacggagtgtgcccggctctcaaaggagcggccctgacggccagactgatcacaggcta

SEQ ID NO: 14092 - DNA, 458 bp, Homo sapiens
  chr5:490766-491224
  binary
caaggtaggtgtgagcctcgaggggccgcgggtccaggagtctctgctacaacccctgaggctttcccttgggtgcggtggctagggcggctgccccatccgaggtgtgtcctgaccacctatggcatcgcccacgtgacgggcctgccatccatgagcctgtctgtgccctcggcagctttccctgggctgcacctggtgggtgatgctggacggcagggactacagggaggggtgagaaggcgccaaggaaccacgtgctgggtgaggcggccccaacccgggagctcctctttctccatgcgtctccttggtctcaggtttcagccccttgattcccatggagaggccgggccgtgctctctcttgaaccagacggaaaatcgccaattcttgtgagtctggttcagctggtggatttgtttgaggctgagttctcagaccggtgagggcggcag

SEQ ID NO: 14093 - DNA, 76 bp, Homo sapiens; identical to SEQ ID NO: 7437
  chr5:54518558-54518634
  hyper

SEQ ID NO: 14094 - DNA, 202 bp, Homo sapiens
  chr5:59189507-59189709
  hyper
gccttcctgatgctgctgctgctgctgccgccgccgccgcttctgcagcccagcagaggctggtgcttagcttctcacttgaaggcgccagagcctcagggctaccgagagggggccctgccagcgggaggggtcacagaacgcggcagggctccttccaccgaggctatggcagagacacgctcccgggctccccaagtca

SEQ ID NO: 14095 - DNA, 53 bp, Homo sapiens
  chr5:59190083-59190136
  hyper
tcttagagaaatggagtttggcgattcctggctggttctcagagcttgttgac

SEQ ID NO: 14096 - DNA, 82 bp, Homo sapiens
  chr5:72416165-72416247
  hyper
tttctcccagattcctcgcgcgcacggccacgagcgcggaggctgccaaacccgccagccctgggttccgaagccgcccctg

SEQ ID NO: 14097 - DNA, 115 bp, Homo sapiens
  chr5:72497779-72497894
  hyper
cgtctgcagaagttcgccctttgctggcccctgtccaggctctcctctcgctggcccacgtgatcctttcctgccagtctcccctggctccagcttcctccacgcccagggctct

SEQ ID NO: 14098 - DNA, 270 bp, Homo sapiens
  chr5:72594501-72594771
  hyper
ggactgtcctgagtgcatttttttcctcccttatagtctgttaaattgactaataaacccaacgcagcgttctctgtgcagcttcaaaaaactcagtaatttcgttagaaaacgttgaaatccgaccccaaagtattcagcccaaatgtttagttaaagtaaccccgtgggttaataaactaaacaaaggcaacccatgcaaaaccggagcaatgaaaaccaggctacataaacgaagggaagtttataagaactctttgggaggaaaaa

SEQ ID NO: 14099 - DNA, 171 bp, Homo sapiens
  chr5:72733185-72733356
  hyper
ctccagcaaactaacatcttgataagtccgctgacaacaaaataaacagtggagaaggctggagggcggggggcgccgtggcccgcggctggttcgcagcagctcggcggccttctgcgaggggaaggcgggccgctctcggctttgtgcttggggctttaggaggggggc

SEQ ID NO: 14100 - DNA, 53 bp, Homo sapiens; identical to SEQ ID NO: 5835
  chr5:75698192-75698245
  binary

SEQ ID NO: 14101 - DNA, 916 bp, Homo sapiens
  chr5:75698274-75699190
  binary
ttccacaattgtcaaataggtgagggcacaggtacggaagcgtcccgcattccctccagattttatcacgctgagacacaaagagaaaaatagctcctggcgaccgcatgaaaaccccgatttcaaaacagccacatgcagtttaatttccttaaaagcttagccggaaaaggtttctgtggcttgcgaccccagctgggcttgagagaaggctctgcacactggggcgggggcgggcacaaggtgatcggagggagggggatgactcgcagttgtgttttgagtggttgccttgggttatcttgttcctccagcacacacacactcagtttcttgtcataaggggaaccctgttattttgtagacaaaaagtgacagaagcaactttcgaagcaaaaaaaaaaaaaaaacaaaaaaaaacaaaaccaaaaagacgaagaagaagaacaaaagtcaacgtgaaatctccccagaggaaaaggaaccgcgctgtttgtccctcagtaactgagcaacaccccggacacgaagggctccctgtgacttctgcggtttttcttgcacttctccgcgttggttcacttccaccctcgaaactctccagaagcgagaaataaggcggggtggccgccacccccaggccaccagctgtgcgggggccccagctgcagggggtcccggcccagcgtccctctcggccccttccctctcccccgggggagaaggggcgggtccacgcggcctgggcgctgcgcccgacacgcggtaggggtcgctgcgtctcggcgcgcgctcccaccgcggtgaataacggggcctggctggaggagaaaggaaacctgctgcgggaggcggcggcgaccggccagggagcgagggaggagagttcacttttacttcagtgtcagcgcgcggc

SEQ ID NO: 14102 - DNA, 267 bp, Homo sapiens
  chr5:75699193-75699460
  binary
cgtggctggctctggcgagagagcaccgagggagtgggtcgcagatcttcgggcggctaggggaaatcggcgagaggcgggatccgagcgcgccggcggggcgcagagcccgcgagcctggccagcgagggtagccgcggggggcgcgccccgggcgggcccccggagacgcgcaggatgccacacgaagagctgccgtcgctgcagagaccccgctatggctgtaagtgcgccgggcgcgcggggttcctgctggccttggggagc

SEQ ID NO: 14103 - DNA, 199 bp, Homo sapiens
  chr5:76936815-76937014
  hyper
cacacgctgtctggagggagggagaaggggccgcgacctggggagacaaggataagggcgcggggccgcgcgtctccacgtgcgtgcacacaagcgctagtgtccccatcccacagtcgcccccggaacggcgccggctgtgcagcgatctcccacacgcactcgctcgtatattctgttttgttgtatctttcaggtc

SEQ ID NO: 14104 - DNA, 89 bp, Homo sapiens
  chr5:76939813-76939902
  hyper
ctttcccttctaactactggcgctcacggccctccacacagaaagctcgacacaaaacaatgacggattagtatccgccccctgactgc

SEQ ID NO: 14105 - DNA, 192 bp, Homo sapiens; identical to SEQ ID NO: 6216
  chr5:77148195-77148387
  hyper

SEQ ID NO: 14106 - DNA, 38 bp, Homo sapiens; identical to SEQ ID NO: 8593
  chr5:77268330-77268368
  binary

SEQ ID NO: 14107 - DNA, 78 bp, Homo sapiens
  chr5:79097441-79097519
  hypo
cgaaaactgtctaatgcaactgcgcatgcaccctcgctagccgcgggtgaaggggaccaagtgccagcagcatctgcc

SEQ ID NO: 14108 - DNA, 418 bp, Homo sapiens
  chr5:79551984-79552402
  hyper
cggcggagcaggctcgacccgggctcgcacttccgctggcgtcaggcgggtgggctgctgcgatcacttcccggttggggcgccgagctccggagtcggccgccagcctttgggccccacgctccgggtctggtgcgcggtctggccgcgctcgggccctcgccaaatgagagcgcagcgcctctccgccttcggatccagagaaagagcttgttgctgcctctaaaaggttggagccttagtaagcggttcctgcctttcctgcacagaccagaccgccgggtgctggtctgcgctctgccgcgcgccgactgggacagcccacccacgagatccttgttcctgaaatccctttccttccctcatctgccaagaaaactttcaacttttgggctctccgcgcctcccaagcttcctc

SEQ ID NO: 14109 - DNA, 81 bp, Homo sapiens
  chr5:87955380-87955461
  hyper
aagcctatgacaggaagttgttaataatatccttcgaaatttacctgtgaaatacagagcttgactacttttgtaaaagtg

SEQ ID NO: 14110 - DNA, 50 bp, Homo sapiens
  chr5:87962917-87962967
  hyper
aacgagatctgttgccttcagagtttattccgaacttttctttttccttt

SEQ ID NO: 14111 - DNA, 389 bp, Homo sapiens
  chr5:87963002-87963391
  hyper
catctattaatatcagaaaataaaaccagctattaaggtgcagcaagctgttacgagtgagcagcagcatccgtcccttcacaggcctctatttgcattgtaaattgcttctttctcacgcaagactctttagcctctctctatagagatgtataaagccaacggcaatttccagcgcaggttaaggaggaaggaaaaaaaaatcccattctatagaagtgacagctgattcaaggatctgttcctgatcctttttggttaggcaccatggctttttaccaagcggtggcagcttgattgcacatatcttgtgtgtatgtgttttagggggaagatcctcgatttcacagggcttctaggctgggaaggagaagatgccgtcttgctgg

SEQ ID NO: 14112 - DNA, 191 bp, Homo sapiens
  chr5:87963511-87963702
  hyper
atgatgatgtcatgagaaatctcaagtacatggttattgatatgcatcagtgatcagccaactgccccacgcctgctgcccgagcagcggcagcgacagcagcagtagcggcagcattgcaacaatccctattttctcaatcaacatctcttccgctagcactaccgactgctcctggaaaagcaacccgc

SEQ ID NO: 14113 - DNA, 157 bp, Homo sapiens; identical to SEQ ID NO: 6219
  chr5:87969885-87970042
  hyper

SEQ ID NO: 14114 - DNA, 158 bp, Homo sapiens
  chr5:9497496-9497654
  hypo
cggttcagacacaatggactggggatagagacggctatagtgccgataatggagaaactagccagagcttcagatatttgttttccaggacatctcaataattgggtacacctcacaatatgtgagacttgacgtcgagtggcacggcatactctggc

SEQ ID NO: 14115 - DNA, 97 bp, Homo sapiens; identical to SEQ ID NO: 9836
  chr6:100039474-100039571
  hyper

SEQ ID NO: 14116 - DNA, 144 bp, Homo sapiens
  chr6:10383584-10383728
  hyper
cgcccgacggagcgtcccctcgcacctccccagagttgcctaactcctaggccctgaaagtgccagaacaaaggccgactcccccggcgcctccctcggggactgagcaccctgggccctgctgacgaagcaaaccccagactc

SEQ ID NO: 14117 - DNA, 85 bp, Homo sapiens
  chr6:10384074-10384159
  hyper
gcccaaatataccacactgtggcgttcctcgtgccgaccgtgggtctctaacctagccaccttctcccgttgaaatatgcacatc

SEQ ID NO: 14118 - DNA, 148 bp, Homo sapiens
  chr6:10392129-10392277
  hyper
cgtgtgtttaggtttgttactggaatttaaaggacgcgatctttattgccatagaaaaatcacgtgcagcaaaagcatagcatgggttgggtcactttttaaagctcccgccctgctgatgaaaatattcccgcccccttaaatgggc

SEQ ID NO: 14119 - DNA, 180 bp, Homo sapiens
  chr6:10409954-10410134
  hyper
cgcaactactttgtgtggttcctcaaaacgtccctcactctccgcctccgaataaaatgtttttataaggaaatactagggagaacccgggcccaccgactgtatgttccaggtatcctttctggggtaggtaagtagggggctgtgttccctcccgcgctggttgcgcggcctcttacc

SEQ ID NO: 14120 - DNA, 203 bp, Homo sapiens
  chr6:10410242-10410445
  hyper
cgaggatccaggcccgacagctggtgaggcagcccccggtgcgtgtgcaggagcccagactcctggctctgcctctggccgggccagcctgggtgctgcggctgcggctgggcgtgcagggggttcaggctgtaggggtcgttgacgtgggagtaaggatcttgcgactgggggtagataggctggtagggtggggggaagta

SEQ ID NO: 14121 - DNA, 306 bp, Homo sapiens
  chr6:10410948-10411254
  hyper
tgccactgcgttattgtttattctcttccatttatttggagagaaaaaaatcataaacgttcaaagactgttaccgtttcatgactacttaaatagaaacatatttcgcagaggggctgtaacaaaaacacacgtttaaattaccagcttaaagaaggttttaactgcaggatcggggtctgtctttttcgcttcctctgttaggagcctttttctcgacagagtcgatttatggtttggatagggaaagggggacgtcaagtcaaggtttaaaatagaaagattcagccttattgggtttaaaag

SEQ ID NO: 14122 - DNA, 61 bp, Homo sapiens
  chr6:10415329-10415390
  hyper
ggaggagggagaggaggtggaggaggagaaggaggagggagaggaggagggcaaggaggag

SEQ ID NO: 14123 - DNA, 283 bp, Homo sapiens
  chr6:10415836-10416119
  hyper
ccagcttctagcacttctcccttaaccctgctaccacgatccgagctgcccttttggccccgtgcaattttattagaaatcattatccctttcgcaattaaacataaccaccaaaccaagaccggcgaagtcactccaggattttttcccaacaagggatcgcctccgctcgaggcagccaccccctcgggccgcagcgccttgggagttttattggctttgagctttcccccaggttggagattctgccaagcggctccggtggctctgctggggtttgcaa

SEQ ID NO: 14124 - DNA, 227 bp, Homo sapiens; identical to SEQ ID NO: 7442
  chr6:10417842-10418069
  hyper

SEQ ID NO: 14125 - DNA, 138 bp, Homo sapiens; identical to SEQ ID NO: 11779
  chr6:10418940-10419078
  hyper

SEQ ID NO: 14126 - DNA, 61 bp, Homo sapiens
  chr6:106443120-106443181
  hyper
caatgatctttcataactaggctgggcatgttcgtgcagccctctgggcactctgggggac

SEQ ID NO: 14127 - DNA, 40 bp, Homo sapiens; identical to SEQ ID NO: 7449
  chr6:108478767-108478807
  hyper

SEQ ID NO: 14128 - DNA, 45 bp, Homo sapiens
  chr6:108484828-108484873
  hyper
cgccttaaatccgaggtcccccgtggcctgcagcagctttgcctg

SEQ ID NO: 14129 - DNA, 144 bp, Homo sapiens
  chr6:13386531-13386675
  hypo
cgtcaggtccaaatcccccttttcatttataagcaagcaaactgatacacctgtgcactagatacacaccgcgtaggtgaaagctgactccaggtagcacctggcctgactgtgaaggaatctcgcgtacttcggaggacatgc

SEQ ID NO: 14130 - DNA, 132 bp, Homo sapiens
  chr6:136556331-136556463
  hypo
tcctagatcttaagcaaccgggtgatcgtgttgccatttgctaatatgcaaaagacgtgggaaagaacaggttttcaaggtggcggaaaagaacaggtaggaaggaaaagtcctgttttggacctgtgaaac

SEQ ID NO: 14131 - DNA, 369 bp, Homo sapiens; identical to SEQ ID NO: 6230
  chr6:143247975-143248344
  hyper

SEQ ID NO: 14132 - DNA, 208 bp, Homo sapiens; identical to SEQ ID NO: 8610
  chr6:143248451-143248659
  hyper

SEQ ID NO: 14133 - DNA, 42 bp, Homo sapiens
  chr6:150962790-150962832
  hyper
cgtgtggatgaataaatcactgtttggtagtaagtgtaaaac

SEQ ID NO: 14134 - DNA, 182 bp, Homo sapiens
  chr6:152622733-152622915
  hyper
cgaaattataaacaaatacagggtagacctctgacatgttaagtaattcagctgtctcgagcacatagtttcattttaactgtcattgtttacagtgtcaaagattggcccggcccaacggtagtcaaagagacttaaggaatctgttcctccctctgaatctgcaagatcgaaggctggtc

SEQ ID NO: 14135 - DNA, 55 bp, Homo sapiens
  chr6:157478478-157478533
  hypo
agcccagcaacccccacggttctgagttacgaaaggcagggatctttggaattac

SEQ ID NO: 14136 - DNA, 693 bp, Homo sapiens
  chr6:158024060-158024753
  hypo
cgtggggccatcgtccccctgggtgtctgaagtggatgttgccgtggcttactgcaggctgggacgtccacagtgcttcatggcagtgccagggcccagggctggacatggagagtcaggtgaggaatccagccatctctgtggaacgctttgtgaagcaagtgtttacaatgaatccagaagcacttatggagtggctgctatgtgcacgtagagggcaaagaaatttcacacaggttcgttccctgcccttaacgagttttccacgtagttatgaaaagataactaacatcataaagaagtacttgacaaggtcgtagcactcaggatggtcattttagaccaattcccgtaaaggggagaaatgagagaaaaggctgaagaaattagctggcagccacactgagaggcccttggatgcccatctaggaaagagggacttgactcagctgctggagcacgatgcttgaacaggagattgagagggctggaattcagccctaggaggactgatctggcatccgagtataaagtgagctgatgacaggtagtaggcagctgttgtctgatgatgccgtattacaagcaccctcaaaaacctctgtggcccttaacaagcagcatttctttttctcgtgtgtctgtgggacatctggggcagctctgcggattaggcaaggctcggccccgggc

SEQ ID NO: 14137 - DNA, 139 bp, Homo sapiens; identical to SEQ ID NO: 7455
  chr6:158093637-158093776
  hypo

SEQ ID NO: 14138 - DNA, 172 bp, Homo sapiens; identical to SEQ ID NO: 7456
  chr6:158094082-158094254
  hypo

SEQ ID NO: 14139 - DNA, 175 bp, Homo sapiens
  chr6:159076962-159077137
  hypo
cgatgcgtggaaatgcagagcgcatgtggtcagggaatggtcttgaatgaggtcagtatgggagtggcgagcattctgtgggaactgaggatggaggagtcaggagaactggatcgggaggtcacgactgggatgcctgtgctttagaatgtgtttacgggaagggaaaaccagc

SEQ ID NO: 14140 - DNA, 55 bp, Homo sapiens
  chr6:166268182-166268237
  hyper
cgagcccgcagaagccccagaggcctggcctgagcccgggagggacgcggggtcc

SEQ ID NO: 14141 - DNA, 97 bp, Homo sapiens
  chr6:1726588-1726685
  hypo
cgcatttgcccagccagccagccaaatgtggccacgcactgggtggccagagagtccttaccacttcagttggccggtagtacttgagatccacagt

SEQ ID NO: 14142 - DNA, 48 bp, Homo sapiens
  chr6:1726859-1726907
  hypo
accacagcagcacaggctgatgctccagctgattattaaagcaacggc

SEQ ID NO: 14143 - DNA, 155 bp, Homo sapiens
  chr6:2108917-2109072
  hypo
cgatataaagtatcagagtcctgcggtatcttcccctcacagttcaacgatactgcccacctcggtattctcagcttagtagtgtgacaggaagactgagtggcatcatatctgggctggagactaggtagcgtgtggctgcttatgaaccgcac

SEQ ID NO: 14144 - DNA, 162 bp, Homo sapiens
  chr6:21202340-21202502
  hypo
cgcttcactctggcaatagtaccgcttcactctggcaatagcaacaaagacaatactattgtctgtgttctcactgactgtggcactggattcttgtgtccgacagcagtgataattcacatgtgcttcacaagtgcccatgaaggatctgcgtgcatggcc

SEQ ID NO: 14145 - DNA, 413 bp, Homo sapiens
  chr6:25726863-25727276
  hypo
cgtctacccaatcagaaagtcgtactagaatcgcctcatttgcattcacgccacttcccattgtccaatcagattttggataccgaacgcggcgtttgagggccgtgcctataaataccgcatctttcatcctccagttctgtttgtttacttggcgagacttggagctgaggtcatttggagctgtttaatactgaagagctgttgagcactggaaagtgctgtgtaaccctggaaaagaaccgtgtaacgctgcagaagtgtgtggtagctatgccggaggtgtcatctaaaggtgctaccatttccaagaagggctttaagaaagctgtcgttaagacccagaaaaaggaaggcaaaaagcgcaagaggacccgtaaggagagttattctatttacatctacaaagtgct

SEQ ID NO: 14146 - DNA, 255 bp, Homo sapiens
  chr6:25727391-25727646
  hypo
agcaagcgctccaccatttcttccagagagattcagacagcagtgcgcttgctactgccgggagagctggctaaacatgctgtgtctgagggcaccaaggctgtcactaagtacaccagctccaagtaagcctgctaagtaaacgtcatttctaacccaaaggctcttttcagagccacttaaacatactgaaacagctgtgggcttcgtttttgtgtagtttctaaccgtaagggttttttttttttttgaggc

SEQ ID NO: 14147 - DNA, 214 bp, Homo sapiens
  chr6:26198924-26199138
  binary
aacacccacttataaatggaaaaattattaaagaaaactgcaaaatagctatttacacagaaaatgtgagcccttttaaggaatacatgggtggctctgaaaagagcctttgttaagactgcttccttaaaaagccaatataagagttctcgttttacttgcccttggccttgtggtgactctcagtcttcttggggagcagtacagcctggat

SEQ ID NO: 14148 - DNA, 368 bp, Homo sapiens
  chr6:26204318-26204686
  hyper
cgtgtttttctcttcgggaggaaaatccttttggtcagatttcccttggcttggtggtggagagggtgagatcttgcagttttcaaacacttcctaagggggttccgtccccaagagagcaagcagcagaaatgccagaggaaccgtgcctatggggacaaagctgaactcctcatggaaggagattactgcagttccggtcttgtgagccaaagctcctgttcaatcgtcctagagcatcccaagcagcaaatgattttaaacatgttaatgtatttaatctcatttagttgttaaaatatgcctaaatttcctctttgggaacgcaagacttgcagagatgactccatggagagcggactctgccg

SEQ ID NO: 14149 - DNA, 205 bp, Homo sapiens
  chr6:26205298-26205503
  hyper
tttataagttaattgttcctgtcaacaggtacgtatatttttcagccgttttttttttttcgttccaaattacatttggggtttcggcatacgattttttaggctacgatccttttatgtttattgtagtagggccttagattgcactgaaaaggctagggtaatagtgtctgtttaccttaccacttttattttgagtacctaa

SEQ ID NO: 14150 - DNA, 55 bp, Homo sapiens
  chr6:26205712-26205767
  hyper
agaagttcctggggtagataagctcacgcaaggagaggttgcaagcattcatttc

SEQ ID NO: 14151 - DNA, 224 bp, Homo sapiens; identical to SEQ ID NO: 6232
  chr6:26216853-26217077
  hyper

SEQ ID NO: 14152 - DNA, 210 bp, Homo sapiens; identical to SEQ ID NO: 6233
  chr6:26217156-26217366
  hyper

SEQ ID NO: 14153 - DNA, 312 bp, Homo sapiens; identical to SEQ ID NO: 6234
  chr6:26217578-26217890
  hyper

SEQ ID NO: 14154 - DNA, 126 bp, Homo sapiens
  chr6:26241269-26241395
  binary
ttattcccacgtttctgaaatttactcctatgttaggtggctgggacttaactacactagcattacatgtttagtttttgagatggagttgctcttgtccaggctgtagtgcaatgacgcaatctc

SEQ ID NO: 14155 - DNA, 130 bp, Homo sapiens; identical to SEQ ID NO: 7461
  chr6:26271217-26271347
  hyper

SEQ ID NO: 14156 - DNA, 327 bp, Homo sapiens; identical to SEQ ID NO: 7462
  chr6:26272105-26272432
  hyper

SEQ ID NO: 14157 - DNA, 210 bp, Homo sapiens; identical to SEQ ID NO: 6237
  chr6:26322359-26322569
  hyper

SEQ ID NO: 14158 - DNA, 71 bp, Homo sapiens; identical to SEQ ID NO: 6238
  chr6:26331633-26331704
  hyper

SEQ ID NO: 14159 - DNA, 324 bp, Homo sapiens; identical to SEQ ID NO: 6239
  chr6:26331811-26332135
  hyper

SEQ ID NO: 14160 - DNA, 243 bp, Homo sapiens; identical to SEQ ID NO: 6240
  chr6:26332283-26332526
  hyper

SEQ ID NO: 14161 - DNA, 248 bp, Homo sapiens; identical to SEQ ID NO: 6241
  chr6:26577475-26577723
  hyper

SEQ ID NO: 14162 - DNA, 61 bp, Homo sapiens; identical to SEQ ID NO: 12892
  chr6:27100389-27100450
  hyper

SEQ ID NO: 14163 - DNA, 61 bp, Homo sapiens; identical to SEQ ID NO: 12893
  chr6:27101049-27101110
  hyper

SEQ ID NO: 14164 - DNA, 87 bp, Homo sapiens; identical to SEQ ID NO: 12894
  chr6:27101206-27101293
  hyper

SEQ ID NO: 14165 - DNA, 205 bp, Homo sapiens; identical to SEQ ID NO: 6247
  chr6:27560506-27560711
  hyper

SEQ ID NO: 14166 - DNA, 51 bp, Homo sapiens; identical to SEQ ID NO: 7471
  chr6:27858740-27858791
  hyper

SEQ ID NO: 14167 - DNA, 191 bp, Homo sapiens; identical to SEQ ID NO: 11803
  chr6:28303261-28303452
  hyper

SEQ ID NO: 14168 - DNA, 74 bp, Homo sapiens; identical to SEQ ID NO: 11804
  chr6:28303489-28303563
  hyper

SEQ ID NO: 14169 - DNA, 209 bp, Homo sapiens; identical to SEQ ID NO: 11805
  chr6:28303607-28303816
  hyper

SEQ ID NO: 14170 - DNA, 150 bp, Homo sapiens
  chr6:28304301-28304451
  hyper
gcttttataataaagtttctgttggggaggggttggggaagtgctggctagttggaactgtttggacactttccaactggggacagatgtggttagggccgttaggctctgttgcggttagagctgttatgctctgttgaagctatggac

SEQ ID NO: 14171 - DNA, 481 bp, Homo sapiens
  chr6:35454062-35454543
  hypo
cgagcccggcttgtttatgaggaggagcgcggaggaggatccagacacacaggcttgcgcgcccagactcgcccggccagcggctggcggcctccgacgtcaccaaaccggttgggtgagagggcagagagcagggggaagggccgcagtcccgcccgcgccccccggcacgcaccgtacatcttgccctcgtctgacaggatgatcttccgccggccgcagggcgggtagatggccagggcctcctggaagctctgctcgatgtccgggctccacacgccctccgcatcgttgtccagccccttgtccaggccctcgggcccatcctcccgggcctccccggggctgctgctggcgttccagctgttggacgctattgtgctggttgctctgggctctgggcctgagcccactgggcggctgagcctgggggacagacagacaggaactgggaccagggtcctcctcgaccacagcaatc

SEQ ID NO: 14172 - DNA, 245 bp, Homo sapiens
  chr6:35454589-35454834
  hypo
gcccaccctaggagcaggtgctccaggtggaacggaggtaaccagaggaacaaccacagcttgttcagagctgtgtgacctgggatgcacgcgctacttcacctctctaggcctcagtcctgtaaaacgagaaaagggtctccttgaggagacctccttgaggttgtgagggttaaaatgtaaatgagctcatgacaaagtaccaaccacatgcccagctcataatactcaagaaataggtaatc

SEQ ID NO: 14173 - DNA, 314 bp, Homo sapiens; identical to SEQ ID NO: 7482
  chr6:37023826-37024140
  hypo

SEQ ID NO: 14174 - DNA, 90 bp, Homo sapiens; identical to SEQ ID NO: 8629
  chr6:37275483-37275573
  hypo

SEQ ID NO: 14175 - DNA, 61 bp, Homo sapiens; identical to SEQ ID NO: 6255
  chr6:391113-391174
  hyper

SEQ ID NO: 14176 - DNA, 154 bp, Homo sapiens
  chr6:41339068-41339222
  binary
cgggacagcctcctctatgcactgcttcctcttccccagccctgctccctgcatccttccctctggtcctagtgtcctggtgtcttgaagatgctgggtagttagaccgacatccctctccctctctcaccctgggctctgggacgctggccct

SEQ ID NO: 14177 - DNA, 312 bp, Homo sapiens; identical to SEQ ID NO: 8633
  chr6:41620850-41621162
  hypo

SEQ ID NO: 14178 - DNA, 35 bp, Homo sapiens
  chr6:42145871-42145906
  hyper
cgctgcatctccgagggtccgggtctcccctcagc

SEQ ID NO: 14179 - DNA, 45 bp, Homo sapiens
  chr6:42145975-42146020
  hyper
cggggcccggatgggctcacggcggccgcgcccctcgcccaggac

SEQ ID NO: 14180 - DNA, 180 bp, Homo sapiens
  chr6:43243254-43243434
  hyper
cggctaagcctccaggctcggagggccctgtcgccccacccctgactcccgttacctcactgcccgtcgggctgccccccaccccgccccaataattggccttgcaattggatgccaaagagcccagagttgagggggagcagagctttgagcccaggtctctcagagcaacccaacagc

SEQ ID NO: 14181 - DNA, 534 bp, Homo sapiens
  chr6:43243475-43244009
  hyper
cccaccactgagggccctgggggtcaccaaacatgcccccccatttccagctcttcccacacccccacccccgaaaataaaactcagggaccaacatctgcttcctttgcacttgctccgtcgaccccgctccccgctcggaggggcttccgtgggggagggggcggggctccgggccctcagagttctcagtgtcgagcgaggagaggggctggcccctgcccccggagaagcgggactggtaggagagagaaactcagcaccggggcccagctgagccccttcctgcgtaaggagacgccttctaattgcggggtgggggcggagtaggggagggataggaaggggattagcgagaggaccctcgcggaggtcctgagtcccagtcggtttattcctgagccttcccctcccatcgtaagtccttccctcgaccccccattttgtactgcaataatactgtattatacgcttgcactatttcccgaccctggccagcggaagcatgcacgaaaaactcaaaaccacacacac

SEQ ID NO: 14182 - DNA, 57 bp, Homo sapiens
  chr6:43478745-43478802
  hypo
caatacaaagaaggtgccagggccagggccctggagcactggtgaggacgtgaaggc

SEQ ID NO: 14183 - DNA, 37 bp, Homo sapiens
  chr6:4910947-4910984
  hypo
attagtcgggtttttataaagcagcagtgttggaagc

SEQ ID NO: 14184 - DNA, 41 bp, Homo sapiens; identical to SEQ ID NO: 8639
  chr6:50674750-50674791
  hyper

SEQ ID NO: 14185 - DNA, 369 bp, Homo sapiens
  chr6:50690697-50691066
  hyper
aggagcgctttcctgattgcccgtggctacacaaaatacaaactactttgaatcaaaacattttggaggaattaatatgatctgaactctgcacgttttaagagagtttgagtttgtcagagcgcttagaggtgactggcacgccaaggcaaaggcatttacgccgcggtacaaacattgtcagatctgatttaatttctttaaaaaaaaaattccttgaaatggaaccttagcttcaattgctcagtctgcccataacagagtagaaggacctgatcgcttttccctttagccggcctcaaggccggcagcaggctgcttggcaggaggaagcgatttcctctgcttctctgggtttcaggaaggccc

SEQ ID NO: 14186 - DNA, 84 bp, Homo sapiens
  chr6:50691095-50691179
  hyper
cgtggattctttcagcagctcctgaaggagtacaattggaggagcgtgggaagccttgctcttcttcctttgtcagtactcttc

SEQ ID NO: 14187 - DNA, 44 bp, Homo sapiens; identical to SEQ ID NO: 8640
  chr6:50805695-50805739
  hyper

SEQ ID NO: 14188 - DNA, 194 bp, Homo sapiens; identical to SEQ ID NO: 8641
  chr6:50808438-50808632
  hyper

SEQ ID NO: 14189 - DNA, 43 bp, Homo sapiens; identical to SEQ ID NO: 11819
  chr6:50810509-50810552
  hyper

SEQ ID NO: 14190 - DNA, 212 bp, Homo sapiens
  chr6:50811605-50811817
  hyper
cttttccatgttaccctcccttcctcacattgttacgggaatcttctgggatgaaaatgagtgtggttggcccttttgcgttgtttcagtcctctcggtacctccccgcccagccctgcgatcttaactcaccgggcccggctccccggccgcttgcataattagggagggcgagggcggggcgggaggcctgtggagaccaggcggaggct

SEQ ID NO: 14191 - DNA, 313 bp, Homo sapiens
  chr6:50813939-50814252
  hyper
ctaccccttctccctccctcacttctcctttcatgtaggacccccgcccccttgctttccttagccaggcccgctacatttatctgataattgagttattaaaagatttggtttccttgggcctataaatcaataaacagtaggattaacgcaatagtttgccttttaagtcaagggagacgtttaaggcaagcccctttgagctttgttttcaaaccaaacaggtgagttgcagctctccccccggcccctgcactcttcagacatttggtccctgcccactcctaaacgctcagtcccaaaacaaaatagc

SEQ ID NO: 14192 - DNA, 189 bp, Homo sapiens; identical to SEQ ID NO: 11820
  chr6:56716695-56716884
  hyper

SEQ ID NO: 14193 - DNA, 116 bp, Homo sapiens; identical to SEQ ID NO: 6258
  chr6:5997274-5997390
  hyper

SEQ ID NO: 14194 - DNA, 113 bp, Homo sapiens; identical to SEQ ID NO: 6259
  chr6:5997401-5997514
  hyper

SEQ ID NO: 14195 - DNA, 164 bp, Homo sapiens; identical to SEQ ID NO: 8652
  chr6:73329621-73329785
  hyper

SEQ ID NO: 14196 - DNA, 82 bp, Homo sapiens; identical to SEQ ID NO: 8653
  chr6:73330126-73330208
  hyper

SEQ ID NO: 14197 - DNA, 42 bp, Homo sapiens; identical to SEQ ID NO: 10742
  chr6:91320244-91320286
  hyper

SEQ ID NO: 14198 - DNA, 61 bp, Homo sapiens
  chr6:99292143-99292204
  hyper
cgctgacccaaatgcagtgaactgcacggcccttgtggggccccaactttgatgtgggcct

SEQ ID NO: 14199 - DNA, 109 bp, Homo sapiens
  chr6:99292521-99292630
  hyper
attaaaaccttaatcctgtttgagactttcttctctctctaaattcctttttcttatgaaaggggtgcaaagttcactacaaaaagtactataacagggagattaattc

SEQ ID NO: 14200 - DNA, 75 bp, Homo sapiens
  chr7:100838060-100838135
  hypo
cgtgagccaccgcgcccagcctcagctgtgttcttaactctatttttccttcactggggatggtaccatttcccc

SEQ ID NO: 14201 - DNA, 92 bp, Homo sapiens; identical to SEQ ID NO: 11836
  chr7:1029909-1030001
  hypo

SEQ ID NO: 14202 - DNA, 465 bp, Homo sapiens
  chr7:105254063-105254528
  hypo
cgtgaggactcagtgaggtaataaccgtaaagtgccgagaacagtgtctagcacatagtgagcgtggtatcaagtacttgttcagtaaagtgctctcaaagcagagggtgaaaactgccttcggggaaaacgagaacaggaatcaagcttgtgttacctgtcggagccgcccggctaagcaggggcgctgcccagctccccctgccccccagagccggtgaaggcggtgccaggaggtcccttacctgccgagaggaggtgctgttaacgggatcgggcaccggtgcgagaaggctgggcgggttctttttgtgaacgctattcataccaggcattttagtgattttacaggctttgctactagaactcgagttcttacgcttttttccttctgatttgtcaaaagagaggggcagagaagacacagcattgtgtgaggccagagagaggtcccctgcgtggagc

SEQ ID NO: 14203 - DNA, 32 bp, Homo sapiens; identical to SEQ ID NO: 10749
  chr7:105279344-105279376
  hypo

SEQ ID NO: 14204 - DNA, 75 bp, Homo sapiens
  chr7:105280248-105280323
  hypo
cggcagcaccgccgaacgcagcacaaggctcggggaatagggcgggagcaggcaccgaagggaaggagaggagcc

SEQ ID NO: 14205 - DNA, 115 bp, Homo sapiens
  chr7:115117321-115117436
  hyper
cgagccgccagacgtgagctaaagaaggtgctggggggcagaacgggtactggggcgcctggaggagagttgaggggcctgaaagactctgggggcccagctcggtcggtgggtt

SEQ ID NO: 14206 - DNA, 66 bp, Homo sapiens
  chr7:11870605-11870671
  hyper
cgaacccgcagaaaaggggttggtaattcctcactccgtattgttttcctgcctgtcacggccccc

SEQ ID NO: 14207 - DNA, 119 bp, Homo sapiens
  chr7:121942391-121942510
  hyper
tgtggtttttgtaattccctgaaacacacaaatgacaggaatatggttctgaaaaaaaaaatagcttaaaaagggaggagcagacacgtggaaggtagcgccaggcaagcagaagagcc

SEQ ID NO: 14208 - DNA, 227 bp, Homo sapiens; identical to SEQ ID NO: 11837
  chr7:121946146-121946373
  hyper

SEQ ID NO: 14209 - DNA, 148 bp, Homo sapiens; identical to SEQ ID NO: 8664
  chr7:121956311-121956459
  hyper

SEQ ID NO: 14210 - DNA, 52 bp, Homo sapiens
  chr7:126891155-126891207
  hyper
cggggtgggacttgcttaggggacttaagggtttctgcaaccggcgaggggg

SEQ ID NO: 14211 - DNA, 52 bp, Homo sapiens; identical to SEQ ID NO: 14210
  chr7:126891155-126891207
  hypo

SEQ ID NO: 14212 - DNA, 47 bp, Homo sapiens; identical to SEQ ID NO: 8667
  chr7:129330248-129330295
  hypo

SEQ ID NO: 14213 - DNA, 89 bp, Homo sapiens; identical to SEQ ID NO: 8668
  chr7:129330351-129330440
  hypo

SEQ ID NO: 14214 - DNA, 170 bp, Homo sapiens; identical to SEQ ID NO: 8671
  chr7:129424378-129424548
  hyper

SEQ ID NO: 14215 - DNA, 177 bp, Homo sapiens; identical to SEQ ID NO: 6611
  chr7:129483449-129483626
  hypo

SEQ ID NO: 14216 - DNA, 124 bp, Homo sapiens; identical to SEQ ID NO: 7499
  chr7:1308164-1308288
  hypo

SEQ ID NO: 14217 - DNA, 123 bp, Homo sapiens
  chr7:131242600-131242723
  hyper
cgtaaactgagtttatccggtgaaagaacaaagaagttcctttcccctcccccgctcccctccttttttccacccccaaagctgcctgggagacgcagaccccaggcccgcctgaagaggagg

SEQ ID NO: 14218 - DNA, 32 bp, Homo sapiens; identical to SEQ ID NO: 10754
  chr7:140156493-140156525
  hypo

SEQ ID NO: 14219 - DNA, 32 bp, Homo sapiens; identical to SEQ ID NO: 8681
  chr7:149112425-149112457
  hyper

SEQ ID NO: 14220 - DNA, 341 bp, Homo sapiens
  chr7:150758626-150758967
  hypo
cgaggctccgttgtctgcctgggccttcactcccctctttccccagctcattatcactccctccctcatctttgttgctttctctccgggcctgggccttgactcctttctccctcatttttcttgcggcctttcccacctcctctctcctcctccctctactcagcctctcggcccttttcggcccccctcgcctcagtcctctcctgtctccttgttcttctcttttcttcctataaataactctcctctgtgctgtggctgccgctaagggccactctgaggcccttcatactccaggaggatccccagcagcgcagcctgcgcgtggtggctcctgc

SEQ ID NO: 14221 - DNA, 148 bp, Homo sapiens; identical to SEQ ID NO: 8683
  chr7:150774065-150774213
  hypo

SEQ ID NO: 14222 - DNA, 347 bp, Homo sapiens; identical to SEQ ID NO: 8684
  chr7:150774358-150774705
  hypo

SEQ ID NO: 14223 - DNA, 39 bp, Homo sapiens; identical to SEQ ID NO: 6613
  chr7:155581980-155582019
  hypo

SEQ ID NO: 14224 - DNA, 41 bp, Homo sapiens
  chr7:156796104-156796145
  hyper
ccctggctgcccagtgttggtgagggcgctgaggctgggcc

SEQ ID NO: 14225 - DNA, 64 bp, Homo sapiens
  chr7:156796431-156796495
  hyper
cgcccagcagctgcttctgcccggactcccagcagccgcgccccggccttggatgaggttgatt

SEQ ID NO: 14226 - DNA, 96 bp, Homo sapiens; identical to SEQ ID NO: 7513
  chr7:156799510-156799606
  hyper

SEQ ID NO: 14227 - DNA, 250 bp, Homo sapiens
  chr7:156802164-156802414
  binary
ataattcgctgcccgtctcatgcctgggggtccgggcgagtcctcgcaggccccgggcagagccgaggcggcttcgcagctcttcccccgctcgctgggagccaagcgcagagaggggcaggcggtgccggtggaggatgcgcgaggccctcccgccacgcgcatccacgggggccgcagggtactcacagttgaagtcgggcatcttaggcaggatcatgcccgcggtggacgcgcgcagccactggtc

SEQ ID NO: 14228 - DNA, 213 bp, Homo sapiens
  chr7:156802537-156802750
  binary
cgccgcggagtagccgtagaccgggtggccgtagagcgccgcctgcgccgggaggcccgcgccgccctgcgcgcccccagggtgcagccccagcgccaggcccccagcggcggcggcggcggcggcggcggcggcagcggccgctgcgcccggatgcgcgtggtggtggggccccccgtgcccgccgcccgtgccgccgccgccgccgcccgc

SEQ ID NO: 14229 - DNA, 42 bp, Homo sapiens; identical to SEQ ID NO: 7515
  chr7:157262486-157262528
  hypo

SEQ ID NO: 14230 - DNA, 215 bp, Homo sapiens; identical to SEQ ID NO: 7516
  chr7:157263471-157263686
  hypo

SEQ ID NO: 14231 - DNA, 141 bp, Homo sapiens
  chr7:157281193-157281334
  hypo
cgccgaagcccctccggcggcggctctttgttccccgcgtcacctcactgcacgccccgtcaccagcgtcgtgctccagcagcggcgctcctccagccaaagagggaggcactgacgaaacccgtgcagtcaaattctcgc

SEQ ID NO: 14232 - DNA, 76 bp, Homo sapiens
  chr7:157448328-157448404
  hypo
cgtctccagtgcgggaaacagcacagccaggcacggtcacccaccaggacgacgcctacggcctggagatccagga

SEQ ID NO: 14233 - DNA, 39 bp, Homo sapiens
  chr7:157448526-157448565
  hypo
aggccgctgaagccgcgtcgccgtgagcctctggccggc

SEQ ID NO: 14234 - DNA, 203 bp, Homo sapiens; identical to SEQ ID NO: 8687
  chr7:157642963-157643166
  hypo

SEQ ID NO: 14235 - DNA, 145 bp, Homo sapiens; identical to SEQ ID NO: 12948
  chr7:157744287-157744432
  hypo

SEQ ID NO: 14236 - DNA, 75 bp, Homo sapiens
  chr7:157877353-157877428
  hypo
cgcccatccacacccacgacgcccatccacacccaccacgcccatccacacccacgacactcatccacacccacg

SEQ ID NO: 14237 - DNA, 241 bp, Homo sapiens; identical to SEQ ID NO: 12952
  chr7:157919964-157920205
  hypo

SEQ ID NO: 14238 - DNA, 143 bp, Homo sapiens; identical to SEQ ID NO: 12962
  chr7:158039908-158040051
  hypo

SEQ ID NO: 14239 - DNA, 471 bp, Homo sapiens
  chr7:158066479-158066950
  hypo
cggggagccgcagacacagggggagccgcaggcatgggggagccgcagacacagggggagccgcagacacaggaggagacacacgaggagccgcagacgcaggaggagccgcagacagacgcgggaggagccgcagacacagggggagccgcagacacagggggagctgcagacagacatgggaggagccgcagacacagggagccgcagacacagggagccgcagacacagggggagccgcagacacaggaggagacacacgaggagccgcaggcacagggggagccgcagacacagggggagctgcagacagacatgggaggagccgcagacacggggagccgcagacacagggagccgcagacacagggggagccgcagacacaggaggagacacacgaggagccgcagacacagggggagccgcagacagacatgggaggagccacagacacgggagccgcagacac

SEQ ID NO: 14240 - DNA, 219 bp, Homo sapiens; identical to SEQ ID NO: 11848
  chr7:158067069-158067288
  hypo

SEQ ID NO: 14241 - DNA, 340 bp, Homo sapiens
  chr7:158552753-158553093
  hypo
cgaggtttgacgcatttggcattaacgtgagccactccagtctcaagtgtagcttccccttgggaacctcgtccagagtgaaccactgaagagaaaaaatgtttacgttcagcaaaagttcttctgaatcaaaaatccaaattaaacccagtctctacaaatgttccatgctgctcactaaccacgaggcatcaacagttctcagtaacgcgaaggctgagcctcaccatatccagctctacgctatgtggatgccagtgacctcacgtttggaggcgatggcagcaacaggtgtgagcgaccattctaagtgctttacacacaccaaccccgtgacccc

SEQ ID NO: 14242 - DNA, 298 bp, Homo sapiens
  chr7:1615093-1615391
  hypo
cgcagaattgagagtcgagcacgtcgctttgttttctgccaaacttagccaagctccggtcttaaaatcttttcgttcctagcgtgaggctttctgtctttgttgcaaatattgaaacctgccacgtcacctcttgcactatttgtttagttctttaagaaatgaaaccttaatccatgtacaatttctaaaagcctttatttcaatattttaagaagttatttcccctggcaaagaagccgccctgttgcccggtgtggagctcgatgacaaagctcatcagcctgagtggaagctc

SEQ ID NO: 14243 - DNA, 113 bp, Homo sapiens
  chr7:1615444-1615557
  hypo
ctgtgtgtcacggtccctggatgaacgtttgtggaactggattgaattaaacaagacgtgcaaagcaagtggttcacgaggtagtgtgggggtgtagggatggggactgaccc

SEQ ID NO: 14244 - DNA, 421 bp, Homo sapiens; identical to SEQ ID NO: 7520
  chr7:1641978-1642399
  hypo

SEQ ID NO: 14245 - DNA, 474 bp, Homo sapiens
  chr7:1714474-1714948
  hypo
cgggcgggaaacatccttcggcccgggccagcccagccatcaccaggtccactgtgtttgctagagcccccaattcaatctctgaattttaaagatagggacactgaggcgcagacagggcagtggccgcaagccactgaggcttgcaggcagtggtatctgggctcagccctgctcccatgctgggctccccacacctcatatccgggctcagctgggagagtgccctggccttaccgacggggacccggcagcccacggcgtggaggtgaaccagcttgtctgggaagccacattccacccctgtgcacccccaggccctctgtggcccactaccccctctaggaccccaccccacagaagcgcatctctctgctgtccgccccactccagtggtaacttctgtcagagggcttgtcacagagtgctgaccgcgctgagagcttctcaccagcgctggacatgtggccaggt

SEQ ID NO: 14246 - DNA, 36 bp, Homo sapiens
  chr7:1733131-1733167
  hypo
cgatgtgtggtgtggggcgtgacccacttcctggtg

SEQ ID NO: 14247 - DNA, 77 bp, Homo sapiens; identical to SEQ ID NO: 9919
  chr7:19146849-19146926
  hyper

SEQ ID NO: 14248 - DNA, 171 bp, Homo sapiens
  chr7:2006407-2006578
  hypo
cgcggtgaggaggaggaacgccgcaatcgtggcgtgctgggaggcgagggccgcgggccgcgctgcgtgcgcagggcagagctccttcaggaacacgagaggaataaagacggacccacccgagggaaaccgtgaggaatcgtagccacctgctctccaggagaggctgcc

SEQ ID NO: 14249 - DNA, 42 bp, Homo sapiens
  chr7:20830567-20830609
  hyper
cgcgtacctctgcagggtacgtttaaacccggctcttagcat

SEQ ID NO: 14250 - DNA, 295 bp, Homo sapiens
  chr7:2163000-2163295
  hypo
cgctacagcttggagacattgcgggagggctcccagcaagcgaaactgggctggggtgcaggacggagagagggcgctggtgaggccctggtcctgtgtgtgagggcggctgacacccggtgggctctgtttgcgcttgagctggtgacggtagggtttccttccctgtcaagcaggagagcaccccagtccacccagggagcacccaggaggagccagccccgccaagggcacgcatgggaggcgtcaatccgctggagggcagcagccctcaagcgaggactcacggggacat

SEQ ID NO: 14251 - DNA, 375 bp, Homo sapiens
  chr7:2163467-2163842
  hypo
aagccagaaataaataaataaagctgccaattagccagcgcccttttccgctctggcaagggctttttagcttctccaaatacaccagagtcctgcaaggctgcacacaagcaaaggcagcccaggcagcaaggggcgggggcttaggccccgggggcaagaactctgcttcctgggaagccccctgtagccaggtcaggctcctcctctagacggggaagccgggcaaacacctccaggagcaaggcgaaggctctcagtacccccagtacagatgcagccgggagcccccagctctccacaggtcagaggccacgccacgcccctgctcaactcgcagagcagcaaggcaggaggggcaggccatcgggcagc

SEQ ID NO: 14252 - DNA, 404 bp, Homo sapiens
  chr7:2196807-2197211
  hypo
cgtcttcaaaagagtgctaagtaatacaatattttaagaatagaaatcaatagtaagaaggcgatgggaacactgttgtggggaggcctggctccactgaccactccagcagtgcaggtcaccgtgatcaggaagcggtaatgatggaacaaatcacagcactcagagggctcctccccttcatgttaccatttgagctccccaccatgcaagtccacacctcacatgcgtaagaacccgcaaaaactaagagactgagaagagaaaagcagcacagcatgctcccgacacggaagacgctgcccatctgggaggagtgggagagccggtcccctacagtctctgctcagtgcagcacaggcccagggccctgggacacagggcagagggtgtctgaaagagga

SEQ ID NO: 14253 - DNA, 237 bp, Homo sapiens; identical to SEQ ID NO: 8690
  chr7:2233056-2233293
  hypo

SEQ ID NO: 14254 - DNA, 137 bp, Homo sapiens
  chr7:2237982-2238119
  hypo
cgcctttgcttctgccagccactcacgctctccacaggctgcagccaggtacacaccccccttcaagcaacaaaaccactgcctgagcacctggcctgctctaagcccagggctgagacaagggggagccagccaca

SEQ ID NO: 14255 - DNA, 107 bp, Homo sapiens; identical to SEQ ID NO: 12977
  chr7:23287654-23287761
  hyper

SEQ ID NO: 14256 - DNA, 242 bp, Homo sapiens; identical to SEQ ID NO: 11853
  chr7:2448743-2448985
  hypo

SEQ ID NO: 14257 - DNA, 469 bp, Homo sapiens; identical to SEQ ID NO: 8700
  chr7:2472811-2473280
  hypo

SEQ ID NO: 14258 - DNA, 328 bp, Homo sapiens; identical to SEQ ID NO: 8701
  chr7:2473779-2474107
  hypo

SEQ ID NO: 14259 - DNA, 171 bp, Homo sapiens
  chr7:2566658-2566829
  hypo
tagaggtgtcccccggagtcctgcttgctcggggtggggccgccagtgttgtgggactgcaaatgggagctcagcacctgcctgccacccacgcagaccagcccctgctctgttcccacaggttccgctccatccactgccacctgtacccggacacaccctggtgtcccc

SEQ ID NO: 14260 - DNA, 225 bp, Homo sapiens; identical to SEQ ID NO: 8705
  chr7:26192423-26192648
  hyper

SEQ ID NO: 14261 - DNA, 112 bp, Homo sapiens; identical to SEQ ID NO: 8706
  chr7:26192748-26192860
  hyper

SEQ ID NO: 14262 - DNA, 91 bp, Homo sapiens; identical to SEQ ID NO: 8708
  chr7:27135176-27135267
  hyper

SEQ ID NO: 14263 - DNA, 142 bp, Homo sapiens; identical to SEQ ID NO: 8709
  chr7:27136790-27136932
  binary

SEQ ID NO: 14264 - DNA, 67 bp, Homo sapiens; identical to SEQ ID NO: 11855
  chr7:27203938-27204005
  hyper

SEQ ID NO: 14265 - DNA, 244 bp, Homo sapiens; identical to SEQ ID NO: 11856
  chr7:27204141-27204385
  hyper

SEQ ID NO: 14266 - DNA, 105 bp, Homo sapiens
  chr7:27223010-27223115
  hyper
cgcctgcggacatttcaccttccagcacctgggctgccccttcccaaggcagtaaaggcggctccagtcccagtctttcccggctgcggccaagactgggcagtc

SEQ ID NO: 14267 - DNA, 269 bp, Homo sapiens
  chr7:27223306-27223575
  hyper
tagggtgaagggaaagggggcttcccgaagctgcgggcaggctctacttgctccccctttaaaaaaaaaaaaaaaaaaaaaaaaaagacccacaagacaaaaaaaaaatcgcttttgacagattgaataacaattgtgaataacatgcagttgggcagaaggaggcacgtaattgccaccacgccagaggaaaatggcttcctttggacaaaaaggccaactttgggttaatttgttcttttaatatattgctagagctaagcgggcta

SEQ ID NO: 14268 - DNA, 227 bp, Homo sapiens
  chr7:27237765-27237992
  hyper
cgagttctgaagcgtttcttcaagttgccttcttgctctatttttaatccattaactagtggttttcagtttgttgatgacttttttctctttaaccctcctgttctggaaccagattgtgacctgccgctcagagagattcgtcgtggctgatatccgcctccgtttgtccttagtaatgaatttattcgtggcgtattcccgttcaagttcttttaattgcacct

SEQ ID NO: 14269 - DNA, 178 bp, Homo sapiens
  chr7:27238170-27238348
  hyper
acccgctgtacaatcctgtcttctgctaaagcctagagggtcagtggggaaggtagttagttctgaactgaaatgaaatcacccagggctccagtgacttccccaacccggccatcctgcaggagcagcgcgtaggcagcctcgagtgatagcctggtccaacggcccacaccttagc

SEQ ID NO: 14270 - DNA, 158 bp, Homo sapiens; identical to SEQ ID NO: 12987
  chr7:27238984-27239142
  hyper

SEQ ID NO: 14271 - DNA, 71 bp, Homo sapiens; identical to SEQ ID NO: 12988
  chr7:27245310-27245381
  hyper

SEQ ID NO: 14272 - DNA, 126 bp, Homo sapiens; identical to SEQ ID NO: 7538
  chr7:27831654-27831780
  hypo

SEQ ID NO: 14273 - DNA, 156 bp, Homo sapiens
  chr7:29847067-29847223
  hyper
cggggagggcgggcacccggccgccctggacctggaggagcgccgcccgggccccgtgggcaggcaggcaccggctctcaggaacagcgcctttggagggtggcgtgccagccgcgtgggtgtgcccgtggcgggcgccggggcggcgtggggacc

SEQ ID NO: 14274 - DNA, 94 bp, Homo sapiens
  chr7:30205901-30205995
  hypo
cgcgcagggtggtttaggataatagcagacacattttttttctggtatccatgtacttacaaagatttttgaaagtgactggaagaaccggggc

SEQ ID NO: 14275 - DNA, 123 bp, Homo sapiens
  chr7:30675617-30675740
  hypo
cgggccggcagcagagctctctggttctgtctgtaccatgtttgcttgattttaagaacaagcagttgaagtgctgttttctaaatgaagagactctttacccacgagtttgcgtatgcatac

SEQ ID NO: 14276 - DNA, 32 bp, Homo sapiens
  chr7:31528326-31528358
  hyper
cgaaccgtgaaaggatgtgggctggacatact

SEQ ID NO: 14277 - DNA, 44 bp, Homo sapiens; identical to SEQ ID NO: 12991
  chr7:3283455-3283499
  hypo

SEQ ID NO: 14278 - DNA, 259 bp, Homo sapiens
  chr7:42237185-42237444
  hypo
cgtgctactggagcacggagcccttactcagtacagagaaggatgggggcctttgtcacctgaaattcaccactttgctatgttccggtcagcgggaggtacagttcgctactcacaggcctaaaagcagtgtcgggcttagctaccccagacaggagagtcagcgcctgctcatgcattgagactgaaacaatggtctgggcgtcacagcagctgtgcaaatccctgaaaattcagtccacgttaacgcaaggctctc

SEQ ID NO: 14279 - DNA, 63 bp, Homo sapiens
  chr7:42267546-42267609
  hyper
cgctctttctctgcgctttcctgtcgagttcccttcaggttctggtttcctccgacggtggca

SEQ ID NO: 14280 - DNA, 139 bp, Homo sapiens
  chr7:42267822-42267961
  hyper
gccagcaaacagaacatgctggattgctcagagacggctctgggtgtctgggggcagaaggggtgctcccaggcccggctttgatccgcatttctgaagctggctttgggagacaatgcatctccgccagccaggccgc

SEQ ID NO: 14281 - DNA, 190 bp, Homo sapiens
  chr7:44431034-44431224
  hypo
agacaatccagatacaccacaaggtaaggttcctccaagagacaaaatgagaagaaaatatcgatcagcgatcttcagggggaggaggcggtccgtgtttacagaacaaaaataaggagactgtgcccagcagatgacccctccccactgactcaaggctgcactgcgtccgcgtgccctgctgtactgc

SEQ ID NO: 14282 - DNA, 189 bp, Homo sapiens
  chr7:4751238-4751427
  hypo
cggcattgtgtggatgggcggtagtgagaataattactaagggcgtcataccctctcgtatctgcatcacccataaggggtgggcagtggtgctgccgtgtcttgtcaggaggccagctctgtgtcacccaccaggctgggctcagccacaagtcggcaacgtagtgcctccagggcagatgccacgga

SEQ ID NO: 14283 - DNA, 299 bp, Homo sapiens
  chr7:4751607-4751906
  hypo
acgcggcaggtcacagagcccaccaagtccgaagctggaagttcagattctttgatattcagaggtggatcatctgtgcttttttttttttatcagtctctcactttttatccatcatctaattgtgacagcttatttgcctttataccataagatggggagtagggttgagatgaaatccaagcatcgtttcccttccccgatggtcgcctccctggggtgagacgttcgacgtgtcagacttcaccaagagcatctcccgcctcggtgcagtaatggacttggaaacgatttactcc

SEQ ID NO: 14284 - DNA, 95 bp, Homo sapiens; identical to SEQ ID NO: 11868
  chr7:50251628-50251723
  hypo

SEQ ID NO: 14285 - DNA, 102 bp, Homo sapiens; identical to SEQ ID NO: 7551
  chr7:50344738-50344840
  binary

SEQ ID NO: 14286 - DNA, 344 bp, Homo sapiens
  chr7:5262623-5262967
  hypo
cacaccctcccctttaaaggccacgctctgagaacctgttccagctctccagctccgcctccaccctcagcaaatggcattggccccttcttttaacccagaagccgcagcctggagttctcttgtcttcctccctccaggctgcaaagcttccctcatcggtgcttacatgcctcctgtggcgcctgctttggaggcaggactgtccctccctcgtcggacagtagagcgggggaggcctcgggctctggagcccgtgcctcagattggagccctagggagcactttcagtcgcatggccgtggtcggcgggaccccacctcaggtctgtggctccacgtctc

SEQ ID NO: 14287 - DNA, 88 bp, Homo sapiens
  chr7:55506201-55506289
  hypo
cggtaaccatgacaccaaagtcaacactcggagaaagtgaagaggctggcaggtgaataagtgtggacagggcgcctcacagagcagg

SEQ ID NO: 14288 - DNA, 103 bp, Homo sapiens
  chr7:57247618-57247721
  hypo
cgtcggttgtccaaatcggcagggaagctccagaggccacccagctccttgggctcccgcgacggactctccttggggtacagcatcccgccttgcagtgcca

SEQ ID NO: 14289 - DNA, 158 bp, Homo sapiens
  chr7:57247887-57248045
  hypo
gggcgagtgccaggcctagaggggcgggatgggcctggcgctgcccagtggggcctgtggctggaaccccgggctaggcctttggggaagcgggaccctcactctcagccccagccaagaagggcaaggtcggttccccaccccagcacagtctggac

SEQ ID NO: 14290 - DNA, 122 bp, Homo sapiens
  chr7:6034958-6035080
  hypo
cgcccggacagaaaagtcttcagttgaaacatctgaagctgggggccatctgcggtagacttctgtaaatgcacaaaataagataatgttaaagccatgtttctcaaagtcccgagctccac

SEQ ID NO: 14291 - DNA, 68 bp, Homo sapiens
  chr7:6060523-6060591
  hypo
cgagctcttacctataaaactgctaacacctgagacttaacgggaaaagataaacacagctgctgatc

SEQ ID NO: 14292 - DNA, 105 bp, Homo sapiens
  chr7:6060612-6060717
  hypo
acaagaacgctttttctggattaattccattgatgccttgtccttgaagtcaggatgtaccttgccagtaaggtacacctttttaaagttcttcaatgctgcagg

SEQ ID NO: 14293 - DNA, 71 bp, Homo sapiens
  chr7:6060772-6060843
  hypo
aggctcattacacacagtactctatgaaattgtcagtgctatgaaagagaaccctggctgggcatggtggc

SEQ ID NO: 14294 - DNA, 521 bp, Homo sapiens; identical to SEQ ID NO: 11869
  chr7:6207763-6208284
  hypo

SEQ ID NO: 14295 - DNA, 54 bp, Homo sapiens; identical to SEQ ID NO: 13008
  chr7:63652630-63652684
  hypo

SEQ ID NO: 14296 - DNA, 122 bp, Homo sapiens; identical to SEQ ID NO: 13009
  chr7:63652839-63652961
  hypo

SEQ ID NO: 14297 - DNA, 108 bp, Homo sapiens; identical to SEQ ID NO: 7552
  chr7:6443719-6443827
  hypo

SEQ ID NO: 14298 - DNA, 101 bp, Homo sapiens; identical to SEQ ID NO: 7553
  chr7:6443856-6443957
  hypo

SEQ ID NO: 14299 - DNA, 61 bp, Homo sapiens; identical to SEQ ID NO: 7554
  chr7:6443990-6444051
  hypo

SEQ ID NO: 14300 - DNA, 51 bp, Homo sapiens
  chr7:65037711-65037762
  binary
caaaaaggcgcggcggcgggggcaaaaagccgcggcggcggggaccaaaac

SEQ ID NO: 14301 - DNA, 210 bp, Homo sapiens; identical to SEQ ID NO: 8732
  chr7:7605822-7606032
  hypo

SEQ ID NO: 14302 - DNA, 164 bp, Homo sapiens; identical to SEQ ID NO: 13014
  chr7:77324199-77324363
  hypo

SEQ ID NO: 14303 - DNA, 116 bp, Homo sapiens; identical to SEQ ID NO: 6284
  chr7:79084011-79084127
  hyper

SEQ ID NO: 14304 - DNA, 245 bp, Homo sapiens
  chr7:818254-818499
  hypo
cgcgccagcaggaggcctcggaggatcctgtccgggcccatagatgtttgctagcgggacaagcttgggtgagttgagcatctgactccgtccttcctcctgagacacgtgcagcgagggcacccactgtgcagcgagggctcccgccgtgcagtgagcataccccctgtgcagtgagggcacctgccgtgcagtgagcataccccccatgcagcaaaagcaccccccatgcagcgagggctccc

SEQ ID NO: 14305 - DNA, 314 bp, Homo sapiens
  chr7:8480006-8480320
  hyper
cggagagaaccaggattgctccaactttctcagcggtattttttcggaaagccattaaattcgtggctcctctgtgcgaagttgatttctatttggctttgaattgttgacggctatttcttccttaatgaaagtgttgtctgggtgaaaaatatatcaggtggctgggaaattggttgatttttttttgagataggtgcccagtgtcctatttttctatctgaggaaagattttctgcagactacagaaattgacagcattgtccgggtaataaccgtcgtcgacaatattttcgaaagggcatttgagtgcc

SEQ ID NO: 14306 - DNA, 47 bp, Homo sapiens
  chr7:98966410-98966457
  hypo
tcagtgctttatttcaacgctggggccttttgagtttgtgacgctcc

SEQ ID NO: 14307 - DNA, 448 bp, Homo sapiens; identical to SEQ ID NO: 8738
  chr8:100796506-100796954
  hypo

SEQ ID NO: 14308 - DNA, 163 bp, Homo sapiens
  chr8:102039330-102039493
  hypo
cgcttgctacatgcacagatctccttgaccctgcagccaatgcctcggtcagccagtgcacctgtactgtctctcctcttgggatagggtccctctccatcaggtacaatatatgggaaatcgaggggtggcctttgtcccagctgtcttagtcaccgcattc

SEQ ID NO: 14309 - DNA, 233 bp, Homo sapiens; identical to SEQ ID NO: 13025
  chr8:1078113-1078346
  hypo

SEQ ID NO: 14310 - DNA, 59 bp, Homo sapiens
  chr8:108509697-108509756
  hyper
ccactgttttctggacttcggcgctgattgctgcaccctatgtgagtcagaatggcagc

SEQ ID NO: 14311 - DNA, 439 bp, Homo sapiens; identical to SEQ ID NO: 13026
  chr8:1132651-1133090
  hypo

SEQ ID NO: 14312 - DNA, 107 bp, Homo sapiens
  chr8:11537483-11537590
  hyper
cgcatgatgagaagaaagaaagattgggagaagttaatcagctcaaagtcacatcgccggggtctcctgccagggggcttggaccagttgctaaaggacttcccgcc

SEQ ID NO: 14313 - DNA, 110 bp, Homo sapiens; identical to SEQ ID NO: 6294
  chr8:11561282-11561392
  hyper

SEQ ID NO: 14314 - DNA, 44 bp, Homo sapiens; identical to SEQ ID NO: 6624
  chr8:126044399-126044443
  hypo

SEQ ID NO: 14315 - DNA, 631 bp, Homo sapiens; identical to SEQ ID NO: 7564
  chr8:128871653-128872284
  hypo

SEQ ID NO: 14316 - DNA, 191 bp, Homo sapiens; identical to SEQ ID NO: 7565
  chr8:128872459-128872650
  hypo

SEQ ID NO: 14317 - DNA, 62 bp, Homo sapiens; identical to SEQ ID NO: 8745
  chr8:128888848-128888910
  hypo

SEQ ID NO: 14318 - DNA, 43 bp, Homo sapiens; identical to SEQ ID NO: 8746
  chr8:128889422-128889465
  hypo

SEQ ID NO: 14319 - DNA, 86 bp, Homo sapiens
  chr8:128931048-128931134
  hypo
cgctgcattcttttctaaccacccaagagataagttgaacccccactcgtagcaacctggccacttgtctgtttagtcagccctgg

SEQ ID NO: 14320 - DNA, 142 bp, Homo sapiens
  chr8:128931261-128931403
  hypo
gacacccttcttcagatgaccgctgtcaggttggtgaaggcagtgcgcgttgggccttccctccctagagatgtgattgcacgtcgggtaccaggagcctggccagccctcagcttctgctaaccagggagcagtgaagccc

SEQ ID NO: 14321 - DNA, 147 bp, Homo sapiens
  chr8:140963396-140963543
  hypo
ctccatttcttcctcctaagaagttggagaatcaccctgacacctcacagaattggtatgggaaggaacaaagcctctgccaacgctcctcacacaaagccctactcctataggggcttgatgcctgcaggccccaccgttctcttc

SEQ ID NO: 14322 - DNA, 46 bp, Homo sapiens
  chr8:141159949-141159995
  hypo
acatgaggtggctctctgtatatcatgcatacatacatgcatgtac

SEQ ID NO: 14323 - DNA, 191 bp, Homo sapiens
  chr8:142242748-142242939
  hypo
cgggaacacagacattcagtggctcccaggtgagcgctcaccagctgcaacgggaacacagacattcagtggctcaacacagacattcagtggctcccaggtgagcactcacaagctgcaacgggaacacacacactcagtggctcccaggtgagcgctcgcgagctgcaacgggaacacacgcactcaat

SEQ ID NO: 14324 - DNA, 89 bp, Homo sapiens; identical to SEQ ID NO: 10806
  chr8:142243860-142243949
  hypo

SEQ ID NO: 14325 - DNA, 66 bp, Homo sapiens; identical to SEQ ID NO: 10807
  chr8:142244214-142244280
  hypo

SEQ ID NO: 14326 - DNA, 204 bp, Homo sapiens
  chr8:142248320-142248524
  hypo
cgtcaccatcaagctataagtctccagtcagcagggaatccaatttttagctttgtaaagtcgcccctttttttttcacatttttattgtgatcaaatatacacaacatcgaattgacctttttaatccctgtgagcgcacagctcaggggcggtgagcgcacttagactgccgtgcaaccatcaccactcaccccagagcgac

SEQ ID NO: 14327 - DNA, 68 bp, Homo sapiens
  chr8:143558643-143558711
  hypo
gtgggaccttgggctggggcagcggacagccagggcagcggggggccagggcagcgggggcggtggcc

SEQ ID NO: 14328 - DNA, 42 bp, Homo sapiens
  chr8:144292304-144292346
  hypo
cgcaccatcccaggtggcaccttctgtaggggctggaccaga

SEQ ID NO: 14329 - DNA, 254 bp, Homo sapiens
  chr8:144292470-144292724
  hypo
cctgggctgggcagtttgcacctgggctgaagaggagctgggcccagagggaggcaacgtgcaagggcctgggcccctgtggaggggaggcggcaggtggaggccccttgagaatcccagtagcgcccttcctaggagcagctcctgcagcactagattcaagggcctgtagcggtagccggggcggggcgcgggggaggtagggcagcaggaaagcggggcaccagggaagcggggcgacagggaggcggggc

SEQ ID NO: 14330 - DNA, 88 bp, Homo sapiens; identical to SEQ ID NO: 8758
  chr8:144676118-144676206
  hypo

SEQ ID NO: 14331 - DNA, 72 bp, Homo sapiens
  chr8:145745207-145745279
  hypo
gctgttcaaggtggccttcatggacaagaagacagtggtactgcgcgagttggtacacacgtggcccttccc

SEQ ID NO: 14332 - DNA, 42 bp, Homo sapiens
  chr8:145758485-145758527
  hypo
cggcgcccggggttgccgtggcacctgaagatgccctctgtc

SEQ ID NO: 14333 - DNA, 36 bp, Homo sapiens
  chr8:145758692-145758728
  hypo
ttgggcttcttcagcccctgtgaagacagaggctcc

SEQ ID NO: 14334 - DNA, 197 bp, Homo sapiens; identical to SEQ ID NO: 6630
  chr8:23423722-23423919
  hypo

SEQ ID NO: 14335 - DNA, 106 bp, Homo sapiens; identical to SEQ ID NO: 9980
  chr8:26267649-26267755
  hypo

SEQ ID NO: 14336 - DNA, 139 bp, Homo sapiens
  chr8:28938419-28938558
  hypo
cgcactcgaatagcgtcttctaactccattctcttcaaatccactttccaaactacagctggagggagctttccgaaaaacaaaagtgaccatgtcccatgtcgctcgccaccttgcagctgccagggtttcccactgc

SEQ ID NO: 14337 - DNA, 136 bp, Homo sapiens
  chr8:28938587-28938723
  hypo
catggtgtatttctgcggctcgatccgtccctcctgcaaacgctctactgattgattcattccacaaatacaatgacttggttactcttaatcactgtcagtgaaatctcttacagtcacacgtgagcatttaacc

SEQ ID NO: 14338 - DNA, 283 bp, Homo sapiens; identical to SEQ ID NO: 11932
  chr8:29387050-29387333
  hyper

SEQ ID NO: 14339 - DNA, 270 bp, Homo sapiens; identical to SEQ ID NO: 11933
  chr8:29387367-29387637
  hyper

SEQ ID NO: 14340 - DNA, 410 bp, Homo sapiens
  chr8:48292766-48293176
  hypo
cgcgtgctgcccctgcctgggcctggcagaaggctcccttgcagcagctcaggactcacactcactgagcaggttttaaaacacacagaatggccagacaggtcgtatcacagtttgtgtcagaattccacaggtgtacactatttttttttggagaagggggtacttttcatctgtgatcactgcagacaaggtgcgtcaggacctcggaggaccgtgttgctgggcggggcctgctgtttgctgtggagccccctggccctggtcactgccgccttctccaccctccactcctgcttggtgaactttgacccggcaggtgcctttcttgagcctcgtgattcccctcccctcttgccccgctgtctgtcatttctccttgggctcctcagagcaggtgccaggctgac

SEQ ID NO: 14341 - DNA, 256 bp, Homo sapiens
  chr8:50313987-50314243
  hypo
cgccaagacagttatggtaaccgcaggcaggcagcaggagtgagcaaaccaaagcgagagcggactccggtgctggaggacagagcctcggaatccagctcaccagagcactatggaggaacaggaagtaacgcaccgccccccactccccggcaaagcttgtctgcatagtgagaccaccacagtcgctcacacacgaagaggtatggaaagctttgctgcttacataatgaggaccctggggagagcgggacac

SEQ ID NO: 14342 - DNA, 152 bp, Homo sapiens; identical to SEQ ID NO: 13049
  chr8:55379013-55379165
  hyper

SEQ ID NO: 14343 - DNA, 366 bp, Homo sapiens
  chr8:644802-645168
  hypo
tcaggtgcaaggaagagaccggttacactttatggggtgggcggcagcgagagttccccgtcccatcatctcctccgccggacgcacagagaatgcagcgtctgtgagcacagctgccctggacctggcatctaagagtcagggtcagagaggggcagtcagaaacccacctccctgctggacaagtcacaagcaccagcatccctcgggaaaggcagaggggcgtggtggctcggagccctagggtgataggcggttggctgccctgtgggtttcaccagtgtcacctcttcgcaggtgtcattgacctggctcctttctccccgtcaggttcccctcagctcctctgggctgctcctggcagcc

SEQ ID NO: 14344 - DNA, 85 bp, Homo sapiens; identical to SEQ ID NO: 11941
  chr8:65499649-65499734
  hyper

SEQ ID NO: 14345 - DNA, 34 bp, Homo sapiens
  chr8:82903010-82903044
  hypo
cgctttacgtattcaagcctcagcaatggcagac

SEQ ID NO: 14346 - DNA, 106 bp, Homo sapiens
  chr8:8639980-8640086
  binary
tcaactagtaagggaagaacacctcaagtgagcatgcgcacaactccagtaatacactgcgcatgcgccccctcccaagcgctggcaggcctctgcgtatgtggac

SEQ ID NO: 14347 - DNA, 125 bp, Homo sapiens; identical to SEQ ID NO: 10000
  chr8:8748226-8748351
  hypo

SEQ ID NO: 14348 - DNA, 533 bp, Homo sapiens
  chr8:8749088-8749621
  hypo
gggacaggaagaagggctggatcacctcataactttcatccccagctaagtcatacacgatgaaccgcaggccccgggaggcatcggccgtccagctggtcacctcgatgcccttgctcacagggggaggtgacggtgggtagcacttctccttgtcccctcctcctgggcatccctccactctctcctcggtgaggcagtggcgcagcaaagtctttcctgcagccttatgccccatcaggagcagcttgagccggggctgcaccgccggctgggaatgagccagttccttctggtaggctgcgatgtaggggatccccttcatgcagacctcgtaggggggctggatcagtgggttgtctttgatcttccacaaacccacccgggagagctggccaaagtggtcgggcagcaccgcgatctggttcccctgcagcacgagctcctccaggccggtcagctccacgatggagtccggcaggtagcggatgcggttattatccagccacaaggtgagaagccggcccaggccc

SEQ ID NO: 14349 - DNA, 140 bp, Homo sapiens; identical to SEQ ID NO: 8779
  chr8:91014317-91014457
  hyper

SEQ ID NO: 14350 - DNA, 188 bp, Homo sapiens
  chr8:95246496-95246684
  hyper
cgcacagctcccccatccgccctctggcgcttcagagtctggaggaatcccgagctgcgcctccctctccctgcatccctggcagagaatttcccctcccagcgcgggggagcccatccctgaggactcgggcaggtcagatgagaattggtagaaagtgaagcgccttttcctcgcgctgagggcaa

SEQ ID NO: 14351 - DNA, 420 bp, Homo sapiens
  chr8:99956867-99957287
  binary
cgaagacgtggatctgctctcgctttagctgctcgcggtcctccagatcatgtccgcgactcctgcgactccgcgcggaaaaaaaagtttgccaggcgtggactcaatgacctttccaagctgtgcgcctcgctgcctggaccgggtctgagcgcggctgcccaggttgacctttctgcgggaggtgagtgttcgctctgggaaggggctgtagctgccctttggaaggaagggtttgggggtgtaagaggcgttcagattctcggtctggtgtgccccaaattcagatgtgaaaatagatcatggggatgcaatcccagggcactgtatttctcacttccttgggtccctggcacgcgactcccagctaacacccaaccacacacatttctacatactgtttcttaattttgttttggg

SEQ ID NO: 14352 - DNA, 51 bp, Homo sapiens; identical to SEQ ID NO: 13063
  chr8:99957709-99957760
  hyper

SEQ ID NO: 14353 - DNA, 81 bp, Homo sapiens
  chr8:99963508-99963589
  hyper
cgaggtggctgcgggtctgcctccgaagttatcagtgtaatcgggcctctgtgtatgcctgcacgtgtattttcatgattg

SEQ ID NO: 14354 - DNA, 202 bp, Homo sapiens; identical to SEQ ID NO: 6314
  chr9:100610480-100610682
  hyper

SEQ ID NO: 14355 - DNA, 299 bp, Homo sapiens
  chr9:110187439-110187738
  hyper
cggcggaggcttcttccctccccccagagtctggttcagaggaagccaacgcctgtgcacgtgggaaagcagcgtggctggccctgggcctggagccacctcccgggcccactctgccaggccccattctagatgccagcaggccggccccgccccttggacacggttttggttttcgggtgcaaacagtctacattcctctgaagaggcccgctccggcctcatcagagctggcgaaatcaacgagagaaacaggggacgtcggcccgcagttcccgcgagcgccacgaggggcgcac

SEQ ID NO: 14356 - DNA, 274 bp, Homo sapiens
  chr9:116059825-116060099
  hypo
cgtagtcaccatacccagcagcaaccgaaaaaggtttggtttcttgtctgggaacagcactcaccccacaccccaaaggaactgcttggtccaaaagatggagaatatgagcaacagagtgacactgaggatgacggccatcaggtaggcaaagatgcggaactgagggttgcggaaacactccctcaaagagtggtggctggggatgaggatgggcgtagacacggtggcagaggccgtgtctgggggcggcccagtctggcccccaggctgg

SEQ ID NO: 14357 - DNA, 631 bp, Homo sapiens
  chr9:116060128-116060759
  hypo
ctggcgcaggaagtagcggctcttgggctggtccttgaggcacagctgatggccttccaggatgacatggtggggctccaggcggagcagggcgagcatggcagtgtccgtgggcaagtcagtgacaggctgccctgaggccagcactgtgggctggcgacagagtgggcacagcaggcggcgccgggctggagtcacaaggctgaggtgggccagacattccacgcagaaggagtggcagcaatccagcattttgggggtatggaacgtgttgttgaaggggttccagcagacggggcactcagcctcaagctcccggccctgctgctcagccatcctcagccacacacggggaggcttcgcgggagacgtcctggcagaagggggaaaggagcaaaggaacagccatgaagtcccatccttgtgcttggcctggggcaaagtgttctgtgggtgttgaaaggtgtaatcaccacgttttacttaggttcaaaagcgttttgttcttgatcaccagttcctaacccatcgagttgagtcaaatgctcctacagcctcccctctgtcaaggtgaaggcctgggccacccctaccaagagcccccaagagagccggcattggagcagatgtc

SEQ ID NO: 14358 - DNA, 37 bp, Homo sapiens; identical to SEQ ID NO: 13066
  chr9:118139-118176
  hyper

SEQ ID NO: 14359 - DNA, 126 bp, Homo sapiens; identical to SEQ ID NO: 6637
  chr9:123176142-123176268
  hypo

SEQ ID NO: 14360 - DNA, 138 bp, Homo sapiens; identical to SEQ ID NO: 6638
  chr9:126348901-126349039
  hypo

SEQ ID NO: 14361 - DNA, 41 bp, Homo sapiens; identical to SEQ ID NO: 6639
  chr9:126349104-126349145
  hypo

SEQ ID NO: 14362 - DNA, 215 bp, Homo sapiens
  chr9:126759147-126759362
  hyper
cgtgtgaagtttaaaagcgcctgtgctgaagaggccgactttgaagcagcttgccggggccccttggcaggctcctgcgagtcagagggccggcctcgcctcagatccgctgcgcctgcctccgcagggctgggaaatgggaattgtttttaagttgaaaaattactcatggagctcactcctttgccactgctcttcttttgttctcagtcgtc

SEQ ID NO: 14363 - DNA, 250 bp, Homo sapiens; identical to SEQ ID NO: 10008
  chr9:126780315-126780565
  hyper

SEQ ID NO: 14364 - DNA, 204 bp, Homo sapiens
  chr9:126784854-126785058
  hyper
cgagtccaggccagtctgacccaccctccagccccaggtctctgggattgagggctgggaggtgacacagagggatgacggagacggagggctgcgcagctgccctgagaaagttcttgtgagtttgtcagaaacaaaaaacaaacaaaaaaatgccctctgtggggcgggtggaggctgtgacgcggcgcaactgcagctgca

SEQ ID NO: 14365 - DNA, 45 bp, Homo sapiens
  chr9:126785351-126785396
  hyper
tggggttaggtcaaggaccctctttggcgtcccctcccttcagcc

SEQ ID NO: 14366 - DNA, 126 bp, Homo sapiens
  chr9:128759727-128759853
  hypo
cgggctcagctgccttccctgccatgtgtcgtgtagttgttttcagcacataagctgtcaacgagcgttctttggagatacttgaactggagtggcccaggggcttttcgcctttccgtaagcctg

SEQ ID NO: 14367 - DNA, 83 bp, Homo sapiens
  chr9:131675071-131675154
  hypo
cggggcctggcgtggccaaggcaggtagggatggagagacatggacggatctgggagacgctggagggggaattcaaagggac

SEQ ID NO: 14368 - DNA, 553 bp, Homo sapiens
  chr9:135513114-135513667
  hypo
ggagccgccaaaaaactggcaacatgagttagcgtaactgagtaaacagcaaacaatctccaaatgatctttccattaacgaaacaaaataaaacgaaaaagatacactttacctaaaaagcataccccagagaaaagcacgaaagtctacatttatttgggacacagaactgacattgtgactcttcacagccgtatctcctttgtctcctagcctcctggcacggtggaaattccccaggaggagaggaaattaagaactgcacagacagaacagtatgcttcaagcggaaaaaaatacggagaaggtggaggaaagcagcacaggtgatttaggtgcatcttctgaaaaagaaatgcacgcgccggacagccaaggaggatgccaagggacagttggcgcccagggcgggctgcaggtatctttcctttctgggaaaaaggtgactgcactccatccagggacaatcaaggacagccaccggagaccaacagaaaacctaatgtcagccttaaaatcaggtggcttagaaactccattttccggccattc

SEQ ID NO: 14369 - DNA, 96 bp, Homo sapiens
  chr9:135767923-135768019
  hypo
cgcaggaggtgggcggcaccccatctcaccaaggtcctggccgggtcttcgctctgcccaaaccctcctccagcctgtgcaggcctcctcccacct

SEQ ID NO: 14370 - DNA, 33 bp, Homo sapiens
  chr9:135865230-135865263
  hypo
cagttctgcggcaagcgtttccaccagaagtcc

SEQ ID NO: 14371 - DNA, 51 bp, Homo sapiens
  chr9:138661962-138662013
  hypo
cagggcctgcttgggggcggggatgggcttcccagaggaggggcacatggc

SEQ ID NO: 14372 - DNA, 166 bp, Homo sapiens; identical to SEQ ID NO: 11957
  chr9:138780870-138781036
  hypo

SEQ ID NO: 14373 - DNA, 265 bp, Homo sapiens; identical to SEQ ID NO: 6642
  chr9:139110897-139111162
  hypo

SEQ ID NO: 14374 - DNA, 81 bp, Homo sapiens; identical to SEQ ID NO: 6643
  chr9:139111384-139111465
  hypo

SEQ ID NO: 14375 - DNA, 483 bp, Homo sapiens
  chr9:139902492-139902975
  hypo
cgccccggccctcctgcaggctgggcctggacgcagggtctccccacgagctccctctgtgtctgggctctcccgggcctccgtctgccgagtctgggggccactgagtctacatcggtcccctgttccccggctctggtcccctctgccccacccttgctctgtgcccctcaaagactctagcaagtctggaccatgcagttacgtctctccaggcctatctgcaagtgtccctcgcccactctgcccccttgacctctggacagcaagcatcctggggccagttctcccccgaccccacccgcggctggagccaccaggcagcctgggtccagtgggcagagccctggacagccatgagagcagcctgctcacccgctcctcctcgaagctgatgaggccctcgtcctccgtgtccaggtcctcgggctcgtctgccacaagtgcccggagctccgtgggggcagaccggggccggagcag

SEQ ID NO: 14376 - DNA, 195 bp, Homo sapiens
  chr9:139903035-139903230
  hypo
caggttgtcactctgcttcttggcaaagttcacgaacacctggtgggtggcgcaggcgtgtggggagggggctggtctggggtgaggaggggcagggcgggtgaggggaggggcaggtgtggtgcgcagtgcccttggggcgctcacattgtccagtgtggtctggctgaccgagtagtcctcgatgcccagcac

SEQ ID NO: 14377 - DNA, 159 bp, Homo sapiens
  chr9:139904532-139904691
  hypo
agtagccgaggctctgctgcacctggagcagctccttcagcacgctggggacacggcagctgtcagcgcgtgaggacgcggcggccccgcccacccagggctcccgccccacctgtgtccattgacgaaggcctcgccccccgtcgtgctctcgtcgcc

SEQ ID NO: 14378 - DNA, 54 bp, Homo sapiens
  chr9:140041698-140041752
  hypo
cgccacacacacacctggacacgtactcaggtgcgctcctcacacacacacctg

SEQ ID NO: 14379 - DNA, 309 bp, Homo sapiens
  chr9:140389001-140389310
  hypo
cgcgccctcacctgctctgcgccctcacctgctccgcaccctcacctgcgccctgccctcacctgctccgtgacctcatccactccgcaccctcacctgctccgcgccctcacctgtgccctgccctcacctgctccatgacctcatccactctgtgccttcacctgctctgcgccctcaccagctccgcaccctcacctgcgccctgccctcacctgctccgtgacctcatccactccgcaccctcacctgcgccctgccctcacctgctccgtgacctcatccactctgcaccctcacctgcgccct

SEQ ID NO: 14380 - DNA, 120 bp, Homo sapiens
  chr9:140389523-140389643
  hypo
cggcagcttggccaattctgagtcccgaacggcatgcaccgtggtcgcccgggcctggtgggtcagtgtctccacctgaggacaggagccggctgctggggccgcgggcttgggagggcc

SEQ ID NO: 14381 - DNA, 241 bp, Homo sapiens
  chr9:140396742-140396983
  hypo
tcaggtgtgtaaacccccagtccacagtgatgatgaaataaaaataagaagccccacccagcatctttggaaaatgatcgaaaaacaaaccattaaacttcccaaaccctgacggtgaagggggtgaaggcagctcccccccaaaagagaaatgacatcacatgtcgccaaaagtttgtcaaacaggagggagaaagagatggaggaggatgagaagaatctgagcagccacatatccagc

SEQ ID NO: 14382 - DNA, 201 bp, Homo sapiens
  chr9:140397203-140397404
  hypo
agccggccacggtgacatggacgaggccgctggacaggggggcactgaacgcacggctgaagtcatttggccattttaaggattactgttaagtattcagaaatgataagagtattgtggttagagatgaatcctgaaatatccaccagtgacgtgctatgatgatgggatttgcttcaagggggggcacccgaacggtac

SEQ ID NO: 14383 - DNA, 184 bp, Homo sapiens
  chr9:140400692-140400876
  hypo
cggcatctgcctcaatggctctgtgacccaccagctacaggttttctccgcagcttaaacccacacggtgccttcaacatttctgggcactgataaaggtagcccggtcggtacctaaaacacggaaggaaaccagccctggtcctgagccaaattcctcaaaccttgccatgcgtgccacacc

SEQ ID NO: 14384 - DNA, 517 bp, Homo sapiens
  chr9:140400905-140401422
  hypo
agagcaccctttctcttgctgtccatctcagggatgctgccgccctctgtatgtgagctcccctaacgggtgccctgggccgtcacgctggtgctttgggcttggctctttgcagtcccagccccatctcagaggttcgctcttcgcagtccagccccatcttggagggagggggttgaggcaccccctccaaagagctcccctgttgctgcttttgggcggcctcgggctgagcgggatgaagcagtgtgcacccttttacagcctgccctcagcattacacatcactacacacacagcgtatctgacctctggaccagctgctgtggattctgaggaagggtgcacgctttgcacgacggggtcacgcacttccaggcacagatccagcccttcgtgtgcagctgcgcatgcgagcgagtcatctgcactgcggtttcccatccatactggaattcgcaacacccatttctcagcggaatacagaggaaccgcgcagacactaaccgcagacaca

SEQ ID NO: 14385 - DNA, 306 bp, Homo sapiens
  chr9:140692095-140692401
  hypo
cgtgtgggaaccgggtgtgctggctttccttgaggaaggtgagcatgctgatttagccccaggtaggggagcagtatgtgcagtgatgcctgcgaaactctatgactgctacacggactccaccgagataaggggagaaaggtaatgaaggaacatggttaagtggagacaggaacaggggagcaaagcaaagcaaacacctgaagggagacggtggtggagtgcgtctgcgggcctgtgtgaggagcacaggcaggaagaaccctgtgtaaggcgtgtggatggcacagcggtgtgggcggcacc

SEQ ID NO: 14386 - DNA, 134 bp, Homo sapiens; identical to SEQ ID NO: 11970
  chr9:140707377-140707511
  hypo

SEQ ID NO: 14387 - DNA, 58 bp, Homo sapiens; identical to SEQ ID NO: 11971
  chr9:140707900-140707958
  hypo

SEQ ID NO: 14388 - DNA, 480 bp, Homo sapiens; identical to SEQ ID NO: 6649
  chr9:140708213-140708693
  hypo

SEQ ID NO: 14389 - DNA, 216 bp, Homo sapiens; identical to SEQ ID NO: 6650
  chr9:140708771-140708987
  hypo

SEQ ID NO: 14390 - DNA, 356 bp, Homo sapiens
  chr9:14347752-14348108
  hyper
cgcggttttttttccgtgcagaaatcactacccggcgacggctcagggcggtagagggcaagtcttatctgccaaggcgggattagattctctcgccgagggtcccagtatcccgccgcccagcaagggccgagcgcgcgcgcgcgccagggagctttggagcgacgcgcgtagtttcgcgtcgcacgcggtgtctggtctccgcgcaccacgtgcgctcgcggtccttggcggggacgttggtgctagcgatccgacagagcacccaggactaggtttttgtgatgccctaacctgggcatttatgctgggggcggaacgaagtcgcccaacccaagttctccctgcaccctggg

SEQ ID NO: 14391 - DNA, 587 bp, Homo sapiens; identical to SEQ ID NO: 11974
  chr9:14348452-14349039
  hyper

SEQ ID NO: 14392 - DNA, 569 bp, Homo sapiens
  chr9:27528536-27529105
  binary
cggcctcgctggggtcgggctcctccactttcccagctgggatcccctgccggagctggcgtgggggccggggagggggaccagaggggcttccttctctccccaagccccgccagatgttggaaaggcaaacaataggggaaacgcggagaaacaaaaggccattcgccacgatctcagtcggctgcgtagagagatctctgtggggagggttaggggagagggtcaggaaagagcgcgaggggggggatcccgagagatttagagtctctggtacttgccaggcaccaggggtcggcgctttaccctcccagcaggggtctgaaggtgggaaggggcaatcaaagaaaacttgaagggttttcaccttcttccccagttcagggaaagggaggggctgggattccagatgtttgacagttgttggccccaaagttaagcgcgatttgtacggcctttacacgctccccacctccgtgaggcatcgtcagccccgggggcgacctggctgacggtgcggacttcccctacgctgccccaagccgagactcctccctcaggatcaggac

SEQ ID NO: 14393 - DNA, 750 bp, Homo sapiens
  chr9:27529157-27529907
  binary
cgccacccacagcccaacacgcaccctgcaggcgtccgcggctggggatgggctcggagtcttgcaccccgaaagaaggacgatcttattgatttatatcttttcaaatcaaggacaaatcaagatcccggggtggaaagtgggcgacccttgttcctgccgggaagtgcacacgaggagccggccagaaacccaggcgccggcaggggtctgaagaggactccagccccggaagcccgtggccggcgggcagaagaccggtccgccgcctcccgcaccttcttgcacccgcgcccaggtgcgccccaaacctcgccgcccgcccgggcgagatcgggagcgagcagccaccgggctgcgccgcctcccctagcttggagcgggttcttactcaccgtggggttttacctccagcccagggcccggtcggctcccttcgccgggtcagctgcagccagcgcgaaagaaaatggtgagctcggggcaggtggggcgtcgcttgccaatccacgcaagggactctgccgccggtgcgcgaggtcccggcgagccaaccggcggacgggcgagcgcctggctccagctgcagccgccgtcgctccggagcagccccctcatgcacccagcgcgccgcgcagccggccggggctcgactgtctcgcggggacgccgagcggggacccctggcggccgcctgcggtatggcagcaccgtggagagaaaagtcgtctttgggatcatcttccctcc

SEQ ID NO: 14394 - DNA, 63 bp, Homo sapiens; identical to SEQ ID NO: 8817
  chr9:37034135-37034198
  hyper

SEQ ID NO: 14395 - DNA, 242 bp, Homo sapiens
  chr9:37035886-37036128
  binary
accccgggctgggggcggggggtgttggtgttttgttgttgttgttgtttccatttagagggcttgttttgtttttgtttgttttctgtgagttttcatttttccatgggatattcttttgtttcgggtgttttgcgtgttgttttttcgtgggattgattttagcgggttttgctctgtaagtcctggtctttggggtgagttttgattttgtgtaattttgtactttgtccttgtaggct

SEQ ID NO: 14396 - DNA, 381 bp, Homo sapiens; identical to SEQ ID NO: 7620
  chr9:71788570-71788951
  binary

SEQ ID NO: 14397 - DNA, 45 bp, Homo sapiens; identical to SEQ ID NO: 6327
  chr9:71789757-71789802
  hyper

SEQ ID NO: 14398 - DNA, 36 bp, Homo sapiens; identical to SEQ ID NO: 7622
  chr9:80833898-80833934
  hypo

SEQ ID NO: 14399 - DNA, 182 bp, Homo sapiens; identical to SEQ ID NO: 7623
  chr9:80834011-80834193
  hypo

SEQ ID NO: 14400 - DNA, 42 bp, Homo sapiens
  chr9:82275758-82275800
  hypo
cggggagacacgcttgttttgcagcaccctcctccgccgatc

SEQ ID NO: 14401 - DNA, 281 bp, Homo sapiens
  chr9:96573430-96573711
  hypo
cgtggtacagtcactccctgctttgtaaagcgctgctgggtctcctgggaaacagcagcgtgcctggcactacgcaaggcccgcacagctgcgccgttgttgtcaccagccgcagttcccaggttgcacatgcctagagaaggtgttggcgggacgcggttgcgcctctgacttcctttaattccgacttctacttgcgtcgttgtgtaggcgtctgagggccacctgacgtcgtctagtgtctccacgccttgacacttgtctattgaaatgcatctttt

SEQ ID NO: 14402 - DNA, 279 bp, Homo sapiens
  chr9:96711697-96711976
  hyper
gagcgggcctggagcttccgttgggtctcaagggttccaccaagcaaggaagccctgagctgcccaaacacaatggcgtgcagccctctcctcttccccagtctcggggactcggtctgcctctgcgttccctgtcccggcaaggagcacagaggtgaaggcagtgacaacaactccacccctcccgcactgcagggcctggaatctggtctccctcatttgaggcccaacttccccactgacccacaggtgacccccggaccggagttcccgcatcaa

SEQ ID NO: 14403 - DNA, 122 bp, Homo sapiens
  chr9:96714974-96715096
  hyper
gaagctgaggggtgggaagccaccaggcacactcactattttcttccacttcatcctccgattctggtaccacgtcttcacctgcaactggctcaggcccagggactcagcaagatctattc

SEQ ID NO: 14404 - DNA, 156 bp, Homo sapiens; identical to SEQ ID NO: 11990
  chr9:96720648-96720804
  hyper

SEQ ID NO: 14405 - DNA, 74 bp, Homo sapiens; identical to SEQ ID NO: 7627
  chrY:16635744-16635818
  hyper

SEQ ID NO: 14406 - DNA, 1082 bp, Homo sapiens; identical to SEQ ID NO: 7628
  chrY:16636060-16637142
  binary

SEQ ID NO: 14407 - DNA, 122 bp, Homo sapiens
  chrY:22918582-22918704
  hypo
gcagttgttacagctgaagataaagacattttactgttaactgagacgagtttctctgaaaaagtttggtgtctttttcaggcccggggccccaagaagcacttgaagcgtgttgcagcgcc

SEQ ID NO: 14408 - DNA, 90 bp, Homo sapiens; identical to SEQ ID NO: 7629
  chrY:2655227-2655317
  hyper

SEQ ID NO: 14409 - DNA, 596 bp, Homo sapiens; identical to SEQ ID NO: 7630
  chrY:2655346-2655942
  hyper

SEQ ID NO: 14410 - DNA, 52 bp, Homo sapiens; identical to SEQ ID NO: 12001
  chrY:4869596-4869648
  hyper

SEQ ID NO: 14411 - DNA, 49 bp, Homo sapiens; identical to SEQ ID NO: 12002
  chrY:4869714-4869763
  hyper

SEQ ID NO: 14412 - DNA, 126 bp, Homo sapiens
  NW_001839646.1_1-5206:1401-1527
  hypo
cgctccatggtggcagctgggaggctgcaggggcacgggcgtgccagcgagggtggcgcggaggcgcagaggatgcaagccaccgaagggatgtcaggaatggacgttgcacgggcccagtgtttc

SEQ ID NO: 14413 - DNA, 584 bp, Homo sapiens
  AC211344.3_7702-13588:3943-4527
  hyper
cgtcactgctgcaaccacagggcgccagcctcccgcatccctgagtgctggtgctggagatgccgcctccgccggccaagcgctgctgctgctgctgctgctgctgctcgcatgggccgtgcatgccgctttccgttccaagttgggcaggtgctgctgacagggaagctgagggcgtctgcctgcaccgccgttggcagcttctccaatgcaaggcagacccggcctcctaaggaggggtttctccaggaagttaaggtgcttagacggtgaagaacgaaacggcccacaacagtccttctatttcgctgctttgtacaaacaccgttctgcccacacctcaccttactgccctcatagtgcagctgagccttgtagaggtgaatccccactccctccagggcccagcccgcagcttatcagcaaccgccaggaggcggggaggcgtccactcttgctgcgtcgctttcctggttgtaaagctcgtgggtgaacattgcaaacttaaccagcaaaaaccaccggagataaaataggaaagacaaaggaaagaggaggaacacgcatttaacacacagcatctc

SEQ ID NO: 14414 - DNA, 289 bp, Homo sapiens; identical to SEQ ID NO: 5717
  chr1:101702081-101702370
  binary

SEQ ID NO: 14415 - DNA, 393 bp, Homo sapiens; identical to SEQ ID NO: 5718
  chr1:101702796-101703189
  binary

SEQ ID NO: 14416 - DNA, 185 bp, Homo sapiens; identical to SEQ ID NO: 7634
  chr1:101774910-101775095
  hyper

SEQ ID NO: 14417 - DNA, 244 bp, Homo sapiens; identical to SEQ ID NO: 5866
  chr1:103574168-103574412
  hyper

SEQ ID NO: 14418 - DNA, 306 bp, Homo sapiens; identical to SEQ ID NO: 5867
  chr1:108506290-108506596
  hyper

SEQ ID NO: 14419 - DNA, 122 bp, Homo sapiens; identical to SEQ ID NO: 12008
  chr1:109656099-109656221
  hyper

SEQ ID NO: 14420 - DNA, 204 bp, Homo sapiens; identical to SEQ ID NO: 12009
  chr1:109656291-109656495
  hyper

SEQ ID NO: 14421 - DNA, 116 bp, Homo sapiens; identical to SEQ ID NO: 12010
  chr1:109657070-109657186
  hyper

SEQ ID NO: 14422 - DNA, 144 bp, Homo sapiens
  chr1:110186004-110186148
  hyper
cgtgccccttgcaggtgggtagcgctgagagcagagcagcgcccgcgggactggcctgaggatcccgcaggcaggagggaccccgcgggcctttccctacctgggaggtgcacggttggccaccagggcgcgctgctggactct

SEQ ID NO: 14423 - DNA, 35 bp, Homo sapiens
  chr1:110186177-110186212
  hyper
cagagtcacttaaacttgtaaccctaccggtagcc

SEQ ID NO: 14424 - DNA, 736 bp, Homo sapiens
  chr1:111746588-111747324
  hyper
cgctttcaggcacactgcggttgcaccacaagcttcctggatggaaggacacgtggccccggggccccacaacggcttcctgtgtcccgccgcctccccctcgccccctcaggcctggcctcgccgtccccgcccccacctgaccctcttcccctctccgcgcgctccttcccgctcacctgcccccgcgcagcctcctgagtccccttccaactgctcccggatctcgacgccccgtgccgccctccaccgggccccagccgccagccctagccccggctccccggtgcccacgccgtccccccgcgctctccccggccggcactaacccccatggccgcgcttcagtctcaggctggctcgaaggcggcggccgagcccatccatggcccctggagtgcccggctcccgctcccagctccgcgctggccccgcccccctatccttgacctccgcgggtccgacactttcactttcacgcggggggaggcctaggggacaggttcggggcggcgcggcgcaccttccggactccggcccaacccccgggcgcacctgggcgggcccgctctgccctcgccctgggcagggcagcgtggggtggaagagggcgctcgacgcgcgtccgggactgggcggcgccacctcgttcccaccctccgtggggctcccggggaggcttgacttagcgaacaccctgcagtccgcaaaagcgcatgtcctggctgaaatcacc

SEQ ID NO: 14425 - DNA, 637 bp, Homo sapiens
  chr1:113256965-113257602
  hyper
cggccgctccgggcagggggtccgcttctttgccaggccagcacgagttggcaggctgaagggcatctaaatgggaccctcctctaccccgggcgtccccctccccgctcctggggaagctggcggcctcctggtgtcgcgggctatttctgggtgtggagggggaggggaactacggtaagagggacagggaactggggcgctggagccgggaagcgggtgagcgagtcttcccaaccgctatgtcccctattaaaaagaaccccgctccttcgtgaaaccccttttcccttagcctttaagctgccgggccgcgacggggaactggccaactcatccttcgccgggctctccgccctccgggctctggggcagaacagggtcctgaggcggcgtgggcgagggcagtcaatgagcgggaaggacgtgaagaaggtgacacaggctgccccccactggaaaatgggttgggagggggtgcggcccgaagaccagaggatagcaaaggtccacggaaaagggagctcctggcccggacgcggcgtggggaacgcgtcctagcgccggggatgcggagctggggagaggggtgggagccccatcctggtttgggtgccccagggggcgctcactcggc

SEQ ID NO: 14426 - DNA, 47 bp, Homo sapiens
  chr1:116711292-116711339
  hyper
ggcggcattggtttcactatttccttcctggagctgtggttgaggcc

SEQ ID NO: 14427 - DNA, 287 bp, Homo sapiens
  chr1:118149482-118149769
  hyper
cgctgcgcgtctctcagaaacttcttgggaatgcggtgtctgtgaaacctgcttcctctccttttgaaaatgaaacttgctttactgcgtaggtgaaaagccacggcaagtgggtcgactcggacggataccggtgcggctgccccgggaggtgtcgcagttcggggactcccttcgcactggtcgcgaggcaggagggagcagggtgggaggcgagtcagaggagggtgacttacctgaagaatacaggttggtagcctgcacacctgaactcaacgctggcgggc

SEQ ID NO: 14428 - DNA, 517 bp, Homo sapiens; identical to SEQ ID NO: 7646
  chr1:12226892-12227409
  binary

SEQ ID NO: 14429 - DNA, 207 bp, Homo sapiens; identical to SEQ ID NO: 7647
  chr1:12227438-12227645
  binary

SEQ ID NO: 14430 - DNA, 1749 bp, Homo sapiens
  chr1:12677012-12678761
  hyper
cgactagctcagcactcgtgggtggcgcggagaagtggggtggccggcgactctcagctcccgggcgcgggatcccgcagcggcagcaggtgggcttacccccgcccctgcggccccccactccctggagtcgcagtgcctggtacctttctggcgccgcgctccgcgaactcgcgggcgagctgacgcccgatgcctctcccgccgccggtgatgaggacgttctcccgcgacaggtcccgcagcttggcgggcagcaccagtccgacggctgctttcaccaccagatagatcatctgtagagggaacatcaccagcgcgcccagccgtttccacaccatcctccgcgccgcggagccgggcagggggcgaaactccccgggccgagcaatacaggaattaaaaaacaccccgaacaataaatagtaaaccgaataaggaggagagaggcgtcccacctggccactcttgaaatcacctcttcccaaatgcaaagcaccgggtgagaaaaagaaaaaaaaaaaaaaaaaaaaagataaattctcctctgggggagaaaaagcgtctcctaaggttgggacggtaaaagaggtggagggggaagccggaggtggaaagttctaacaagaagtttcttgccccagcagccgtttcggctggggaattctcaggtaatgtttacagactgacagaggagtttagggaggggaagaaaaaaaaaaaaaggcaccaaccacacgcgcgcaccctgcctcggtcccgcggtttcaaagtgcaagattaaaaaaaaaaaaaaaaaaaaaaaaaagctgattccaaattgtagcgcccccacccccaccccgtctccagaaaaaaaaaaaaaaaaaaaagtggggggaaaaagtgcttggagctcccaatttcagcccgcgaaagtctcccgactcattgctattcttgggctcaggaaattgcttaaacgcgatctgattgccagcaacgtgcaggagaagtggggggtccgggtgtcagtttctttacgtgcagcgctcgccctcgcgcgcgctcgctcgctccggctccctccctccctctctgttccagcagaggctgggagttgccgctcgatccagctccccttctctccctttttagcatttattgccttctttttgtcctttccaacttggagagggtccgggtgtggagcgcgcgtggatcggacgccttggtctgcgcggccctattcattcgctccccgggcagccgcgtcgcggagagggcggcccctttttcccccattttttcaataccccattaagtctgattgacagttaaagttgttgggaggcttcactaccgttcctctgagtggctgctgcggcctcccctccccctgcgccgtcgcggggagcgcgcataaggcgcgcactcgggctcgccgggactcgcgctctcccgggactggctcccctctctgcaagccgggacttgccgccggtgtccctgagggctcgcagctgtaactcgaacacgctggaaccgactccggcgagccggctgccttctcgagacgttcctccttgcccgggccgcccgcgggccaggtgatcaccccgagtgtggagcaggcccgggggagcttgcgtatgccttgatccaaccaggtcacccagggttttatttcaggtcatttggtcatcctcggcctccaggtaggatcaggaagccactcctcacctttgctcggacctcttctgtgttcac

SEQ ID NO: 14431 - DNA, 110 bp, Homo sapiens; identical to SEQ ID NO: 7649
  chr1:1502406-1502516
  hypo

SEQ ID NO: 14432 - DNA, 130 bp, Homo sapiens; identical to SEQ ID NO: 7650
  chr1:1502555-1502685
  hypo

SEQ ID NO: 14433 - DNA, 430 bp, Homo sapiens
  chr1:150669495-150669925
  hyper
cgcaggctgtagcttgtgctgtattttagaaggacacctgttctccccaccccacccccgtcctagtaggtgaaaaacttagccacgcagagagcacaaacttcctgatccttcgatgcagagaaggaataacacatcagcttcctcaggatcactaggcaacctaccttggtgtttcttcattgcgccaatcagaaatcaccaaggttgagtcccgccaatcggagctcacagggggaggctctcccccagctattctgttgcgatccagacaaacaccaccaaaaggaggcaggtttgcgttcaacctgacagctggtcaatccaatgaaggaaccttggtggaagagaggaaagagggctgcgctccccacccccattaaaccagccaatcaaagcgctgagtgagctaacatgggctgccaatctc

SEQ ID NO: 14434 - DNA, 68 bp, Homo sapiens; identical to SEQ ID NO: 7652
  chr1:151373761-151373829
  hypo

SEQ ID NO: 14435 - DNA, 271 bp, Homo sapiens
  chr1:151378250-151378521
  hypo
cgccgggcatggggagtcaggtggtgccgcagcatgaaacgcacagcccactcataggagatcttaaaccccccttccaaagaacgtcctattttggtggccttctggaacaaggtctcctcatttacaggtagctgttgttcgcgctgggttagcacccactcagccagtttctcttctgcctcaaagctcagatatttgccctctagattctccccctgggaggcctggaaacgtcgaagccaacggcgaatacgtcgctggggatttc

SEQ ID NO: 14436 - DNA, 154 bp, Homo sapiens
  chr1:151566699-151566853
  hyper
cggaggggaagacaatgctttcagagcacgtttagccggtgaacctgaaaacgaggatttttttcatttgcgaagtggaggtactcctgcgcgcccaggatgcagccactagagggcagcaagtcttccagcacctgtgcaggtggccgccgcc

SEQ ID NO: 14437 - DNA, 229 bp, Homo sapiens
  chr1:156326789-156327018
  hyper
cggccgctggtccctgctctcaatacctgaatgaactatttggctgaaagcctagggtgaggtgttcgggggacggagagcagggcgtggacttcgctccgccgctaggtggcgggctggctcaggacaggtgagcccggcagagagtgccggagggggaggagcccagcagggaagggcagaggggcaccctggcggtgggaggggatctgcgtaggacctcagcaac

SEQ ID NO: 14438 - DNA, 43 bp, Homo sapiens; identical to SEQ ID NO: 7658
  chr1:156390054-156390097
  hyper

SEQ ID NO: 14439 - DNA, 93 bp, Homo sapiens; identical to SEQ ID NO: 7665
  chr1:161276123-161276216
  hyper

SEQ ID NO: 14440 - DNA, 60 bp, Homo sapiens
  chr1:162792553-162792613
  hyper
actcacaactctgacgccccgtgactgcatcccctagctgggcagagacgcatttggctc

SEQ ID NO: 14441 - DNA, 530 bp, Homo sapiens
  chr1:17445328-17445858
  hyper
cggcaagtctccgcggaagctccgctgaactgggagtgggaagcaggagaggggctgggttgaggtgggtccgaggggaagtgaggtgcggaggggaagtgaaaggggagaggacggcagggaagctgaaggggtgtgaggtcccccgggaggagaactggagagggccagacggagggttacgggtgaaagggagggtctgtgagggagctggggctgaggctgtgttagggggtctgggagagtctcagggtttctggaaggtggacacaaggttcgggggttgtcaggtttctggatgagattcttaggatttctgggctcgggggctcgggatgagggacaactcgggctggacaaaggctgtccacgtccccgagtctgagcgcgtctcaggatttctgggctcgagatctcggcccgggcatcacggtgggccggctcacctgtagacatcggtccagaggtaggtgcccagcacgtacaccgcctccacgcggctcccgtactgcagccgcacggtccgctcg

SEQ ID NO: 14442 - DNA, 144 bp, Homo sapiens
  chr1:17445943-17446087
  hyper
cctgcgccccacggccccgcgcgcagccttatccagcggccggtgggcggggcggcccgccccagtcctctcgcagtgggctgcgggcctgtccgtcaagcgtggtcccgcccctaactcgtcccgccccgctgaggtcgtggc

SEQ ID NO: 14443 - DNA, 227 bp, Homo sapiens
  chr1:175161560-175161787
  hyper
cgcagagaggaagactcctgagagtcctcgcgaaggagggaaacacaccagaactaaagttgtgaaggcgcaagaggctacttaggaataattccttgtatctctggggcaggtctcatccttctaaagacaggagtgactgggcgtcttcttccaaacagagggcgcttaaaaatgtatttttaaaaaacataacagaaagtcctgaaactcacctttcggtccgc

SEQ ID NO: 14444 - DNA, 181 bp, Homo sapiens; identical to SEQ ID NO: 6670
  chr1:175372314-175372495
  hypo

SEQ ID NO: 14445 - DNA, 145 bp, Homo sapiens; identical to SEQ ID NO: 6671
  chr1:175372572-175372717
  hypo

SEQ ID NO: 14446 - DNA, 153 bp, Homo sapiens; identical to SEQ ID NO: 6672
  chr1:175375048-175375201
  hypo

SEQ ID NO: 14447 - DNA, 110 bp, Homo sapiens
  chr1:182361452-182361562
  binary
cgcggggcgcgggacccgagggaactttgggcgggcctgggctagggcgggtgccgcgcgggcctggggacaggccggggttcccaaggcctggaagagccgcccgctcc

SEQ ID NO: 14448 - DNA, 138 bp, Homo sapiens
  chr1:200271204-200271342
  hyper
cgcgtaccaaacaacgaagctcctgcccttgggagtttatacacaggctatgttaatatttgcaaagggccccgagtgtctaagcggctaatgaacgtcttgggtcggtttcctcaaaatccagcccattgtttcccc

SEQ ID NO: 14449 - DNA, 528 bp, Homo sapiens
  chr1:200271373-200271901
  hyper
cgcactgtagcccgaatctttctgccaacaaccgctgaaactaccagaggttaaagcaattaacatgagatgcaacctcaccgtggcgcagctccgcgcgcccccggctgctgcgacccgggaggggggagccccggagcggctgcgcccggccccgcacccccggcagagcaggttagctccccctgggtggcaagcctttgcaaaacaaaaccgaaaatgagcgttcgctctcctgacagtcttgcctaaaagaacctcgtctatactgcaaaatcccattaggtacacaagtccggtcggcattgtcacttttagcgtgacttcaatttacacattcaaagaatacctgtccggagcatgggacctggtagaaaggttaggctctctccgaaggaagttcaactcaggatttccctcccccggtgctgcacacaccatcaacggcaaaacctcccctcccagttgcagatctagacttgctgagaaaggtgctggagatgtttccaaggtcatccccagcaccgc

SEQ ID NO: 14450 - DNA, 43 bp, Homo sapiens
  chr1:201252452-201252495
  hyper
cgagcaggaaggcgcccagcgtcccacacaggggactcgcagc

SEQ ID NO: 14451 - DNA, 134 bp, Homo sapiens
  chr1:201252816-201252950
  hyper
cgcctcccgccaccatgaaccactcgccgctcaagaccgccttggcgtacgaatgcttccaggaccaggacaactccacgttggctttgccgtcggaccaaaagatgaaaacaggcacgtctggcaggcagcgc

SEQ ID NO: 14452 - DNA, 494 bp, Homo sapiens
  chr1:204347108-204347602
  binary
cgggcaattagcgcggtgagtaattacgatgcctctcctgccgggactgttaacgggcagcgctgggtctccgttcctcctggctctgctgccctccagcctggcggagcccggagagcagaagctggagcggggaggatccctccccgaagggagcaggttgcagtgcgagcaggggtgttgcctctccgctcccagctccgatcttgcacttgaaccaccggcggggccgggggcggagccgcgccgccgcctcggaaggtaattcacagccccgagaactcgccggcagcgccaagtcccccagtccaggcgcaccgcgcagagaaccagtttgactaaaagagctttgaatcaggaacctggtggacatgtccagccactgaacggaaaaggggaagtgattaaacctggttctacttggtgggaggttaggagaggaacaaaggtcaaaggcacggaagcgtggcggggctgtgagcagcgaggggccc

SEQ ID NO: 14453 - DNA, 259 bp, Homo sapiens
  chr1:20810336-20810595
  hyper
cgcggtgaaacagctccatcctccgtccctgccaggggtcccttccctgctttcctctgaaccacccaccaccctctatcctccagcctgcgtcccagctccattctgagaaaaggaaacagagggcgccaacccagccgctcctgctgcagccagggcgcgcactggcccgcgtcctccccgcaccaggcgcactaatttagacagaaatgtctggagctgggataggagagggagccaaagtctttgggtctcggga

SEQ ID NO: 14454 - DNA, 260 bp, Homo sapiens
  chr1:20810930-20811190
  hyper
gtctctgtctctccctgtctaaggtgtcggtcgcccttattgtttcggcggcttctgcgtcctccccaaacgcgcgtcctcggctctgtctctcccgcttcagctcccctctcgggagctttgtctcggtctctgccaccctcggtctcccgcgtaccccctcccctccatccctgcgtctcagtctctctctgcagccgtcggtccccctcattgtccccgcgtctctggagctcctctcggagcctctctgcgtctcc

SEQ ID NO: 14455 - DNA, 68 bp, Homo sapiens
  chr1:20811219-20811287
  hyper
cggatcgcccaggcctggcaaaccccctcccaagccaagtaacaatgaaaagcccgtgcgacccgaac

SEQ ID NO: 14456 - DNA, 66 bp, Homo sapiens
  chr1:20811755-20811821
  hyper
cccggcgccgaagaagttgttggtgtcctgcaggcggcaggagaagatctggcccacgtcgccgcc

SEQ ID NO: 14457 - DNA, 179 bp, Homo sapiens
  chr1:212838662-212838841
  hyper
cgggccggcgggcacctgtcactgatgggaagagctcctgtttccttgccttgtgccaagagggcccaaggcagacctgccagcagccacgagatggcgctgcgatccaggcgactccgggccctgcagccaccctccccgaggctgccccgcggaggacccaagcggtcgtggaggac

SEQ ID NO: 14458 - DNA, 457 bp, Homo sapiens
  chr1:218519313-218519770
  hyper
cggcacccgaccgagtaccgagcgccctgcgaagcgcaccctcctccccgcggtgcgctgggctcgcccccagcgcgcgcacacgcacacacacacacacacacacacacgcacgcacacacgtgtgcgcttctctgctccggagctgctgctgctcctgctctcagcgccgcagtggaaggcaggaccgaaccgctccttctttaaatatataaatttcagcccaggtcagcctcggcggcccccctcaccgcgctcccggcgcccctcccgtcagttcgccagctgccagccccgggaccttttcatctcttcccttttggccggaggagccgagttcagatccgccactccgcacccgagactgacacactgaactccacttcctcctcttaaatttatttctacttaatagccactcgtctctttttttccccatctcattgctccaagaatt

SEQ ID NO: 14459 - DNA, 54 bp, Homo sapiens
  chr1:218520805-218520859
  hyper
aagggttaaaaaaagtgtctcaaaactagcctctccggaaggcgccccctttcc

SEQ ID NO: 14460 - DNA, 189 bp, Homo sapiens
  chr1:22023693-22023882
  hypo
cgaccactggcgagacactgcctgaggatagtttagctctagccctgaatctacataggcaactgagtgattctaagattcacgagaaaaagttaagtgcacatgtgagttaaaaagaaaaaaaaaaaatgaaacccgatgaaacatttttctcagtctcgactgttgaaagaaaaggtcaggccaggc

SEQ ID NO: 14461 - DNA, 936 bp, Homo sapiens; identical to SEQ ID NO: 7688
  chr1:225614356-225615292
  binary

SEQ ID NO: 14462 - DNA, 270 bp, Homo sapiens
  chr1:228871596-228871866
  hyper
ggggggccgggggcgtgcggggggtgccgaggggcgcggcgtcaagtgcgtgctggtcggcgacggcgcggtgggcaagacgagcctggtggtgagctacaccaccaacggctaccccaccgagtacatccctactgccttcgacaacttctccggtgagctggccggggggccggggccgggggcgcgtggccgcggtccacccaggggaaggaaggtggcgcgagggtcgcgaggttcccaagggggctgcagggccccgggcgcggc

SEQ ID NO: 14463 - DNA, 252 bp, Homo sapiens
  chr1:228872003-228872255
  hyper
tgccaaaaaaaaaaaaaaaaaaaatctcacaatttaagcaacagataagtaggagtgaaacaggttgagttcagggtgcccggtcagtttgttgcatagagcaaagtttcctgagggcgacgtcgctggcgccgctgcagagtttcaatcagaaggtgacgcgcaggtgcctttacctgagcgtcgctcctttgcttttaggcggctcagctcacaaggggcgtctccgctttaaagagccgcggagacgcc

SEQ ID NO: 14464 - DNA, 58 bp, Homo sapiens
  chr1:231297569-231297627
  hyper
ggggtgtggaactggagtggcccagggagacgatggcaggggcggggcggggcaggtc

SEQ ID NO: 14465 - DNA, 546 bp, Homo sapiens
  chr1:232941054-232941600
  hyper
cgcccgagacccgctggagcgcttccgcaaatctcgcgagatagcaggcagcgatgccttttgctccggtttctcgtgagaccccggggcttcagcttctcgtttgcggagcccgcggcggcgtttcctggggcaacagcaatggcggcctcgctgtccgagcggctcttctcgctggagctgctggtggactgggtgcgtttggaagcccggctgctgccgtcccccgctgccgcagtggagcaggaggaggaagaggaggaaaaggagcagggggaggcctcgtcgccgcgcggtctgtgccccgccgtggccttccgcctgctggacttccccacgctgttggtttaccctcctgacggccccggcgctcccgccgccgaaccgtggcccggtgtcatccgcttcggtcgcggcaagtcctgcctcttccgcctgcagcctgctaccctgcactgccggctcctgcggaccccgcttgccaccttgctgctgcagctgccccctgggcgcccgacgcccaccccacagctcctgggggcctgc

SEQ ID NO: 14466 - DNA, 82 bp, Homo sapiens
  chr1:235811934-235812016
  hyper
cggcacacctcactcatgagcagacgacaggactggcacgttttaatggagcacacgggcgcagcctaggcggccttttgct

SEQ ID NO: 14467 - DNA, 184 bp, Homo sapiens
  chr1:235813161-235813345
  binary
gaccacgcgggcctgggggcgcaggcggaccctcccccggccctggacgctgggggcttctgctcggccccctgtgccgtgggggcccagactggggaagggagagccggcgactctgcgaccctcgcccccgttccacgctggccgcgcccactccgccgcggggtctcgcccgggaaatccc

SEQ ID NO: 14468 - DNA, 195 bp, Homo sapiens
  chr1:2460612-2460807
  hyper
cgggcggccggggacttcccagaagtcacttgcttaaatgcaaacacagaacaaccccatggggtcagacacttggcagaagatgggccctgattgtcctaaaacggcagggactctgcacacacattctctgagaatggggctcctgcgggccggccagcttggggccagagccttccggagaagggcgcgtcc

SEQ ID NO: 14469 - DNA, 414 bp, Homo sapiens
  chr1:2460898-2461312
  hyper
cccgccgggtcaccagggccgccagaggccgcaggcgggctggtgcgcggcggcggcggcggcggtggccttggcggagagcgcgggcgggggcgcggcgcccggcgccttgggctccttggcgggcgcggcgggcgcggccgggggccgctggaagtggtacagcagcttcatctgcgtgtcgctggcggcgtggagcgtcaggaactgcacggcctcctgcaggcaccacgagtagccttcgctgtagtcctggtgcaggctcttggggccggcggcggcgacgaaggctgcggggagacgcggcggcggtgagcgggcggcggggcgcgggggagccggggcgcggtgggaactcggggcgcggggggcccgggcgcgctcacctttgctgtgcttcaggtagctgacagc

SEQ ID NO: 14470 - DNA, 443 bp, Homo sapiens; identical to SEQ ID NO: 7708
  chr1:2461988-2462431
  binary

SEQ ID NO: 14471 - DNA, 234 bp, Homo sapiens
  chr1:24742017-24742251
  hyper
cgggagagggggcaggggagtcgccgcaccattcttcctgtggccgctagggggtccccgctccaggtgagcgccaagctctagccccaggtcgctcccttatgcttcaagcaagctttgcagcgcagccaattgccaggggctgtcccgcctactccccgtcctcgcagccacttgcctgcgcgaaatgcctgccaacttctgactggcaggcagtctggcaaatcaaatcgc

SEQ ID NO: 14472 - DNA, 796 bp, Homo sapiens
  chr1:24882115-24882911
  hyper
cgacagcctggggaggaaggagcctttgatcctacagcggcaagagttcttgacacttgccggctgccaagcctgtttcctcccggtctaacgttctgtggttgtctgaatctccagctgcccctcaaaaccttcaatcagattagcgccgtgctcctttaaagaccctactcaaagtgcctggagctcacctgggtgtgtttgtgaggccctttccctctctttaccccgcggaggagtccgacctggaagcctcctgctggacttctctactggactgagtgcccgggagtgccagagccagtcccaaaaaggacccaggagcggggacaccacggggaggcgccgccactccagtgtgcgggaccctggcacccccggcgcgttctccggcctccccaggatcacctgcacggggcggggccgggggcgggacgccccgggcgggggcgggatcccagggtggcagcgccgggcggcggcggggaccctggctgggagcgcggcggtgccggcgggaggccgagcggggctcgacagagcaggtaggaggcgcctggtcgccggggttgcccggggctgcggggagcgaggagcggtccggcccaggtgcggtggcttcctgtccacctgccggccgcgctgggcgaaggagggcccgggggtggggacgaggggtccccagtctcacccccacatctgttggaggaagtgcctggggtctgcgcgggagggcgttggtccggggtggtgggagggaggctgatcatctccagtgggtcttggagacgaggtc

SEQ ID NO: 14473 - DNA, 178 bp, Homo sapiens
  chr1:2716559-2716737
  hypo
cgggggcagctttcaccctggctctgcaggggccatgccgtcctcctaccttggggttcgctgccggtgggatgggcctcgagggcccggctgcatgctgccaggcagtcctcaaacctgccgctgtggagcagagcttcaggtgacagggtgtcactccgggtgcccctggggtcca

SEQ ID NO: 14474 - DNA, 39 bp, Homo sapiens
  chr1:2717239-2717278
  hypo
ggccagggcagtgcgcacactctgcagggctgagggggc

SEQ ID NO: 14475 - DNA, 738 bp, Homo sapiens
  chr1:28286184-28286922
  hyper
cgcagccctggtccaggctctagtctccccgccctctcgctttcttgggcctccgggcgcctcaaaggtaaaactaggccatttgaagcctgcgaagcgaagggcagtcggtcttcaggcctagcgggcttggctgggctgggtcggtggacccctgggctggcggcgggagcagagcatcgagcggcttttagctggggttcgggcggaggacctgggacaaccgcgggcctcgctcctccccggacggggcgggacggggaagtcccgcccaccaggcccaggccccgggccgccccgagggctgcgcccacctccttcctgcctcggcaaccccgggccctgagggcaggccccaaccgcggaggagcaggagagggcggaggccggcgggccatgccctggtcgtcccgcggcgccctccttcgggacctggtcctgggcgtgctgggcaccgccgccttcctgctcgacctgggcaccgacctgtgggccgccgtccagtatgcgctcggcggccgctacctgtgggcggcgctggtgctggcgctgctgggcctggcctccgtggcgctgcagctcttcagctggctctggctgcgcgctgaccctgccggcctgcacgggtcgcagcccccgcgccgctgcctggcgctgctgcatctcctgcagctgggttacctgtacaggtgagtgcttcgccccgggaggggaggagtgtcggagcccagcacctcc

SEQ ID NO: 14476 - DNA, 143 bp, Homo sapiens
  chr1:32226391-32226534
  hyper
ggtcctcaggagccgctctcctagagctctgtcgccctgggggacgcacaccctccatcctgcctccggagctggggactgggccgaggggagggagcgaccccctctgtgcagtcctcccgctccgactgccagagagggtc

SEQ ID NO: 14477 - DNA, 697 bp, Homo sapiens
  chr1:39956640-39957337
  binary
cggagcctcctccgcaaagctggatcagtaccggggacgcagggcgcacagctagggctggcgggggcggcccgactggggcgctgcctgggctcacgcgggagccaggtgggggacgcagggagaagcagccgagcaggtgccgagaaggaggcgcccgcagaagcgcatgcaggggccacggggaaggcgccaggaggcggtgaggggccgcggtggccggaacccgggccggctgctgcgggcagaggaacaggccccacccgcggggcttggctggcaccgcccggctctccagacggggctacggccgcgtgtcgggcccggtggcgaccacggcacaccacggcgaggcagccgggtggcaccactggcgggaccgggacggcgccgcggccttaggatctctgcgccgaggcccgcggcgggagccacgacggccctgaccacgctgacgcccaggctgcgggctcctcgcccggaccaaccgccagccacgccgaggtcgcacctcggggtcgccccacccgcaacacctgccgccgcccggggctcctagcgggcgcggcctccgcgcccaggccccgcccccgcgcccccattggtcagtcccgggggtgggcgggcggcacagacggctgagccggggcaaggactcgcgggaatcgcgccgcccgggtcgctgccggagctcgcc

SEQ ID NO: 14478 - DNA, 352 bp, Homo sapiens
  chr1:40782323-40782675
  hyper
cgcgcgcccgcagcccccggcggccctcggaagggagacgtgggtaggcgggcagggccgagaggccgcctcggggcgacagcggcgtctggttggagccggcgccccctgggaggcggcgggggcggaggctgcgcagcgggtgaatgagcaccattgtatgccccgccacctgggctccccgggctgccaggaccgggcgccagctcctgccccacgctgcctgtcccgggccgggccgcgcgtctggggacgggtcccgtttgactctccggctcagccacctccattcacggtgccgcgatgggcaccatgtatgcacccaccgaggggacctgcccgcggcgctgtc

SEQ ID NO: 14479 - DNA, 52 bp, Homo sapiens
  chr1:40782908-40782960
  hyper
gcacgcaccgacggcagagtctcccggcgctcctccagcgctggctgttcgc

SEQ ID NO: 14480 - DNA, 189 bp, Homo sapiens
  chr1:46954676-46954865
  hyper
cgagcctctgcctgattgagagccggccccagaacgtcctcttcctatgagccggttcccgcctggagggagcagagcgctggtaagagcaggaccatctcaggcccaggattttcccgaagtggaccggtcgccgagtgtgtttgttcccccagtcccggcgacaggtgcctgtgctgtgtgtgaagc

SEQ ID NO: 14481 - DNA, 392 bp, Homo sapiens
  chr1:46954904-46955296
  hyper
catccaggtgctagacaggtgagcggctgctaggagcgcaaaccagcgcacccgcggggtgtgtgggcggcgagttcagagtactggctgtggcgctgcatggtggcgcgggggtggcagtgttgttgcaggtggtgtggaactgatgggaagaggtatgtgtgcgcgcgtgtgtgtgcgcacaaccttgaagggacagtggggacgggagtccgtcggggctcccccaggtcacctctacggactccagctgccaagcgtcggggtgggaccggcgagggggaggtttctcaagacctttcaacaccccagggatcggcctgcggcttccgcggacccaagagaggcagagatccctggaccgggagccagagctcgaggagcagagattc

SEQ ID NO: 14482 - DNA, 137 bp, Homo sapiens; identical to SEQ ID NO: 5883
  chr1:53168691-53168828
  hyper

SEQ ID NO: 14483 - DNA, 164 bp, Homo sapiens
  chr1:55620065-55620229
  hypo
cgagcttcccggcctattcgtccaatcaggctcaaaagcttctgtcttactctatcactctcagtctcccagctctgtagaacggaaaagacacaggaattgcttcacgatcaaactggcaaaatatgcaaaaattttaaacttgagctaaaaacattaacaac

SEQ ID NO: 14484 - DNA, 165 bp, Homo sapiens
  chr1:6265347-6265512
  hyper
cgaaaggcagggctgggattacagggcgtctcactccgcctcccaagcgctggaaagtcggtggaggggcgtccgctgctctctggcgcccccaattggccgccgaggaaatgaggcggcgatgacctgttcagacccaaatgggatggaagagtggggattagc

SEQ ID NO: 14485 - DNA, 696 bp, Homo sapiens
  chr1:6265789-6266485
  hyper
cgtgagccaccgcgcccggcctacccttgaagaccccgcagccaaggtcctccggccccgctctgcgcggcgctctggtcttggggctccggactctgtcatgccgggcaggggccagtccgatccttgcacccttgcctggcaccgtccctggagccttggcgtcctggcctctcctccccgcgggctggaggtggagtggccgggccggaaccagtgcgcaaagcagatggcgagcgcggaggtcggttcggccccgccgcgcctcaaggcagcagccaccctggggaaggtggatgccggaagaggcgtcgcctgcgggtcacccagaggacacccggcggggaattccgagggtgggagtgaggagaggtaggagaggccacggcagagggaggccccgcgcagagtgggaaccatcgcccggtgcgggcctgaacttccagggccggctactcctcggcagagcgaccgcgcggtgtctcagagcgcggcccggagccgcactaagagcgctggacggcgggagagaggctcggaggaccggtagctcccagcaaagcggcccagcgggtaggtacaaggccccgcccctcgccagtcctcactgcctgttctccctgcgccggggagctccaggccccagccctaacctgggccctagcggctccccactccatgacctctggacgccca

SEQ ID NO: 14486 - DNA, 64 bp, Homo sapiens
  chr1:6266713-6266777
  hyper
gtttccacgacttctgtgccggctgcctgcgtggccgcgcgaccgacggccgcctcacctgccc

SEQ ID NO: 14487 - DNA, 41 bp, Homo sapiens
  chr1:65468262-65468303
  hyper
cgctcagtaacgcagcgctgaggagtaggccaccccggagg

SEQ ID NO: 14488 - DNA, 336 bp, Homo sapiens
  chr1:65468660-65468996
  hyper
cgccgtcgcgcctcgcacggcgtgagacaacctagctttttttttttttttttttttaagaaaagcattggcaccgcagcagcctcccccgcttcttccctactaggacgcccgcctgactcgccccattgcacaattcttaccgtggaacagccgcgtgactcggcgggagcccaaaagtttcccaggtttcctcagcctagaaaagcgtgggtgggtgtcccggcctggctccaggcgccctttaagttgtatttcttcgggtaactgggttgccctttaaaatgtggagattgtcctttagaaagaaagaaaatctcacgagctcgctggccc

SEQ ID NO: 14489 - DNA, 61 bp, Homo sapiens; identical to SEQ ID NO: 7738
  chr1:66999412-66999473
  hyper

SEQ ID NO: 14490 - DNA, 36 bp, Homo sapiens; identical to SEQ ID NO: 7739
  chr1:66999673-66999709
  hyper

SEQ ID NO: 14491 - DNA, 45 bp, Homo sapiens
  chr1:70035044-70035089
  hyper
cgagaagctggtgaacctgcctattcccaatccagcgctgggtcc

SEQ ID NO: 14492 - DNA, 92 bp, Homo sapiens
  chr1:70035537-70035629
  hyper
accatctgcgactcccacgttcctttcgaagttctccttcaaaaggaattacaaaaaaaaaaaaaaaaaaaaaagcgatgggggtggggatc

SEQ ID NO: 14493 - DNA, 61 bp, Homo sapiens; identical to SEQ ID NO: 7744
  chr1:91185065-91185126
  hyper

SEQ ID NO: 14494 - DNA, 171 bp, Homo sapiens; identical to SEQ ID NO: 7745
  chr1:92948154-92948325
  hyper

SEQ ID NO: 14495 - DNA, 226 bp, Homo sapiens; identical to SEQ ID NO: 5891
  chr1:92949466-92949692
  hyper

SEQ ID NO: 14496 - DNA, 569 bp, Homo sapiens
  chr10:102822304-102822873
  binary
cgaacgcgctgatgccccgagtgctcgcagggcttcccgctaaccatgctgccgccgccgcggcccgcagctgccttggcgctgcctgtgctcctgctactgctggtggtgctgacgccgcccccgaccggcgcaaggccatccccaggcccagattacctgcggcgcggctggatgcggctgctagcggagggcgagggctgcgctccctgccggccagaagagtgcgccgcgccgcggggctgcctggcgggcagggtgcgcgacgcgtgcggctgctgctgggaatgcgccaacctcgagggccagctctgcgacctggaccccagtgctcacttctacgggcactgcggcgagcagcttgagtgccggctggacacaggcggcgacctgagccgcggagaggtgccggaacctctgtgtgcctgtcgttcgcagagtccgctctgcgggtccgacggtcacacctactcccagatctgccgcctgcaggaggcggcccgcgctcggcccgatgccaacctcactgtggcacacccggggccctgcgaatcgggtacgcatggccc

SEQ ID NO: 14497 - DNA, 34 bp, Homo sapiens; identical to SEQ ID NO: 7753
  chr10:102995986-102996020
  hyper

SEQ ID NO: 14498 - DNA, 174 bp, Homo sapiens
  chr10:111987876-111988050
  hypo
cggatttgtgggtcaatggatttgggtactatattcttcttaccgtatctttttttcttgctttcttcagagtgtgaacatggctacgcctcttcattcccgtccatgccgagcccccgactgcagcattcaaagcccccacggaggttgagccgggcacagaaacacagcagc

SEQ ID NO: 14499 - DNA, 457 bp, Homo sapiens
  chr10:114135846-114136303
  hyper
cggcccttaggggctgaggtgaaaggctttgacacggagccagggtagctttggcagcttctcccctcctggtcagaacacttccactttcagttgtgaaaaaaaaaattaaaaccaggaagtgaagtccccgagcacgttagaaagcctgacatggcctgactcgggacagctcagagcagggcagaactggggacactctgggccggccttctgcctgcatggacgctctgaagccaccctgtctctggaggaaccacgagcgagggaagaaggacagggactcgtgtggcaggaagaactcagagccgggaagcccccattcactagaagcactgagagatgcggccccctcgcagggtaaggggaccatcgagggggtgttattcagcaagggggtcttgtgagggtgtgacagaggccaagggggcatcctgacccccgactttctttaagc

SEQ ID NO: 14500 - DNA, 43 bp, Homo sapiens
  chr10:121591491-121591534
  hypo
cgaaacagcaataatggacgtgcgccacttaccgagccaccac

SEQ ID NO: 14501 - DNA, 405 bp, Homo sapiens
  chr10:134116378-134116783
  hypo
cgaggcaaaaccatcacggggccactagagtcactccaaggcaacgtgacagaccacccagaaagccaacaaaatgaacttcaaagctatagactaacgagaatttagccaagtgcagtcatgtgcaagaggcagcgaagtctcagccacacacaaggtgaaccttgtaaaagtggagcgttccttcacatcagcagcagccagcgtggaaacggtcccactccagtcccacaggccgggagcagcaagggcgcagcctgcctggggctctgcggtgaggggctgcgtgggaggcctcagatccctacagggggaaacatcctaactgcactcatcctgggaaagaggagaactaatgcgagaaggagagagctttctcactctccgtcaagcgatactccctac

SEQ ID NO: 14502 - DNA, 163 bp, Homo sapiens
  chr10:134734534-134734697
  hypo
cggcagccccttcccgctccaagagtcgccaaccttcccttgcagggcgcgacccaccctgcgtctgcccatctcctcgtctcagacccgagacatgacccagcagctccactcccgaccaccatctccacaggctgcagtctgggtgacacctggttcgtcg

SEQ ID NO: 14503 - DNA, 100 bp, Homo sapiens
  chr10:13933035-13933135
  hyper
gagcagctgcctccaatatagaagcactgcatttagccaattttaaatgagcacgtactaaagggggttcccttctgttctcctccccttccgagcgtcc

SEQ ID NO: 14504 - DNA, 191 bp, Homo sapiens
  chr10:13933246-13933437
  binary
cgccctgtcctgcacccaaaggaaagggctcccctggcactctcagaaaatggttttaaaaaaagcctacacagctctgcctaaagccatgtcctttcctatctccccgggtagattcagacagcgtgggactgaggtgcccaaggaaagtaggtgtgtgtgtgccgaggggagggttgcagaagaaagca

SEQ ID NO: 14505 - DNA, 139 bp, Homo sapiens
  chr10:14979037-14979176
  hypo
cggataagaaatgaacacatgttgtatgattccactcatatgaaatatccggaataggtgaacccatggagacagagagtccaatacagtagtggttgccgggggttggggaaggagagaatagggagggattgcgatc

SEQ ID NO: 14506 - DNA, 193 bp, Homo sapiens
  chr10:24497856-24498049
  hyper
cgcgcctgaggacggacggacggacggacggacagacctagggacggagggccaggggcaggggagatccaagaggccccgcgctggaatgcagttttctcgggcgagggagactttgcaccggagtggaaaatagtttggggtggggtttcgcaccgtcccctcctccccagccccgggccccctcccaggc

SEQ ID NO: 14507 - DNA, 472 bp, Homo sapiens
  chr10:25241259-25241731
  hyper
cgggactcagagtttcgtcagattgggggcggggagaggaggcccgggtccgaggatggaagcgatccccgccgggagggagaacaaagcggtggccctctctctcccccgacgcacggcaagcatttaatctacaagcagggtgccagggagggaggggagcgggccgagccccaaaatagggagtttgcatttaccacgacgcctcgcccgtagtctggcgcctcctcgctgctcccggccatgtttctcccggggaacgcgggaagggaagacggcgcgggaaggagcagggagggcgaaggctgcgtgggggatgggacgtggggatggggacggggacggggacggggacggggacggggacgggtccgccccgccccgggcccgccggcgggaagcagcggcctgacgcggatccatggccccggcgctgcgccccctcccctggctaggccgcgggggcgcgggg

SEQ ID NO: 14508 - DNA, 343 bp, Homo sapiens
  chr10:29011162-29011505
  hyper
tgaattaatgggttcagcttcatgttgagcacaagtgggaggctattttagagaaaccttcccaggccagccgtcactgatgtggcaaactcagcctctgggcagaccggctggaaatagaaacgtctccgcttcacgatggcgcacgcccggacgtccccttccgagagcgggtcccctttgtcccccgaggccccgccgccctgtgtcacgtccccacctcgctctgggtccactgatctcttgatgcacgcgtcccatcagcagcagccgaaagagggtgctcgggcgggagtgaaatccctgtgaaatgtgatcaagaacacaaaatgctgaggcagct

SEQ ID NO: 14509 - DNA, 157 bp, Homo sapiens
  chr10:31607149-31607306
  hyper
cggcgatgaccgctcatttaggaaggaattcatggcctgtggataccttagctctgagtcctgccacctaggatcccacggttctacgcgaggaagagggcggggagcgcggaccgggtgtgggaggccgaggtgacagcaggtgagggccgggtgc

SEQ ID NO: 14510 - DNA, 791 bp, Homo sapiens; identical to SEQ ID NO: 8945
  chr10:31607954-31608745
  binary

SEQ ID NO: 14511 - DNA, 298 bp, Homo sapiens; identical to SEQ ID NO: 7780
  chr10:6018666-6018964
  hyper

SEQ ID NO: 14512 - DNA, 256 bp, Homo sapiens
  chr10:62492589-62492845
  hyper
cgtgtccttaggaaaggttcagcctggcacggagttggaggggcgagccaagagcagagaagccccaagacgagagaccgaggtgagggcgtcctgagcccggggcccgcttttctttttccagacgaatgtttccaagcagaagccccaagtcctcgggcccccctctctcctggggatgctccagcactgggaccgagttcgagctctcgcctctgtcccgggccgcaacttccaggcgcaactggactcccac

SEQ ID NO: 14513 - DNA, 147 bp, Homo sapiens; identical to SEQ ID NO: 7784
  chr10:73846836-73846983
  hyper

SEQ ID NO: 14514 - DNA, 262 bp, Homo sapiens
  chr10:73847427-73847689
  hyper
gatgccaccctcactgccggccccacccagacctgccggtgctgcagtgccccgtatgtgcagcctgcagcatcccagcggctggggcaggcccgggggcggctcgcacaacgcagctggggaccgggtcggggtccagcggcagccggggtccgggtccccccggccccgcaccccttcccactcccggcccgcaggggagaccccggagcgcgcgaccccggagcgtcgggcaggtgtggagctgggggtcccggggctg

SEQ ID NO: 14515 - DNA, 413 bp, Homo sapiens
  chr10:74079281-74079694
  binary
cgtttgtccgctcagaccagacggggcaaagggcagccatcaaaggtgtctgggacgagcccggcggggtaatgggccgctagggactcagtctggcccgggtctcagccggggcagaaggcagccgggcgagggccgcgggtggggggcagggggccggggacaagcagccccgcccaggccggcgcgctgtgtgcacaacgtgcagggctgcgaaagcggatgcggcctgatggggcaatcgctggcaacgcgccgcgggttgtcagcgggcgctggggggtgggagcccggcgccggcgggccctgcctccagcattggccccgcccccagttccgcagtcgtggctgggtttcggggagggcgcccggtgcggggggcgcccagggcctgcgcacacgggtaggcccgc

SEQ ID NO: 14516 - DNA, 179 bp, Homo sapiens
  chr10:74079752-74079931
  binary
cgttcggttccgctcctgtcgcaccaccccctcactgctctgacagataccaggagctggtgccaacccgcagacacacctgggcagccccacgtgggtatcgcacgcgcaggggcacatctgccctgccgggtttggagagcagttgcaagtcagcccctggaatgtggtcccgtgcc

SEQ ID NO: 14517 - DNA, 74 bp, Homo sapiens; identical to SEQ ID NO: 7787
  chr10:75670652-75670726
  hyper

SEQ ID NO: 14518 - DNA, 45 bp, Homo sapiens; identical to SEQ ID NO: 7788
  chr10:75670755-75670800
  hyper

SEQ ID NO: 14519 - DNA, 418 bp, Homo sapiens
  chr10:89621342-89621760
  hyper
cgaatcagctctctcacggtgacaggtcagcccaatcggggctgtaaacagacttgacaggtttgttctgggctgacggccattgactaggttctcagaccagataagtcacttggctgagtccacagtaggtggggcgcgctcaccagctcaggggtagtgactggacgtttgttgcaacatcggagaatgcacgctctgggctgcagcaggagataccctcaagcacagaaccaaaagggttcaccctaagcggcagggcatcagcgatggagaggcccgagagccctagcgcccagctccttttcccacgtttgggaaggcgcagaataggtcgatgtagagcaaggagtgagtctcaggtctcagtcctttggcttgctcttagggtagcaggcgaggagtggcaccagtttgg

SEQ ID NO: 14520 - DNA, 1002 bp, Homo sapiens
  chr10:89621836-89622838
  hyper
gtgcttgtgtaaccagttccccaagcgccagccccgacagcgctccttcgggaggctggtccgagcccctgtttccgccgcggcgcaggaagggttggggttccgctgcctgcaccaggcaagagcaccccgagcaaaggaagaagacgacttgcctccggagctatcactggggagtgggaatttggaaagttccccaactagggacacacgtgacctccttcggaaagtagttccgactgtggcccgtgtatccttccacctccttttgaaccctcctaggtctcctcgccccgcccactcgctgggctgcagcttcctaccgttccgtactttccactcaacccggtaaccccaaacgtgcacggtccggccggggcgcgcggagcctggccccgggcgatccatcctgccgggttttcacggcggccaagggggggcggggctaggtggtctctgagaaccgagcttgactccgacgccgcgaaccgacctggagcccgaggggaaagatgctcgactctcttgggggcaccggagcgggcgcaggagaggcctgcggggtgcgtcccactcacagggatcctctttcagttcatttagataggtgccctttgggcccttgaaattcaacggctatgtgttcacgttcagcacgctcggctgagagctttcatttttagggcaaacgagccgagttaccggggaagcgagaggtggggcgctgcaagggagccggatgaggtgatacacgctggcgacacaatagcaggttgctctttgtgctaagactgacaccatgaggacacagatttgggggaagggggaatctctaggcaaaggctgttacagtcaaatctctgcgaacgattgtgatccgacagcggtgcaaaaggaaagagcgaatgcagtccacgccgcggaaatctaggggtagaggcaaggggggagggtattccccttgcagggaccgtccctgcatttccctctacactgagcagc

SEQ ID NO: 14521 - DNA, 79 bp, Homo sapiens; identical to SEQ ID NO: 5731
  chr10:94449318-94449397
  binary

SEQ ID NO: 14522 - DNA, 173 bp, Homo sapiens
  chr10:97051022-97051195
  binary
cgcacggccgcaccgcggctctcgggcccggggcgggtgctaggtgagagggaagcaggtcctgacagcgagacaaactcgcgcctcgtgctttgtaaaacgagaaatttgaagtgctgtgccaagtcagccctctgaggtcggctccgacttcccatttgctttttgtaatc

SEQ ID NO: 14523 - DNA, 231 bp, Homo sapiens; identical to SEQ ID NO: 7799
  chr10:98272415-98272646
  hyper

SEQ ID NO: 14524 - DNA, 715 bp, Homo sapiens; identical to SEQ ID NO: 12162
  chr10:98272768-98273483
  hyper

SEQ ID NO: 14525 - DNA, 761 bp, Homo sapiens; identical to SEQ ID NO: 8961
  chr10:98479725-98480486
  hyper

SEQ ID NO: 14526 - DNA, 38 bp, Homo sapiens
  chr11:101918139-101918177
  hyper
cgacacgacggccgccgcgtctccatggaaacggccca

SEQ ID NO: 14527 - DNA, 401 bp, Homo sapiens
  chr11:10326048-10326449
  hyper
cgaaacgccggggtcttggtcctctgggggactagtgagtcctgctcctctcggctttgctccgtccctgccccggcccctccgcgggagtctggggtcgcggcccggtcaggcgccaagccggcaggggggcgcggtccacttgaggccacagctccccaggtccagggctcgggccatccgcgctgtcccttccgcgggctcttgctgttcttcgccaggaggctttgcactccgggccgcatgggtcctggataaggacctcaagaggttgtagtggcgccccttcgctccggcgtactgtctgaaccctgtgcccaaagagggctgtggcagttcctgcaccaaccgcctggagcccatacctaagccctctgggcacgagggacctcctctccccc

SEQ ID NO: 14528 - DNA, 229 bp, Homo sapiens
  chr11:10326499-10326728
  hyper
cgtccgagagcaggagcgcgcgtggctgaggaaagaaagggaaggcaaccgggcagcccaggccccgccccgccgctcccccacccgtgcgcttataaagcacaggaaccagagctggccactcagtggtttcttggtgacactggatagaacagctcaagccttgccacttcgggcttctcactgcagctgggcttggacttcggagttttgccattgccagtgggac

SEQ ID NO: 14529 - DNA, 499 bp, Homo sapiens
  chr11:1103476-1103975
  hypo
cgcccacggcatcgtgggaaggtgctctcatccccaggaatgtccgggggtcccgggctcattctcctttccctctagggctccatcacattcatgcccaatggatgctgcaagacctgtgagtacagggcacagcctggggggtaggcagggtgggggcacaagggctggtgccctcagccccgcctggggtggctggaggctggacaacggcctctgggtgggcagtgagggctgggggctgaggccgagcctggggaggggacgcagcgagggagagcctcctcgaagatgtggaggccctgccctaagccgctgcccgctctccccaggcacccctcgcaatgagaccagggtgccctgctccaccgtccccgtcaccacggaggtttcgtacgccggctgcaccaagaccgtcctcatgaatcattgctccgggtcctgcgggacatttgtcatgtgagtcccaggctgggagtgtgcctggagggggtggtgg

SEQ ID NO: 14530 - DNA, 313 bp, Homo sapiens
  chr11:1104214-1104527
  hypo
cacctcccgccgggcccggcgctcccctaggcatctggggagcgggtgagcggggtgggcacagcccccttcactgccctcgacagctttacctcccccggaccctctgagcctcctaagctcggcttcctctcttcagatatttattgtctgagtctttgttcagtccttgctttccaataataaactcagggggacatgctgtactgtgtggtttaggttggtgctgcaggggtgcggcttggccactgtgcatggcggaggccaccaggctctgcgtgcaggacacgggggcaccacacacacgccacgc

SEQ ID NO: 14531 - DNA, 81 bp, Homo sapiens
  chr11:114115648-114115729
  hypo
tctcacgtggccttggctttatttatttatttataccttaatgaggatactgaatctttgattaaagtcgtaatcgttgcc

SEQ ID NO: 14532 - DNA, 1596 bp, Homo sapiens
  chr11:17034991-17036587
  binary
cgcaggcccgcgcagtggatggaggccgggggcgaggttccgactctccaagaccatcccagagcctgcggcgggagagggggcgtcctcctaagcgagattcccctagtctctccctctccccactccaaccccgcaggcccacaccaggacagaacttctcgttctactcctcccacccgagcccatccaggtcccggcactcgcctctcccggcggggcgcagccccagaccctagaggggaggcgtgcccagcccgcacaccagcacccgaatccagccggattgcaaggtccagggcgcagagtctgcggcctcttcccccccggcccaggtccccagcgtaggtgcggcccccaccgccttcctctcggaggccgccaaacaacttgggcacacaaaacgttgagtgtggccgcggcgcagcgcgcgccaacgagcccgggccggcgggagcagaggaagggcggggcgcccggcgggaacggggagggaccccccccccgcggcacaggtgcgagcgcggcggccccactcactcactcgatgaagtagctggcgccctcctccgtgaagccctcctcccagccgcggggcaggtctgcggaaacgccagaaaagtcgggtcaaacttgggccgccgctgcgcgcgccccccacccgccggcccggcgcccacctgagcggatcatgtggcccgagttgacgggctccccggtgcgcggatgcagccaggtcgtgcagcggagctggtcactgcgggcagagaggtgcacctgttagcgccgccacagcccgccgggtgcccgcccggcccccgcccccgcgcccccacccgcgtccccgcgtccccgggtcctcgcgccgcacttgatgaagaagacgcggccatcccggcacaccccgtaggaccaatgctcaggtaaagtgtcccgcccgaccgtcgccgccgccatgttcgccgagcgcggagccgccgcggggtgggggggagggggcgggggcgcgggcaggggcggaggcgggggcggtggcgggggctcggcctgcgcgtggcccggcggcgccgcgaggcgctccatccaggcgcgggctcctgagggagcgaccgcccggccgggtcctggcgcccggagttcgcagccgctccggccaacccagcgcagtgcccgcggcctttgtccccgagccttccccgcccccagcctgctggcaccggcgctcccctttgcccccgaggccgggagacccgggcggcgcggggggccgctggcgggggccgctggcgggcgcgcctgggcagcttcggggcgcgcggttggacccgaccaactccgaaaacggcgagcgcccgaacgctcagtaaaccccagccgacccgcaccacagaacttcccgacccgggaactccgcttgtgtgtgaaccaagttaacactcaggttcctgccatattcccagcctccttctcttcccctgtaaggttaatcgagtccacacgggattgttgtgtagattaaatgaagtaacaatcgcataaagtgcttaaccggaccatggcatgtagtaggtgctctatcaacggcaggccgagcgc

SEQ ID NO: 14533 - DNA, 108 bp, Homo sapiens
  chr11:17373019-17373127
  hyper
cgcgccaacggtaagatgtcgctctggacgcgtgcacctgctctcgcaatcaccgactgcggtcagcatcttccttagagcagcgccccgggccacttggatcccggt

SEQ ID NO: 14534 - DNA, 167 bp, Homo sapiens
  chr11:17373405-17373572
  hyper
gctgtgtctccgtcaactctttacgcaacagaggtctccccctgcccttggtttctaccgggccgcctgctcccactcggcgaaaaaaattacacaacagcagccgcggcgatgacgtggagggctgccgcctccacgtgcgcggcgctcctgattctgctgtgggc

SEQ ID NO: 14535 - DNA, 116 bp, Homo sapiens
  chr11:17373642-17373758
  hyper
cgggtcggctccctagcatcccgccaggggacctcaacttcctgggggctgagagctctattttcttttctatttcttctcctttttttttttttttttttttgagacggagtctc

SEQ ID NO: 14536 - DNA, 35 bp, Homo sapiens
  chr11:1975930-1975965
  hypo
cgcgcaggaatgaagggcgcacgacatgagaggca

SEQ ID NO: 14537 - DNA, 917 bp, Homo sapiens
  chr11:19798519-19799436
  hyper
cgaccatctttcccccttcgcgcccaccggcggcagtggcgaagggcccactgaagcgccgggtgccacgcggggcggcccgcgggccagctagggggcggggaactcaccagccgccgacccccccccccaccccgccctcggccgccgcggccccagcggcctccgcgctgcgaggagcgggcgcttggacacagggcgagttgtttgatttggcggaggcggggaggccggcggggagcgagcgagggaggcacgagagctgggcagcgcgggcgccggtctccagggtagggtccccgcgcgcagcagcggccccggggcgggggcgaggcgaccgcgggcgccggggatgcctggaggggccgcggccgagaggagacccgggactggacggccagacctgccgggcgcgcgggcaggtgcttcggctttttttttttttcccctcctcctttttcctctgccccttccttcctcgccctgaagtaagatgagcgtgatgctgtggcgctgggaacagaataacaccaccatgaagctggtaagggtggattgcagaccgcaccccctgggcgctgctctactttttaaccccccaccccgccccccatcccctttaggaactggcccgggtggtggaaagcccctgaaatgcattccgcacttggtatttcccttattgttttgaagctagatctcaggggaggtgtgtgtgtttaaaccaggaaagtcgatgtgtgtatgtctctggttgtgagtcattgaaggggggtgggactgggctgcattatctctccgtcccttccacctacgaattcctggagctctcttggattgcacacgctgggattgtctcctacgagcatgtctgcgccctcacagcctgtcccgggacagcgtggtccgcgtccccc

SEQ ID NO: 14538 - DNA, 67 bp, Homo sapiens
  chr11:20153468-20153535
  hyper
cgtgcagcaatactcgcagcgtggagagttccagtcccgaaatggcagcgtcaggcaagctgcttcc

SEQ ID NO: 14539 - DNA, 197 bp, Homo sapiens
  chr11:20385084-20385281
  hyper
cgcctgggtgagctgagcccagcaggtgagggaaaacgcgggaagagggtcttgcagattccaaacttaggaagggtcgcggctccgcgcacgtgctctcggggtcaccttccccgcgcctgtgagggtgccaggagttcgtctccaggtcccgcccctgtgggcggggcgaggcagcgtcgccgcgaggccacccg

SEQ ID NO: 14540 - DNA, 238 bp, Homo sapiens
  chr11:20385481-20385719
  hyper
gagctgggccaggtctcctggccgggccggggataccgtggggtatgcccagtgatgccagcagcttgtggcacctgggcgcaccctccagctcgggccccttccgatgggtctgctggctcaggtgcgggcgatggccggggagccgcgccccgcacgtgactcagcactttccccagagcccggactgcggagaacaatatcctcctccctaacagataaacagcccttgttcctc

SEQ ID NO: 14541 - DNA, 268 bp, Homo sapiens
  chr11:31833155-31833423
  hyper
ttctgggttgggggtcgcgcccccactccccctaagctggactcgggactcccagtcctcggagggtgcaagtttctgtgctgtcctttcttgccaactccaggacagcgtggcctgccgccccgcccccgcccgcccccaccccatcccagccggggccccaagacacagagcacagcggcggccgcaccccagcccacctggccccttggaagaagaggaaaggggcgggagcgtcactgggtcctggcagctccattccagctgc

SEQ ID NO: 14542 - DNA, 384 bp, Homo sapiens
  chr11:32851566-32851950
  binary
cgcgcgggggccatccagaccctgcggagagcgaggcccggagcgtcgccgaggtttgagggcgccggagaccgagggcctggcggccgaaggaaccgccccaagaagagcctctggcccgggggctgctggaacatgtgcggggggacacaggtacgaggcctggcggcaggacctcggcggggagggggttacctggaaggggccacctcggcggactgggttggattcgaacacatagcgagggttgcccgcggcgacaggtgcccgatcagccctcggcagggtcactgggcacggcgtttgtcccaggcgctctcaggggctgcttcctgggcgcgcgtcgggttccggcgaccgaaaccgcgcgccgggcgctcttgc

SEQ ID NO: 14543 - DNA, 57 bp, Homo sapiens; identical to SEQ ID NO: 7814
  chr11:35547041-35547098
  hyper

SEQ ID NO: 14544 - DNA, 209 bp, Homo sapiens; identical to SEQ ID NO: 7815
  chr11:35547127-35547336
  hyper

SEQ ID NO: 14545 - DNA, 117 bp, Homo sapiens
  chr11:441960-442077
  hyper
cggccaggagagtggctgccagcggcgggtgctcctacctgacttccgcgtggggctcgcccctccctcctcctcctccagcgtcctgcagctgccgcgcctgggtgtagtcggggc

SEQ ID NO: 14546 - DNA, 87 bp, Homo sapiens; identical to SEQ ID NO: 6778
  chr11:47208495-47208582
  hyper

SEQ ID NO: 14547 - DNA, 93 bp, Homo sapiens
  chr11:57580261-57580354
  hypo
cggcgctcagccacactagccactttgtttaatggaacactgtttttacttggaaaaaaatgtgtggtagacaaagggattattcagatgtgc

SEQ ID NO: 14548 - DNA, 231 bp, Homo sapiens
  chr11:61062458-61062689
  binary
cggcagcaggagcgcgacacaggcggcccgaaggagcagtccggcccacatgaccggcggcggcgggtcccccgggctgggctcggctcctgcgccgcgcgcgggagagggggctgccggccctcgcccctcctcctggcgccgtggggagcgaaccagcgatccccgaaatggcacgcagagctgagcaggggggcttgggacgccgagaggaggggccgagggccgcga

SEQ ID NO: 14549 - DNA, 260 bp, Homo sapiens
  chr11:61595492-61595752
  binary
gcgggaggatgtggaacccgaggcggggggagccggaggggcgggcagaggaggtgtcgaggccctgagctcccggggagtttttactggaggcaaaagtccatagcgggagggctgagggaggggcggaggaaggggaccgcttgggggcactgggaagccagggatcctccgccaggaaggcagggacactcccgagcgcaggcgagaaggctgggggagggggcgcggtgggaggagtaggagaagacaaaagccga

SEQ ID NO: 14550 - DNA, 34 bp, Homo sapiens
  chr11:61596695-61596729
  binary
ggggaccggcgtccgggattggtggaaggagaac

SEQ ID NO: 14551 - DNA, 672 bp, Homo sapiens
  chr11:705963-706635
  binary
cgcggaggggcacaccaggcgggtgttggggaggacgcagagggctggggctggagcccaggcggggcagggggcggggcggagctgggtccgaggccggcgggggcgcctccatcccacgccctcctcccccgcgcgcccgcccgctctcgggtgactccgcaacctgtcgctcaggttcctcctctcccggccccgccccggcccggccccgccgagcgtcccacccgcccgcgggagacctggcgccccggccgaggcgcgaacagacggacgcaccggcgagcgccgaggggacaggccgagcgcggggcgccggaggcaggtgagcgctgcggacacgggggagcgcgcccgcccgggcctcagtttacccggtggcgatgggacgcggggcttctggttcaggacaccgggacgaacgcggcgtcgcagggcgcggggcacttggagggcggccgggccgagggcgcggggcaaggggctgggggcctggtcgagtccccacctctcctggacgggtcctgctgcagcccggcctgcccccgtcggtcctgggcggcggccggcgagcaaggatatttttaagccagcgatgggtgactcacctgccccgtcctgcccactcccagctctggggcttggtgggggcaatccctgcgtccggagagc

SEQ ID NO: 14552 - DNA, 96 bp, Homo sapiens
  chr11:73358566-73358662
  hyper
cgcctcgggtcagcatctcttcacgtcactccccctccctggggtgggcaggtccggagggcggggcccgggggcagctgggctctcaggcgctgc

SEQ ID NO: 14553 - DNA, 149 bp, Homo sapiens
  chr11:7694738-7694887
  binary
cggaatccgagccggcccgccccactccccgcccttcgcggtcccgcccacgacctctccccacgcctcccgctccggcccccaacctcccggtcggacgttcgttcccggctctagccggcctccgcgcctctggcctctttccttcc

SEQ ID NO: 14554 - DNA, 164 bp, Homo sapiens
  chr11:7695108-7695272
  binary
ggaccccgcaggctgggaccccggcggctggcccgctccccgagaagggccgtggtcggggggctctcactcacgagccgctggctctgggtcagccctgcccccagggcagcgctccatcatgaggctggcggggcgctgagccgtggcgtcctcgctcctgc

SEQ ID NO: 14555 - DNA, 240 bp, Homo sapiens; identical to SEQ ID NO: 11020
  chr11:86382607-86382847
  hyper

SEQ ID NO: 14556 - DNA, 63 bp, Homo sapiens; identical to SEQ ID NO: 11021
  chr11:86383105-86383168
  hyper

SEQ ID NO: 14557 - DNA, 374 bp, Homo sapiens
  chr12:104322593-104322967
  hyper
cgcacactaaatacgggaagttgtaaaagactgtgacagactgtcactaaaaaacttgtcttcaggaattcggacgattatctgaaaagatattcaaagttcaattttgttggaggaagcaataaggaagtggggtgtctatgtcagagacgggcgcgggtatgcgagggggtaacgtatagagtaggttaaagagacgtagaaaatatttccaaaggcacaagtttagcatgagggacttccctcacaggaaagacacctggtgttttatatgtccttctgagcacagacagggtatttctatgaagttacaaagctgcaatcccgttctcatgtgcagcaccacaggttttgctttcaaatatctgcaggtg

SEQ ID NO: 14558 - DNA, 226 bp, Homo sapiens
  chr12:104323141-104323367
  binary
ggtcgggaaggtcccaaccacgttcttctgtaaaccagataaggaaggcctggggattccggccgcggaaaggcacagaggaggtgaacgctccggctgcccaagtgacgcacttgtaggcggattcggaaactcgtgctcttgagccggaggcggagcccccagactcagaccgaccccccagaaccgggcggccttgcccgaggcatgaaggctttctaggccc

SEQ ID NO: 14559 - DNA, 508 bp, Homo sapiens; identical to SEQ ID NO: 6805
  chr12:112204412-112204920
  hyper

SEQ ID NO: 14560 - DNA, 186 bp, Homo sapiens; identical to SEQ ID NO: 6806
  chr12:112204992-112205178
  hyper

SEQ ID NO: 14561 - DNA, 58 bp, Homo sapiens; identical to SEQ ID NO: 7864
  chr12:116946548-116946606
  hyper

SEQ ID NO: 14562 - DNA, 161 bp, Homo sapiens; identical to SEQ ID NO: 12202
  chr12:117316504-117316665
  hyper

SEQ ID NO: 14563 - DNA, 551 bp, Homo sapiens
  chr12:123258823-123259374
  binary
cggcgcagcagcctttattgacttcttcattctctgggtagtggtgaacagccggttctttcaggccttccagcgccggagcctcgggcgtgggcaaaaagcgtccatacgcagcctgagccacttgggagcccccagtttccgaggcagaagaacagtgcccaccagcgcagcggggctgcggcccggaaaccctggcggggagccccgagccccggcgggcgcacgccgcgtgggcaccaggcaggcggttggagtacggggcgggggtcggccgagggcgcggggccccggggctccgggctcgcccccgccgctcggggcaggcgcgccgatggcgtttctgaggtgacgccgcccacaccgggcttctccgggggcggaggaaacacctatgaaccctccggcagccttccttgccgggcgccaggtaagcagcggttccgggcgcggcggggcgccgcgggaacggtgcacattggtcgaaatctattgcttctcaagaacggtgtctacttaaaatgtgaaacaggccgggcgcggtggctcac

SEQ ID NO: 14564 - DNA, 90 bp, Homo sapiens
  chr12:123321244-123321334
  hyper
cgtttgtggcggctatttgcaagttccgtcccacttgtccttgcagagagctatgacttctgcggttgccttcacatctagttagcacac

SEQ ID NO: 14565 - DNA, 723 bp, Homo sapiens
  chr12:124850157-124850880
  hypo
cggtgatgcctgcttaggctgcccatggcgcacagacgggggccagacgaggaaggtcaccctgacttctgcatgcacctccaccgcccccaccgccagcccactctcctccctcccctccctccacctgtccagaccctgcttgatctcccaggaccacctaaagcctctcctttggccactgccatgcctcactccctggacctgggcccagctgtgctctccccgccatcctcaaggtacagacaaggtaccctgacccaggtccaaacacagatggtatcacctgtcccaacattctccacctgcggcttcaactgccgccacccctatgtccctccccacaggtttacctaccaccatccgtttcaaccagctcgcacttgcaagctgaaatttaaaagagaatgctgcagccactttggaaagcagtcggtgagccctcattgccctaaacccagcactgccactcctaggcacacaccaggcaaatgagagcaaatgtctatgcagaaacctgcacgtgcccaccactgcagcaccgcccagcgcacaacagccagaaggcagagacaacccgacatccaccaagagacgaatgaggagacaaagcgtgccctgtccgcacgatggaacacatggccatcaaaaggcatgaggctctgacacgggctatgacgtgggtggaccctgaagacacgatgcgcgtgaaacaagctagtc

SEQ ID NO: 14566 - DNA, 565 bp, Homo sapiens
  chr12:12502899-12503464
  binary
cgggtgtgggtgaaggagcctcggcccctggaaaggaggggaccgactctctccgcaggtagcgacgtcgcctgcggccggtcgggggtgggtattggggagacccctttacctggcgtcgagaggaccccggcgcccctgctgccatccaggtgcgaggacagctctgtcgcgcccgcgggaaggaccggcgaatccgcgcgggggtctcggcgaggaccgcagcggatgctccgcagctcccgcaccggcctggcgggttttgtggttagcaagttcctgcttccgtcgcagcgacggcaagtttgccgcgggggaagggcacgttcctgccctgcaacccggagctgcttcccggcaacattagcgcgtccctccccgcggaggctccgggctcccggccccagcgctgagccccgcagggaggtggctccccccaccgccccgcgctcccccccagctcagccacaccgctgaccccgggctgggcgcgctgcgagggggagtgcgtgcctccctgctggtggcccgagggtctgcaggtgagccttgcctcgcggcccgc

SEQ ID NO: 14567 - DNA, 133 bp, Homo sapiens
  chr12:125477548-125477681
  hyper
cgcaggtggcgctggtacttcctggcactaagatcgattggcgggaccgggacttcgcggcttagcccctccattttcaagttccccgccaaaccctcccctcttggttgtacccatttctgatgatcatcgc

SEQ ID NO: 14568 - DNA, 150 bp, Homo sapiens
  chr12:125500633-125500783
  hypo
cggcagcggatccacgagccctgaatgcctgcattcatcaggggagcagctggcgcgttctggaggcgaaacgagcttgcttccgtgtcgaagcttttctagttctgtttgatgcgtaagcttcaaggcatccgaagccctttggaattc

SEQ ID NO: 14569 - DNA, 230 bp, Homo sapiens; identical to SEQ ID NO: 12208
  chr12:129189650-129189880
  hypo

SEQ ID NO: 14570 - DNA, 206 bp, Homo sapiens; identical to SEQ ID NO: 12209
  chr12:129189909-129190115
  hypo

SEQ ID NO: 14571 - DNA, 63 bp, Homo sapiens; identical to SEQ ID NO: 12210
  chr12:129190144-129190207
  hypo

SEQ ID NO: 14572 - DNA, 267 bp, Homo sapiens
  chr12:132241778-132242045
  hypo
cgttcagctggtgttgcgagaggaacgggaagctctgaggcaggggtgcagccctaggcaggagccccgtggtgcgagctgcccggccccgtgttgagatgcggtaggtggtcagcagtgacttcgggggtggctggtgaaggagccttggccagcttgccccggtgcaccctgtcggggaggggccagcacatctgacaggctttaggtcagcggaataactttatccagtctggtgactttgtgatgcggttaagccactggagc

SEQ ID NO: 14573 - DNA, 325 bp, Homo sapiens
  chr12:132247422-132247747
  hypo
cgtaagccactgcacccggccaattttttttttcttatggaaaatctcaaacatgtacgaaaacagaatatcacataatgaccactcacgccccacacacgtgctcatcatctggcttcagctgccggccctgctgctttttattttgatgttataaaatactgctgtcccggtatcagtatctttgtgtgtgccctgtcccctgaggcagttgttgatgaaaagtggttatatttcagagggtctgggctatcacatgcttaactgtctacttcacatcacacgcgggtttggagccataaaatgctaaagcggaaggacctcc

SEQ ID NO: 14574 - DNA, 311 bp, Homo sapiens
  chr12:132270193-132270504
  hypo
cgcgggtctcagggtccttggccgcgtgtggattatgtcaccacaggagagggacgagtcctttccaggcacatgaggaggaggaatcagtgttaatgggtggctttgcatctgtgaaatcgcataaacttaagttagctgaagctgtcgtgagactggcatttccaaattggattgaaggtttcaggcttcatgccagcgcaccacagcctgttcctgagtatctgtgctgagaggctgtaagattagtgtgaacaggagaaatttccaggtaggcctctagcttcattaccgttgggtttcttactgcc

SEQ ID NO: 14575 - DNA, 345 bp, Homo sapiens
  chr12:1639977-1640322
  binary
ccgggccccgccggccgccccctgcgcccccgcgggccgcgcctcgcccgccgacccagcgcagccgggcgcaggaagagccgggccgggccgagcggcgcccggagcccgcgggcctgacacgcggcgggacatgcaggtaagcgccggccctcgcccccggggacggccccgccgccgccgccgccgccccggctgccgaacctcgcgcggctcctccgccttcccggccccgcggccgcgctgggtgtccgccgggtgggtctgcgcgccgcgggcgtcgggtcggggcgggccggggtcaggtcgggggaagggagtcgccccgggccggggcggcgaaca

SEQ ID NO: 14576 - DNA, 273 bp, Homo sapiens
  chr12:1640476-1640749
  binary
ccccatctgggttactttacccgccggacgcgggtgggagcctgcgtttctgcccggaccgcgcaggtagagcccgagcgccgctcggctttgtgcttctccggtcgctccggcgctccacgtccccgccgtgggagaggcgggacgagacctcctccttcactttcttggagcctcggtggacgcgtagcccgcgctccagtcggagccgaacccccgggtatttgctgcagaccgctgggagaggcagttcggtttgcggggagcctgccc

SEQ ID NO: 14577 - DNA, 335 bp, Homo sapiens
  chr12:46766939-46767274
  hyper
cgggggacacatcaaggcttttgggggacaccaccctcccaccaaacactttcttgattgttatttttgtgatttacagtgaagttttgtctcacaaacttgggccaaggcagcaaggttgtcctgatggtttgttgttctttcttttccacctagacctgctttcactcttcaaaactagccggaggtcggcgagcagctccttttcgggatgtgctttttgtacggccatggaaactggactagcggaaaggctaccttttggccagcaagccaggccccttagaaagaggccccagtggggagcccggcgctcctaaggccgtttgggagtc

SEQ ID NO: 14578 - DNA, 215 bp, Homo sapiens
  chr12:48299205-48299420
  binary
cgtcgtccgcgggacgctggggggcgcctgccgactggcaccggcggctagctccgcacgaatgggaaatcccgggctccgctcgccaacctgttactgctgcagaacgccaggaagctcagcctgatcccacagattagggtaaaatatcccggggggccgaagtggaaaccggagttgcgtcattgctcccacccgatatcaccttggcagcg

SEQ ID NO: 14579 - DNA, 42 bp, Homo sapiens
  chr12:48299465-48299507
  binary
ggagctgagtctcagcttccctggtccctggtcccgagttcc

SEQ ID NO: 14580 - DNA, 176 bp, Homo sapiens; identical to SEQ ID NO: 12244
  chr12:48398744-48398920
  hyper

SEQ ID NO: 14581 - DNA, 61 bp, Homo sapiens; identical to SEQ ID NO: 7901
  chr12:49392537-49392598
  hyper

SEQ ID NO: 14582 - DNA, 295 bp, Homo sapiens; identical to SEQ ID NO: 7902
  chr12:49392636-49392931
  hyper

SEQ ID NO: 14583 - DNA, 78 bp, Homo sapiens
  chr12:49487994-49488072
  binary
cggtcatcaggcggtcggctccactgttctcctcatccttgaagatgatgtcggggttgtagttgggcacgaggtccc

SEQ ID NO: 14584 - DNA, 78 bp, Homo sapiens
  chr12:49488131-49488209
  binary
cgctctggcacgccgggcacaaattgcttgtagagtagcggcacgagctgcttgcgcgcatagcggcgccggccaacc

SEQ ID NO: 14585 - DNA, 145 bp, Homo sapiens; identical to SEQ ID NO: 7903
  chr12:49735822-49735967
  hyper

SEQ ID NO: 14586 - DNA, 710 bp, Homo sapiens; identical to SEQ ID NO: 7904
  chr12:49736083-49736793
  hyper

SEQ ID NO: 14587 - DNA, 336 bp, Homo sapiens; identical to SEQ ID NO: 7905
  chr12:49736828-49737164
  hyper

SEQ ID NO: 14588 - DNA, 1388 bp, Homo sapiens
  chr12:49738834-49740222
  hyper
cgagccttagagggatcgatgcggcccgggggccccgcccggggtcgatattcctgattgggaagcggccgcttcgcggagcccgcgtgtaaatcacctgggctgggggagggggcgtggggagcctaccacgtcccaggctcgcgaagccaggaggggtcgggacccgggcggtaccggagggcgacggaatgagaacgacaggccttagagaaccagagagaagcccgcccagggcctccccctcccccgctcagccctgccaactcccccagcaggctccagtctcgcttcagcggccgccacccttcgttgcccctggagccgccggggaggccagtgtcggagccagccatgcggcggctcctctctggccgctcccgcggggccggggcttcggcggctgctgtcacggagccgacaggccgggccggccgggaaggggcgggtggcgggggggagaggcggcggggtgaggctggctcagcgctggcactcagtgggcgcgcaacgtatgtttgccgaattgaaaggctgggacaccgagcggcgcagggcagagggtcggagggcacaggcggggtaggagatggcccagaccgggtgagggcagaagcctcactcacgggggaagaaggcactcgaggtcgctctgaggaccgctgggctgggatagaccacccatcccccgccggggagacccgggtagtaaagaacaagacagaatgggacaggcaggacggtttggaccccacctacaagcgcctccaccaccccagcctccgatccttgtcacgctctgctggggaaaccgaggcagccgatgctgagaatagccaaaaagttaaaagcggggtcagcgacgaagctggggcagcaaccagaattcctgcgtgggttttttggattcctccgcccacgcggggccagtttgcgggtaaatgcaccaccgcgccccgcaccacagctcagaccctttcctctcgctgcagtttgtcagatccccccacctcccactctgcaccagtttatagaacaacaatttggggaaaacaatccgggcggagtgacggccccgtaattgtgacaaagtgagtgcgggcggctggagagagcgctaggccgggagcgctgcagggcgaggcggaggcaggggcgcctccccccgccctgccgccccctcgttcttattccggtcacctcccatccctctccttgactcttcaattcctcttctcccggccccttgcgccttccttcgcttgttcctccatcgctcttccctttcctcccggtaacagctcttctcccgctcccccgaccccgtcgcccctcccccggtgcgctttttcctcgctcacttctcccctctcctctgccctccactc

SEQ ID NO: 14589 - DNA, 660 bp, Homo sapiens
  chr12:51785160-51785820
  hyper
cgcgaccagcagagagcgaaggcaggagggaccagcctggcccagccccttcattttactgtcgggggtagtgaggaggaagaggaagaggcgaaggctggcggaggaggaggtgagagcgaggactcggcagaagcgagatccgccgaagggaagtccgagcagtcggggagctcaggggggccctcccggggagagggtcgcgggctccttctgccgcttacctgtcgcgccgaggcaaagccgcagccgcgccgcggggtggctcccgggtttccccaccggacggccgggagggtgggaccggggcgggacctcccccagctgcactaacgcgcccgccccgcccctccctggccaggtgcagcgggtcccgccgtgtcctcagcctgctgcgggcccgggaactcccggcggaccggcagaggggcgccccggcttctctgcgtctcagcccgccccgggggtgcggtctttgcggccaggctttcagcgcggaaaaagattggagggtcctagtcaccccaaagaggacaggcattagcagagccgcgggcggcgggtgcatggaaccggaatgtgctgcgcgccagcctggagcgctcggagcccggaggcctgccccggagggggaaacgcggcggggcggccatgggcccc

SEQ ID NO: 14590 - DNA, 122 bp, Homo sapiens; identical to SEQ ID NO: 7908
  chr12:54088960-54089082
  hyper

SEQ ID NO: 14591 - DNA, 321 bp, Homo sapiens
  chr12:54389321-54389642
  hyper
acaaaagatcaggtaacaaggcgctcagggccactggggctccgggcagggcagggagcggctctagctctggggcggctccccctccagccactcccaggctggaaaaccagaccgcgttgggggagccggaaatagccccgcttgctgcggagcgtcagggcgggggcgccggcgggaatgcaggcccggcaggccgtggctttgagagagccacgttcacaggccctggggatttcactcctgctgggcctcgggacctgactcctggtgtgtagggatcccagatacccaccttgggtgggggcaggacgcgggttt

SEQ ID NO: 14592 - DNA, 300 bp, Homo sapiens
  chr12:58026315-58026615
  hyper
agcatcacctgggccggggtgggctgcggagggcggctccacacctagcctgtcaggaaaaaatgcagaatcatgcccgtgctggcgggcgcccccggcggaggtgacccgatgagtggcctcggcaagcggcgcgggggacagagtggaccgggaagcgcgcctcctcccgcctcctcccgcctcctcctcctcccctcaccaaccaatcccacccccacccacccccgggcactgacctgtctaacgctctaaggcagcggcaaaatttcggtccgggctgtgccgggctctcgcccc

SEQ ID NO: 14593 - DNA, 55 bp, Homo sapiens
  chr12:59989999-59990054
  binary
cgccagagaccagataaagtaagtacagctggggagggaggggagaggaggagga

SEQ ID NO: 14594 - DNA, 405 bp, Homo sapiens
  chr12:59990544-59990949
  hyper
cagatgatcaggacaggaagaggctgtgaggggaagacgaaataccgggggatgggggggttgtctttcttcatttttggtccccaggaaggatggcaggggtggaagcagatggaaaactatatgcgggcgaggcctgagcccaggcagaaagggacctctgacttggcaagggttcaggagggcctgagccttctggtcttgctgggccactgcaccacattgggggcgccaggcccggtcaggtggcgccacaggctgcgagcccgctcacgtgcgaactgcctgttttctcagcggatgctgcatcgcggcgcccttctccacccccttttctcctctacttccgcgaaaaggattgcagactgccttggaaagggcggtcgtgcccagtgccactttccc

SEQ ID NO: 14595 - DNA, 526 bp, Homo sapiens
  chr12:6419603-6420129
  hyper
cgcctcgcgggggtctggcccggagtggagggcgcgcggtcccagccctcccgctcggccggcgggtgtcgagttcaggtgcgaccgaaaaggggaaaggagggcaccgccacgtgagctgtcctctccggggaaggcggtggctgcgtgagggcgggggctgctcggtccccagggccccgcccctctgcccctctgccccgagcggtgctggcggtagggaggggccagcccggtccccgccctcctcgcccggacccgcgctgcccggctcccgcgggccgctcgatcccagtcccaggctgggcatcggggctggctggcatcgccggggagccgacggcgacggggagccccgcgggcggggagggcggcgcagggcagcgggtgcggtgacacctgtgggcacaggtgagcggcgggagggctacgcggcccgggggcggggcggccgggacccggggcctggaagccggggcgaaggggaaggaaggcctggcctcccgaaggcgggaggaggggagcc

SEQ ID NO: 14596 - DNA, 265 bp, Homo sapiens
  chr12:93966037-93966302
  binary
cgggctgcgccaggtgtgagaccggaatgccaatttggggaatctctcctgttctttcctttttaattttttctacttgtccttgacaagggcctattcccactggatctgcaggtgactatttgctcttcctaggtcgccagtctttgatttcagctagtgaccctgggcgggaagacaccctgttcaccctcctcctgacctccgccccccacctcttcagccaactttatcttggatctctgctctctttatcttttctcta

SEQ ID NO: 14597 - DNA, 66 bp, Homo sapiens
  chr12:93967274-93967340
  hyper
cgagggcggctgcccgggcgtcgagagtaggctgcgaagcccccgccgagcgcggcttccatggtc

SEQ ID NO: 14598 - DNA, 74 bp, Homo sapiens
  chr12:96184964-96185038
  binary
cgcgaaacaggctagcgcctacttcccacatcccccagcgaaacaagccctccctcctcctccagccaccccct

SEQ ID NO: 14599 - DNA, 222 bp, Homo sapiens
  chr12:96185121-96185343
  binary
ggcgttcgccgcttctctgctgccttttgcgggggtagggggatgtctcggctaaacaatcgctgcctacatgatccgaaggtgtgcccactttggtgtaagaggtattgcctaactcaaactcaaggtgctgaaagaaaagggtcacaggattagctagtcggcagtgtaagaacatcgttgtccagaggcagggcaagggcacgacaaagggaactcttc

SEQ ID NO: 14600 - DNA, 262 bp, Homo sapiens
  chr13:20702234-20702496
  hyper
cggggtggccaggccttgtttagagtagctccagcgtttgaatcgcgcaggcacaagaaggccgtctcctcaccgcgggccagcggggccggccagggcccgggcggagggggagcccgggttccgcggtcgggttgtggggccggcgctgacctcaccgcatgggcccctgcggccgccgtggcttctcacgcggcctgactttggactcgagtgcaggctcttagctgaatctctgtgtagacagggtgggtgggactcc

SEQ ID NO: 14601 - DNA, 254 bp, Homo sapiens
  chr13:20702531-20702785
  hyper
cgcaggcctgtcagcggggcgcttcccgtcgattccaggagcgcccgcgtctctgctcagcgccacgagtccaagcgtgggggaggacgagactttcaaggcggggggtgacagtgccatccagcccagaatacccacccccagtggcgggctgccgtgcccaggccctgatccctgcccctgcaaacatcactttctatcgcccacggggctctgcagatgtggccaggctaagggtccagagttagggagat

SEQ ID NO: 14602 - DNA, 208 bp, Homo sapiens
  chr13:20702913-20703121
  hyper
ccaggtggcgccgattccggacgcccagaactctgtgggaatgcagctgtactgtgcggcgtgtaaaccaccgcatctgtgggattttgttaaagcagccacgggaccactccaccccctccagctgtggtcctttacccggcggcggccacctggcagcagcccggttccccatcctgcggggttcctcccgcccgcagaccggctc

SEQ ID NO: 14603 - DNA, 675 bp, Homo sapiens
  chr13:20767087-20767762
  hyper
cgccgtggcgccttttaaccgcaccccacaccccgcctcttccctcggagactgggaaagttacggagggggcggcgccgcgggcggagcgcgcccggcctctgggtcctcagagcttcccgggtccgcgaacccccgaccgcccccgaaagccccgaaccccccaagtccccttcgaggtcccgatctcctagttcctttgagcccccatgagttccccaagtgcccccagcgccctgagtctcccccggttaccccgagcgccgcctcccccagccccttggcggcccgggtgaagcgggggcggctgagagtcgggaccccccaggaagcggcgccccagaccccggctccggcgctgtgccgtgggcggggttcagggatggctgtggtcgttgtcctctgtactccgcatagtgcgagaggacttggcatttatgagcgcttctttaattttttattgttagagaaacaggcattcctccaaggactgaagatctgttcgagtcgcggaggctgcgcgggcccgcgaggctctcgcagggggacctaggctgggtggcggggcagtgccctctggaatgggggttaacggtggccgaggagggggcgccgctggtgccggcgaagtccccgcttctttctcccctcaaaatctcaccaatccgaacgaac

SEQ ID NO: 14604 - DNA, 81 bp, Homo sapiens
  chr13:20767827-20767908
  hyper
cggtgggagagacaagcctcgtttttgccatggccggcaggggggtcccgccatctgcggagggtgccccccgcggccccc

SEQ ID NO: 14605 - DNA, 40 bp, Homo sapiens
  chr13:28152529-28152569
  hypo
cgagaagccgcaaacagtcgtagtaatcatattctgcgcc

SEQ ID NO: 14606 - DNA, 178 bp, Homo sapiens
  chr13:33000891-33001069
  binary
cgtgccagacaatgtgcttggcagggtaagacatggctcctaccttcaagaaacttacagaaggataagaaaaaccatgtgcaaaaaagtaagcacagtcacgtaggtataaacaggaagccaaggagcccagaagaggggcatatactggcggggtgggatagctgcccggtcttaa

SEQ ID NO: 14607 - DNA, 204 bp, Homo sapiens
  chr13:33001228-33001432
  binary
aggtggccacaggcacaagcccgcgtaattcccagaggttgggtaccggagggccgcttacgcaattcgcaagtgaacgaatttgggcgcccatggcgaggctctgtcagtgacggtcggtggtggcgccgccagccagccccccgcccccgtgcacctgtgcgccttcgcagctgccaaagcaaacgcaggctccccgacttc

SEQ ID NO: 14608 - DNA, 244 bp, Homo sapiens
  chr13:39261446-39261690
  hyper
tcaggctgacctgtccaagcccgaacaccgggaccatgcactcagccgggactcccgggttatcctcgcgccggacaggcaactccaccagctttcaaccaggaccgccaccgccgccccggctgctgctgctgctgctgcttctcctgtcactggtaagccgcgtcccggcacagcccgctgccttcggcagggcgttgctgtcccctggtctcgcgggggctgcaggggtccctgctgagga

SEQ ID NO: 14609 - DNA, 480 bp, Homo sapiens
  chr13:42032017-42032497
  binary
cggtcttcccgcgcgggcggctgcagcctcctttccggcccgggctggcccccatgtcccaccttccctccaccaccagctccgcgcgcgcccggggttggggggagcggcggggacaggtaaccggcagcgcctggggaggaatctggccgcgccaagtcgctgggtgaccctgggcctggcgaaggctcagttttcttgtctgtaaaacggacttggtaatagaacgcacttcgggggtggtggagaagattacaaggtaacagcgactgcgtggctgtcacttggcagaggcgccaagtgtcagttatcttcgggaaccgtggcggcccctcctggccctgggaggtggtcccgctgcccccctgacttccgtgcactgagcccctggccctgcccgcagccccggccctggactcggcggccgcggaggacctgtcggacgcgctgtgcgagtttgacgcggtgctggccgacttc

SEQ ID NO: 14610 - DNA, 109 bp, Homo sapiens
  chr13:42032649-42032758
  binary
cccaggacctgccccgcgaaggctgcggcctcagttttcttatcagtaaactgaggaatggtttcctgaagctcaacgcagtaggccgagtggtggcggggcccctgac

SEQ ID NO: 14611 - DNA, 83 bp, Homo sapiens
  chr13:45953018-45953101
  hypo
cgtaggacattggcctcatccagggccccagagtttcggttaaaagtccagctgccatcttttctctatctgacgcgttcaac

SEQ ID NO: 14612 - DNA, 139 bp, Homo sapiens
  chr13:50265737-50265876
  hyper
cgaggattccgtgcccgcctcgcaccctggccagcctgctgagtccggtggttttgccaggtgccgcccatggaggttccgtagaaggaacgtgctcaccaacttgcgcaaccgcctcgaccaaacctgttcccaaacc

SEQ ID NO: 14613 - DNA, 61 bp, Homo sapiens
  chr13:73809567-73809628
  hypo
cgacggtgcggccggtcacaagcatgcgtccctttggcaggcaatcgctcgtctccacgac

SEQ ID NO: 14614 - DNA, 148 bp, Homo sapiens; identical to SEQ ID NO: 6875
  chr13:95201113-95201261
  hyper

SEQ ID NO: 14615 - DNA, 288 bp, Homo sapiens; identical to SEQ ID NO: 6876
  chr13:95201339-95201627
  binary

SEQ ID NO: 14616 - DNA, 230 bp, Homo sapiens; identical to SEQ ID NO: 6877
  chr13:95201662-95201892
  binary

SEQ ID NO: 14617 - DNA, 302 bp, Homo sapiens
  chr13:95202013-95202315
  hyper
cgctttgcgtccaactggcttgcttgtcttttcctggtgatcatgtacagcatttcttccttgtcctgttaaacggtgtcgtcggaattcttccacctccctccttctacgctgccactgggcgctgcacacgcgccttactttcttagattgctctcggcgcgcgcagcccgcacggtccaggagctgggtccaggcccccgatggcggctcctcgggatgctggttccgtcctcccagggccggtccccgcgagatccgaagcagcggggtcgcctcggggagctcctgcccaggcctgg

SEQ ID NO: 14618 - DNA, 267 bp, Homo sapiens
  chr13:95202344-95202611
  hyper
tgtgactatccacattcgtcaccttgctccccgaaaagttccaggccccaggtgaggagccgtgtaggcccaatacgattggatgaaggagtgtacggggcaggaatcgtcagactggcctctggagaggagtttgcagcctctccgtgctccgggcccgggaaatgtccaccttaatcatcacctctttgcatggagcctgactggcaaataaatgctgggtgagctcactaacgatgattattcagtcaatgctatttcccacac

SEQ ID NO: 14619 - DNA, 131 bp, Homo sapiens
  chr14:102375780-102375911
  hypo
cgcggaatgagcaggccttgcattttagaccttagggatcctgtgcgatgtgggactgttggaatatggagcagcctgagagtggagaggcgagggctcagcaggaatgcgtgctcccaggctcaccgtgc

SEQ ID NO: 14620 - DNA, 63 bp, Homo sapiens
  chr14:103394621-103394684
  binary
cgaggaccccgggcctgagctcgcccgggctccttccgtgcacagggtctcggcttctcgtcc

SEQ ID NO: 14621 - DNA, 239 bp, Homo sapiens
  chr14:103433869-103434108
  hypo
cgtgaatgcactcacgcaagcctagacggtgcggctgccgcacaccaggccctgtggtacagcctgtcaattccaggccccaagcctgcataccatgttgctgtgcgggacgctgccggcggctgtagcacaatgctaagtatctgtgtatctcaacacagaagaggtagagtaaagtacagtattatgatcgtacgggacgcctgttgtacacacagtctatcattgatggaagcatc

SEQ ID NO: 14622 - DNA, 465 bp, Homo sapiens
  chr14:105330476-105330941
  hyper
cgccatactcaagggcgcctcttgactccctctgaactcgcaatcccgccccagggtccggcacaagggctctgctggggctgagatccgtgaaggcagatgcggagaggcgccgctggattgcgagcaggcccaggtgcggggccaggtgggcgttgtcgcagccgggaacgcccagccgctccagctgcccacaggacaaagcccagggttccccggccgggcgcacgccttccacattctccctcacctccacgccttcgctcactgcgttccccaacacctggaatgcagcaatgcccttcgggcacgctgccccgcccccacgttgatcccgtcccctagcttggctccagggacaccggatacgcctattgtagcacccggcaaggagcgagcagtccgcgggaacttacccaggaaccccgagcgcctccgtagttcccaaccccacccccacccctc

SEQ ID NO: 14623 - DNA, 455 bp, Homo sapiens
  chr14:105330980-105331435
  binary
cgtcgatgcccaccaccatcgcccccagctcagcccagagcgcccggggtcagaggtggagatgtcggacatacgcccagtctggccaggctcgggagggaaaatctgggagcggcctctggaactcaccctgactccttcaccgtccgctcctctttttggcttccggggccaaaggttggggactcgaggcgcggctggagcctacagctcctggagcgtagttaagcgttaacccgctggccctgggccagggcgcggggctgctgtgcgcacccggttccgcccgtcgagctggggccggaccgggaggcgaagcggggggcgctgccgagacgggagggcatggggtctgcgccgggtgcgagatgagccggggaggccagcggggcctgggcggtgggggaaggtgggcctggggcaggggcgggatggcggctcgccaagcctctgcc

SEQ ID NO: 14624 - DNA, 586 bp, Homo sapiens
  chr14:50469917-50470503
  hyper
cgtgtccctgcttgtgtcaacatagaaaacgcccatggcaacgggcaagtgcggcctgaaatggcagagtgtgtgtttcacaaaacaggggtggctcacggctgcagccgcccggggaggtcctggccttgccttcgaggggctggtcctcggggggtggatgcagctttgcggggctggctccacgtcgcgccgcggcggtttgggctggggagcagccctgcagggaggcgccgccgggtgggccgcggagatagctgcagggcggggcccccgggggcgcggggacgcccagcggccggatatcagctgccacgcccgcgtgggcggagaaaagagcaatttgactttggacggagagctgagatgcggggaggaaatccaccaccggcctctggcgactcctgtcctgcgcgcaggggaggcagcgcagcccgtgaacacccccgagcccggtgcgggccgagcagttctccgcacctccggtaaaggtgcaggaccgggtgatggtctctgcagcagtcagaaggctcctctcccagcccaggaacgtctgcaataaattgcttccatgtgcgggcttccc

SEQ ID NO: 14625 - DNA, 435 bp, Homo sapiens
  chr14:51027134-51027569
  hyper
gacgggccgtagccgagccgctccctgtttgggcggaggaaccatggccgagcggtacccgcgtcaccgaatcgcgctgtcggggtgagggctgcagcttcgcgcaggccgggcctccagctccttcttccccacccccctcccgcctcctcccagcatttggacagcacccaccaggcgcctccggggacttgtgggttccgccttagcgatcggttgggaggaaggctatgggggtgggcagggggctgttgttactcggccccagaggggcgaggggtcggggatctagagcaggccaagccccaacccccctccccgggagccgccaactcgctggctctgcagggcgcgggctcccggcggcgggcggcgggcggcgcgctggaacaatgaggcggagcgcgccgggtcccggacggacggtagcagacc

SEQ ID NO: 14626 - DNA, 62 bp, Homo sapiens; identical to SEQ ID NO: 7961
  chr14:60794412-60794474
  hyper

SEQ ID NO: 14627 - DNA, 133 bp, Homo sapiens; identical to SEQ ID NO: 11108
  chr14:61116736-61116869
  hyper

SEQ ID NO: 14628 - DNA, 186 bp, Homo sapiens; identical to SEQ ID NO: 11109
  chr14:61117028-61117214
  hyper

SEQ ID NO: 14629 - DNA, 355 bp, Homo sapiens
  chr14:61123186-61123541
  binary
cggtgcatacccaagccgtgggatctgtttttgcattctcacacgagcatattgctcgggttctaaaggatccagattttcgcagacagaagctcgaccgcctctgttcccaaaagggccgagcggcgtttgtctgaatcaccagtcctctgagcagtgggaaaagagatactgggtagagggtgctgggaaggtgcccactcatccatgcccctctgcgcgtctcgcccactcgcttaggcttggactttgcaacaaggtttccaacaccgctgcagtgcttgacaaagccctcctggaagccagcagggtgaggctgccagcaagcaggcgggctgcgagggacgcttttagg

SEQ ID NO: 14630 - DNA, 460 bp, Homo sapiens
  chr14:61123681-61124141
  binary
gcgcgcgcagccaagtatccgcgcgcggacgccggggaggcttcaccgcccggtgtgctggcggccccgcccgctggctcgcagagcggggtctcgcagagctgggcctcacccgtcgccccgccgcctgcaccagaaactccctccccgggctgtgcgggagctcttgggcgccgcgtctgcgccggggccgactccgcccaggcttgtagccagaggtcgcgctatctcgccgggctggcccggcgctctctggggttgttccctcgggcggtgcatggggcccacaggcgtcggggcttgagggaagaggggccggggcctgaagggcggggaccacaacgaggcgcggggaggtcagtggagcggagagccggcgcaggccggcggcggcgcggccggaggagaaagagggcgctgtcttcctggcaaaggagttttcgcctggccggcaggaacc

SEQ ID NO: 14631 - DNA, 655 bp, Homo sapiens
  chr14:61188627-61189282
  hyper
tttggttaccgcgagggccggatagggcaccaagcctccctcccagccttgggcgaggaacgccggagcccgagccgtcggacccccacaggggcccagaagcggcaagggcgggctgagaccggctctggaatgcgctggtgatcaccttcacctggcgcaggcgggctggatccccggctcccagtttgcttccccgagaagaaccttcgagctgcttttggattctttctctcctatccccgcggggctggagacaccaggtctttaggcgaccttctccttactttgtttcgtccaacaaaacacacagacgcacacaccaagtgtctgactcgggaggacgcacaaaagaggtggaaaatccggtattttttttaccagagggggaaagcagtctgccaggcaaaaagctcaaacccagtggggtgggagcgcccccactcctttgctgccgcccgccgtaagccggcctgccccccacccataactaccgtaccaggagggagccaagcagcgttcgggggccgagggaggaagcagcccttcagccctgctaccccggctgcgctgaaacccgatcctaaggagttcagaatcaggtttcaaaacatgacagagccgagctgcaccagcaccccacgttgccgcggcc

SEQ ID NO: 14632 - DNA, 92 bp, Homo sapiens
  chr14:65016816-65016908
  hyper
gctgggcgcaaggcgggccctgctgcccccaaccggcgccgcgcccctcgccctcctccagaggcgggtcgtcgccttcgccccgggctggc

SEQ ID NO: 14633 - DNA, 493 bp, Homo sapiens
  chr14:75517730-75518223
  hyper
cgggtaaacgtttaacaagtattccgattaatgtaaacccaatgatttcctgatgacgcctcccagcgcctgggactgacgggacgcacgggcctggatccagggcacgggggcctgggagggccgcgcgggccgagtccggggcagcgctgccttcccgccaggcccagcccctccctggccagccccgtccttgtccccaaactgggcccgcccggccgccaggccgccgggcctccggggccctcgcgcatccggctccgaaagctgcgcgcagccatcatcagggcccttctggtgttagaagagaccccggcatcatcttttcgtcgcgtgcttcccccagagtcacctggagtcccgcttaacaaattctccgacaccaaccgcctcggacgccgacgcgcgcaccttggatcttgaggctcgtgcgtgcccacgagcatgcgcttcggagggggcgcgccaggccgcgagacaccagtgcgcatgc

SEQ ID NO: 14634 - DNA, 67 bp, Homo sapiens; identical to SEQ ID NO: 13436
  chr14:89657793-89657860
  hypo

SEQ ID NO: 14635 - DNA, 40 bp, Homo sapiens; identical to SEQ ID NO: 6914
  chr14:90849401-90849441
  hyper

SEQ ID NO: 14636 - DNA, 383 bp, Homo sapiens; identical to SEQ ID NO: 6915
  chr14:90849476-90849859
  binary

SEQ ID NO: 14637 - DNA, 54 bp, Homo sapiens; identical to SEQ ID NO: 6916
  chr14:90849897-90849951
  binary

SEQ ID NO: 14638 - DNA, 67 bp, Homo sapiens; identical to SEQ ID NO: 6917
  chr14:90850476-90850543
  hyper

SEQ ID NO: 14639 - DNA, 119 bp, Homo sapiens
  chr14:91883379-91883498
  binary
cgagacaggaggaaaaacttcctcgccacttttctcccgcgttccagagcggaagaaataaaaataaaaaggacttttcaataaatgtctcacgtctcaaatccattgtaaatcagtgc

SEQ ID NO: 14640 - DNA, 405 bp, Homo sapiens
  chr14:91883530-91883935
  binary
cgccccccattccccacccgtcaccgccatccaccggctggtctcagggattcagaaaaactacatgagatatttggttgggaagaatggggtccttttcgggagtggctaaaccccagggacaggagtgaccactgggacccggtccgccccgaggcagccagcctagagccccagcgggaacaggtgtacccgcccggctcctggcccggccgaaagcgcggcggggtcccgcgccggacgcacaacgggggcgccggctccagagttacaaagctccggactccaggacgcggccccaaccccggccgggagccacttgctgcgtccctcgcgccccggagccacccggggccccggccgtgtcgggtctgcggcgtcccgtcgccgggctagagagaagcc

SEQ ID NO: 14641 - DNA, 518 bp, Homo sapiens; identical to SEQ ID NO: 7970
  chr15:101459489-101460007
  binary

SEQ ID NO: 14642 - DNA, 50 bp, Homo sapiens; identical to SEQ ID NO: 7971
  chr15:101460335-101460385
  hyper

SEQ ID NO: 14643 - DNA, 62 bp, Homo sapiens
  chr15:102028780-102028842
  hyper
cgacaacccagcggtgtagacattgccactgactgcaaaggagcttgtcaggggagcgactt

SEQ ID NO: 14644 - DNA, 503 bp, Homo sapiens
  chr15:102028992-102029495
  hyper
aggctcccggccatctacccccgggagccgcggacaccgagggagcgcgagtccccgagacgccgggccacgctcatgtcacccaagcagcggccgcggccgccttggcgcgcgcaccgggtccggagctcgcgccgcccgtcgagggcagaggggccgctcccccgcgggggagagccgggtgggcgcccaggacccagcggcggacggcgcgcgacgcctgaggcagcccagactcccccggagcccggcaggtgtccgcgccgccccggcttctgaggccacacttccgagcgcggggttgggcggcactgccgggggacttgcggtcggcgcgccggacctgcgtgggcgcccacgcgggaccccagtcccccccaccccgccgagtgtcccgcgcgcgcccccccgggcgacacccccccccgcagggcgccccggccgcccgccgtccccaagcggtcccggagccttcccacgcgcgcgcggggccggggccgggc

SEQ ID NO: 14645 - DNA, 276 bp, Homo sapiens
  chr15:28340034-28340310
  hyper
caggaccgacagaggccagggcgcggcgccgggcgtggtcctgacacctgccctgccgggaaggggacggcgttccacgcctgggcccttctccactgcgtacaggagcctgggtcacctgctcggcccaagaaaaggctccaggcctgcgggtgtgaatgagcagcagccaagagagcggtgctgccggcgctcaagctaggccgggtcaccgcctcctgcccaggtccaggcagccccggcctttcccgctggtactggcacgcccgtggccgc

SEQ ID NO: 14646 - DNA, 357 bp, Homo sapiens
  chr15:33445914-33446271
  hypo
cggctggcgactgcgatgacctatccccttgccgctccttgccctgccgcctggagccatgagccccagcctcagctcccgggagggtgagcaagtcggctttgggtacaaactcagcgtgggctgctgggcgaatggcaatcgtctccttacccttagaatgcgttttaactactctttgtacctgggaggacaggtcctgaactttggccaccactttggagacaggtttctgcttgcaagtccgcttagccggcttctccatctcatccttttctgcctctggatgcttctcagggtcctggtgactttcagacaaacctgtttgctgatgctccagcccgctcggcggcctcc

SEQ ID NO: 14647 - DNA, 133 bp, Homo sapiens; identical to SEQ ID NO: 13452
  chr15:37403336-37403469
  hyper

SEQ ID NO: 14648 - DNA, 111 bp, Homo sapiens
  chr15:38857279-38857390
  binary
cgtcgacctccacctcagctcgggaaacgggctgcgcctagcggctcccatgggaccccctttcccgcagccgacccgcagcttccacgcctcttcctgcggccgctgctc

SEQ ID NO: 14649 - DNA, 417 bp, Homo sapiens
  chr15:41136701-41137118
  binary
cggaacccagaggcccgcgctctgaaggtgacccccctggggaggaaggcgatggcccctgcgaggacgatggcccgcgcccgcctcgccccggccggcatccctgccgtcgccttgtggcttctgtgcacgctcggcctccagggcacccaggccgggccaccgcccgcgccccctgggctgcccgcgggagccgactgcctgaacagctttaccgccggggtgcctggcttcgtgctggacaccaacgcctcggtcagcaacggagctaccttcctggagtcccccaccgtgcgccggggctgggactgcgtgcgcgcctgctgcaccacccagaactgcaacttggcgctagtggagctgcagcccgaccgcggggaggacgccatcgccgcctgcttcctcatcaactgcctc

SEQ ID NO: 14650 - DNA, 44 bp, Homo sapiens
  chr15:41137147-41137191
  binary
gcccagggagggcttcatcaactacctcacgagggaagtgtacc

SEQ ID NO: 14651 - DNA, 385 bp, Homo sapiens; identical to SEQ ID NO: 11124
  chr15:41786420-41786805
  hyper

SEQ ID NO: 14652 - DNA, 527 bp, Homo sapiens
  chr15:41804115-41804642
  hyper
cggctcgagactccccgaggcagacgagctggctctccgggctaccctgcgggcagcgggggagggaatcggcggggcccgggagcctcccctcgctgtgctggtgacccggcaccgaggaaagcacgctcccccggcccccaggcagccctcgcccccggcgccggcgccgccccatccccactggctgcgctcactccgggacaggcgtcctctccctgctgccccaccaggatgtacagcgactccccgagaccgagggagaagattgctgagacgaagacgccatgcgcccgcgacaggtggttcttggcgcctttgccgcccgcggctccgtaggctgagatcctgcggggaacggacggtgagtccccggccttcggtgctcaggccggccgctccgggcagaagttggcgacagaggaggctccagaattattttttatctgagggacttggaggctgcaatcgactctgacgggatgggaagggtaggtttgcacaccgaaaaatcagatattacactt

SEQ ID NO: 14653 - DNA, 135 bp, Homo sapiens; identical to SEQ ID NO: 12330
  chr15:41953174-41953309
  hyper

SEQ ID NO: 14654 - DNA, 447 bp, Homo sapiens
  chr15:42873450-42873897
  hyper
cgggatattgggcagatggcaggtggggtctgagccatggaagaactgcgaagatccaacagaaactttctatcataaatgatttgagtttctcctggtgtggtggagaagagcgtcccctcgggcgtggtgcaatagtcaagaggtagctgcgcggcgtcgctgatggccacggtgtgggtggggaaggcgcggctctggctgggctggtggccgctgccagcggaggaggacatggctgtggacgcgggctctgggctttgtgtggcgggtaggcggcggcgccgggccggtctgctccagctcctagggcgggtggaaaagcgagctctgcgcactcctcgctcgcttcctctagttccctcgtctggctccgcccctgccgccagccgatcctcgggcctcgccagcagcctcagcagcagcagcagcggcggcgacgaccac

SEQ ID NO: 14655 - DNA, 171 bp, Homo sapiens
  chr15:43809685-43809856
  hyper
cgtcgtgaaggcaaagaaacagttaagtctccagtgcctcgtcacggaccagcccctcttccccgccctggcgccgccctcctcatcaagcacccccctcccccccccaccgcccgccccactcccaccctaagtgctgcagactcttccctgaagctgccggctgaggcc

SEQ ID NO: 14656 - DNA, 234 bp, Homo sapiens
  chr15:49268662-49268896
  hypo
cggtcagtgtttctatcgagagctgagtcctctggccaggacctacgagcagggggacgccagtacaaattactggagccagccgtccggaaggcgcctatgcacacgtgttgtacagcaatgcgaacttgccctggttggggagaagtagcgggtgggaggtgggcaagtttcttcccagcaactatccgctgtccacactccgctactgcctcttccccagagagagaggcc

SEQ ID NO: 14657 - DNA, 350 bp, Homo sapiens
  chr15:50474768-50475118
  binary
cggcggccggcgcgcaccatcctgcgggcgttcctggagaaagcgcgccagacgccacacaagccttttctgctcttccgcgacgagactctcacctacgcgcaggtggaccggcgcagcaatcaagtggcccgggcgctgcacgaccacctcggcctgcgccagggagactgcgtggcgctccttatgggtaacgagccggcctacgtgtggctgtggctggggctggtgaagctgggctgtgccatggcgtgcctcaattacaacatccgcgcgaagtccctgctgcactgcttccagtgctgcggggcgaaggtgctgctggtgtcgccaggtgagccccgaggatc

SEQ ID NO: 14658 - DNA, 815 bp, Homo sapiens
  chr15:52587420-52588235
  binary
cgaggcgctccagtcccgggagatggggacgcacgcgcgacccctgggcactggggattctaggccccgaggccggagcggcggagggggcggcccctcccacagggtcttcccacccacagggcacccaggcgcagcggagccaggagggggcttacccgcgggcagggacggagcacgccggggccctggaggggcgacgctcgctcgtgtccccggtccccgtggcccctccgcggcgcctccgcggcccccagcgcgcgcccgcccgccctgccgtgtcaggtgcgcaggtgtggcaggtgtggcccgggcgccaggtcgagtcagcgttagcagggccggctcccccacagcgctcccaggagcccagcggaccctcctacctgcgtgtacagctcggccaccgccatgggcaggaggggccggggccaggccggggctgccgaacgtgcgaggctcgggggctgggcctgcgccgcagaggccgggcgcaggagagaccgccgcggaaatcaccgccgggccatcttgcccaaagttttccaacggcctcctgttcccgttcccgagttggcggcgaggggagggggcagcggcgggattggtccctccaagcttggcccggctagtcggcgctgccattggccggggccgggcggctgcacctggcgggagcgcgggtggagaaggttggggcccggggcgcgctgccaggcaggaacagatgcatccggaggctgcccggcccgagtgttagctcctcaaagagcagaggatacgaccatttaaatggaagacccaagggaatcaac

SEQ ID NO: 14659 - DNA, 228 bp, Homo sapiens; identical to SEQ ID NO: 9158
  chr15:53078992-53079220
  hyper

SEQ ID NO: 14660 - DNA, 108 bp, Homo sapiens; identical to SEQ ID NO: 13459
  chr15:53080082-53080190
  hyper

SEQ ID NO: 14661 - DNA, 49 bp, Homo sapiens
  chr15:53095580-53095629
  hyper
cgtaaaagacgagaaaaacatcccgggtgctctgcataaaccacacgca

SEQ ID NO: 14662 - DNA, 94 bp, Homo sapiens
  chr15:58028020-58028114
  hypo
cgtgatgaattgcgtatattacctcccgagagcctaaacgctcacatgttaaaagttagcatctgcggcaggtagtccttaatatttatgatcc

SEQ ID NO: 14663 - DNA, 105 bp, Homo sapiens; identical to SEQ ID NO: 12333
  chr15:59729552-59729657
  hyper

SEQ ID NO: 14664 - DNA, 91 bp, Homo sapiens; identical to SEQ ID NO: 12334
  chr15:59729815-59729906
  hyper

SEQ ID NO: 14665 - DNA, 479 bp, Homo sapiens
  chr15:62359006-62359485
  hyper
cggagagagaaagaactgggtctccaaaccttgctcagcaaatccagccacgtggcagagggacagggaagagcctggcgtcaggttaccaggcagcgcccctctgctcggcccactggcaagcgctcccagcggcaggtataaaagctcaggctggcagtccttgaacactggtgctgaaccccgccgcgcgcgctttgaatttcccagccgctaagcgcctctcctggtcggtgtcccaggcagaaaggtgcagagacccatctgacgcaggactccaggtattttaggagggacccatcggcttgcttaattccctgggggattcgtctgaggctctttgcctctgcaaggggagaaccagccacagtttcccggaaggaataacaattactttaattctagctgaggactagactgctatggtccaaagagtcaggaaacgattgcaaggcaatcgttggcacagagaacagagc

SEQ ID NO: 14666 - DNA, 115 bp, Homo sapiens
  chr15:62359741-62359856
  hyper
cgggactcgctctgacgatccttgtgcctttgtgcactgcaggtagacaagctccagcagagagtggccagatgtggtgcctggagcgactccgcttgggtcctgagtgccttcg

SEQ ID NO: 14667 - DNA, 72 bp, Homo sapiens; identical to SEQ ID NO: 5974
  chr15:63795400-63795472
  hyper

SEQ ID NO: 14668 - DNA, 351 bp, Homo sapiens; identical to SEQ ID NO: 5757
  chr15:63795501-63795852
  binary

SEQ ID NO: 14669 - DNA, 338 bp, Homo sapiens; identical to SEQ ID NO: 5758
  chr15:63795894-63796232
  binary

SEQ ID NO: 14670 - DNA, 390 bp, Homo sapiens
  chr15:64439389-64439779
  hypo
cgctgccgcccgcccagcccgggcccagaaaagaatccagcctctgtgccccgtggcgcccacaagctcgtggcccaggggctgtttgttttcttaacgaggttgaccaaacctcctgagcagcctttgtggcgcagcagaagccttgccggtgaaagggggctttgtgtgactgcaatggaagccagggcctgagctaaggcagggtctgtgggccagcctacccgtgcgcaggaatggggcgagtcggggtacatcttcactccccagcccttcctgccctctgctccttggttctatttccaagtggcaaactgccggctctatgcctgcatagaggagcgagtggagccaggcccccggcggggctgctgcggtaatcaggagacc

SEQ ID NO: 14671 - DNA, 137 bp, Homo sapiens
  chr15:64443636-64443773
  hyper
cgtccttggtaggcgcttaactcaggttgggtgacattttcgctcgccagttcctggcatcagtgagtgctccgtcaatgtttgacaaacggttgactccactgccccgcgctgtgggcgcactagacttcgggggc

SEQ ID NO: 14672 - DNA, 287 bp, Homo sapiens
  chr15:68347714-68348001
  hyper
cgcctcacgaaattagatgaaagggtgcccccttttccccgcttttctcccaccccaatctttacctgatgatggcttctttaccgtagcagatataccactacacaagcagttgggggagggggtggtggaacccttatgactggattgtgacaaatggggctccgcttgaataattttggtttagtagcaggcagttcttaactaacgcgtattatttcgaggctctgaacgcgatcttctctgtggcttcctgtgtgtgtgaacccagcagctggttatgtctc

SEQ ID NO: 14673 - DNA, 234 bp, Homo sapiens
  chr15:69109452-69109686
  hyper
cggctttttaaaattctcagagatgccagcatcggaggacccgacgcgacgaattgcctggctcctaagtcaacatccggagaaaggcggtttacttttttcaaaagcaaaccttcatccctctctttcgctttaggatctcattactattgtagctgccttctcccaggcaaaaataaaagggggaaggagcaggtttagaccgaggaggagggttcccctagcctgcagggc

SEQ ID NO: 14674 - DNA, 139 bp, Homo sapiens
  chr15:75470758-75470897
  hyper
cgtgtggctcggccactgcgccaggtcttggaacatctaaggcagaaacaggaccaacacccgcaagcctccaacagcccctggggctccgtccagccgttggggtggaggggttggggggaggtgcaggggcgggcac

SEQ ID NO: 14675 - DNA, 191 bp, Homo sapiens
  chr15:75976190-75976381
  binary
cggggcaggaccccagcactaggcttctggagcaaacacaggtagatggcaccacctggtggctgtgctgccacacagccgtcctggcctgtggttccagagcactgtgtcccactctttggcggcttccgcaccaccaggccacccgctacgggcacatcctagaccaccaaggccccgcccccaccccc

SEQ ID NO: 14676 - DNA, 68 bp, Homo sapiens; identical to SEQ ID NO: 13471
  chr15:76638250-76638318
  hyper

SEQ ID NO: 14677 - DNA, 86 bp, Homo sapiens; identical to SEQ ID NO: 13472
  chr15:76639126-76639212
  hyper

SEQ ID NO: 14678 - DNA, 395 bp, Homo sapiens
  chr15:81072326-81072721
  hyper
cgccgaggagggagtaccacaagggtcaggtctcggtgtcctgccgactgggagccagctcacgccgagctctagcgggcgtgcgcctagcaacaggtctgcgccctgctgctcctgcctcagcacgctcttcctcccagtttccctcgcctcccagtgcctccgggacagcgctaggcacccagcgacgcgctggcgcggggccgagctgaggcaattgcaatgttagatgaacccggggggctctgctgatgtttagactgagactccaaacgtggcatcgctggaagaaggtctggtggtccctggcaaaggacgtcggctccaagaaaggtcgcgttaggttgtgaggaaaggcagagagtcctggcagaacgctggccaggtctccagct

SEQ ID NO: 14679 - DNA, 372 bp, Homo sapiens
  chr15:81072789-81073161
  hyper
gaggagcgctgtgcgccctgggtcctcagccgcagacactctctgcgacagccgctgttccccaagggtcggacgctacggcagtcccaggagttccgccagctgccgggtttgaggtcctgagtccttctccaagcagccaacgctacccacaggtgagagctccctttaaaaactaatcttctgatgtgtgagccagtgcctggctgcagccccataccagggacggtgagccggggagcgcgtctctccatccctgcggtctggaaagtgatccagggcgcgcccgagggcggggagccggcggctctgcgtgcccaggcgcgacgccaccatggacagctcccagccacttcctccactcggggtctg

SEQ ID NO: 14680 - DNA, 494 bp, Homo sapiens
  chr15:89437837-89438331
  hyper
cgtcgagggagagaagccagggcccctctcaatcgctgccccctactccagggagcacaggcactcccgcgggtcagcgctggacaccaaggtcccaacaggtttacaggctgcctgtggcctgtggctgccaacgagctggtggcaggactgggtccaagtgccgtgctgtttccatactggctgcgcacaagcctacgtttctccctgagggtcgccatctcccacccagggctctgccctccaccctccctacccttctggcctcgctgtccctggggcaagaaccccggtgagcgaggtctggaacccataggcatcagttgcctttgccccaggcgcccagagccggccagctgcggtccagaggcgcaggtccgccagccgcctcgcaggttgccctcagcccctcccaggactcccggggcccccggagcatccaacagatacccaggggcagggcctggggcgccgcggacggcactggaggcagc

SEQ ID NO: 14681 - DNA, 128 bp, Homo sapiens
  chr15:89438421-89438549
  hyper
ccgctcgggctctgctccctcacggtgggcacgagggtccggcgcccgcatccccgcgccgctccctccccacttgtgccccgggcgcccctcgcccgcgatcacagcccatctcagcccgggcctcc

SEQ ID NO: 14682 - DNA, 200 bp, Homo sapiens
  chr15:93199039-93199239
  hyper
caccgccgccgccaccaccaacacgttgcaaggagtcattcgacgggccgcggccccacgtgggcggggcaggccacccggcctgggtcccggctgcgctccgctcgcccgcgaccccaattcctcgggacttgagaccccgtggtgaagcagcaactgccacgatgacacttgggctggccctgtgttacacgtttcac

SEQ ID NO: 14683 - DNA, 351 bp, Homo sapiens; identical to SEQ ID NO: 12343
  chr15:94048797-94049148
  hypo

SEQ ID NO: 14684 - DNA, 150 bp, Homo sapiens
  chr16:2245386-2245536
  hyper
cgcccagaccccacgtgccgacctgcagagccctgtccgtgcccgcacaggtgccctgacacactgacacggctatacgtgcgcagccgcacacgcggctggtccacacgcccatccatccatctccggcggcccccagggaggctacgc

SEQ ID NO: 14685 - DNA, 63 bp, Homo sapiens
  chr16:31228313-31228376
  hyper
cagcaccttcaggatggcctcgcgcttcgttcccatggctcagccctgcgcctctgagcctcc

SEQ ID NO: 14686 - DNA, 179 bp, Homo sapiens; identical to SEQ ID NO: 8027
  chr16:3811586-3811765
  hypo

SEQ ID NO: 14687 - DNA, 49 bp, Homo sapiens; identical to SEQ ID NO: 5984
  chr16:4363872-4363921
  hyper

SEQ ID NO: 14688 - DNA, 158 bp, Homo sapiens; identical to SEQ ID NO: 5985
  chr16:4364080-4364238
  hyper

SEQ ID NO: 14689 - DNA, 890 bp, Homo sapiens
  chr16:4986642-4987532
  hyper
cgaccctctgcgcaagagcgaccctgggacacgggggtgccctgtacccccagctcagctgcccgtgccctaggccctcaaggcaatgctccctgggctcccggagtcccctgtgttatgctccccctcggggaccccagccagtcccttcccacctggcggcgcttcccagcttcagggtggcctcggtcccgcgttcccgagagtcccgcactccgggttcagttcccggttcctggacccccgtaccccccattcctacactgcccgggaggtcttccaggtcctgtgcgcccacaggggcaagagcgtcccggagcggagctgtgggcgcctcctcacctccgggtctgcacagtggggctgtatttgcctttgtttctcttcctgaagagcgagttcatggtggcgctcggggtgcgggcggcggcggctggcgggccgggcgcgcaccgaggggcgggcgggagcgcaggtgagcgagcggcggcgcggggagcccggactgcggcgcggcagtggctccgggtccctactcgctgggggcggggcgcccgccggccactggctctgcgggccgctccccgagaaggtggtgcttaccttcccgaggaggggccaccgcgcgggcggggcttggacgcgggggtggggacactgggtcttggccggacgccgcccacccccagccgggggactccggaggccgggcaggcactggggcgcaaaggccgccggggcgagcgctcgcagccccaccctcctcgggcccggcgcgcctctggccgaggccttcacctggttctgcgctaccgcggaactcggcgctcctggtgctttggcggacacccagctgggccccgcaagacaggtgcggcagagacccgcac

SEQ ID NO: 14690 - DNA, 93 bp, Homo sapiens
  chr16:55404823-55404916
  hyper
cgcagcctcacctacgggaagatctacatcccctcctccagggctctaccgagggagaaccaaggtagaaaagcatgcctttccggctgctgc

SEQ ID NO: 14691 - DNA, 86 bp, Homo sapiens; identical to SEQ ID NO: 10335
  chr16:56228284-56228370
  binary

SEQ ID NO: 14692 - DNA, 57 bp, Homo sapiens; identical to SEQ ID NO: 10336
  chr16:56228591-56228648
  binary

SEQ ID NO: 14693 - DNA, 573 bp, Homo sapiens
  chr16:56390323-56390896
  hyper
cgtcccacctcgcggcgcagcccctggagctcctgctggggggcagggcccatctgccgcctggggctccggtgcggtgcactggtccgaggagtgtgctcaggccgggctttccagaaggccacaggccactgcaaaccctgctgcctgccggccgcccagacaccacagacgccacctggcggccctaagccactcccgccacacgctcactccaggttcgtatagaaaaagcacagctctcactggccagtagctgccaaaaagaacacccatcgtataaggaaatccagccccatagaaaacaatctgcccaccgaccccctttctaaggatagcctttgtaggggttttttggttccttttttttttttttcagtttttgtttttacttttgtcccgccgagtactatgtattaccagccccccaccccacagatcagttttcctagtctttgggaaacgggttgtgttttttttcctttgccgtgttggatttccggtcccggctgacacctcccttcgtgtgtgcgcccctccccacccctgcctttgtttcggtgccctgtgtcc

SEQ ID NO: 14694 - DNA, 101 bp, Homo sapiens
  chr16:56857042-56857143
  hypo
cgctcctttcctgggaggcgtcttttgaagggagtgagtgggaaggaaaatgggaggctgtgacgctcaccaagtaacgtaagagcggtggcccctggagc

SEQ ID NO: 14695 - DNA, 66 bp, Homo sapiens
  chr16:68269820-68269886
  binary
cgtcccagcgcacccgccgtagccccgaagaggacgaccagtgatccgggccaggggcaggggtcc

SEQ ID NO: 14696 - DNA, 113 bp, Homo sapiens
  chr16:68269896-68270009
  binary
cggccgcggggtcagggcccgggggagggggcggcggcggcggcggagtcatggccgcagaggaagggggctctcggccagacacgcggaccgacgaggcgcacgcacgcacc

SEQ ID NO: 14697 - DNA, 106 bp, Homo sapiens
  chr16:68270022-68270128
  binary
cgcggatcagcttgggcgggacaccgtgtatcgggggcggcacctgcggcccggctggctcagtgggcgctgccaagacccgcccgtggcgccccgcggggcgggg

SEQ ID NO: 14698 - DNA, 125 bp, Homo sapiens
  chr16:68270157-68270282
  binary
agttacctgccggccccgccggccacgtgaccggggcggctccgggaaccttgggggagggccgccagaactcaacccaggacgcaagagctcacgctcccggcctgggcgcacgcttaggatcc

SEQ ID NO: 14699 - DNA, 411 bp, Homo sapiens
  chr16:69833676-69834087
  hypo
cggcactcagtaaacatttactggatgttggaacgtgatggacgcgccatctgaattagccaacgtgcctctacgtcacggacatataaatcctcatctatttattgctgtttgtggtcagtggcatggcccatggcggtggtattggaccctccttcataaggcctctattcagagcagtaccatatgtggcgaatgaatggcatggaaagaaaggctcctttttctcttgatatctggaaagtattttctgaaagtggatgtagcttaagagagaggtgggggcggggagagttgcgtcccagcgagcgtgttacatgatttaagagtctttcttttctctccaagcctgtccttttaagcgatgggccacttgaaaggtctttgagcctcctctggtcttttcttttc

SEQ ID NO: 14700 - DNA, 50 bp, Homo sapiens; identical to SEQ ID NO: 13540
  chr16:73100590-73100640
  hyper

SEQ ID NO: 14701 - DNA, 419 bp, Homo sapiens
  chr16:74782393-74782812
  hypo
cgggcggggggagcacacagcagcccactccgagggctgttcccgggaaggttcctcacagtagcctcctttctcccctcgtggaggactctctgggaggtccccaagcccccagcttcctccagggtcccagaccctgtcctccctagagagggtttgcttggacggcgcacgggggagagaacagagaagaacaacagaaagtctgcgctctgcaccacaaacaaacaagtccaccatagaggccgcgtgaaaggaggcagtgtgcggcgggcgggggctgggggcgggggcgccggcataaaggcatgttgttcgggaaagctggggctgggcaccgcgggacggacagatggccttttatcccatagcctggattttgcctgaaaaccctttttctgaaagggaatggttgcctc

SEQ ID NO: 14702 - DNA, 120 bp, Homo sapiens
  chr16:75469119-75469239
  hypo
ttttgttaattttggataatgctacaatccattgctgcaaagaactcgaaaatgcacacgccaacataggagttctttttatgcccccaaacactaagtctctcatccaacccctcaatc

SEQ ID NO: 14703 - DNA, 368 bp, Homo sapiens
  chr16:80646305-80646673
  hypo
cgccatgcagagtgcatggtccatacactgacatcatcgccatcttctcaggccgggctactccatctggcactgaaggtgtgaaggacatgaggcagccaagccaatctgcaggctgacaacaccctcaggtttctagccccatgaagagcccctaaacccaaggcagaggaaggatcctgctgggacccgaatccaggtatcacaggaggcttaccagcgcgacgcccaggatctgggggaaggtgtaggaggagcagccagcaggcgtgaggcggatggtggcgtagggcgtctggaaccaggccttctcactggcccacacgatgtcacagaggggcaggatggaggcacccaggcccagggcc

SEQ ID NO: 14704 - DNA, 453 bp, Homo sapiens
  chr16:88091522-88091975
  hypo
cgacaagccaggcgccgaggctcggtgtgggcccgtgggcctgattgaagtcacactcctgcccccttaaactatgaaacggcggagttacacgggaagaaagggttcaagcgtaatataatttcctacctttttttcactctgagagtgaaccgctgagtggctgttaaattcattgtgtatttacgaggaatctttcatctagagactgtagatgcaggactgtgcccgtgcctggttaaaacgttgaagctggtgctaaagtgtgttgaggtgcctgaaagagaagcttttgttttttgactcactggcctttgggaaactgaaggacagtgcgaacaaagatccctttcttcctcaaatgggagcttgggatttgttgggtttcacgcaggtgggcccgaggaggacggcaggcagggccgggacgtgctgatgtcaggcgccttcgtc

SEQ ID NO: 14705 - DNA, 188 bp, Homo sapiens; identical to SEQ ID NO: 8073
  chr16:88994153-88994341
  hypo

SEQ ID NO: 14706 - DNA, 104 bp, Homo sapiens
  chr16:89972021-89972125
  hypo
cgcctgggagtggtgcccatttgcatctccacagtgaagtctgtgtgccgcggacatgaggtgtgcccgggggtgcccaagaggcgctggtgcccccagccgct

SEQ ID NO: 14707 - DNA, 441 bp, Homo sapiens; identical to SEQ ID NO: 13572
  chr16:89972235-89972676
  hypo

SEQ ID NO: 14708 - DNA, 482 bp, Homo sapiens; identical to SEQ ID NO: 13573
  chr16:89972802-89973284
  hypo

SEQ ID NO: 14709 - DNA, 94 bp, Homo sapiens; identical to SEQ ID NO: 13574
  chr16:89992765-89992859
  hyper

SEQ ID NO: 14710 - DNA, 362 bp, Homo sapiens; identical to SEQ ID NO: 5994
  chr17:16290077-16290439
  hyper

SEQ ID NO: 14711 - DNA, 95 bp, Homo sapiens
  chr17:17399572-17399667
  binary
cggggtgagcggctggagggctctgctcgggctgggcgcggctcgggcttggggctccggctccgctcgggctgggctcgggctaggctgggctc

SEQ ID NO: 14712 - DNA, 1383 bp, Homo sapiens
  chr17:17685627-17687010
  hyper
cggctgggaagctcgcgcgcgctctctcgcctcgttcggtgccagaggactccaggggaggtggcgttggggagggcagagcgggattccccctcctccgccgggcggggtgcccgcctgcgcgccgcggttgcacgtgtgcggggccgcgcgcccgggccccctctgcacccggtcggtgggtgccccctccccaggaccgggcgcatctggcagtggccccccgcccgcagccttgcgcggctggagggaagcgctccattattcattatttacgagcgttaataggtttgagccacgggggcggggggttgggggggcgacgaggacccagtggggaccgaagcattagaagaagggatagggagggagggggaagggcgggggcggggctgtgccgcggcctggaggaagaggtctcggcctggggcccggcgagccgggcgcacctctccgtcaggtttctccacaccgccggccgtcgaggctgctcagggcgccaagagggcagcacgggccttagattttgctctcggcctctgtccttcgcgtcctcgcccttaccgaggcgtggggagggagctgcggaggccgtacgccccgccctgcgcgccccttgccgccgccgcgtccccgcggcagccccggcctcatttatcatcatctttggtcaagtggagtgtgcaaggaacagctgcttcactcggctgacttcgagggcggctacgggagaatcagggagatgaatgatgggggctggtggcagccccccgcggtccccgcgcaggcgagagggaggcggggacgtccagggccgcctccgcctcatggcgagtgcagcgcccccttcctctctcctggcgcctgcagcgaccggggaccgggggaccggggcaccgaggaccgggcccgccccgggaggggactgggcgcggggacgggggggcgcccttcgccggcggagaactggcgggcgcgctgccggcagagcccgaggttgccgtgaccttgctggggtcagcgggctgggctgcggaggcggcggcgcggcgtctttggtgcgctttccggattggcgcagaggccgggaaacaaggcgggggcgggcgggggaacacaaatagaaggtgaaattttacctgcccctgagggagtcctgcggattttctccggcagcagcaggcgctctgcctttgtcttacacggctgaaacatctgttgcagaggggcggagaggccgcaacaacccccacacaccctgcgctgctccccgtccccctctgccccagccgggctgcaggactccaggcgccgcgttaaccctgctcgcgctggggcgcgcgcccgcactcgctgccgcagtccagcgcctcgcgtggggct

SEQ ID NO: 14713 - DNA, 367 bp, Homo sapiens; identical to SEQ ID NO: 7001
  chr17:17687055-17687422
  hyper

SEQ ID NO: 14714 - DNA, 402 bp, Homo sapiens
  chr17:1783887-1784289
  hypo
cgagtctctgatttcggtggacggagcctctccgtgctgtcttcaagcactatcattgcgaatcctgacatcccagaggcctataagcttcgtggatggtaggttttgtggggctaaacaaagggttacttgaggctgggctttgagaaaagctggttacaatcagcatgggagctttctgccaagcagaagccttcgtccctgagtggtgcagcttccgtgtttcttgaaggcattatgccttctgtgaggagggctttaaagcccttaaacggacaaacctgtaatcccaggacaaacctagagagtcggaggaggcaattagcatgtaagtgctgcctgctgacctcgatcctgccaaaggaggggacggccaggcttcagcagcggtgtgctgaaggc

SEQ ID NO: 14715 - DNA, 109 bp, Homo sapiens
  chr17:1784817-1784926
  hypo
cggtccacacgtatctgccgaactgcagggcccgttcatagtctgaccagaactagccacagatttgcttttttcttattgcttgattttcttttaggctctggagttc

SEQ ID NO: 14716 - DNA, 106 bp, Homo sapiens
  chr17:20756146-20756252
  hyper
cttacttggggagaaaacagagctggtggcgctgctgagtgtcaaaccctggagcccatcgtcaagacgttatattggtggcagttctgctgtgagtgcacttgcc

SEQ ID NO: 14717 - DNA, 57 bp, Homo sapiens; identical to SEQ ID NO: 8085
  chr17:27893139-27893196
  binary

SEQ ID NO: 14718 - DNA, 387 bp, Homo sapiens; identical to SEQ ID NO: 8086
  chr17:27893344-27893731
  binary

SEQ ID NO: 14719 - DNA, 122 bp, Homo sapiens; identical to SEQ ID NO: 8090
  chr17:35078956-35079078
  hyper

SEQ ID NO: 14720 - DNA, 160 bp, Homo sapiens
  chr17:36829818-36829978
  hyper
cgtggtggggagcgtcggtgcagggcggcggggctgcgcggtgcgcggagggggcgccggcagccggcgtttcttggcggctccccgagccggccctttcgcaggcggccgctctggcccccggcgcaaactcggagtgtccaaggcgaagcccttcgcg

SEQ ID NO: 14721 - DNA, 303 bp, Homo sapiens
  chr17:36830051-36830354
  hyper
ccgggctggccgtcgaggggctggccgctggagcctcgggggcggccggcggggggtttccatcgacttcggcaggctggccgggcaggaacggccgcggcgccgtcccgggacccgcgggctcggtggagaggcccgcaggtggcgacggaggccgggaactgggttcctgaggcgggctggcggctgggccacgctgaggctcgagacccggggccgggcgaggcggggccgaggcgaagctggtcgtagattcccgagggtgcgggggcgcagggcagcggcccggaggtgcacaggagc

SEQ ID NO: 14722 - DNA, 297 bp, Homo sapiens
  chr17:38020387-38020684
  hyper
cgggccgggctggagctgccgctgtggctactcggcctctccacgtgctcctgccgtcgcctggactcagcgcgcagctggcgggagattcccggcgcggggagtccccgggatccggcagccgcgtcggcgcagactgaaaagggcaggagccggcgacctgccggtgcgcggggttacagcggcgctggctggcggcggctttaaaggacgctggccgcggagtgccgcgggttccgcgcctccagccccctttcgaatgtcaaacccaaggaaccccgacaggatggaaatgtc

SEQ ID NO: 14723 - DNA, 85 bp, Homo sapiens; identical to SEQ ID NO: 9238
  chr17:40558083-40558168
  hyper

SEQ ID NO: 14724 - DNA, 47 bp, Homo sapiens; identical to SEQ ID NO: 9239
  chr17:40558226-40558273
  hyper

SEQ ID NO: 14725 - DNA, 198 bp, Homo sapiens; identical to SEQ ID NO: 8105
  chr17:42988798-42988996
  hyper

SEQ ID NO: 14726 - DNA, 89 bp, Homo sapiens; identical to SEQ ID NO: 8106
  chr17:42989016-42989105
  hyper

SEQ ID NO: 14727 - DNA, 39 bp, Homo sapiens
  chr17:43298587-43298626
  binary
cgtccgcgccccccaccctgtttaggagttcctgtttgg

SEQ ID NO: 14728 - DNA, 230 bp, Homo sapiens
  chr17:43298666-43298896
  binary
caggggaggagagaaataaaaggtggggggcctggaagggggttcccaccttctcagtccgggacgcgagacgggaacgcagccctggcgccccaacgctgcaccaccgtgggtctccgagccgtgctcgcagtcgctgagatcctcggtgcggagaagatgtgcccctccaatccccaggccgtgatccccttcacccagacccggccaatccctcgcccgaggcgagc

SEQ ID NO: 14729 - DNA, 39 bp, Homo sapiens
  chr17:45500788-45500827
  hyper
cgtcggctgcgcccgcggcccggggcggagttggccacc

(The sequence listing continues in the following parts.)

1. A composition comprising a plurality of different bait oligonucleotides, wherein:
(a) each bait oligonucleotide in the plurality of different bait oligonucleotides is at least 45 nucleotides in length;
(b) the plurality of different bait oligonucleotides comprises a different set of bait oligonucleotides for each of at least 10 cancer types;
(c) each set of bait oligonucleotides collectively hybridize to DNA molecules derived from at least 100 target genomic regions that are differentially methylated in the respective cancer type relative to a different cancer type or relative to non-cancer, and
(d) the total size of the target genomic regions comprises 50 kb to 5 MB.

2. The composition of claim 1, wherein:
(a) each set of bait oligonucleotides collectively hybridizes to at least 300 target genomic regions that are differentially methylated in the respective cancer type relative to a different cancer type or relative to non-cancer; or
(b) for each set of bait oligonucleotides, the at least 100 target genomic regions comprise, for all possible pairs between the respective cancer type and at least 10 other cancer types, at least one target genomic region that is differentially methylated between the pair of cancer types.

3. (canceled)

4. (canceled)

5. The composition of claim 1, wherein the target genomic regions comprise:
(a) at least 20% of the target genomic regions of any one of Lists 1-49, or complements thereof;
(b) at least 20% of the target genomic regions of any one of Lists 1-15, or complements thereof;
(c) at least 20% of the target genomic regions of Lists 1-15, or complements thereof;
(d) at least 20% of the target genomic regions of any one of Lists 16-32, or complements thereof;
(e) at least 20% of the target genomic regions of Lists 16-32, or complements thereof;
(f) at least 20% of the target genomic regions of any one of Lists 33-49, or complements thereof; or
(g) at least 20% of the target genomic regions of Lists 33-49, or complements thereof.

6.-122. (canceled)

123. The composition of claim 1, wherein:
(a) the total size of the target genomic regions is less than 1100 kb;
(b) the total number of target genomic regions is less than 10,000;
(c) the DNA molecules are converted cfDNA fragments; or
(d) the bait oligonucleotides each have a length of 45 to 300 nucleotide bases.

124.-135. (canceled)

136. The composition of claim 1, wherein:
(a) each set of bait oligonucleotides comprises pairs of bait oligonucleotides;
(b) each pair of bait oligonucleotides comprises a first bait oligonucleotide and a second bait oligonucleotide;
(c) each bait oligonucleotide comprises a 5′ end and a 3′ end;
(d) for each pair of bait oligonucleotides, a sequence of at least X nucleotide bases at the 3′ end of the first bait oligonucleotide is identical to a sequence of X nucleotide bases at the 5′ end the second bait oligonucleotide; and
(e) X is at least 25, 30, 35, 40, 45, 50, 60, 70, 75 or 100.

137. The composition of claim 136, wherein the first bait oligonucleotide comprises a sequence of at least 31, 40, 50 or 60 nucleotide bases that does not overlap a sequence of the second bait oligonucleotide.

138. (canceled)

139. (canceled)

140. A method of enriching converted cell-free DNA (cfDNA) fragments informative of a type of cancer, the method comprising:
contacting the bait oligonucleotide composition of claim 1 with converted cfDNA derived from a subject, and
enriching the sample for cfDNA corresponding to the target genomic regions by hybridization capture.

141.-163. (canceled)

164. The composition of claim 1, wherein:
(a) the target genomic regions are human sequences, and each of the bit oligonucleotides is designed to have sequence homology or sequence complementarity with less than 20 off-target human genomic regions;
(b) each bait oligonucleotide is at least 61 nucleotides in length;
(c) each bait oligonucleotide is less than 300 nucleotides in length;
(d) each target genomic region comprises at least five methylation cites;
(e) at least 3% of the bait oligonucleotides comprise no guanines (G); or
(f) each bait oligonucleotide comprises multiple binding sites to methylation sites of converted cfDNA molecules, wherein at least 83% of the multiple binding sites comprise exclusively either CpG or CpA.

165.-184. (canceled)

185. A method for detecting cells of a cancer type, the method comprising the steps of:
(a) processing cell-free DNA (cfDNA) from a biological sample with a deaminating agent to generate a cfDNA sample comprising deaminated nucleotides;
(b) enriching the cfDNA sample or amplification products thereof to produced enriched DNA molecules, wherein
(i) the enriching comprises contacting the cfDNA sample or amplification products thereof with a composition comprising a plurality of different bait oligonucleotides;
(ii) each bait oligonucleotide in the plurality of different bait oligonucleotides is at least 45 nucleotides in length; and
(iii) the plurality of different bait oligonucleotides collectively hybridize to at least 100 target genomic regions from each of a plurality of Lists 33-49, or complements thereof;
(c) sequencing the enriched DNA molecules to produce a set of sequencing reads; and
(d) detecting sequencing reads for cfDNA molecules from the cells of the cancer type, thereby detecting the cells of the cancer type.

186. The method of claim 185, wherein,
(a) the plurality of target genomic regions comprises target genomic regions selected from List 1 or complements thereof, and the cancer type is bladder cancer;
(b) the plurality of target genomic regions comprises target genomic regions selected from List 2 or complements thereof, and the cancer type is breast cancer;
(c) the plurality of target genomic regions comprises target genomic regions selected from List 3 or complements thereof, and the cancer type is cervical cancer;
(d) the plurality of target genomic regions comprises target genomic regions selected from List 4 or complements thereof, and the cancer type is colorectal cancer;
(e) the plurality of target genomic regions comprises target genomic regions selected from List 5 or complements thereof, and the cancer type is head and neck cancer;
(f) the plurality of target genomic regions comprises target genomic regions selected from List 6 or complements thereof, and the cancer type is hepatobiliary cancer;
(g) the plurality of target genomic regions comprises target genomic regions selected from List 7 or complements thereof, and the cancer type is lung cancer;
(h) the plurality of target genomic regions comprises target genomic regions selected from List 8 or complements thereof, and the cancer type is melanoma;
(i) the plurality of target genomic regions comprises target genomic regions selected from List 9 or complements thereof, and the cancer type is ovarian cancer;
(j) the plurality of target genomic regions comprises target genomic regions selected from List 10 or complements thereof, and the cancer type is pancreatic cancer;
(k) the plurality of target genomic regions comprises target genomic regions selected from List 11 or complements thereof, and the cancer type is prostate cancer;
(l) the plurality of target genomic regions comprises target genomic regions selected from List 12 or complements thereof, and the cancer type is renal cancer;
(m) the plurality of target genomic regions comprises target genomic regions selected from List 13 or complements thereof, and the cancer type is thyroid cancer;
(n) the plurality of target genomic regions comprises target genomic regions selected from List 14 or complements thereof, and the cancer type is upper gastrointestinal cancer; or
(o) the plurality of target genomic regions comprises target genomic regions selected from List 15 or complements thereof, and the cancer type is uterine cancer.

187. The method of claim 185, wherein,
(a) the plurality of target genomic regions comprises target genomic regions selected from List 16 or List 33 or complements thereof, and the detection of cancer comprises a detection of anorectal cancer;
(b) the plurality of target genomic regions comprises target genomic regions selected from List 17 or List 34 or complements thereof, and the detection of cancer comprises a detection of bladder or urothelial cancer;
(c) the plurality of target genomic regions comprises target genomic regions selected from List 18 or List 35 or complements thereof, and the cancer type is breast cancer;
(d) the plurality of target genomic regions comprises target genomic regions selected from List 19 or List 36 or complements thereof, and the cancer type is cervical cancer;
(e) the plurality of target genomic regions comprises target genomic regions selected from List 20 or List 37 or complements thereof, and the cancer type is colorectal cancer;
(f) the plurality of target genomic regions comprises target genomic regions selected from List 21 or List 38 or complements thereof, and the cancer type is head and neck cancer;
(g) the plurality of target genomic regions comprises target genomic regions selected from List 22 or List 39 or complements thereof, and the cancer type is liver or bile duct cancer;
(h) the plurality of target genomic regions comprises target genomic regions selected from List 23 or List 40 or complements thereof, and the cancer type is lung cancer;
(i) the plurality of target genomic regions comprises target genomic regions selected from List 24 or List 41 or complements thereof, and the cancer type is melanoma;
(j) the plurality of target genomic regions comprises target genomic regions selected from List 25 or List 42 or complements thereof, and the cancer type is ovarian cancer;
(k) the plurality of target genomic regions comprises target genomic regions selected from List 26 or List 43 or complements thereof, and the cancer type is pancreatic or gallbladder cancer;
(l) the plurality of target genomic regions comprises target genomic regions selected from List 27 or List 44 or complements thereof, and the cancer type is prostate cancer;
(m) the plurality of target genomic regions comprises target genomic regions selected from List 28 or List 45 or complements thereof, and the cancer type is renal cancer;
(n) the plurality of target genomic regions comprises target genomic regions selected from List 29 or List 46 or complements thereof, and the cancer type is sarcoma;
(o) the plurality of target genomic regions comprises target genomic regions selected from List 30 or List 47 or complements thereof, and the cancer type is thyroid cancer;
(p) the plurality of target genomic regions comprises target genomic regions selected from List 31 or List 48 or complements thereof, and the cancer type is upper gastrointestinal tract cancer; or
(q) the plurality of target genomic regions comprises target genomic regions selected from List 32 or List 49 or complements thereof, and the cancer type is uterine cancer.

188. The method of claim 185, wherein:
(a) the plurality of target genomic regions comprises at least 20% of the target genomic regions of each of the respective Lists or complements thereof;
(b) the plurality of target genomic regions comprises less than 90% of the genomic regions of each of the respective Lists or complements thereof;
(c) the plurality of target regions comprises at least 100 target genomic regions from each of Lists 33-49 or complements thereof;
(d) the plurality of target regions comprises at least 100 target genomic regions from each of a plurality of Lists 16-32 or complements thereof; or
(e) the plurality of target regions comprises all of the target regions from each of a plurality of Lists 1-15 or complements thereof.

189.-199. (canceled)

200. A method of detecting cells of a cancer type in a subject, the method comprising:
(i) capturing cell-free DNA (cfDNA) fragments from the subject or amplification products thereof with a composition comprising a plurality of different bait oligonucleotides, wherein
(a) each bait oligonucleotide in the plurality of different bait oligonucleotides is at least 45 nucleotides in length;
(b) the plurality of different bait oligonucleotides comprises a different set of bait oligonucleotides for each of at least 10 cancer types;
(c) each set of bait oligonucleotides collectively hybridizes to at least 100 target genomic regions that are differentially methylated in the respective cancer type relative to a different cancer type or relative to non-cancer; and
(d) the capturing comprises separating bait-bound DNA from unbound DNA;
(ii) sequencing the captured cfDNA fragments or amplification products thereof to produce sequencing reads; and
(iii) separately for each of the at least 10 cancer types, applying a trained classifier to the sequencing reads, wherein the classifier (a) is constrained to the at least 100 target genomic regions of the set of bait oligonucleotides for the respective cancer type, and (b) assigns a score for each of the at least 10 cancer types; and (c) detects the cells of the cancer type as the cancer type assigned the highest score.

201. The method of claim 200, wherein the likelihood of a false positive detection of the cells of the cancer type is less than 1% and the likelihood of an accurate the cells of the cancer type is at least 40%.

202. (canceled)

203. The method of claim 200, wherein the cfDNA fragments are converted cfDNA fragments.

204.-208. (canceled)

209. The method of claim 200, wherein the at least 10 cancer are selected from thyroid cancer, melanoma, sarcoma, renal cancer, prostate cancer, breast cancer, uterine cancer, ovarian cancer, bladder cancer, urothelial cancer, cervical cancer, anorectal cancer, head & neck cancer, colorectal cancer, liver cancer, bile duct cancer, pancreatic cancer, gallbladder cancer, upper gastrointestinal cancer, and lung cancer.

210. The method of claim 209, wherein:
(a) the cancer type is a stage I cancer type, and the likelihood of an accurate assignment of cancer type is at least 70%
(b) the cancer type is a stage II cancer type, and the likelihood of an accurate assignment of cancer type is at least 85%;
(c) the cancer type is a stage I or stage II cancer, and accuracy of assigning the cancer type is at least 75%; or
(d) accuracy of assigning cancer type is at least 80%.

211.-245. (canceled)

246. The method of claim 200, wherein:
(a) the cancer type is anorectal cancer, and the sensitivity for anorectal cancer is at least 65% or 75%
(b) the cancer type is bladder & urothelial cancer, and the sensitivity for bladder & urothelial cancer is at least 40%;
(c) the cancer type is breast cancer, and the sensitivity for breast cancer is at least 20%;
(d) the cancer type is cervical cancer, and the sensitivity for cervical cancer is at least 25%;
(e) the cancer type is colorectal cancer, and the sensitivity for colorectal cancer is at least 55%;
(f) the cancer type is head & neck cancer, and the sensitivity for head & neck cancer is at least 70%;
(g) the cancer type is hepatobiliary cancer, and the sensitivity for hepatobiliary cancer is at least 75%;
(h) the cancer type is lung cancer, and the sensitivity for lung cancer is at least 55%;
(i) the cancer type is melanoma, and the sensitivity for melanoma is at least 30%;
(j) the cancer type is ovarian cancer, and the sensitivity for ovarian cancer is at least 70%;
(k) the cancer type is pancreas & gallbladder cancer, and the sensitivity for pancreas & gallbladder cancer is at least 60%;
(l) the cancer type is sarcoma, and the sensitivity for sarcoma is at least 40%; or
(m) the cancer type is upper gastrointestinal tract cancer, and the sensitivity for upper gastrointestinal tract cancer is at least 60%.

247.-268. (canceled)

269. The method of claim 200, wherein each set of bait oligonucleotides collectively hybridizes to at least 300 target genomic regions that are differentially methylated in the respective cancer type relative to a different cancer type or relative to non-cancer.

270. (canceled)

271. The method of claim 200, wherein the total size of the target genomic regions comprises 50 kb to 4 MB.

272. The method of claim 200, wherein:
(a) the subject has an elevated risk of one or more cancer types;
(b) the subject manifests symptoms associated with one or more cancer types; or
(c) the subject has not been diagnosed with a cancer.

273. (canceled)

274. (canceled)

275. The method of claim 200, wherein the classifier was trained on converted DNA sequences derived from a least 100 subjects with a first cancer type, at least 100 subjects with a second cancer type, and at least 100 subjects with no cancer; and wherein the first cancer type, second cancer type, and third cancer type are selected from the at least 10 cancer types.

276.-278. (canceled)

279. The method of claim 200, wherein the classifier was trained on converted DNA sequences derived from the target genomic regions, and the plurality of different bait oligonucleotides collectively hybridize to at least 100 target genomic regions from each of a plurality of Lists 33-49 or complements thereof.

280. The method of claim 279, wherein the trained classifier detects the cells of the cancer type by:
(i) generating a set of features for the sample, wherein each feature in the set of features comprises a numerical value;
(ii) inputting the set of features into the classifier, wherein the classifier comprises a multinomial classifier;
(iii) based on the set of features, determining, at the classifier, a set of probability scores, wherein the set of probability scores comprises one probability score per cancer type class and per non-cancer; and
(iv) thresholding the set of probability scores based on one or more values determined during training of the classifier.

281. The method of claim 280, wherein;
(a) the set of features comprises a set of binarized features;
(b) the numerical value comprises a single binary value;
(c) the multinomial classifier comprises a multinomial logistic regression ensemble trained to predict a source tissue for the cancer; or
(d) the method further comprises determining the final cancer classification based on a top-two probability score differential relative to a minimum value, wherein the minimum value corresponds to a predefined percentage of training cancer samples that had been assigned the correct cancer type as their highest score during training of the classifier.

282.-285. (canceled)

286. The method of method of claim 200, further comprising administering an anti-cancer therapeutic agent to the subject: optionally wherein the anti-cancer agent is a chemotherapeutic agent selected from the group consisting of alkylating agents, anti metabolites, anthracyclines, anti-tumor antibiotics, cytoskeletal disruptors (taxans), topoisomerase inhibitors, mitotic inhibitors, corticosteroids, kinase inhibitors, nucleotide analogs, and platinum-based agents.

287. (canceled)
